United States Patent Application Publication US 2022/0096574 A1 - sequence listing, part 14

SEQ ID NO: 64489 - protein, 355 aa, Burkholderia multivorans
  misc_feature (1)..(355): tr|A0A0H3KCC2|A0A0H3KCC2_BURM1 S-adenosylmethionine:tRN A ribosyltransferase-isomerase OS=Burkholderia multivor ans (strain ATCC 17616 / 249) OX=395019 GN=queA PE=3 SV =1
MFTLSDFDFNLPPELIAQTALPDRTASRLLEVDATAEPARFVDRRFAELPACIARGDLLVFNDTKVLKARFFGQKASGGRIEVLIERVTGSHTALAQIRASKSPGAGTTLRLADAFDVTVGERVEPFFTLHFPQPCLELIEQYGRLPLPPYIEHDPDATDETRYQTVYASNPGAVAAPTAGLHFDEPLLAKLDAMGIERATLTLHVGAGTFQPVRVENIAEHKMHSEWYELPQSLVDKIAATRARGGKVIAVGTTSMRALEAAARDAEAAGRPLAATQAETDIFITPGYRFRVVDRLVTNFHLPKSTLMMLVSAFAGIETIRAAYRHAIEQRYRFFSYGDAMLLTRRDTPEATHA

SEQ ID NO: 64490 - protein, 348 aa, Burkholderia novacaledonica
  misc_feature (1)..(348): tr|A0A2U3I4Q3|A0A2U3I4Q3_9BURK S-adenosylmethionine:tRN A ribosyltransferase-isomerase OS=Burkholderia novacale donica OX=1544861 GN=queA PE=3 SV=1
MFTLSDFDFNLPPELIAQSALAERSASRLLEVDNRVTPATLVDRRFSELPGLIAPGDLLVFNDTKVLKARFFGQKASGGRVEVLVERLTGATTALAQIRASKSPAEGSTIRLADAFDVTVGERVEPFYTLHFPAECLTLIEQFGRLPLPPYIEHDADAYDETRYQTVYAANPGAVAAPTAGLHFDDALFAELDARGVERATLTLHVGAGTFQPVRVENIAEHKMHSEWYDLPQSLVDRIAAVKARGNKVIAVGTTSMRALEAAARDAADAGRPLAATQAETDIFITPGYGFRVVDRLVTNFHLPKSTLLMLVSAFAGMDTIRDAYRHAIEQRYRFFSYGDAMLLTHQR

SEQ ID NO: 64491 - protein, 354 aa, Burkholderia oklahomensis
  misc_feature (1)..(354): tr|A0A381IGJ6|A0A381IGJ6_9BURK S-adenosylmethionine:tRN A ribosyltransferase-isomerase OS=Burkholderia oklahome nsis OX=342113 GN=queA_2 PE=3 SV=1
MKTDDFDFGLDWKAMPTDPAELRGKRRDSGRMIVLDRAAATIEHTIFATISDRLRPGDLLVFNDSYMLSNTLPFRHGNESAHVIVYGQEPDGTSIVELRSSQSPRPGLTLTATDDSQLSCTLLSPEPNQLWRARFEPAGKLVGVLDRRGWRSDETIPLNPVYWRTRPDAYRSVYARKPGSLEIPSAGLHFSTDVLRRLADKGVEFAYITLHVGATEILAVRHIDEDEVEQHKVRPEYFEVGAKAAGQINRARAERRRIIAIGTTAMRTLESLAAHGEPGAALRAQAGWTQLYIYPGFEFKIANGLLTNLHRPRSSHIVLTAAFAGKDLVMRGYAEILEMGGYEFDMFGDSMLIL

SEQ ID NO: 64492 - protein, 351 aa, Burkholderia oklahomensis
  misc_feature (1)..(351): tr|A0A381BRR8|A0A381BRR8_9BURK S-adenosylmethionine:tRN A ribosyltransferase-isomerase OS=Burkholderia oklahome nsis OX=342113 GN=queA_1 PE=3 SV=1
MFTLSDFDFDLPPELIAQTALPERSASRLLEVDNTSEPPRLVDRRFAELPACVAPGDLLVFNDTKVLKARFFGHKASGGRIEVLIERVTGARTALAQIRASKRPAPGTTLTLADAFDATVGERVEPFFTLHFPEDCLGLIERYGRLPLPPYIEHTPDATDETRYQTVFAANPGAVAAPTAGLHFDDAVLAALDARGVERATLTLHVGAGTFQPVRVENLAEHKMHREWYELTGALVEKIAATRARGGRVIAVGTTSMRALEAAARDAEAAGRPLSATRAETDIFITPGYRFRVVDRLVTNFHLPKSTLLMLVSAFAGVDTIRAAYRHAIAARYRFFSYGDAMLLTRRDDAR

SEQ ID NO: 64493 - protein, 350 aa, Burkholderia plantarii
  misc_feature (1)..(350): tr|A0A0B6RP33|A0A0B6RP33_9BURK S-adenosylmethionine:tRN A ribosyltransferase-isomerase OS=Burkholderia plantari i OX=41899 GN=queA PE=3 SV=1
MFKLSDFDFDLPPELIAQTALPERSASRLLEVDGAATPARLVDRRFTELPDCLAAGDLLVFNDTKVLKARFFGQKASGGRIEVLVERVTGPRTALAQIRASKSPAAGTTLTLADAFEVTVGERVEPFFTLHFPDDCLTLIERHGRLPLPPYIEHDPDATDETRYQTVFANNPGAVAAPTAGLHFDDALLATLRARGVETATLTLHVGAGTFQPVRVDDIAEHKMHSEWYELTDALVERIAATRARGGRVIAVGTTSMRALEAAARDAEAAGRPLAATRAETDIFITPGYRFRVVDRLVTNFHLPKSTLLMLVSAFAGIEPIRAAYRHAIAGRYRFFSYGDAMLLTRREPD

SEQ ID NO: 64494 - protein, 360 aa, Burkholderia pseudomallei
  misc_feature (1)..(360): sp|Q3JNW2|QUEA_BURP1 S-adenosylmethionine:tRNA ribosylt ransferase-isomerase OS=Burkholderia pseudomallei (stra in 1710b) OX=320372 GN=queA PE=3 SV=2
MLTLSDFDFDLPPELIAQTALPERSASRLLEVDNTNPSAPPRLVDRRFAELPACVAPGDLLVFNDTKVLKARFFGRKASGGKIEVLIERVTGERTALAQIRASKSPPPGTTLTLADAFDVTVGERVEPFFTLHFPDDCLVLIERHGRLPLPPYIEHAPDAADETRYQTVFAANPGAVAAPTAGLHFDDAVLAALEARGVERATLTLHVGAGTFQPVRVENLAEHRMHSESYELTDALVEKIAATRARGGRVIAVGTTSMRALEAAARDAQAAGRPLAATRAETDIFITPGYRFRVVDRLVTNFHLPKSTLLMLVSAFAGIETIRAAYRHAIDARYRFFSYGDAMLLTRRDDAAEATHGGA

SEQ ID NO: 64495 - protein, 360 aa, Burkholderia pseudomallei; identical to SEQ ID NO: 64494
  misc_feature (1)..(360): sp|A3NDB6|QUEA_BURP6 S-adenosylmethionine:tRNA ribosylt ransferase-isomerase OS=Burkholderia pseudomallei (stra in 668) OX=320373 GN=queA PE=3 SV=1

SEQ ID NO: 64496 - protein, 355 aa, Burkholderia pseudomultivorans
  misc_feature (1)..(355): tr|A0A132EBP9|A0A132EBP9_9BURK S-adenosylmethionine:tRN A ribosyltransferase-isomerase OS=Burkholderia pseudomu ltivorans OX=1207504 GN=queA PE=3 SV=1
MFTLSDFDFNLPPELIAQTALPDRTASRLLEVDAAAEPARLVDRRFAELPACIARGDLLVFNDTKVLKARFFGQKASGGRIEVLIERVTGTRTALAQIRASKSPGAGTTLRLADAFDVTVGERVEPFFTLHFPAPCLTLIEQYGRLPLPPYIEHDPDATDETRYQTVYASNPGAVAAPTAGLHFDEPLLAKLDAMGVERATLTLHVGAGTFQPVRVENIAEHKMHSEWYELPQSLVDKIAATRARGGNVIAVGTTSMRALEAAARDADTAGRPLAAAQAETDIFITPGYRFRVVDRLVTNFHLPKSTLLMLVSAFAGVETIRAAYRHAIAERYRFFSYGDAMLLTRRDTPEATHA

SEQ ID NO: 64497 - protein, 355 aa, Burkholderia pseudomultivorans
  misc_feature (1)..(355): tr|A0A132F5N2|A0A132F5N2_9BURK S-adenosylmethionine:tRN A ribosyltransferase-isomerase OS=Burkholderia pseudomu ltivorans OX=1207504 GN=queA PE=3 SV=1
MFTLSDFDFNLPPELIAQTALPDRTASRLLEVDGAAEPARLVDRRFADLPACIAPGDLLVFNDTKVLKARFFGQKASGGRIEVLVERVTGTHTALAQIRASKSPGAGTTLRLADAFDVTVGERVEPFFTLHFPAPCLTLIEQYGRLPLPPYIEHDPDATDETRYQTVYASNPGAVAAPTAGLHFDEPLLAKLDAMGVERATLTLHVGAGTFQPVRVENIAEHRMHSEWYELPQSLVDKIAATRARGGKVIAVGTTSMRALEAAARDADAAGRPLAATQAETDIFITPGYRFRVVDRLVTNFHLPKSTLLMLVSAFAGVETIRAAYRHAIAERYRFFSYGDAMLLTRRDTPEAAGA

SEQ ID NO: 64498 - protein, 356 aa, Burkholderia puraquae
  misc_feature (1)..(356): tr|A0A1X1PAW6|A0A1X1PAW6_9BURK S-adenosylmethionine:tRN A ribosyltransferase-isomerase OS=Burkholderia puraquae OX=1904757 GN=queA PE=3 SV=1
MFTLSDFDFNLPPELIAQTALPDRTASRLLEVDGTVAPARLVDRHFTALPSCISAGDLLVFNDTKVLKARFFGQKASGGKIEVLIERVTGTHTALAQIRASKSPGAGTTLRLADAFDVTVGERVEPFFTLNFPEPCLELIEQYGRLPLPPYIEHDPDATDETRYQTVYASNPGAVAAPTAGLHFDQPMLDRLDAMGVERATLTLHVGAGTFQPVRVDNIAEHKMHSEWYDLPQSLADRIAATRARGGNVIAVGTTSMRALEAAARAADEAGRPLAATQAETDIFITPGYRFRVVDRLVTNFHLPKSTLLMLVSAFAGVETIRAAYRHAIDERYRFFSYGDAMLLTRRDTPETTAGA

SEQ ID NO: 64499 - protein, 355 aa, Burkholderia pyrrocinia
  misc_feature (1)..(355): tr|A0A104MT02|A0A104MT02_BURPY S-adenosylmethionine:tRN A ribosyltransferase-isomerase OS=Burkholderia pyrrocin ia OX=60550 GN=queA PE=3 SV=1
MFTLSDFDFNLPPELIAQTALPDRTASRLLEVDTTAAPARLVDRHFAELPSCISAGDLLVFNDTKVLKARFFGHKASGGRIEVLIERVTGTHTALAQIRASKSPGPGTTLTLADAFDVTVGERVEPFFTLHFPAPCLNLIEQYGRLPLPPYIEHDPDATDETRYQTVYASNPGAVAAPTAGLHFDEPLLAKLDAMGVERATLTLHVGAGTFQPVRAENIAEHKMHSEWYELPQSLVDKIAATRARGGSVIAVGTTSMRALEAAARDADAAGRPLAATQAETDIFITPGYAFRVVDRLVTNFHLPKSTLLMLVSAFAGVDTIRAAYRHAIEQRYRFFSYGDAMLLTRRSAPEAPAA

SEQ ID NO: 64500 - protein, 355 aa, Burkholderia pyrrocinia
  misc_feature (1)..(355): tr|A0A087NPV4|A0A087NPV4_BURPY S-adenosylmethionine:tRN A ribosyltransferase-isomerase OS=Burkholderia pyrrocin ia OX=60550 GN=queA PE=3 SV=1
MFTLSDFDFNLPPELIAQTALPDRTASRLLEVDRTVEPARLVDRRFTELPSCIAPGDLLVFNDTRVLKARFFGQKASGGKIEVLIERVTGTHTALAQIRASKSPGAGTTLRLADAFDVTVGERVEPFFTLHFPEPCLALIEQYGRLPLPPYIEHDPDATDETRYQTVYASNPGAVAAPTAGLHFDQPMLEKLDAMGVERATLTLHVGAGTFQPVRVDNIAEHKMHSEWYDLPQSLVDKIAATRARGGNVIAVGTTSMRALEAAARSADEAGRPLAATQAETDIFITPGYRFRVVDRLVTNFHLPKSTLLMLVSAFAGVETIRAAYRHAIDQRYRFFSYGDAMLLTRRDTPEAPRV

SEQ ID NO: 64501 - protein, 355 aa, Burkholderia reimsis
  misc_feature (1)..(355): tr|A0A365QI42|A0A365QI42_9BURK S-adenosylmethionine:tRN A ribosyltransferase-isomerase OS=Burkholderia reimsis OX=2234132 GN=queA PE=3 SV=1
MFTLSDFDFNLPPELIAQTALPDRTASRLLEVDGTVEPARLVDRRFAELPSCIAPGDLLVFNDTKVLKARFFGQKASGGKIEVLVERVTGTHTALAQIRASKSPGAGTTLRLADAFDVTVGERVEPFFTLVFPEPCLDLIEQYGRLPLPPYIEHDPDATDETRYQTVYASNPGAVAAPTAGLHFDQPLLDKLDAMGVERATLTLHVGAGTFQPVRVDNIAEHKMHSEWYDLPQSLVDKIAATRARGGSVIAVGTTSMRALEAAARTADEAGRPLAATQAETDIFITPGYRFRVVDRLVTNFHLPKSTLLMLVSAFAGVETIRAAYRHAIEQRYRFFSYGDAMLLTRRDTPETPRA

SEQ ID NO: 64502 - protein, 355 aa, Burkholderia seminalis
  misc_feature (1)..(355): tr|A0A118FST2|A0A118FST2_9BURK S-adenosylmethionine:tRN A ribosyltransferase-isomerase OS=Burkholderia seminali s OX=488731 GN=queA PE=3 SV=1
MFTLSDFDFNLPPELIAQTALPDRTASRLLEVDNTAEPARLVDRRFTELPSCIAPGDLLVFNDTKVLKARFFGQKASGGKIEVLIERLTGTHTALAQIRASKSPGAGTTLRLADAFDVTVGERVEPFFTLHFPAPCLDLIEQFGRLPLPPYIEHDADATDETRYQTVYASNPGAVAAPTAGLHFDQPLLAKLDAMGVERATLTLHVGAGTFQPVRVENIAEHKMHSEWYDLPQSLVDKIAAARARGGNVIAVGTTSMRALEAAARAADEAGRPLAATQAETDIFITPGYRFRVVDRLVTNFHLPKSTLLMLVSAFAGVETIRAAYRHAIEERYRFFSYGDAMLLTRRDTPEAPGA

SEQ ID NO: 64503 - protein, 357 aa, Burkholderia singularis
  misc_feature (1)..(357): tr|A0A238H9E5|A0A238H9E5_9BURK S-adenosylmethionine:tRN A ribosyltransferase-isomerase OS=Burkholderia singular is OX=1503053 GN=queA PE=3 SV=1
MLTLSDFDFDLPPELIAQTALPERSASRLLEVGNAPAGARLVDRRFAELPGCIAPGDLLVFNDTKVLKARLLGRKASGGKIEVLIERVTGPRTALAQIRASKSPAAGTTLTLADAFDVTVGERVEPFFTLHFPDDCGTLIERYGRLPLPPYIEHAPDAIDETRYQTVFAANPGAVAAPTAGLHFDDAVLAALDVRGVERATLTLHVGAGTFQPVRAENIAEHRMHREWYELSGALVDQIAATRARGGRVIAVGTTSLRALEAAARDAEAAGRPLAATRAETDIFITPGYRFRVVDRLVTNFHLPKSTLMMLVSAFAGLETIRAAYRHAIDARYRFFSYGDAMLLTRRDLPEENRRDA

SEQ ID NO: 64504 - protein, 357 aa, Burkholderia singularis
  misc_feature (1)..(357): tr|A0A103E456|A0A103E456_9BURK S-adenosylmethionine:tRN A ribosyltransferase-isomerase OS=Burkholderia singular is OX=1503053 GN=queA PE=3 SV=1
MLTLSDFDFDLPPELIAQTALPERSASRLLEVGNAPAGARLVDRRFAELPGCIAPGDLLVFNDTKVLKARLLGRKASGGKIEVLIERVTGPRTALAQIRASKSPAAGTTLTLADAFDVTVGERVEPFFTLHFPDDCGTLIERYGRLPLPPYIEHAPDAIDETRYQTVFAANPGAVAAPTAGLHFDDAVLAALDARGVERATLTLHVGAGTFQPVRAENIAEHRMHSEWYELSGALVDQIAATRARGGRVIAVGTTSLRALEAAARDAEAAGRPLAATRAETDIFITPGYRFRVVDRLVTNFHLPKSTLMMLVSAFAGLETIRAAYRHAIDARYRFFSYGDAMLLTRRDVPEENRRDA

SEQ ID NO: 64505 - protein, 350 aa, Burkholderia sp.
  misc_feature (1)..(350): tr|A0A063BCX8|A0A063BCX8_9BURK S-adenosylmethionine:tRN A ribosyltransferase-isomerase OS=Burkholderia sp. lig3 0 OX=1192124 GN=queA PE=3 SV=1
MFTLSDFDFNLPPELIAQTALPDRTASRLLEVDNSTEPPRLADRGFAELPSCISPGDLLVFNDTKVLKARFFGHKASGGKIEVLIERVTGTHTALAQIRASKSPGAGTALTLADAFDVTVGERVEPFFTLHFPEPCLTLIERYGRLPLPPYIEHDPDATDETRYQTVYASNPGAVAAPTAGLHFDDALLARLDAMGVERATLTLHVGAGTFQPVRVENIAEHKMHSEWYELPQSLVDRIAATRARGGKVIAVGTTSMRALEAAARDAEAAGRPLAATQAETDIFITPGYRFRVVDRLVTNFHLPKSTLLMLVSAFAGIETVRAAYRHAIEQRYRFFSYGDAMLLTRRDGA

SEQ ID NO: 64506 - protein, 355 aa, Burkholderia sp.
  misc_feature (1)..(355): tr|A0A3N8GU55|A0A3N8GU55_9BURK S-adenosylmethionine:tRN A ribosyltransferase-isomerase OS=Burkholderia sp. Bp89 98 OX=2184557 GN=queA PE=3 SV=1
MFTLSDFDFNLPPELIAQTALPERTASRLLEVDGTVEPARLVDRRFAELPSCIAPGDLLVFNDTKVLKARFFGQKASGGKIEVLIERVTGTHTALAQIRASKSPGAGTTLRLADAFDVTVGERVEPFFTLHFPAPCLTLIEQHGRLPLPPYIEHDADANDETRYQTVYASNPGAVAAPTAGLHFDQPLLEKLDAMGVERATLTLHVGAGTFQPVRVENIAEHRMHSEWYDLPQSLVDKIAATHARGGNVIAVGTTSMRALEAAARSAAEAGRPLAATQAETDIFITPGYRFRIVDRLVTNFHLPKSTLLMLVSAFAGVETIRAAYRHAIDERYRFFSYGDAMLLTRRDTPEAPRA

SEQ ID NO: 64507 - protein, 355 aa, Burkholderia stabilis
  misc_feature (1)..(355): tr|A0A1Y1BNG2|A0A1Y1BNG2_9BURK S-adenosylmethionine:tRN A ribosyltransferase-isomerase OS=Burkholderia stabilis OX=95485 GN=queA PE=3 SV=1
MFTLSDFDFNLPPELIAQTALPDRTASRLLEVDRTVEPARLVDRRFAELPSCIAPGDLLVFNDTKVLKARFFGQKASGGKIEVLIERVTGTHTALAQIRASKSPGAGTTLRLADAFDVTVGERVEPFFTLHFPEPCLVLIEQYGRLPLPPYIEHDPDATDETRYQTVYASNPGAVAAPTAGLHFDRPMLDKLDAMGVERATLTLHVGAGTFQPVRVDNIAEHKMHSEWYELPQSLVDKIAATRARGGNVIAVGTTSMRALEAAARAADEAGRPLAATQAETDIFITPGYRFRVVDRLVTNFHLPKSTLLMLVSAFAGVETIRAAYRHAIDERYRFFSYGDAMLLTRRDTPETPRA

SEQ ID NO: 64508 - protein, 355 aa, Burkholderia stabilis
  misc_feature (1)..(355): tr|A0A4Q2ASW5|A0A4Q2ASW5_9BURK S-adenosylmethionine:tRN A ribosyltransferase-isomerase OS=Burkholderia stabilis OX=95485 GN=queA PE=3 SV=1
MFTLSDFDFNLPPELIAQTALPDRTASRLLEVDRTVEPARLVDRKFAELPSCIAPGDLLVFNDTKVLKARFFGQKASGGKIEVLIERVTGTHTALAQIRASKSPGAGTKLRLADAFDVTVGERVEPFFTLIFPEPCLDLIEQFGRLPLPPYIEHDPDSTDETRYQTVYASNPGAVAAPTAGLHFDQPMLDRLDAMGVERATLTLHVGAGTFQPVRVDNIAEHKMHSEWYDLPQSLVDRIATTRARGGNVIAVGTTSMRALEAAARTADEAGRPLAATQAETDIFITPGYRFRVVDRLVTNFHLPKSTLLMLVSAFAGVETIRAAYRHAIDQRYRFFSYGDAMLLTRRDTPEAPRA

SEQ ID NO: 64509 - protein, 355 aa, Burkholderia stagnalis
  misc_feature (1)..(355): tr|A0A3N7UCR4|A0A3N7UCR4_9BURK S-adenosylmethionine:tRN A ribosyltransferase-isomerase OS=Burkholderia stagnali s OX=1503054 GN=queA PE=3 SV=1
MFTLSDFDFNLPPELIAQTALPDRTASHLLEVDNTAAPARLVDRRFAELPSCISAGDLLVFNDTKVLKARFFGHKASGGRIEVLIERVTGTHTALAQIRASKSPGPGTTLTLADAFDVTVGERVEPFFTLHFPAPCLNLIEQYGRLPLPPYIEHDPDATDETRYQTVYARNPGAVAAPTAGLHFDAPLLAQLDAMGVERATLTLHVGAGTFQPVRVENIAEHKMHSEWYELPQSLVDKIAATRARGGNVIAVGTTSMRALEAAARDAAAAGRPLAATQAETDIFITPGYAFRVVDRLVTNFHLPKSTLLMLVSAFAGVDTIRAAYRHAIEQRYRFFSYGDAMLLTRRDAPQAPGA

SEQ ID NO: 64510 - protein, 355 aa, Burkholderia stagnalis
  misc_feature (1)..(355): tr|A0A119W057|A0A119W057_9BURK S-adenosylmethionine:tRN A ribosyltransferase-isomerase OS=Burkholderia stagnali s OX=1503054 GN=queA PE=3 SV=1
MFTLSDFDFNLPPELIAQTALPDRTASRLLEVDNTAAPARLVDRRFAELPSCISAGDLLVFNDTKVLKARFFGHKASGGRIEVLIERVTGTHTALAQIRASKSPGPGTTLTLADAFDVTVGERVEPFFTLHFPAPCLNLIEQYGRLPLPPYIEHDPDATDETRYQTVYARNPGAVAAPTAGLHFDAPLLAQLDAMGVERATLTLHVGAGTFQPVRVENIAEHKMHSEWYELPQSLVDKIAATRARGGNVIAVGTTSMRALEAAARDAAVAGRPLAATQAETDIFITPGYAFRVVDRLVTNFHLPKSTLLMLVSAFAGVDTIRAAYRHAIEQRYRFFSYGDAMLLTRRDAPQAPGA

SEQ ID NO: 64511 - protein, 355 aa, Burkholderia territorii
  misc_feature (1)..(355): tr|A0A102G1C4|A0A102G1C4_9BURK S-adenosylmethionine:tRN A ribosyltransferase-isomerase OS=Burkholderia territor ii OX=1503055 GN=queA PE=3 SV=1
MFTLSDFDFNLPPELIAQTALPDRTASRLLEVDGTVEPARLVDRRFTELPSCIAPGDLLVFNDTKVLKARFFGQKASGGKIEVLIERVTGTHTALAQIRASKSPGAGTTLRLADAFDVTVGERVEPFFTLHFPAPCLDLIEQHGRLPLPPYIEHDADANDETRYQTVYAANPGAVAAPTAGLHFDQPLLEKLDAMGVERATLTLHVGAGTFQPVRVENIAEHKMHSEWYDLPQSLVDKIAATRARGGKVIAVGTTSMRALEAAARSAEEAGQPLAAMQAETDIFITPGYRFRVVDRLVTNFHLPKSTLLMLVSAFAGVETIRAAYRHAIDERYRFFSYGDAMLLTRRDTPEAPRA

SEQ ID NO: 64512 - protein, 355 aa, Burkholderia territorii
  misc_feature (1)..(355): tr|A0A125A8M5|A0A125A8M5_9BURK S-adenosylmethionine:tRN A ribosyltransferase-isomerase OS=Burkholderia territor ii OX=1503055 GN=queA PE=3 SV=1
MFTLSDFDFNLPPELIAQTALPDRTASRLLEVDGTVEPARLVDRRFTELPSCIAAGDLLVFNDTKVLKARFFGQKASGGKIEVLIERVTGTHTALAQIRASKSPGAGTTLRLADAFDVTVGERVEPFFTLHFPAPCLDLIEQHGRLPLPPYIEHDADANDETRYQTVYAANPGAVAAPTAGLHFDRPLLEKLDAMGVERATLTLHVGAGTFQPVRVENIAEHKMHSEWYDLPQSLVDKIAATRARGGKVIAVGTTSMRALEAAARSAEEAGRPLAAMQAETDIFITPGYRFRVVDRLVTNFHLPKSTLLMLVSAFAGVETIRAAYRHAIDERYRFFSYGDAMLLTRRDTPEAPRA

SEQ ID NO: 64513 - protein, 374 aa, Burkholderia thailandensis
  misc_feature (1)..(374): tr|Q2SZ23|Q2SZ23_BURTA S-adenosylmethionine:tRNA ribosy ltransferase-isomerase OS=Burkholderia thailandensis (s train ATCC 700388 / DSM 13276 / CIP 106301 / E264) OX=2 71848 GN=queA PE=3 SV=1
MPRRALSVRPAAPAPFRMLTLSDFDFDLPPELIAQTALPERSASRLLEVDNASAPPRLVDRRFAELPACVAPGDLLVFNDTKVLKARFFGRKASGGKIEVLIERVTGQRTALAQIRASKSPAPGTTLTLADAFDVTVGERVEPFFTLHFPDDCLVLIERHGRLPLPPYIEHTPDATDEARYQTVFAANPGAVAAPTAGLHFDDAVLAALDARGVERATLTLHVGAGTFQPVRVENIAEHRMHRESYELTDALVEKIAATRARGGRVIAVGTTSMRALEAAARDADAAGRPLAATRAETDIFITPGYRFRVVDRLVTNFHLPKSTLLMLVSAFAGVDTIRAAYRHAIDARYRFFSYGDAMLLTRRDAAEETHGGG

SEQ ID NO: 64514 - protein, 357 aa, Burkholderia thailandensis
  misc_feature (1)..(357): tr|A0A2Z4T7D1|A0A2Z4T7D1_BURTH S-adenosylmethionine:tRN A ribosyltransferase-isomerase OS=Burkholderia thailand ensis OX=57975 GN=queA PE=3 SV=1
MLTLSDFDFDLPPELIAQTALPERSASRLLEVDNASAPPRLVDRRFAELPACVAPGDLLVFNDTKVLKARFFGRKASGGKIEVLIERVTGQRTALAQIRASKSPAPGTTLTLADAFDVTVGERVEPFFTLHFPDDCLVLIERHGRLPLPPYIEHTPDATDEARYQTVFAANPGAVAAPTAGLHFDDAVLAALDARGVERATLTLHVGAGTFQPVRVENIAEHRMHRESYELTDALVEKIAATRARGGRVIAVGTTSMRALEAAARDADAAGRPLAATRAETDIFITPGYRFRVVDRLVTNFHLPKSTLLMLVSAFAGVDTIRAAYRHAIDARYRFFSYGDAMLLTRRDAAEETHGGG

SEQ ID NO: 64515 - protein, 354 aa, Burkholderia ubonensis
  misc_feature (1)..(354): tr|A0A1R1J3L5|A0A1R1J3L5_9BURK S-adenosylmethionine:tRN A ribosyltransferase-isomerase OS=Burkholderia ubonensi s OX=101571 GN=queA PE=3 SV=1
MLTLSDFDFHLPPELIAQIALPDRTASRLLEVDNTIAPARLVDRRFAELPSCIAAGDLLVFNDTKVLKARFFGHKASGGKVEVLIERVTGTHTALAQIRASKSPGPGTTLTLADAFDVTVGERVEPFFTLHFPAPCLTLIEQYGRLPLPPYIEHDPDATDETRYQTVYASNPGAVAAPTAGLHFDEPLLAKLDAMGVERATLTLHVGAGTFQPVRVDNLAEHKMHSEWYELPQSLVDKIAATRARGGNVIAVGTTSMRALEAAARDADAAGRPLAATQTETDIFITPGYAFRVVDRLVTNFHLPKSTLLMLVSAFAGVETIRAAYRHAIDERYRFFSYGDAMLLTRRSAPEAGA

SEQ ID NO: 64516 - protein, 354 aa, Burkholderia ubonensis
  misc_feature (1)..(354): tr|A0A118ZSX2|A0A118ZSX2_9BURK S-adenosylmethionine:tRN A ribosyltransferase-isomerase OS=Burkholderia ubonensi s OX=101571 GN=queA PE=3 SV=1
MLTLSDFDFHLPPELIAQTALPDRTASRLLEVDNTVAPARLVDRRFAELPSCIAAGDLLVFNDTKVLKARFFGHKASGGKVEVLIERVTGTHTALAQIRASKSPGPGTTLTLADAFDVTLGERVEPFFTLHFPAPCLTLIEQYGRLPLPPYIEHDPDATDETRYQTVYASNPGAVAAPTAGLHFDEPLLAKLDAMGVERATLTLHVGAGTFQPVRVENLAEHKMHSEWYELPQSLVDRIAATRARGGNVIAVGTTSMRALEAAARDADAAGRPLAATQAETDIFITPGYAFRVVDRLVTNFHLPKSTLLMLVSAFAGVETIRAAYRHAIDERYRFFSYGDAMLLTRRSAPEAGA

SEQ ID NO: 64517 - protein, 353 aa, Burkholderia vietnamiensis
  misc_feature (1)..(353): tr|A0A2Z6TL49|A0A2Z6TL49_BURVI S-adenosylmethionine:tRN A ribosyltransferase-isomerase OS=Burkholderia vietnami ensis OX=60552 GN=queA PE=3 SV=1
MFTLSDFDFNLPPELIAQTALPERTASRLLEVDGTVAPARLVDRRFAELPSCIARGDLLVFNDAKVLKARFFGPKASGGKIEVLVERVTGTHTALAQIRASKSPGAGTTLRLADAFDVTVGERVEPFFTLHFPQPCLTLIEQYGRLPLPPYIEHAADATDGTRHQTVYASNPGAVAAPTAGLHFDQPLLEKLDEMGVGRATLTLHVGAGTFQPVRVENIAEHRMHSEWYELPQSLVDKIAATRARGGNGIAVGTTSRRALEAAARSAEAAGRPLAATQDETDIFITPGYRFRVVDRLVTNFHLPKSTLLMLVSAFAGVETIRAAYRHAIDERYRFFSYGDAMLLTRRDTPEHA

SEQ ID NO: 64518 - protein, 353 aa, Burkholderia vietnamiensis
  misc_feature (1)..(353): sp|A4JBP3|QUEA_BURVG S-adenosylmethionine:tRNA ribosylt ransferase-isomerase OS=Burkholderia vietnamiensis (str ain G4 / LMG 22486) OX=269482 GN=queA PE=3 SV=1
MFTLSDFDFNLPPELIAQTALPERTASRLLEVDGTVAPARLVDRRFAELPSCIARGDLLVFNDTKVLKARFFGQKASGGKIEVLVERVTGTHTALAQIRASKSPGAGTTLRLADAFDVTVGERVEPFFTLHFPQPCLTLIEQYGRLPLPPYIEHDADATDETRYQTVYASNPGAVAAPTAGLHFDQPLLEKLDAMGVERATLTLHVGAGTFQPVRVENIAEHRMHSEWYDLPQSLVDKIAATRARGGNVIAVGTTSMRALEAAARSAEAAGRPLAATQDETDIFITPGYRFRVVDRLVTNFHLPKSTLLMLVSAFAGVETIRAAYRHAIDERYRFFSYGDAMLLTRRDTPEHA

SEQ ID NO: 64519 - protein, 353 aa, Burkholderiaceae bacterium
  misc_feature (1)..(353): tr|A0A0F0E5T8|A0A0F0E5T8_9BURK S-adenosylmethionine:tRN A ribosyltransferase-isomerase OS=Burkholderiaceae bact erium 26 OX=1619951 GN=queA PE=3 SV=1
MLTLSDFDFDLPPELIAQTALPDRTASRLLAVCRAEDAVHFEDRQFADLVDYLRPGDLLVFNDTRVIKARFFGHKASGGKVEVLVERLLDEHTVLAQIRSSKSPVEGTTLRLADAFDVTVGPRAEPFFTLRFPQPALDLIEQYGRLPLPPYIEHDPDSFDETRYQTVYARNPGAVAAPTAGLHFDDALFAKLDAMGIQRGFLTLHVGAGTFQPVRVENIAEHRMHSEWYQITPELAEAIRGTRAAGGRVIAVGTTSMRALESAAQPDGTLNACSGETDIFITPGYRFRAVDLLVTNFHLPKSTLLMLVSAFAGMGAIRGAYQHAIAQRYRFFSYGDAMLLMRAPSEPGEPQSL

SEQ ID NO: 64520 - protein, 362 aa, Burkholderiaceae bacterium
  misc_feature (1)..(362): tr|A0A522L5N4|A0A522L5N4_9BURK S-adenosylmethionine:tRN A ribosyltransferase-isomerase OS=Burkholderiaceae bact erium OX=2030806 GN=queA PE=3 SV=1
MHSFPSSAARPFTLSDFDFALPPELIAQHPTPERSASRLLDGRGAQPVDRIFHDLPGLLDPRDLMVFNDTKVIKARLFGEKPTGGKVELLVERVLSGNQVVAHMRVSKRPEAGATLALAGGGGFRATLLGRWPDEQGDLFRFVLSNDAGDDPYALMQQHGQVPLPPYITHAASSEDEQRYQTVFAKNPGAVAAPTAALHFDEALLAALDAHGVQRASVTLHVGAGTFQPVKTEDLAQHQMHSEWYDVPEATQRAIQACRARGGRLIAVGTTTVRTLEAMAASGHTCGDTRIFITPGFEFKRVDGLITNFHLPKSTLMMLVSAFAGYEHIMALYRHAIESRYRFFSYGDAMLLSRQAANHAAI

SEQ ID NO: 64521 - protein, 388 aa, Burkholderiales bacterium
  misc_feature (1)..(388): tr|A0A1Q3R436|A0A1Q3R436_9BURK S-adenosylmethionine:tRN A ribosyltransferase-isomerase OS=Burkholderiales bacte rium 68-10 OX=1895730 GN=queA PE=3 SV=1
MRGEAQHRAASGATGEGHFTTSDFDFALPPELIAQHPAPERSASRLLDGSGAAPMDRVFRDLPALLQPGDLLVFNDTQVVKARLYGHKPPPPAPRSRRSPQGAQLGWGRPGADVAPSGGKLELLIERVLPDGSVAAHMKVSKKPPPGTVLRMADGAFTAELLGRWPDAGGPLFHLRFSGDAYALMAAHGHVPLPPYIGHADSHEDAARYQTVFARHPGAVAAPTAALHFDEPLLRAIAARGVQRAFVTLHVGAGTFQPVKTEDLAAHVMHRERYHVPPETAQAIADCRARGGRVVAVGTTSVRTLESWAASGQASGDTDIFITPGFRFRVVDALITNFHLPRSTLMMLVSALAGHTHVMALYAHAVARRYRFFSYGDAMWLVRTAQEN

SEQ ID NO: 64522 - protein, 353 aa, Burkholderiales bacterium
  misc_feature (1)..(353): tr|A0A1F4NJQ1|A0A1F4NJQ1_9BURK S-adenosylmethionine:tRN A ribosyltransferase-isomerase OS=Burkholderiales bacte rium RIFOXYC12_FULL_65_23 OX=1797572 GN=queA PE=3 SV=1
MNPSSSGATRAHTVSDFDFELPPELVAQHPAAERSGSRLLDNTGRSPVDRIFKELPGLLQAGDLLIFNDTKVVKARLYGEKASGGKVELLIERVLDGHEVVAHMKVSKKPLPGALLHMVGGFSAELLGRWPEDNGPLFRFRLSAEPYGLMEQHGHVPLPPYIEHGDSAEDERRYQTVFARAPGAVAAPTASLHFDQALLDELEARGIQRASVTLHVGAGTFQPVKVETIADHVMHSERYEVPEATQQAIRECRARGGRVIAIGTTTVRTLESWAQSGHASGETQIFITPGFDFKIVDLLVTNFHLPKSTLMMLVSAFAGYETIMALYARAVREGYRFFSYGDAMLLARKSTHA

SEQ ID NO: 64523 - protein, 356 aa, Buttiauxella agrestis
  misc_feature (1)..(356): tr|A0A381CB84|A0A381CB84_9ENTR S-adenosylmethionine:tRN A ribosyltransferase-isomerase OS=Buttiauxella agrestis OX=82977 GN=queA PE=3 SV=1
MRVADFSFELPESLIAHYPQAQRSGCRLLSLEGPTGNLTHGTFTDLLDKLNPGDLLVFNNTRVIPARLFGRKASGGKIEVLVERMLDDKRILAHIRASKAPKPGAELLLGDDESVHATMVARHDALFEVQFEDERSVLDILNSIGHMPLPPYIDRPDEESDRELYQTVYSQKPGAVAAPTAGLHFDEPLLEALRNKGIEQAFVTLHVGAGTFQPVRVDSIEDHIMHSEYAEVPQDVVDAVLACKARGNRVIAVGTTSVRSLESAAQAAKNDLIEPFFGDTQIFIYPGYQYKVIDALVTNFHLPESTLIMLVSAFAGYKNTMNAYKEAVSSEYRFFSYGDAMFITYNPQAINERPGA

SEQ ID NO: 64524 - protein, 356 aa, Buttiauxella agrestis; identical to SEQ ID NO: 64523
  misc_feature (1)..(356): tr|A0A085GI01|A0A085GI01_9ENTR S-adenosylmethionine:tRN A ribosyltransferase-isomerase OS=Buttiauxella agrestis ATCC 33320 OX=1006004 GN=queA PE=3 SV=1

SEQ ID NO: 64525 - protein, 356 aa, Buttiauxella brennerae
  misc_feature (1)..(356): tr|A0A1B7IV20|A0A1B7IV20_9ENTR S-adenosylmethionine:tRN A ribosyltransferase-isomerase OS=Buttiauxella brennera e ATCC 51605 OX=1354251 GN=queA PE=3 SV=1
MRVADFTFELPESLIAHYPQAQRSGCRLLSLDGPTGNLTHGTFTDLLDKLNPGDLLVFNNTRVIPARLFGRKASGGKIEVLVERMLDDKRILAHIRASKAPKPGAQLLLGDDESVHATMVARHDALFEVQFEDERSVLDILNSIGHMPLPPYIDRPDEDADRELYQTVYSQKPGAVAAPTAGLHFDEPLLEALRNKGIGQAFVTLHVGAGTFQPVRVDSIEDHIMHSEYAEVPQDVVDAVLACKARGNRVIAVGTTSVRSLESAAQASKNGLIEPFFGDTQIFIYPGYQYKVIDALVTNFHLPESTLIMLVSAFAGYKNTMNAYKEAVSSEYRFFSYGDAMYITYNPQAINERPGA

SEQ ID NO: 64526 - protein, 356 aa, Buttiauxella gaviniae
  misc_feature (1)..(356): tr|A0A1B7HUB3|A0A1B7HUB3_9ENTR S-adenosylmethionine:tRN A ribosyltransferase-isomerase OS=Buttiauxella gaviniae ATCC 51604 OX=1354253 GN=queA PE=3 SV=1
MRVADFSFELPDSLIAHYPQAQRSGCRLLSLEGPTGNLTHGTFTDLLDKLNPGDLLVFNNTRVIPARLFGRKASGGKIEVLVERMLDDKRILAHIRASKAPKPGAELLLGDDESVHATMVARHDALFEVQFEDDRSVLDILNSIGHMPLPPYIDRPDEESDRELYQTVYSQKPGAVAAPTAGLHFDEPLLEALRSKGIEQAFVTLHVGAGTFQPVRVDSIEDHIMHSEYAEVPQDVVDAVLACKARGNRVIAVGTTSVRSLESAAQAAKNDLIEPFFGDTQIFIYPGYQYKVIDALVTNFHLPESTLIMLVSAFAGYKNTMNAYKEAVSSEYRFFSYGDAMFITYNPQAIDERPGA

SEQ ID NO: 64527 - protein, 356 aa, Buttiauxella izardii
  misc_feature (1)..(356): tr|A0A3A5JKU2|A0A3A5JKU2_9ENTR S-adenosylmethionine:tRN A ribosyltransferase-isomerase OS=Buttiauxella izardii OX=82991 GN=queA PE=3 SV=1
MRVADFSFELPDSLIAHYPQAQRSSCRLLSLDGPTGDLAHGTFTDLLDKLNPGDLLVFNNTRVIPARLFGRKASGGKIEVLVERMLDDKRILAHIRASKAPKPGAELLLGDDESVHATMVARHDALFEVQFEDERSVLDILNSIGHMPLPPYIDRPDEDSDRELYQTVYSQKPGAVAAPTAGLHFDEPLLEALRNKGIEQAFVTLHVGAGTFQPVRVDSIEDHIMHSEYAEVPQDVVDAVLACKARGNRVIAVGTTSVRSLESAAQAAKNELIEPFFGDTQIFIYPGYQYKVIDALVTNFHLPESTLIMLVSAFAGYKNTMNAYKQAVSSEYRFFSYGDAMYITYNPQAINERPGA

SEQ ID NO: 64528 - protein, 356 aa, Buttiauxella noackiae
  misc_feature (1)..(356): tr|A0A1B7I1J6|A0A1B7I1J6_9ENTR S-adenosylmethionine:tRN A ribosyltransferase-isomerase OS=Buttiauxella noackiae ATCC 51607 OX=1354255 GN=queA PE=3 SV=1
MRVADFSFELPESLIAHYPQAQRSGCRLLSLEGPTGNLTHGTFTDLLDKLNPGDLLVFNNTRVIPARLFGRKASGGKIEVLVERMLDDKRILAHIRASKAPKPGAELLLGDDESVHATMVARHDALFEVQFEDERSVLDILNSIGHMPLPPYIDRPDEESDRELYQTVYSQKPGAVAAPTAGLHFDEPLLEALRNKGIEQAFVTLHVGAGTFQPVRVDSIEDHIMHSEYAEVPQDVVDAVLACKARGNRVIAVGTTSVRSLESAAQAAKNDLIEPFFGDTQIFIYPGYQYKVIDALVTNFHLPESTLIMLVSAFAGYKNTMNAYKEAVSSEYRFFSYGDAMFITYNPQAIDERPGA

SEQ ID NO: 64529 - protein, 356 aa, Buttiauxella sp.
  misc_feature (1)..(356): tr|A0A5C5D8J4|A0A5C5D8J4_9ENTR S-adenosylmethionine:tRN A ribosyltransferase-isomerase OS=Buttiauxella sp. B2 O X=2587812 GN=queA PE=3 SV=1
MRVADFSFELPDSLIAHYPQASRSSCRLLSLDGPTGKLAHGTFTDLLDKLNPGDLLVFNNTRVIPARLFGRKASGGKIEVLVERMLDDKRILAHIRASKAPKPGAELLLGDDESVHATMVARHDALFEVQFEDERSVLDILNSIGHMPLPPYIDRPDEESDRELYQTVYSQKPGAVAAPTAGLHFDEPLLEALRNKGIEHAFVTLHVGAGTFQPVRVDSIEDHIMHSEYAEVPQEVVDAVLACKARGNRVIAVGTTSVRSLESAAQAAKNDLIEPFFGDTQIFIYPGYQYKVIDALVTNFHLPESTLIMLVSAFAGYKNTMNAYKEAVSSEYRFFSYGDAMYITYNPQAINERPGA

SEQ ID NO: 64530 - protein, 356 aa, Buttiauxella sp.
  misc_feature (1)..(356): tr|A0A4P5QF56|A0A4P5QF56_9ENTR S-adenosylmethionine:tRN A ribosyltransferase-isomerase OS=Buttiauxella sp. A111 OX=2563088 GN=queA PE=3 SV=1
MRVADFSFELPESLIAHYPQAQRSGCRLLSLEGPTGNLTHGTFTDLLDKLNPGDLLVFNNTRVIPARLFGRKASGGKIEVLVERMLDDKRILAHIRASKAPKPGAELLLGDDESVHATMVARHDALFEVQFEDERSVLDILNSIGHMPLPPYIDRPDEESDRELYQTVYSQKPGAVAAPTAGLHFDEPLLEALRKKGIEQAFVTLHVGAGTFQPVRVDSIEDHIMHSEYAEVPQDVVDAVLACKARGNRVIAVGTTSVRSLESAAQAAQNDLIEPFFGDTQIFIYPGYQYKVIDALVTNFHLPESTLIMLVSAFAGYKNTMNAYKEAVNSEYRFFSYGDAMYITYNPQAINERPGA

SEQ ID NO: 64531 - protein, 356 aa, Buttiauxella warmboldiae
  misc_feature (1)..(356): tr|A0A3N5DIH1|A0A3N5DIH1_9ENTR S-adenosylmethionine:tRN A ribosyltransferase-isomerase OS=Buttiauxella warmbold iae OX=82993 GN=queA PE=3 SV=1
MRVADFSFELPESLIAHYPQAQRSACRLLSLNGPTGELTHGTFTDLLDKLNPGDLLVFNNTRVIPARLFGRKASGGKIEVLVERMLDDKRILAHIRASKAPKPGAELLLGDDESVHATMVARHDALFEVQFEDERSVLDILNSIGHMPLPPYIDRPDEDSDRELYQTVYSQKPGAVAAPTAGLHFDEPLLEALRNKGIEQAFVTLHVGAGTFQPVRVDSIEDHIMHSEYAEVPQDVVDAVLACKARGNRVIAVGTTSVRSLESAAQAAKNDLIEPFFGDTQIFIYPGYQYKVIDALVTNFHLPESTLIMLVSAFAGYKNTINAYKEAVSSEYRFFSYGDAMYITYNPQAINERPGA

SEQ ID NO: 64532 - protein, 341 aa, Unknown
  misc_feature (1)..(341): tr|D7GU47|D7GU47_9FIRM S-adenosylmethionine:tRNA ribosy ltransferase-isomerase OS=butyrate-producing bacterium SS3/4 OX=245014 GN=queA PE=3 SV=1
MNVTDFNFELPPELIAQDPLEDRAASRLLVLDKKTGEIEHRHFRDILKYLKKGDCLVINDTKVIPARLMGHKIGTDAGIEVLLLKRKSDNVWETLVKPGKKMKVGAEVSFGDGLLKGKVIDVVDEGNRLIQFEYDGIFEEILDKLGQMPLPPYITHQLKDKNRYQTVYAKNEGSAAAPTAGLHFTKELLQEIEEMGVKIAHVTLHVGLGTFRPVKVDTIEEHHMHSEFYMVEESEAKKINDTKANGGRVICVGTTSCRTLESATGDDGILKAGSGWTEIFIYPGYKFKILDCLITNFHLPESTLVMLVSALAGREHILNAYQEAIKERYRFFSFGDAMFIH

SEQ ID NO: 64533 - protein, 344 aa, Butyribacterium methylotrophicum
  misc_feature (1)..(344): tr|A0A1E7S194|A0A1E7S194_BUTME S-adenosylmethionine:tRN A ribosyltransferase-isomerase OS=Butyribacterium methy lotrophicum OX=1487 GN=queA PE=3 SV=1
METLTTKDFYYDLPEELIAQTPEKKRDASRLMVLNRMEGSIQDRYFHDIIDYLNEDDLLVMNNTKVLPARIFGKKEETGGKVELLLLKRLDDKTWETMVKPGKKAMPGTRLVFGDKLKGEIKDKIESGLRIIEFEYDGIFEEIIGELGTMPLPPYIHEVLEDQDRYQTVYAKYTGSAAAPTAGLHFTEELLDALRRKGIRTAEVTLHVGIGTFRPVKCDNILDHHMHEETYQVPKETEKLIEETRKKGGRVIAVGTTSVRTLESAAARFGGKVQACEGSTDIFIYPGYKWQVIDALITNFHLPESTLLMLVSSFYNREAVLKAYQHAIDARYRFFSFGDAMFIY

SEQ ID NO: 64534 - protein, 353 aa, Butyricicoccus porcorum
  misc_feature (1)..(353): tr|A0A252F2Z1|A0A252F2Z1_9CLOT S-adenosylmethionine:tRN A ribosyltransferase-isomerase OS=Butyricicoccus porcor um OX=1945634 GN=queA PE=3 SV=1
MKTSDFYYDLPERLIAQTPLDHRDESRLLALCKDTGEIQHRHFYDLPDFLRPGDTLVLNNSRVIPARLLGVREDTGYPIELVLLTDKGDGVWECLTRPGKKCREGAKLSFGDGKLTATVEEILPDGGNRLIRFHYEGIFLEILEELGMMPLPPYIKEKLDDPERYQTVYSKTPGSAAAPTAGLHFTPELLEKIRAMGVNIACVTLHVGLGTFRPVKVDDVQDHVMHSEFYMMDEENAAIINNTRKNGGRVFAVGTTATRTLETIAAEDGSVRACSGWTNIFIYPGYRFKAIDCLVTNFHLPESTLMMLISAFAGRDMIMNAYQIAVEQEYRFFSFGDSMLIYTENAHREDTNV

SEQ ID NO: 64535 - protein, 342 aa, Butyricicoccus pullicaecorum
  misc_feature (1)..(342): tr|A0A1Y4LI87|A0A1Y4LI87_9CLOT S-adenosylmethionine:tRN A ribosyltransferase-isomerase OS=Butyricicoccus pullic aecorum OX=501571 GN=queA PE=3 SV=1
MKKSDFYFDLPERLIAQHPMEQRDASRMLVMDRKTGELSHRHFHDLIEYLKPGDCLVMNNSRVIPARLMGQAEGRTTPIEVVLLTDHGDGVWECLTRPGKKTREGVKLSFGDGLLTGVVESVNPKDGNRMIRFQYEGVFLELLEQLGTMPLPPYIKEKLDDPERYQTVYSKTPGSAAAPTAGLHFTPELLDEIRAKGVKTAFVTLHVGLGTFRPVKEEEITDHIMHSEFYTMDEETARIINETHAQGHDVFAVGTTACRTLETIAAEDGTVRAQSGWTDIFIYPGYRFKCIDHLVTNFHLPESTLMMLISAFAGRERVLDMYKTAVEQEYRFFSFGDSTLFL

SEQ ID NO: 64536 - protein, 342 aa, Butyricicoccus pullicaecorum; identical to SEQ ID NO: 64535
  misc_feature (1)..(342): tr|R8W480|R8W480_9CLOT S-adenosylmethionine:tRNA ribosy ltransferase-isomerase OS=Butyricicoccus pullicaecorum 1.2 OX=1203606 GN=queA PE=3 SV=1

SEQ ID NO: 64537 - protein, 341 aa, Butyricicoccus sp.
  misc_feature (1)..(341): tr|A0A417HX16|A0A417HX16_9CLOT S-adenosylmethionine:tRN A ribosyltransferase-isomerase OS=Butyricicoccus sp. AM 28-25 OX=2292294 GN=queA PE=3 SV=1
MKKSDFYFDLPERLIAQHPLEQRDASRLMVLDRRDGSVTHRHFRDLLEYVQPGDCMVFNNSRVIPARLMGHAVGHVTPIEVLLLTDKGDGLWECLTRPGKKTRTGVELTFGDGLLTATVEAVQPDGNRLIRFRYEGIFLEILDKLGTMPLPPYIKEKLDDPERYQTVYSKTPGSAAAPTAGLHFTTELLDALKAKGVKLAFVTLHVGLGTFRPVKEDEITDHIMHSEYYIMDEETAGIINDTRAAGGKIWAVGTTASRTLETIAADDGTVRAQSGWTDIFIYPGYKFKAVDHLVTNFHLPESTLMMLISAFATREMVMNAYQEAIKEEYRFFSFGDSMLLY

SEQ ID NO: 64538 - protein, 341 aa, Butyricicoccus sp.; identical to SEQ ID NO: 62979
  misc_feature (1)..(341): tr|A0A396N1L9|A0A396N1L9_9CLOT S-adenosylmethionine:tRN A ribosyltransferase-isomerase OS=Butyricicoccus sp. AF 15-40 OX=2292197 GN=queA PE=3 SV=1

SEQ ID NO: 64539 - protein, 419 aa, Butyricimonas faecalis
  misc_feature (1)..(419): tr|A0A3S9VZL3|A0A3S9VZL3_9BACT S-adenosylmethionine:tRN A ribosyltransferase-isomerase OS=Butyricimonas faecali s OX=2093856 GN=D8S85_08610 PE=3 SV=1
MTKKMAIENSRDMVEKLKEIRIEDYTYDLPDERIAKFPLENREASKLLIYEEGRIEERHFYEVPEILDAGKMLVFNNTKVIYARMLFQKVTGAVIEVFCLEPYRPSDYVQSFAAYGRCEWKCMVGNLKKWKEGTIFCHYRFEGKEYQLAATLKCREENDVIVEFTWDTPASFSEVLECCGRIPIPPYLNRESEEDDKIRYQTVYSKNEGSVAAPTAGLHFSIPVLKALREKGITIEELTLHVGAGTFRPVKSETIGGHDMHTEHISVRREVVEHLRAHPENIVAVGTTSVRTLESLYWMGVKRILGDENFNSLGQWEAYDLPSGYSLKESMTALLGWFDERDAELLKAKTTIIIVPGYSYRVITAMFTNFHQPQSTLLLLVAAAIGDDWHKVYDYALAHDFRFLSYGDSSLLKVRKDKK

SEQ ID NO: 64540 - protein, 349 aa, Butyricimonas faecalis
  misc_feature (1)..(349): tr|A0A3S9VX12|A0A3S9VX12_9BACT S-adenosylmethionine:tRN A ribosyltransferase-isomerase OS=Butyricimonas faecali s OX=2093856 GN=queA PE=3 SV=1
MKLSKFKYKLPPELIALHPTPNRDEARLMVLDRKTGKIEHKIFKDVIDYFDEKDVFVFNDSKVFPARLYGNKEKTGAEIEVFLLRELNPELRIWDVLVDPARKIRIGNKLYFGEDDSMVAEVIDNTTSRGRTLRFLFDGEYDEFKKELYALGETPLPRFINRKVEPEDAENYQTIFAKHEGAVAAPTAGMHFSRELMKRMEIKGIDFAYITLHVGLGNFREVDVEDLTKHKMDSEQIFVTPETVKIVNDAKDEKHKICAVGTTVVRTLESCVTTKGRLTEFEGWTNKFIFPPYDFSVPDAFISNFHLPYSTLLMMVAAFGGYEHVMEAYNQAVKEKYRFGTYGDAMLII

SEQ ID NO: 64541 - protein, 419 aa, Butyricimonas sp.
  misc_feature (1)..(419): tr|A0A3D2DTN0|A0A3D2DTN0_9BACT S-adenosylmethionine:tRN A ribosyltransferase-isomerase OS=Butyricimonas sp. OX= 1969738 GN=DFK15_04165 PE=3 SV=1
MTKKIAIENSRDMVERLKEIRIEDYIYDLPDERIAKFPLENREASKLLIYDEGRIDERHFYEVPEILDAGKMLVFNNTKVIYARILFQKVTGAMIEVFCLEPYRPSDYVQSFAAYGKCEWKCMVGNLKKWKEGTIYCHYQFEGKEYQLAATLKFREENDVIVEFTWDASASFSEVLECCGRIPIPPYLNRESEEKDKIRYQTVYSKNEGSVAAPTAGLHFSIPVLKALREKGITIEELTLHVGAGTFRPVKSETIGGHDMHTEHISVRREVVEHLCTHPENIIAVGTTSVRTLESLYWMGVKRILGDEDFSSLGQWEAYDLPSGYSLKESMTALLGWFDEQDAELLKAKTTIIIVPGYSYRVITAMFTNFHQPQSTLLLLVAAAIGEDWHNVYDYALAHDFRFLSYGDSSLLKVRKDKK

SEQ ID NO: 64542 - protein, 349 aa, Butyricimonas sp.
  misc_feature (1)..(349): tr|A0A3D2DT98|A0A3D2DT98_9BACT S-adenosylmethionine:tRN A ribosyltransferase-isomerase OS=Butyricimonas sp. OX= 1969738 GN=queA PE=3 SV=1
MKLSKFKYKLPPELIALHPTPNRDEARLMVLDRKAGKIEHKVFKDVIDYFDEKDVFVFNDSKVFPARLYGNKEKTGAEIEVFLLRELNPELRIWDVLVDPARKIRIGNKLYFGEDDSMVAEVIDNTTSRGRTLRFLFDGEYDEFKKELYALGETPLPRFINRKVEPEDAENYQTIFARHEGAVAAPTAGMHFSRELMKRMEIKGIDFAYITLHVGLGNFREVDVEDLTKHKMDSEQIFVTPETVKIVNDAKDEKHKICAVGTTVVRTLESCVTTKGRLTEFEGWTNKFIFPPYDFSVPDAFISNFHLPYSTLLMMVAAFGGYEHVMEAYNQAVKEKYRFGTYGDAMLII

SEQ ID NO: 64543 - protein, 407 aa, Butyricimonas synergistica
  misc_feature (1)..(407): tr|A0A1U7L9V7|A0A1U7L9V7_9BACT S-adenosylmethionine:tRN A ribosyltransferase-isomerase OS=Butyricimonas synergi stica OX=544644 GN=BHV81_11850 PE=3 SV=1
MVEKLKEIRIEDYTYDLPDERIAKFPLENREASKLLIYDEGRIDERHFYEVPEILDAGKMLVFNNTKVIYARILFQKVTGAMIEVFCLEPYRPSDYVQSFAAYGKCEWKCMVGNLKKWKEGTIFCHYRFEGKEYQLAATRKLREENDVIVEFTWDAPASFSEVLECCGRIPIPPYLNRESEEDDKIRYQTVYSKNEGSVAAPTAGLHFSVPVLKALREKGITIEELTLHVGAGTFRPVKSETIGGHDMHTEHISVRREVVEHLCTHPENIIAVGTTSVRTLESLYWMGVKRILGDEDFSSLGQWEAYDLPSGYSLKESMTALLGWFDERDVELLKAKTTIIIVPGYSYRVITAMFTNFHQPQSTLLLLVAAAIGEDWHKVYDYALAHDFRFLSYGDSSLLKVRKDKK

SEQ ID NO: 64544 - protein, 349 aa, Butyricimonas synergistica
  misc_feature (1)..(349): tr|A0A1U7L8C7|A0A1U7L8C7_9BACT S-adenosylmethionine:tRN A ribosyltransferase-isomerase OS=Butyricimonas synergi stica OX=544644 GN=queA PE=3 SV=1
MKLSKFKYKLPPELIALHPTPNRDEARLMVLDRKTGKIEHKVFKDVIDYFDEKDVFVFNDSKVFPARLYGNKEKTGAEIEVFLLRELNPELRIWDVLVDPARKIRIGNKLYFGEDDSMVAEVIDNTTSRGRTLRFLFDGEYDEFKKELYALGETPLPRFINRKVEPEDAENYQTIFARHEGAVAAPTAGMHFSRELMKRMEIKGIDFAYITLHVGLGNFREVDVEDLTKHKMDSEQIFVTPETVKIVNDAKDEKHKICAVGTTVVRTLESCVTTKGRLTEFEGWTNKFIFPPYDFSVPDAFISNFHLPYSTLLMMVAAFGGYEHVMEAYNQAVKEKYRFGTYGDAMLII

SEQ ID NO: 64545 - protein, 419 aa, Butyricimonas virosa
  misc_feature (1)..(419): tr|A0A412X4D8|A0A412X4D8_9BACT S-adenosylmethionine:tRN A ribosyltransferase-isomerase OS=Butyricimonas virosa OX=544645 GN=DWW18_05330 PE=3 SV=1
MTKKIAIENSRDMVEKLKEIRIEDYIYDLPDERIAKFPLENREASKLLIYDEGRIDERHFYEVPEILDAGKMLVFNNTKVIYARILFQKVTGAMIEVFCLEPYRPSDYVQSFAAYGKCEWKCMVGNLKKWKEGTIYCHYQFEGKEYQLAATLKFREENDVIVEFTWDASASFSEVLECCGRIPIPPYLNRESEEKDKIRYQTVYSKNEGSVAAPTAGLHFSIPVLKALREKGITIEELTLHVGAGTFRPVKSETIGGHDMHTEHISVRREVVEHLCTHPENIIAVGTTSVRTLESLYWMGVKRILGDEDFSSLGQWEAYDLPSGYSLKESMTALLGWFDEQDAELLKAKTTIIIVPGYSYRVITAMFTNFHQPQSTLLLLVAAAIGEDWHKVYDYALTHDFRFLSYGDSSLLKVRKDKK

SEQ ID NO: 64546 - protein, 349 aa, Butyricimonas virosa; identical to SEQ ID NO: 64544
  misc_feature (1)..(349): tr|A0A413IU22|A0A413IU22_9BACT S-adenosylmethionine:tRN A ribosyltransferase-isomerase OS=Butyricimonas virosa OX=544645 GN=queA PE=3 SV=1

SEQ ID NO: 64547 - protein, 341 aa, Butyrivibrio crossotus
  misc_feature (1)..(341): tr|R5LJN7|R5LJN7_9FIRM S-adenosylmethionine:tRNA ribosy ltransferase-isomerase OS=Butyrivibrio crossotus CAG:25 9 OX=1263062 GN=queA PE=3 SV=1
MDLKDFNYDLPEELIAQDPLEDRSSSRLMVLHKDTGRIEHKIFRDIIDYLNPGDCLVINDTKVIPARLMGIKEDTGATIEVLLLKRNADDVWECLVKPGKKARTGARIVFGEGLLVGEIVDVIEDGNRMIKFHYEGIFEEILDKLGQMPLPPYITHKLQDKNRYQTVYARNEGSAAAPTAGLHFTKELLEKIKEKGVNVVSITLHVGLGTFRPVKVDKIEEHHMHTETFNISKEAADTINRARAAGGRVIAVGTTSCRTLESAAADDGTIPARSGDTDIFIYPGYKFKAIDCLITNFHLPESTLIMLVSALAGRDNIMNAYETAVKERYRFFSFGDAMFIC

SEQ ID NO: 64548 - protein, 341 aa, Butyrivibrio crossotus
  misc_feature (1)..(341): tr|D4S0Q3|D4S0Q3_9FIRM S-adenosylmethionine:tRNA ribosy ltransferase-isomerase OS=Butyrivibrio crossotus DSM 28 76 OX=511680 GN=queA PE=3 SV=1
MDLKAFNYDLPEELIAQDPLEDRSSSRLMVLHKDTGRIEHKIFRDIIDYLNPGDCLVINDTKVIPARLMGIKEDTGAAIEVLLLKRNADDVWECLVKPGKKARTGARIVFGEGLLVGEIVDVIEDGNRMIKFHYEGIFEEILDKLGQMPLPPYITHKLQDKNRYQTVYAKNEGSAAAPTAGLHFTKELLEKIKEKGVNVVSITLHVGLGTFRPVKVDKIEEHHMHTETFNISKEAADTINRTRAAGGRVIAVGTTSCRTLESAAADDGTIPARSGDTDIFIYPGYKFKAIDCLITNFHLPESTLIMLVSALAGRDNIMNAYETAVKERYRFFSFGDAMFIC

SEQ ID NO: 64549 - protein, 345 aa, Butyrivibrio fibrisolvens
  misc_feature (1)..(345): tr|D4J2D2|D4J2D2_BUTFI S-adenosylmethionine:tRNA ribosy ltransferase-isomerase OS=Butyrivibrio fibrisolvens 16/ 4 OX=657324 GN=queA PE=3 SV=1
MLVKDFDYELPEELIAQDPLEKRSNSRLMVLDKHTGEIAHRHFYDIKEYLRPGDCLVINNTRVIPARLYGARVGSGGKVEILLLKRISDNQWECLVKPGKKARPGMEISFGDGLLIGKIVDIVDEGNRIIEFTYEGIFEEILDKLGEMPLPPYITHKLQDRDRYQTVYAKFDGSAAAPTAGLHFTPELLEEVKAMGVRIAEVTLHVGLGTFRPVKEDEVLDHHMHSEYYEITQEACDIINETKANGGRVISVGTTSTRTLESAAEAGKPLSPKSGWTQIFIYPGYEFKVIDCLITNFHLPQSTLIMLVSALAGREHVLAAYKKAVEEKYRFFSFGDAMMITDLEQ

SEQ ID NO: 64550 - protein, 349 aa, Butyrivibrio fibrisolvens
  misc_feature (1)..(349): tr|A0A317G5T0|A0A317G5T0_BUTFI S-adenosylmethionine:tRN A ribosyltransferase-isomerase OS=Butyrivibrio fibrisol vens OX=831 GN=queA PE=3 SV=1
MLGLRTSDYYFDLPQELIAQDPLEDRAASKLLVMDKKTGEIQHHVFKDIIDYLEPGDCLVLNNTKVIPARLLGTKEETGAAIEILLLKRRENDVWETLVKPGKKMRPGARVTFGDGRLKAEVLEVIEDGNRLVKFYYDGIWEEVLDSLGEMPLPPYITHKLQDKNMYQTVYAKFDGSAAAPTAGLHFTSELLDAIEKKGIDLAYVTLHVGLGTFRPVKVDNVLEHHMHTEWYQVTQEAADKINKAKESGHRVICVGTTSCRTIESAADENGHLKECSDNTSIFIYPGYKFKVLDCLITNFHLPESTLVMLVSALAGRDHVLNAYNEAIKLKYRFFSFGDACFFTDKMPK

SEQ ID NO: 64551 - protein, 346 aa, Butyrivibrio hungatei
  misc_feature (1)..(346): tr|A0A1M7SAK6|A0A1M7SAK6_9FIRM S-adenosylmethionine:tRN A ribosyltransferase-isomerase OS=Butyrivibrio hungatei DSM 14810 OX=1121132 GN=queA PE=3 SV=1
MSELGLSTSDYYFDLPEELIAQDPMEKRDECRLLVVDKNTGELEHHKFNEIINYLEPGDCLVLNNTKVIPARLLGEKEGTGAAVEILLLRRKEADVWETLVKPGKKLRPGARVSFGGGILKAEILDIVEEGNRLVKFYYDGIWEEVLDKLGEMPLPPYITHKLQDKNMYQTVYAKFEGSAAAPTAGLHFTEKLLEDIKAKGVDMAFVTLHVGLGTFRPVKVDNVKEHHMHTEWYQVTQEAADKINKAKAEGHRVICVGTTSCRTIESAADENGHLSECSGDTSIFIYPGYKFKVLDQLITNFHLPESTLVMLVSALAGREHVLNAYEEAIKERYRFFSFGDACFFK

SEQ ID NO: 64552 - protein, 353 aa, Butyrivibrio hungatei
  misc_feature (1)..(353): tr|A0A1G5BWS6|A0A1G5BWS6_9FIRM S-adenosylmethionine:tRN A ribosyltransferase-isomerase OS=Butyrivibrio hungatei OX=185008 GN=queA PE=3 SV=1
MSETTQIGLSTADYFFDLPQELIAQDPLEKRDECRLLVIDKETGKTKHKIFSDIIDYLEPGDCLVLNNTKVIPARLLGEKEGTGAAVEILLLKRKENDIWETLVKPGKKLRPGARVSFGGGILTAEILDIVEDGNRLVKFYYEGIWEEVLDRLGEMPLPPYITHKLKDKNMYQTIYAKYEGSAAAPTAGLHFTDELLKRISDKGVDMAFVTLHVGLGTFRPVKVTNVKEHHMHTEWYQVTAEAAEKINRAKENGHRVICVGTTSCRTIESAADENGRLSECSGDTSIFIYPGYKFKVLDCLITNFHLPESTLVMLVAALAGRENILAAYEEAIKEKYRFFSFGDACFITDRME

SEQ ID NO: 64553 - protein, 349 aa, Butyrivibrio proteoclasticus
  misc_feature (1)..(349): tr|E0S201|E0S201_BUTPB S-adenosylmethionine:tRNA ribosy ltransferase-isomerase OS=Butyrivibrio proteoclasticus (strain ATCC 51982 / DSM 14932 / B316) OX=515622 GN=que A PE=3 SV=1
MSENREIGLSTADYYFDLPQELIAQDPMEKRDECKLLVMDKETGNVEHHVFNEVINYLQPGDCLVLNNTKVIPARLLGVKEETGAAVEILLLKRKEADVWETLVKPGKKLRPGAKVSFGDGILKAEIMDIVDEGNRLVKFYYDGIWEEVLDRLGEMPLPPYITHKLQDKNMYQTVYAKYEGSAAAPTAGLHFTDELLDKIREKGVDIAFVTLHVGLGTFRPVKVTNVKEHHMHTEWYQVTQEAADKINKAKESGHRVICVGTTSCRTIESAAGEDGTLSAASGDTSIFIYPGYKFKLMDGLITNFHLPESTLVMLVSAFAGREHVLNAYETAIKEKYRFFSFGDACLFI

SEQ ID NO: 64554 - protein, 349 aa, Butyrivibrio proteoclasticus
  misc_feature (1)..(349): tr|A0A1I5R042|A0A1I5R042_9FIRM S-adenosylmethionine:tRN A ribosyltransferase-isomerase OS=Butyrivibrio proteocl asticus OX=43305 GN=queA PE=3 SV=1
MAENKELGLSTSDYYFDLPEELIAQDPMEKRDECRLLVVDKETGETEHHKFNEIINYLEPGDCLVLNNTKVIPARLLGEKEGTGAAVEILLLKRKEADVWETLVKPGKKLRPGARVSFGGGILKAEILDIVDEGNRLVKFYYDGIWEEVLDRLGEMPLPPYITHKLQDKSMYQTVYAKYEGSAAAPTAGLHFTEKLLEDIKAKGVDMAFVTLHVGLGTFRPVKVDNVLEHHMHTEWYQVTQEAADKINKAKENGHRIICVGTTSCRTIESAADENGHLTACSGDTSIFIYPGYKFKVLDQLITNFHLPESTLVMLVSALAGREHVLAAYEEAIKERYRFFSFGDACFFK

SEQ ID NO: 64555 - protein, 359 aa, Butyrivibrio sp.
  misc_feature (1)..(359): tr|A0A1G6BLF4|A0A1G6BLF4_9FIRM S-adenosylmethionine:tRN A ribosyltransferase-isomerase OS=Butyrivibrio sp. INll a16 OX=1520807 GN=queA PE=3 SV=1
MTITNKGANDPNLGLRTSDYYFDLPEELIAQDPLPARDDAKLLVMNKKTGNIEHKIFHDIIDYLKPGDCLVLNDTKVIPARLLGTKKDTGAAVEILLLKRRENDIWETLVKPGKKLRPGAEVTFGEGLLNAKILDIVEEGNRLVQFSYEGIFEEVLDKLGEMPLPPYITHKLQDKNMYQTVYAKYEGSAAAPTAGLHFTNDLLKKIQDKGIDLAYVTLHVGLGTFRPVKVTNVLEHHMHTEWYQVNAEAAEKINKAKESGHRVICVGTTSCRTIESAADENGHIEPCADNTSIFIYPGYNFKVTDCLITNFHLPESTLVMLVSALAGRENVLNAYEEAISKRYRFFSFGDACFFTDDEI

SEQ ID NO: 64556 - protein, 349 aa, Butyrivibrio sp.
  misc_feature (1)..(349): tr|A0A1H5W8J5|A0A1H5W8J5_9FIRM S-adenosylmethionine:tRN A ribosyltransferase-isomerase OS=Butyrivibrio sp. Su6 OX=1520810 GN=queA PE=3 SV=1
MAENKELGLSTSDYYFDLPEELIAQDPMEKRDECRLLVVDKKTGETEHHKFNEIINYLEPGDCLVLNNTKVIPARLLGEKEGTGAAVEILLLKRKEADVWETLVKPGKKLRPGARVSFGGGILKAEILDIVDEGNRLVKFYYDGIWEEVLDRLGEMPLPPYITHKLQDKNMYQTVYAKYEGSAAAPTAGLHFTEKLLEDIKAKGVDMAFVTLHVGLGTFRPVKVDNVLEHHMHTEWYQVTQEAADKINKAKENGHRVICVGTTSCRTIESAADENGHLSACSGDTSIFIYPGYKFKVLDQLITNFHLPESTLVMLVSALAGREHVLAAYEEAIKERYRFFSFGDACFFK

SEQ ID NO: 64557 - protein, 354 aa, Bythopirellula goksoyri
  misc_feature (1)..(354): tr|A0A5B9Q6F5|A0A5B9Q6F5_9PLAN S-adenosylmethionine:tRN A ribosyltransferase-isomerase OS=Bythopirellula goksoy ri OX=1400387 GN=queA PE=3 SV=1
MEPWIDYELPADLIAQQPLAHRADARLMVLDRSTDSIDHYHIRDLANLLHSGDRLVLNDTKVIPAQLRGIRDSTGGRWQGLYLGANSNGDWRIVCKTRGHLHPPEQIKLVDRDGRTRATLWLLEQIEEGQWLARPTEDRPTLELLEEFGHVPLPPYIRKGNMVDSDIADYQTVFARNPGAVAAPTAGLHFTPDLLRALEQSGVELSAVTLHVGLGTFRPITVDDPLQHPMHAEWGELNTVAAQELTTTRAEGGRIIAVGTTVTRVLESVVAAQKLDRQKTSSIGPWQGETDLFIHPPYEFQLVDALLTNFHFPRTTLLLLVQALGGTELVRRAYEEAIREEYRFYSYGDAMLIV

SEQ ID NO: 64558 - protein, 349 aa, Caballeronia arationis
  misc_feature (1)..(349): tr|A0A158A1X0|A0A158A1X0_9BURK S-adenosylmethionine:tRN A ribosyltransferase-isomerase OS=Caballeronia arationi s OX=1777142 GN=queA PE=3 SV=1
MFTLSDFDFNLPPELIAQTALTERSASRLLEVDNRTTPAAFTDRQFAELPNLIEPGDLLVFNDTKVLKARFLGKKASGGRIEVLVERLTGPTTALAQIRASKSPAPGTVLTLADAFDVTVGERVEPFYTLHFPTDCLTLIEQYGRLPLPPYIEHDPDAVDETRYQTVYAANPGAVAAPTAGLHFDDALFARLDARGVERATLTLHVGAGTFQPVRVEKIDEHKMHSEWYQLPQSLVDRIAAVKARGNRVIAVGTTSMRALEAAARDAANENRPLAAAVAETDIFITPGYEFRVVDRLVTNFHLPKSTLLMLVSAFAGMDTIRDAYRHAIEQRYRFFSYGDAMLLTRRPR

SEQ ID NO: 64559 - protein, 348 aa, Caballeronia arvi
  misc_feature (1)..(348): tr|A0A158J6V7|A0A158J6V7_9BURK S-adenosylmethionine:tRN A ribosyltransferase-isomerase OS=Caballeronia arvi OX= 1777135 GN=queA PE=3 SV=1
MFTLSDFDFNLPPELIAQSALAERSASRLLEVSNDMTQTRLIDRRFSELPNLIDAGDLLVFNDTKVLKARFLGKKASGGRVEVLVERLAGATTALAQIRASKSPAEGSTIRLADAFDVTVGERVEPFYTLHFPAECLTLIEQYGRLPLPPYIEHDADAYDETRYQTVYAANPGAVAAPTAGLHFDDALFAELDAKGVERATLTLHVGAGTFQPVRVENIAEHKMHSEWYDLPQSLVDRIAAVKARGNKVIAVGTTSMRALEAAARDAADAGKPLAGSQAETDIFITPGYEFRVVDRLVTNFHLPKSTLLMLVSAFAGMDTIRDAYRHAIKQRYRFFSYGDAMLLTRKN

SEQ ID NO: 64560 - protein, 348 aa, Caballeronia calidae
  misc_feature (1)..(348): tr|A0A158B4W7|A0A158B4W7_9BURK S-adenosylmethionine:tRN A ribosyltransferase-isomerase OS=Caballeronia calidae OX=1777139 GN=queA PE=3 SV=1
MFTLSDFDFNLPPELIAQSALAERSASRLLEVDNGTTPAALVDRRFSELPDLIESGDLLVFNDTKVLKARFLGQKASGGRVEVLVERLTGATTALAQIRASKSPTQGSTIRLADAFDVTVGERVEPFYTLHFPAECLTLIEQHGRLPLPPYIEHDADAYDETRYQTVYAANPGAVAAPTAGLHFDDALFAELDARGVERATLTLHVGAGTFQPVRVENIAEHKMHSEWYDLPQSLVDRIAAVKARGNKVIAVGTTSMRALEAAARDAAVAGRPLAATQAETDIFITPGYEFRVVDRLVTNFHLPKSTLLMLVSAFAGMETIRAAYRHAIDERYRFFSYGDAMLLTRQK

SEQ ID NO: 64561 - protein, 348 aa, Caballeronia catudaia
  misc_feature (1)..(348): tr|A0A158A7E5|A0A158A7E5_9BURK S-adenosylmethionine:tRN A ribosyltransferase-isomerase OS=Caballeronia catudaia OX=1777136 GN=queA PE=3 SV=1
MFTLSDFDFNLPPELIAQSALTERSASRLLEVSGGMPQTRLTDRRFSELPNLIGAGDLLVFNDTKVLKARFLGQKASGGRVEVLVERLTGATTALAQIRASKSPAEGSTIRLADAFDVIVGERVEPFYTLHFPAECLTLIEQYGRLPLPPYIEHDADAYDETRYQTVYAANPGAVAAPTAGLHFDDALFAELDARGVERATLTLHVGAGTFQPVRVENIAEHKMHSEWYDLPQALVDRIAAVRARGNKVIAVGTTSMRALEAAARDAASAGKALAGSQAETDIFITPGYEFRVVDRLVTNFHLPKSTLLMLVSAFAGMETIRDAYRHAIEQRYRFFSYGDAMLLTRKN

SEQ ID NO: 64562 - protein, 351 aa, Caballeronia choica
  misc_feature (1)..(351): tr|A0A158KFP4|A0A158KFP4_9BURK S-adenosylmethionine:tRN A ribosyltransferase-isomerase OS=Caballeronia choica O X=326476 GN=queA PE=3 SV=1
MFTLSDFDFNLPPELIAQTALAERSASRLLEVDHRTTPATLTDRQFAELPDLIDAGDLLVFNDTKVLKARFLGQKASGGRIEVLIERLTGATTALAQIRASKSPAPGTVLTLADAFDVTVGERVEPFYTLHFPADCLTLIEQYGRLPLPPYIEHDPDAFDETRYQTVYAANPGAVAAPTAGLHFDAKLFERLDARGVERATLTLHVGAGTFQPVRVEKIAEHKMHSEWYELPQALVDKIAATKARGNRVIAVGTTSMRALEAAARDAANAGRPLAAANAETDIFITPGYAFRVVDRLVTNFHLPKSTLLMLVSAFAGMETIREAYRHAIDERYRFFSYGDAMLLTRQAPGQ

SEQ ID NO: 64563 - protein, 347 aa, Caballeronia cordobensis
  misc_feature (1)..(347): tr|A0A158EQY1|A0A158EQY1_9BURK S-adenosylmethionine:tRN A ribosyltransferase-isomerase OS=Caballeronia cordoben sis OX=1353886 GN=queA PE=3 SV=1
MFTLSDFDFNLPPELIAQSALAERSASRLLDVSGGPTTTRLVDRRFSELPNLVDAGDLLVFNDTKVLKARFFGQKASGGRVEVLVERLTGATTALAQIRASKSPAEGGTIRLADAFDVTVGERVEPFYTLHFPAECLTLIEQYGRLPLPPYIEHDADAYDETRYQTVYAANPGAVAAPTAGLHFDDALFAELDARGVERATLTLHVGAGTFQPVRVENIAEHKMHSEWYDLPQSLAERIAAVKARGNKVIAVGTTSMRALEAAARDAAQAGKPLAATQAETDIFITPGYEFRVVDRLVTNFHLPKSTLLMLVSAFAGMETIRDAYKHAIEQRYRFFSYGDAMLLTRA

SEQ ID NO: 64564 - protein, 343 aa, Caballeronia fortuita
  misc_feature (1)..(343): tr|A0A157ZFS3|A0A157ZFS3_9BURK S-adenosylmethionine:tRN A ribosyltransferase-isomerase OS=Caballeronia fortuita OX=1777138 GN=queA PE=3 SV=1
MFTLSDFDFNLPPELIAQSALAERSASRLLDVSGGKLVDRRFSELPGLLDAGDLLVFNDTKVLKARFLGQKASGGRVEVLVERLTGATTALAQIRASKSPAEGTTIRLADAFDVTVGERVEPFYTLHFPAECLTLIEQYGRLPLPPYIEHDADAYDETRYQTVYAANPGAVAAPTAGLHFDDALFAELEKRGIERATLTLHVGAGTFQPVRVENIAEHKMHSEWYDLPQSLVDRIAAVKARGNKVIAVGTTSMRALEAAARDAAQANRPLSATQAETDIFITPGYEFRVVDRLVTNFHLPKSTLMMLVSAFAGMETIRDAYRHAIEQKYRFFSYGDAMLLTRA

SEQ ID NO: 64565 - protein, 351 aa, Caballeronia glathei
  misc_feature (1)..(351): tr|A0A069PW37|A0A069PW37_9BURK S-adenosylmethionine:tRN A ribosyltransferase-isomerase OS=Caballeronia glathei OX=60547 GN=queA PE=3 SV=1
MFTLSDFDFNLPPELIAQTALAERSASRLLEVDNRTSPATLTDRRFSELPGLIDAGDLLVFNDTKVLKARFLGKKASGGRIEVLIERITGATTALAQIRASKSPAPGTTLTLADAFDVTVGERVEPFFTLHFPADCLTLIERYGRLPLPPYIEHDPDAVDETRYQTVYAANPGAVAAPTAGLHFDDALFAALDERGVARATLTLHVGAGTFQPVRVENIAEHRMHSEWYELPQTLVDRIAATKARGNRVIAVGTTSMRALEAAARDAAVANRPLAAAAAETDIFITPGYEFRVVDRLITNFHLPKSTLLMLVSAFAGVETIREAYRHAIEARYRFFSYGDAMLLTRQSTGI

SEQ ID NO: 64566 - protein, 348 aa, Caballeronia glebae
  misc_feature (1)..(348): tr|A0A157ZAW9|A0A157ZAW9_9BURK S-adenosylmethionine:tRN A ribosyltransferase-isomerase OS=Caballeronia glebae O X=1777143 GN=queA PE=3 SV=1
MFTLSDFDFNLPPELIAQSALAERSASRLLDVDNRTAPATLTDRRFSELPDLLAPGDLLVFNDTKVLKARFFGQKASGGRVEVLVERLTGATTALAQIRASKGPTEGSTIRLADAFDVTVGERVEPFYTLHFPAECLTLIEQHGRLPLPPYIEHDADAYDETRYQTVYAANPGAVAAPTAGLHFDDALFAELEKRGVERATLTLHVGAGTFQPVRVENIAEHKMHSEWYDLPQSLVDRIAAVKARGNKVIAVGTTSMRALEAAARDAAQAGRPLSATQAETDIFITPGYAFRVVDRLVTNFHLPKSTLLMLVSAFAGMDTIRDAYRHAIEEKYRFFSYGDAMLLTRRD

SEQ ID NO: 64567 - protein, 348 aa, Caballeronia grimmiae
  misc_feature (1)..(348): tr|A0A069P6P0|A0A069P6P0_9BURK S-adenosylmethionine:tRN A ribosyltransferase-isomerase OS=Caballeronia grimmiae OX=1071679 GN=queA PE=3 SV=1
MFTLSDFDFNLPPELIAQSALAERSASRLLEVDNRSTPATLTDRRFSELPDLVEPGDLLVFNDTKVLKARFFGQKASGGRVEVLVERLTGATTALAQIRASKSPAAGSTIRLADAFDVTVGERVEPFYTLHFPADCLTLIEQYGRLPLPPYIEHDADAYDETRYQTVYAANPGAVAAPTAGLHFDDALFARLDARGVERATLTLHVGAGTFQPVRVENVTEHKMHSEWYALPQTLVDRIAAVKARGNRVIAVGTTSMRALEAAARDAAAAGRPLSATSAETDIFITPGYEFRVVDRLVTNFHLPKSTLMMLVSAFAGMDTIRDAYRHAIEQRYRFFSYGDAMLLTRSA

SEQ ID NO: 64568 - protein, 349 aa, Caballeronia humi
  misc_feature (1)..(349): tr|A0A158EXI9|A0A158EXI9_9BURK S-adenosylmethionine:tRN A ribosyltransferase-isomerase OS=Caballeronia humi OX= 326474 GN=queA PE=3 SV=1
MFTLSDFDFNLPPELIAQTALAERSASRLLEVDNRTSPATLTDRQFAELPNLIDSGDLLVFNDTKVLKARFLGQKASGGRIEVLVERLTGPTTALAQIRASKSPAPGTVLKLADAFDVTVGERVEPFYTLHFPADCLTLIEQYGRLPLPPYIEHDPDVYDETRYQTVYAANPGAVAAPTAGLHFDDALFAKLDARGIERATLTLHVGAGTFQPVRVEKIDEHKMHSEWYALPQSLVDKIAATKARGNRVIAVGTTSMRALEAAARDAANAGRPLAAASAETDIFITPGYEFRVVDRLVTNFHLPKSTLLMLVSAFAGMETIREAYRHAIDQRYRFFSYGDAMLLTRQAR

SEQ ID NO: 64569 - protein, 344 aa, Caballeronia hypogeia
  misc_feature (1)..(344): tr|A0A157Z249|A0A157Z249_9BURK S-adenosylmethionine:tRN A ribosyltransferase-isomerase OS=Caballeronia hypogeia OX=1777140 GN=queA PE=3 SV=1
MFTLSDFDFNLPPELIAQSALAERSASRLLDVSGTTFIDRRFSELPGLLDAGDLLVFNDTKVLKARFFGQKASGGRVEVLVERLTGATTALAQIRASKSPVGGTTIRLADAFDVTVGERVEPFYTLHFPAECLTLIEQYGRLPLPPYIEHDADAYDETRYQTVYAANPGAVAAPTAGLHFDDALFAALDAKGVERATLTLHVGAGTFQPVRVENIAEHKMHSEWYDLPQSLVDRIAAVKARGNKVIAVGTTSMRALEAAARDAAEAGRPLSATQAETDIFITPGYEFRVVDRLVTNFHLPKSTLMMLVSAFAGMDTIRDAYRHAIKQRYRFFSYGDAMLLTRKS

SEQ ID NO: 64570 - protein, 348 aa, Caballeronia jiangsuensis
  misc_feature (1)..(348): tr|A0A038H726|A0A038H726_9BURK S-adenosylmethionine:tRN A ribosyltransferase-isomerase OS=Caballeronia jiangsue nsis OX=1458357 GN=queA PE=3 SV=1
MFTLSDFDFNLPPELIAQSALAERSASRLLEVDNRATPATLIDRRFSELPDLIAPGDLLVFNDTKVLKARFFGQKASGGRVEVLVERLTGATTALAQIRASKSPGEGTTIRLADAFDVTVGERVEPFYTLHFPAECLTLIEQYGRLPLPPYIEHDADAYDETRYQTVYAANPGAVAAPTAGLHFDDALFAELDARGVERATLTLHVGAGTFQPVRVENIAEHKMHSEWYDLPQSLVDRIAAVKARGNSVIAVGTTSMRALEAAARDAANAGRPLAATQAETDIFITPGYGFRVVDRLVTNFHLPKSTLLMLVSAFAGMETIRDAYRHAIEEKYRFFSYGDAMLLTRRD

SEQ ID NO: 64571 - protein, 348 aa, Caballeronia megalochromosomata
  misc_feature (1)..(348): tr|A0A149PZY4|A0A149PZY4_9BURK S-adenosylmethionine:tRN A ribosyltransferase-isomerase OS=Caballeronia megaloch romosomata OX=1399969 GN=queA PE=3 SV=1
MFTLSDFDFNLPPELIAQSALAERSASRLLEVDNRTTPATLIDRRFSELPGLIASGDLLVFNDTKVLKARFFGQKASGGRVEVLVERLTGATTALAQIRASKSPVEGSTIRLADAFDVTVGERVEPFYTLHFPAECLTLIEQYGRLPLPPYIEHDANAYDETRYQTVYAANPGAVAAPTAGLHFDDALFAELDARGVERATLTLHVGAGTFQPVRVENIAEHKMHSEWYDLPQSLADRIAAVKARGNKVIAVGTTSMRALEAAARDAADAGRPLAATQAETDIFITPGYAFRVVDRLVTNFHLPKSTLLMLVSAFAGMDAIREAYRHAIEQRYRFFSYGDAMLLTRRD

SEQ ID NO: 64572 - protein, 350 aa, Caballeronia mineralivorans
  misc_feature (1)..(350): tr|A0A0J1CPS3|A0A0J1CPS3_9BURK S-adenosylmethionine:tRN A ribosyltransferase-isomerase OS=Caballeronia minerali vorans PML1(12) OX=908627 GN=queA PE=3 SV=1
MFTLSDFDFNLPPELIAQTALTERSASRLLDVNNRAATASFTDRHFTELPSLLEPGDLLVFNDTKVLKARFLGQKASGGRIEVLVERLTGATTALAQIRASKSPLPGTKLVLAEAFEVTVGERVEPFYTLHFPADCLTLIEQYGRLPLPPYIEHDPDAFDETRYQTVYAANPGAVAAPTAGLHFDPALFAALDARGVERATLTLHVGAGTFQPVRVENLAEHRMHSEWYRLPQTLADKIVATKARGNRVIAVGTTSLRALEAAARDAAKAGRPLSETSAETDIFITPGYEFRVVDRLVTNFHLPKSTLMMLVSAFAGMDAIRAAYAHAIEERYRFFSYGDAMLLTRQAAA

SEQ ID NO: 64573 - protein, 348 aa, Caballeronia pedi
  misc_feature (1)..(348): tr|A0A157Z4S2|A0A157Z4S2_9BURK S-adenosylmethionine:tRN A ribosyltransferase-isomerase OS=Caballeronia pedi OX= 1777141 GN=queA PE=3 SV=1
MFTLSDFDFNLPPELIAQSALTERSASRLLEVDNRATPATFVDRRFAELPGLIAPGDLLVFNDTKVLKARFLGQKASGGRVEVLVERLTGATTALAQIRASKSPAEGSTIRLADAFDVTVGARVEPFYTLHFPAECLTLIEQYGRLPLPPYIEHDADAYDETRYQTVYAANPGAVAAPTAGLHFDDALFAELDARGVERATLTLHVGAGTFQPVRVENIAEHKMHSEWYELPQSLVDRIAAVKARGNKVIAVGTTSMRALEAAARDAADAGRALAATQAETDIFITPGYAFRVVDRLVTNFHLPKSTLLMLVSAFAGMDTIREAYRHAIEQRYRFFSYGDAMLLTRRD

SEQ ID NO: 64574 - protein, 348 aa, Caballeronia peredens
  misc_feature (1)..(348): tr|A0A158G9P8|A0A158G9P8_9BURK S-adenosylmethionine:tRN A ribosyltransferase-isomerase OS=Caballeronia peredens OX=1777132 GN=queA PE=3 SV=1
MFTLSDFDFNLPPELIAQSALAERSASRLLEVDNRAQPATLVDRRFSELPDLVDTGDLLVFNDTKVLKARFFGQKASGGRVEVLVERLSGATTALAQIRASKSPAEGSTIRLADAFDVTVGERVEPFYTLHFPAECLTLIEQFGRLPLPPYIEHDADAYDETRYQTVYAANPGAVAAPTAGLHFDDALFARLDARGVERATLTLHVGAGTFQPVRVENIAEHKMHSEWYDLPQSLADRIAAVKARGNRVIAVGTTSMRALEAAARDAANAGRPLAGSQAETDIFITPGYEFRVVDRLVTNFHLPKSTLLMLVSAFAGMDTIRDAYRHAIEQRYRFFSYGDAMLLTRRD

SEQ ID NO: 64575 - protein, 348 aa, Caballeronia ptereochthonis
  misc_feature (1)..(348): tr|A0A158BJY8|A0A158BJY8_9BURK S-adenosylmethionine:tRN A ribosyltransferase-isomerase OS=Caballeronia ptereoch thonis OX=1777144 GN=queA PE=3 SV=1
MFTLSDFDFNLPPELIAQSALAERSASRLLEVDNRTSPATLVDRRFSELPDLVEPGDLLVFNDTKVLKARFFGQKASGGRVEVLVERLTGATTALAQIRASKSPAQGSVIRLADAFDVTVGERVEPFYTLHFPAECLTLIEQYGRLPLPPYIEHDADVYDETRYQTVYAANPGAVAAPTAGLHFDDALFVELDARGVERATLTLHVGAGTFQPVRVENIAEHKMHSEWYDLPQSLVDRIAAVKARGNRVIAVGTTSMRALEAAARDAAQAGRPLAATQAETDIFITPGYEFRVVDRLVTNFHLPKSTLLMLVSAFAGMDAIREAYRHAIEARYRFFSYGDAMLLTRAA

SEQ ID NO: 64576 - protein, 347 aa, Caballeronia sordidicola
  misc_feature (1)..(347): tr|A0A242MMN3|A0A242MMN3_9BURK S-adenosylmethionine:tRN A ribosyltransferase-isomerase OS=Caballeronia sordidic ola OX=196367 GN=queA PE=3 SV=1
MFTLSDFDFNLPPELIAQTALTERSASRLLEVDNSAASPAFTDRQFTELPGLLEPGDLLVFNDTKVLKARFLGQKASGGRIEVLVERLTGATTALAQIRASKSPQPGTKIVLADAFEVTVGERVEPFYTLHFPADCLTLIEQYGRLPLPPYIEHDPDAYDETRYQTVYAANPGAVAAPTAGLHFDANLLEALDARGMERATLTLHVGAGTFQPVRVENLAEHKMHSEWYRLPQALADKIAATKARGNSVIAVGTTSMRALEAAARDADEAGRPLAETSAETDIFITPGYQFRVVDRLVTNFHLPKSTLMMLVSAFAGMDPIRAAYAHAIEKRYRFFSYGDAMLLTRQ

SEQ ID NO: 64577 - protein, 347 aa, Caballeronia sordidicola
  misc_feature (1)..(347): tr|A0A242M5T2|A0A242M5T2_9BURK S-adenosylmethionine:tRN A ribosyltransferase-isomerase OS=Caballeronia sordidic ola OX=196367 GN=queA PE=3 SV=1
MFTLSDFDFNLPPELIAQTALTERSASRLLEVDNSAASPAFTDRQFTELPGLLEPGDLLVFNDTKVLKARFLGQKASGGRIEVLVERLTGATTALAQIRASKSPQPGTKIVLADAFEVTVGERVEPFYTLHFPADCLTLIEQYGRLPLPPYIEHDPDAYDETRYQTVYAANPGAVAAPTAGLHFDANLLEALDARGMERATLTLHVGAGTFQPVRVENLAEHKMHSEWYRLPQALADKIAATKARGNSVIAVGTTSMRALEAAARDADQAGRPLAETSAETDIFITPGYQFRVVDRLVTNFHLPKSTLMMLVSAFAGMDPIRAAYAHAIEKRYRFFSYGDAMLLTRQ

SEQ ID NO: 64578 - protein, 349 aa, Caballeronia telluris
  misc_feature (1)..(349): tr|A0A158K657|A0A158K657_9BURK S-adenosylmethionine:tRN A ribosyltransferase-isomerase OS=Caballeronia telluris OX=326475 GN=queA PE=3 SV=1
MFTLSDFDFNLPPELIAQTALTERSASRLLDVDNHTTPAALTDRQFAELPTLIEPGDLLVFNDTKVLKARFLGKKASGGRIEVLVERLTGPTTALAQIRASKSPAPGTVLTLADAFDVTVGERVEPFYTLHFPAECLTLIEQYGRLPLPPYIEHDPDAIDETRYQTVYAANPGAVAAPTAGLHFDAALFDRLDARGVERATLTLHVGAGTFQPVRVEKIDEHKMHSEWYQLPQSLVDKIAATKARGNRVIAVGTTSMRALEAAARDAANENRPLAAAVAETDIFITPGYEFRVVDRLVTNFHLPKSTLLMLVSAFAGMETIRDAYRHAIEQRYRFFSYGDAMLLTRQPR

SEQ ID NO: 64579 - protein, 344 aa, Caballeronia temeraria
  misc_feature (1)..(344): tr|A0A158B5G4|A0A158B5G4_9BURK S-adenosylmethionine:tRN A ribosyltransferase-isomerase OS=Caballeronia temerari a OX=1777137 GN=queA PE=3 SV=1
MFTLSDFDFNLPPELIAQSALAERSASRLLEVTGGTLVDRRFSELPGLIDAGDLLVFNDTKVLKARFFGQKASGGRVEVLVERLTGATTALAQIRASKSPVEGTTIRLADAFDVTVGERVEPFYTLHFPAECLTLIEQYGRLPLPPYIEHDADAYDETRYQTVYAANPGAVAAPTAGLHFDDALFAELEKRGVERATLTLHVGAGTFQPVRVENIAEHKMHSEWYDLPQSLVDRIAAVKARGNKVIAVGTTSMRALEAAARDAAEAGRPLSATQAETDIFITPGYAFRVVDRLVTNFHLPKSTLLMLVSAFAGMDTIRDAYRHAIEQKYRFFSYGDAMLLTRRD

SEQ ID NO: 64580 - protein, 349 aa, Caballeronia terrestris
  misc_feature (1)..(349): tr|A0A158JXM8|A0A158JXM8_9BURK S-adenosylmethionine:tRN A ribosyltransferase-isomerase OS=Caballeronia terrestr is OX=1226301 GN=queA PE=3 SV=1
MFTLSDFDFNLPPELIAQTALTERSASRLLEVDTRTTPDTLTDRQFAELPNLIDAGDLLVFNDTKVLKARFLGQKASGGRIEVLVERLTGPTTALAQIRASKSPGPGTVLKLADAFDVTVGERVEPFYTLHFPADCLTLIEQYGRLPLPPYIEHDPDAYDETRYQTVYAANPGAVAAPTAGLHFDDALFAKLDARGVERATLTLHVGAGTFQPVRVEKIDEHKMHSEWYALPQALVDRIAATKARGKRVIAVGTTSMRALEAAARDAANAGRPLAAASAETDIFITPGYEFRVVDRLVTNFHLPKSTLLMLVSAFAGMETIREAYRHAIEQRYRFFSYGDAMLLTRQAR

SEQ ID NO: 64581 - protein, 348 aa, Caballeronia turbans
  misc_feature (1)..(348): tr|A0A158GA82|A0A158GA82_9BURK S-adenosylmethionine:tRN A ribosyltransferase-isomerase OS=Caballeronia turbans OX=1777134 GN=queA PE=3 SV=1
MFTLSDFDFNLPPELIAQSALAERSASRLLEVDNRITPATLVDRRFSELPDLIAPGDLLVFNDTKVLKARFFGQKASGGRVEVLVERLTGATTALAQIRASKSPAEGTTIRLADAFDVTVGERVEPFYTLHFPAECLTLIEQYGRLPLPPYIEHDADAYDETRYQTVYAANPGAVAAPTAGLHFDDALFAELDARGVERATLTLHVGAGTFQPVRVENIAEHKMHTEWYDLPQSLVDRIAAVKARGNKVIAVGTTSMRALEAAARDAASAGRPLAATQAETDIFITPGFEFRVVDRLVTNFHLPKSTLLMLVSAFAGMETIRDAYRHAIEEKYRFFSYGDAMLLTRRD

SEQ ID NO: 64582 - protein, 350 aa, Caballeronia udeis
  misc_feature (1)..(350): tr|A0A158JDP0|A0A158JDP0_9BURK S-adenosylmethionine:tRN A ribosyltransferase-isomerase OS=Caballeronia udeis OX =1232866 GN=queA PE=3 SV=1
MFTLSDFDFNLPPELIAQTALTERSASRLLDVDNRAATAAFTDRHFTELPNLLEPGDLLVFNDTKVLKARFLGQKASGGRIEVLVERLTGATTALAQIRASKSPLPGTKLVLADAFEVTVGERVEPFYTLHFPADCLTLIEQYGRLPLPPYIEHDPDSFDETRYQTVYAANPGAVAAPTAGLHFDPALFAALDARGVERATLTLHVGAGTFQPVRVENLAEHKMHSEWYRLPQELADKITATKARGNRVVAVGTTSLRALEAAARDAAVAGRPLAQTSAETDIFITPGYQFRVVDRLVTNFHLPKSTLMMLVSAFAGMDAIRAAYAHAIQERYRFFSYGDAMLLTRQAAA

SEQ ID NO: 64583 - protein, 350 aa, Caballeronia udeis
  misc_feature (1)..(350): tr|A0A3M0V740|A0A3M0V740_9BURK S-adenosylmethionine:tRN A ribosyltransferase-isomerase OS=Caballeronia udeis OX =1232866 GN=queA PE=3 SV=1
MFTLSDFDFNLPPELIAQTALTERSASRLLDVNNRAATASFTDRHFTELPSLLEPGDLLVFNDTKVLKARFLGQKASGGRIEVLVERLSGATSALAQIRASKSPLPGTKLVLAEAFEVTVGERVEPFYTLHFPADCLTLIEQYGRLPLPPYIEHDPDAFDETRYQTVYAANPGAVAAPTAGLHFDPALFGALDARGVERETLTLHVGAGTFQPVRVENLAEHRMHSEWYRLPQSLADKIAATKARGNRVIAVGTTSLRALEAAARDAAEAGRPLSETSAETDIFITPGYEFRVVDRLVTNFHLPKSTLLMLVSAFAGMDAIRAAYAHAIEERYRFFSYGDAMLLTRQAAA

SEQ ID NO: 64584 - protein, 346 aa, Caenimonas sp.
  misc_feature (1)..(346): tr|A0A562ZMY0|A0A562ZMY0_9BURK S-adenosylmethionine:tRN A ribosyltransferase-isomerase OS=Caenimonas sp. HX-9-2 0 OX=2596921 GN=queA PE=3 SV=1
MRQFTLGDFDFALPPELIAQHPAAERSGSRLLDGTQGTPIDRSFRELPALLQPGDLLVFNDTQVIKARLFGEKPTGGKLELLVERVLQDHEVVAHMKVSKKPPIGTVLRMDGGFNATLLGRWPEEDGPLFRFAFSSEPHALMEQHGHVPLPPYITHEDTPEDARRYQTVFARAPGAVAAPTAALHFDAEVLAALEARGVQRASVTLHVGAGTFQPVKTDNIAEHRMHSEWYEVPPATQQAIADLRARGGRLVAVGTTTVRTLESWARSGQASADTSIFITPGFRFREVNVLLTNFHLPKSTLLMLVSAFAGYEHAMGLYHHAIAAGYRFFSYGDAMLLARTDTPPT

SEQ ID NO: 64585 - protein, 348 aa, Caenispirillum bisanense
  misc_feature (1)..(348): tr|A0A286GY46|A0A286GY46_9PROT S-adenosylmethionine:tRN A ribosyltransferase-isomerase OS=Caenispirillum bisane nse OX=414052 GN=queA PE=3 SV=1
MRVDAFDFDLPRDRIADRPVSPRDSARCLHVRPDGLDDRIMRDLPDLLQPGDVMVFNDTRVIPARLLGRRGEAKVEVTLHMRLADDTWRAFAKGAKKLKPGQTITFAEGFEALVEDKDGGDVRLKFDRGGQALMDALKAHGHIPLPPYMGRDDDERDRTDYQTVYAAPEKEGAVAAPTAGLHFTPDLLARLEARGVSRVFVTLHVGAGTFLPVTADDTAEHRMHAEIGEVTPEAAAAINAARAGGGRVVAVGTTALRLLESAADESGVLHPFSGPTDIFITPGWRFRMVDRLVTNFHLPRSTLFMLVSAFCGLTRMQAAYAHAVETGYRFYSYGDGSLLERCDEDIPA

SEQ ID NO: 64586 - protein, 351 aa, Caenispirillum salinarum
  misc_feature (1)..(351): tr|K9HJ73|K9HJ73_9PROT S-adenosylmethionine:tRNA ribosy ltransferase-isomerase OS=Caenispirillum salinarum AK4 OX=1238182 GN=queA PE=3 SV=1
MRVDAFDFDLPRDRIADRPASPRDSARCLRVTCDGLADFIMRDLPDMLQPGDVMVFNDTRVIPARLAGRRGEAKVEVTLHMRLDDDTWRAFAKGAKKLKVGQTIDFADGFSALVEERDGGDVRLKFNRGGQALMDALKDHGHIPLPPYMGREDDESDRTDYQTVYSAPEKEGAVAAPTAGLHFTPELLERLDKRGVTRVFVTLHVGAGTFLPVTADDTADHKMHSEIGEITPEAAEAIEAARARGGRVVAVGTTALRLLESAADAETGAVKPFSGPTDIFITPGWRFRAVDKLMTNFHLPKSTLFMLVSAFSGLNRMKAAYAHAIQSGYRFYSYGDGSLLDRCDADLSVSE

SEQ ID NO: 64587 - protein, 342 aa, Caldalkalibacillus thermarum
  misc_feature (1)..(342): tr|F5LAQ4|F5LAQ4_CALTT S-adenosylmethionine:tRNA ribosy ltransferase-isomerase OS=Caldalkalibacillus thermarum (strain TA2.A1) OX=986075 GN=queA PE=3 SV=1
MRVDEFDFELPEELIAQKPLPDRASSRLLHLDRQTGAIFHHQFTDIVQLLTAGDVLVLNDTKVMPARLLGVKEETGAKVEVLLLKQIEGDSWETLVKPAKRVKPGVTLRFGDGRLRAVCTGVTDAGGRYIRFEYQGIFQEILAELGQMPLPPYIKEQLDDPDRYQTVYARHEGSAAAPTAGLHFTPAILQALEDKGVILTYITLHVGLGTFRPVQAERVEEHQMHAEFFQMPQETAQVLNQAKAEGRRIIAVGTTSVRTLETVVRAQNGRFGACSGWTDIFIYPGFRFQAIDGMLTNFHLPKSTLIMLVSAFAGKETIMQAYREAVKQRYRFFSFGDAMLIL

SEQ ID NO: 64588 - protein, 341 aa, Caldanaerobacter subterraneus
  misc_feature (1)..(341): sp|Q8RAN0|QUEA_CALS4 S-adenosylmethionine:tRNA ribosylt ransferase-isomerase OS=Caldanaerobacter subterraneus s ubsp. tengcongensis (strain DSM 15242 / JCM 11007 / NBR C 100824 / MB4) OX=273068 GN=queA PE=3 SV=1
MKRSEFYFDLPEELIAQEPLEDRASSRLMILDRRTGEIKHDIFKNITKYLKEGDCLVLNDTKVIPARLIGQREDSGGKVELLLLRRTSMNEWEVLVKPGKRAKVGKRVVFGNGELVAEIIDTTEAGGRIARFYYDGVFEEVLDRLGEMPVPPYIKKKLKDKNRYQTVYAKYEGSAAAPTAGLHFTEELLDEIRNMGVKTVFITLHVGLGTFRPVKEEIIENHKMHEEFYIVTEEAAKAINEARKNGGRIIAVGTTSTRTLETVADESGYIHPKSGWTDIFIYPGYKFKAIDGMITNFHLPESTLIMMVSAFAGKENIMRAYKVAIENKYRFFSFGDAMLII

SEQ ID NO: 64589 - protein, 341 aa, Caldanaerobacter subterraneus
  misc_feature (1)..(341): tr|A0A117LA37|A0A117LA37_9THEO S-adenosylmethionine:tRN A ribosyltransferase-isomerase OS=Caldanaerobacter subt erraneus OX=911092 GN=queA PE=3 SV=1
MKRSEFYFELPEELIAQEPLEDRASSRLMILNKKTGEIEHDIFKNITKYLKPGDCLVLNNTKVIPARLIGRREDSGGKIEFVLLKRISNNEWEILVKPGRRAKIGSKFVFGNGELIAEILDTTEVGGRIVRFYYEGVFEEVLDKLGEMPVPPYIKKKLKNKDRYQTVYAKYEGSAAAPTAGLHFTEELLEKIRQMGVKTVFITLHVGLGTFRPVKEEVIENHKMHEEFYIVTKEAAEEINETRKSGGRIIAVGTTSTRTLETVADEDGYIKEKSGWTDIFIYPGYKFKAIDGMITNFHLPESTLIMMVSAFAGKENIMRAYKIAVEKKYRFFSFGDAMLII

SEQ ID NO: 64590 - protein, 341 aa, Caldanaerobius fijiensis
  misc_feature (1)..(341): tr|A0A1M4TXI0|A0A1M4TXI0_9THEO S-adenosylmethionine:tRN A ribosyltransferase-isomerase OS=Caldanaerobius fijien sis DSM 17918 OX=1121256 GN=queA PE=3 SV=1
MNVHDFYYELPQELIAQEPLERRDSSRLMVLHRKDGSIEHKIFRDIVQFLNPGDCLVLNDTRVIPARLIGHKKDTGGIIEFLLLRKTALDTWEVLVKPGRRAKIGTRFVFGDGELEAEVIDNTDAGGRIAKFYYEGVFEEILDKLGQMPLPPYIKKSLKDKERYQTVYSKHEGSAAAPTAGLHFTNELLDVIREKGVHVVFITLHVGLGTFRPVKVEKIEEHRMHSEFYVVTDEVAKTLNDARKKGGRIICVGTTSVRTLETVADDSGVIHSSSGWTDIFIYPGYKYKVVDGLITNFHLPESTLIMLVCAFGGYDHVMRAYRVAVEERYRFYSFGDAMLII

SEQ ID NO: 64591 - protein, 341 aa, Caldanaerovirga acetigignens
  misc_feature (1)..(341): tr|A0A1M7JJK9|A0A1M7JJK9_9FIRM S-adenosylmethionine:tRN A ribosyltransferase-isomerase OS=Caldanaerovirga aceti gignens OX=447595 GN=queA PE=3 SV=1
MDVKEFYYELPEELIAQEPLPERDKSRLMVVRRETRSFEHRIFENIIDYLEEGDCLVLNDTRVIPARLLGTRKDTGGKIEFILLKRIEKDKWEILVKPGRRAKLGSEFTFGDGRLRAKVLDYTDAGGRIVEFYYEGIFEHVLDELGKMPLPPYIKKELEEKERYQTVYARKPGSAAAPTAGFHFTKDLLNKIEQKGVRVCHITLHVGLGTFRPVKEEKVEQHKMHHEYFEVDDETARIINATKQQGKRVIAVGTTSTRTLETVADENGFVKGQSGWTDLFIYPGYRFKVVDGLVTNFHLPESTLLMLVCAFADKELIMTAYNEAIKEKYRFYSFGDAMLIL

SEQ ID NO: 64592 - protein, 341 aa, Calderihabitans maritimus
  misc_feature (1)..(341): tr|A0A1Z5HTP6|A0A1Z5HTP6_9THEO S-adenosylmethionine:tRN A ribosyltransferase-isomerase OS=Calderihabitans marit imus OX=1246530 GN=queA PE=3 SV=1
MRVADFDYQLPEELIAQEPVEPRDSSRLMILHRKTGKIEHRIFRDIVEYLRPGDVMVLNNTRVIPARLYGRKAETGAQVEVFLLTHREGDCWETLVRPGKKVKPGNSIIFGNGELVGKVVGYTEAGGRLIQFQYDGSWEAVINRLGRTPLPPYIRTAKEYRERYQTVYALHEGSVAAPTAGLHFTPELLEQIKKRGIKVVFLLLHVGLGTFQPVKTDRVEDHRMHAEYYRLSSDTAETINHARRKGGRVIAVGTTTVRTLETVADEEGNVRSGEGWTDIFIYPGHRFRAVDALVTNFHLPRSTLLMLVSAFAGRDKIMEAYREAIDKNYRFYSFGDAMLIL

SEQ ID NO: 64593 - protein, 342 aa, Caldibacillus debilis
  misc_feature (1)..(342): tr|A0A150LG63|A0A150LG63_9BACI S-adenosylmethionine:tRN A ribosyltransferase-isomerase OS=Caldibacillus debilis OX=301148 GN=queA PE=3 SV=1
MKTEEFDFDLPEELIAQTPLKERTSSRLMVLDRKTGGIVHDRFSNIKTYLRPGDCLVLNNTKVMPARLYGEKTDTGAHVEILLLKQRDGDEWETLAKPAKRIKTGSEIRFGNGELTAVCVGTTDFGGRILKFRYEGIFYEILEKLGEMPLPPYIKEKLGDQSRYQTVYAKEIGSAASPTAGLHFSEGLLAEIKEMGVHLAFLTLHVGLGTFRPVTAENIEDHKMHAEFYQFPEETAELLNRVREEGGRIISVGTTSTRTLETVASRHNGKFVPESGWTDIFIYPGYRFQAIDGLITNFHLPKSTLIMLVSAFAGKERIMNAYRTAVRERYRFFSFGDAMLII

SEQ ID NO: 64594 - protein, 342 aa, Caldibacillus debilis
  misc_feature (1)..(342): tr|A0A420VBS9|A0A420VBS9_9BACI S-adenosylmethionine:tRN A ribosyltransferase-isomerase OS=Caldibacillus debilis GB1 OX=1339248 GN=queA PE=3 SV=1
MKTEEFDFDLPEELIAQTPLKERTSSRLMVLDRKTGGIVHDRFSNIKTYLRPGDCLVLNNTKVMPARLYGEKTDTGAHVEILLLKQREGDEWETLAKPAKRIKPGSEIRFGRGELTAVCVGTTDFGGRILKFRYEGIFYEILEKLGEMPLPPYIKEKLGDQSRYQTVYAKEIGSAASPTAGLHFSEGLLAEIKEMGVHLAFLTLHVGLGTFRPVTAENIEDHKMHAEFYQFPEETAELLNRVREEGGRIISVGTTSTRTLETVASRHNGKFAPESGWTDIFIYPGYRFQAIDGLITNFHLPKSTLIMLVSAFAGKERIMNAYRTAVRERYRFFSFGDAMLII

SEQ ID NO: 64595 - protein, 346 aa, Caldicellulosiruptor bescii
  misc_feature (1)..(346): tr|B9MMG3|B9MMG3_CALBD S-adenosylmethionine:tRNA ribosy ltransferase-isomerase OS=Caldicellulosiruptor bescii ( strain ATCC BAA-1888 / DSM 6725 / Z-1320) OX=521460 GN= queA PE=3 SV=1
MGKWKLSDFHYDLPDELIAQKPVEPRDSSRLMVILPDGRIEHRIFRDIVEYLNEGDCLVLNNSKVIPARLIGQREETGSFIEFLLIKRLDINTWEVMTRPGKKARKGRRFVFGNGELKAEVLHVNREEGTRVVRFYYDGVFEEVLERLGKIPLPPYIKEELDDLSRYQTVYSKVPGSAAAPTAGLHFTEELLSRISKKGVEILYVTLHVGLGTFKPVKVENVEEHKMHEEYYEISEDVTERINRAKELGKRVIAVGTTSCRVLESCCDENGKVKAKKGWTDIFIYPGYEFKVLDGLVTNFHLPDTTLMMLVCAFGGYERIMNAYKIAVDMRYRFFSFGDAMLILRR

SEQ ID NO: 64596 - protein, 345 aa, Caldicellulosiruptor changbaiensis
  misc_feature (1)..(345): tr|A0A3T0D288|A0A3T0D288_9FIRM S-adenosylmethionine:tRN A ribosyltransferase-isomerase OS=Caldicellulosiruptor changbaiensis OX=1222016 GN=queA PE=3 SV=1
MKKWKLSDFHYDLPEELIAQKPVEPRDSSRLMVIHPDGRIDHRIFRDIIEYLNEGDCLVLNNSKVIPARLIGQREDTGSFIEFLLVKRLNIDTWEVMTRPGKKARKGRRFVFGDGRLKAEVLHVNQDEGTRIVRFEYEGVFEDILESLGEIPLPPYIKEKLENVERYQTVYSKVPGSAAAPTAGLHFTEELLDRISKKGVEVLYVTLHVGLGTFKPVKVENIEEHKMHEEYYEISEDVAEKINEAKKLGKRVIAVGTTSCRVLESAAVEKGLVKAQKGWTDIFIYPGYEFKILDGLVTNFHLPDTTLMMLVCAFGGYERIINAYKIAVEQRYRFFSFGDAMLILK

SEQ ID NO: 64597 - protein, 346 aa, Caldicellulosiruptor hydrothermalis
  misc_feature (1)..(346): tr|E4Q8T1|E4Q8T1_CALH1 S-adenosylmethionine:tRNA ribosy ltransferase-isomerase OS=Caldicellulosiruptor hydrothe rmalis (strain DSM 18901 / VKM B-2411 / 108) OX=632292 GN=queA PE=3 SV=1
MKKWKLSDFHYDLPDELIAQKPVEPRDSSRLMVILPDGRLEHRIFRDIVEYLNEGDCLVLNNSKVIPARLIGQREDTGSFIEFLLVKRLDINTWEVMTRPGKKARKGRKFVFGNGELKAEVLHVNQEEGTRIVRFYYEGVFEEVLERLGKIPLPPYIKEELDDLSRYQTVYSKVPGSAAAPTAGLHFTEELLEKISKKGVEILYVTLHVGLGTFKPVKVENVEEHKMHEEYYEISEDVAERINRAKELGKRVIAVGTTSCRVLESCCDENGKVRAKKGWTDIFIYPGYEFKVLDGLVTNFHLPDTTLMMLVCAFGGYERIMNAYKIAVDMRYRFFSFGDAMLILRR

SEQ ID NO: 64598 - protein, 346 aa, Caldicellulosiruptor kristjanssonii
  misc_feature (1)..(346): tr|E4S7F9|E4S7F9_CALKI S-adenosylmethionine:tRNA ribosy ltransferase-isomerase OS=Caldicellulosiruptor kristjan ssonii (strain ATCC 700853 / DSM 12137 / I77R1B) OX=632 335 GN=queA PE=3 SV=1
MRKWKLSDFHYDLPEELIAQKPVEPRDSSRLMVILPDGTIEHRIFRDIVEYLNEGDCLVLNNSKVIPARLIGQREDTGSFIEFLLVKRLDINTWEVMTRPGKKARKGRKFVFGNGELKAEVLHVNQDEGTRIVRFYYEGVFEEVLERLGKIPLPPYIKEELDDLSRYQTVYSKVPGSAAAPTAGLHFTEELLDRISKKGVEILYVTLHVGLGTFKPVKVENVEEHKMHEEYYEISQDVADKINRAKEVGKRVIAVGTTSCRVLESCSDETGRVKAKKGWTDIFIYPGYNFKVLDGLVTNFHLPDTTLMMLVCAFGGYERIMNAYKIAVDMRYRFFSFGDAMLILRR

SEQ ID NO: 64599 - protein, 346 aa, Caldicellulosiruptor kronotskyensis
  misc_feature (1)..(346): tr|E4SHD0|E4SHD0_CALK2 S-adenosylmethionine:tRNA ribosy ltransferase-isomerase OS=Caldicellulosiruptor kronotsk yensis (strain DSM 18902 / VKM B-2412 / 2002) OX=632348 GN=queA PE=3 SV=1
MRKWKLSDFHYDLPDELIAQKPVEPRDSSRLMVILPDGRIEHRIFRDIVDYLNEGDCLVLNNSKVIPARLIGQREDTGSFIEFLLVKRLDINTWEVMTRPGKKARKGRRFVFGNGELKAEVLHVNREEGTRIVRFYYDGVFEEVLERLGKIPLPPYIKEELDDLSRYQTVYSKVPGSAAAPTAGLHFTEELLSRISKKGVEILYVTLHVGLGTFKPVKVENVEEHKMHEEYYEISQDVADKINKAKELGKRIIAVGTTSCRVLESCCDENGKVKAKKGWTDIFIYPGYEFKVLDGLVTNFHLPDTTLMMLVCAFGGYERIMNAYKIAVDMRYRFFSFGDAMLILRR

SEQ ID NO: 64600 - protein, 346 aa, Caldicellulosiruptor lactoaceticus
  misc_feature (1)..(346): tr|G2PW72|G2PW72_9FIRM S-adenosylmethionine:tRNA ribosy ltransferase-isomerase OS=Caldicellulosiruptor lactoace ticus 6A OX=632516 GN=queA PE=3 SV=1
MRKWKLSDFHYDLPEELIAQKPVEPRDSSRLMVILPDGTIEHRIFREIVEYLNEGDCLVLNNSKVIPARLIGQREDTGSFIEFLLVKRLDINTWEVMTRPGKKARKGRKFVFGNGELKAEVLHVNQDEGTRIVRFYYEGVFEEVLERLGKIPLPPYIKEELDDLSRYQTVYSKVPGSAAAPTAGLHFTEELLDRISKKGVEILYVTLHVGLGTFKPVKVENVEEHKMHEEYYEISQDVADKINRAKEVGKRVIAVGTTSCRVLESCSDETGRVKAKKGWTDIFIYPGYNFKVLDGLVTNFHLPDTTLMMLVCAFGGYERIMNAYKIAVDMRYRFFSFGDAMLILRR

SEQ ID NO: 64601 - protein, 346 aa, Caldicellulosiruptor obsidiansis
  misc_feature (1)..(346): tr|D9THW1|D9THW1_CALOO S-adenosylmethionine:tRNA ribosy ltransferase-isomerase OS=Caldicellulosiruptor obsidian sis (strain ATCC BAA-2073 / strain OB47) OX=608506 GN=q ueA PE=3 SV=1
MRKWKLSDFHYDLPDELIAQKPVEPRDNSRLMVILPDGTIEHRIFRDIVEYLNEGDCLVLNNSKVIPARLIGQREDTGSFIEFLLVKRLDINTWEVMTRPGKKARRGRKFVFGNGELKAEVLHVNQDEGTRIVRFYYEGVFEEVLEKLGKIPLPPYIKEELEDLSRYQTVYSKVPGSAAAPTAGLHFTEELLEKISKKGVEILYVTLHVGLGTFKPVKVENVEEHKMHEEYYEISQDVADRINRAKELGKRVIAVGTTSCRVLESCSDEAGRVKAQKGWTNIFIYPGYNFKVLDGLVTNFHLPDTTLMMLVCAFGGYERIMNAYKIAVDMRYRFFSFGDAMLILRR

SEQ ID NO: 64602 - protein, 345 aa, Caldicellulosiruptor owensensis
  misc_feature (1)..(345): tr|E4Q2N5|E4Q2N5_CALOW S-adenosylmethionine:tRNA ribosy ltransferase-isomerase OS=Caldicellulosiruptor owensens is (strain ATCC 700167 / DSM 13100 / OL) OX=632518 GN=q ueA PE=3 SV=1
MRKWKLSDFHYDLPDELIAQKPVEPRDSSRLMVILPDGTIEHRIFRDIVEYLNEGDCLVLNNSKVIPARLIGQREDTGSFIEFLLVKRLDINTWEVMTRPGKKARRGRKFIFGNGELKAKVLHVNQDEGTRIVRFYYEGVFEEVLEKLGKIPLPPYIKEELEDLSRYQTVYSKVPGSAAAPTAGLHFTEELLKKIEEKGVEILYVTLHVGLGTFKPVKVENIEEHRMHDEYYEISQEVADRINKAKEFGKRVIAVGTTSCRVLESCSDENGRLKAKKGWTDIFIYPGYEFKVLDGLVTNFHLPDTTLMMLVCAFGGYERIMNAYKIAVEMKYRFFSFGDAMLILR

SEQ ID NO: 64603 - protein, 345 aa, Caldicellulosiruptor saccharolyticus
  misc_feature (1)..(345): tr|A4XFX0|A4XFX0_CALS8 S-adenosylmethionine:tRNA ribosy ltransferase-isomerase OS=Caldicellulosiruptor saccharo lyticus (strain ATCC 43494 / DSM 8903 / Tp8T 6331) OX=3 51627 GN=queA PE=3 SV=1
MRKWKLSDFHYDLPEELIAQKPIEPRDSSRLMVIHPDGRIDHRIFRDIIEYLNEGDCLVLNNSKVIPARLIGQREDTGSFIEFLLVKRLSIDTWEVMTRPGKKARKGRRFVFGDGRLKAEVLHVNQDEGTRIVRFEYEGVFEDILESLGEIPLPPYIKEKLENVERYQTVYSKIPGSAAAPTAGLHFTEELLSRISKKGVQTLYVTLHVGLGTFKPVKVENIEEHKMHEEYYEISEDVAERINEAKRLGKRVIAVGTTSCRVLESAAVEKGLVKAQKGWTDIFIYPGYEFKILDGLVTNFHLPDTTLMMLVCAFGGYERIMNAYKIAVEQRYRFFSFGDAMLILK

SEQ ID NO: 64604 - protein, 342 aa, Caldicoprobacter faecalis
  misc_feature (1)..(342): tr|A0A1I5VIM7|A0A1I5VIM7_9FIRM S-adenosylmethionine:tRN A ribosyltransferase-isomerase OS=Caldicoprobacter faec alis OX=937334 GN=queA PE=3 SV=1
MKVEDFDYYLPEELIAQSPTEKRDESRLLVYHRDTGKIEHRIFKDIVEYLHKGDCLVINDTRVIPARLLGRRADTGGKIEFVLLNQIDDKRWEVLVKPGRRAQIGSVFVFGDGLLEARVLDRTPEGGRVVEFQYEGVFNEILDRVGIVPLPPYIRKQIDDPERYQTVYARHRGSVAAPTAGLHFTIPLLEKIQASGVNIVRITLHVGLGTFRPVKVDNVEEHRMHEEYYRISEEAARVINDTKVRGGRVIAVGTTSTRALESSADDSGRVHPTEKGCTDLFIYPGYKFKVVDALITNFHLPKSTLLMLVSAMCSREEILRVYQEAIKERYRFFSFGDAMLIL

SEQ ID NO: 64605 - protein, 342 aa, Caldicoprobacter oshimai; identical to SEQ ID NO: 64604
  misc_feature (1)..(342): tr|A0A2W4MUY6|A0A2W4MUY6_9FIRM S-adenosylmethionine:tRN A ribosyltransferase-isomerase OS=Caldicoprobacter oshi mai OX=551788 GN=queA PE=3 SV=1

SEQ ID NO: 64606 - protein, 361 aa, Caldilinea aerophila
  misc_feature (1)..(361): tr|I0I5J1|I0I5J1_CALAS S-adenosylmethionine:tRNA ribosy ltransferase-isomerase OS=Caldilinea aerophila (strain DSM 14535 / JCM 11387 / NBRC 104270 / STL-6-O1) OX=9265 50 GN=queA PE=3 SV=1
METALFDYELPESYIAQQPAEPRDSSRLMVLHRADGRIEHRIFREIGEYLRAGDLLVANDSRVIPARLHGRKSTGGEVEIFLLRQRDEAGKVWECLVRGRGLKEGTKVHLNEELFAEITAVTPTGARIVEFSASVHPYLDVLGEVPLPPYITQYTGDRERYQTVYSRPEGSVAAPTAGLHFTPELLMQLRQQGVLFETVTLHVGLDTFKPVQSERVEDHHIHTEWAELSSATARRINETTLAGGRIVAVGTTTVRTLEWAATAAQGLDPYDTQACPWQRVAAFMGDVSLFIYPGYRFRAVDALITNFHLPRSSLLMLVSAFIAQAHPEDVDAGRRILLNAYEEAKRTGYRFFSFGDAMLIL

SEQ ID NO: 64607 - protein, 357 aa, Caldilineae bacterium
  misc_feature (1)..(357): tr|A0A3M1HUY2|A0A3M1HUY2_9CHLR S-adenosylmethionine:tRN A ribosyltransferase-isomerase OS=Caldilineae bacterium OX=2420332 GN=queA PE=3 SV=1
MRTADFDYELPQELIAQTPIEPRDHARMLVLNRADGAISHQHIYDLPHYLRAGDLLVLNDTRVIPARLVGRKDTGGRVEVFLLKRLADGTWEALVRGRHLTEGKKIHITGPQDQAITATIEAVGEGPLRTVSFHPAIDDILPEVGQIPLPPYIHTPLADPERYQTIFSRHEGSVAAPTAGLHFTPELMLQLRQLGVRFAYVTLHVGLDTFRPVREEDPAQHRMHREWLSIPPETARAVNETRLQGNRIVAVGTTVVRALETAAKIALGLAPCDPAPAGLACGWQTIAAWTGETDLYILPGHHFRAVDVLLTNFHLPRSTLLMLVSAFAGKANIDRAYAEAIARRYRFFSFGDAMLIL

SEQ ID NO: 64608 - protein, 357 aa, Caldilineae bacterium
  misc_feature (1)..(357): tr|A0A3M1EZ66|A0A3M1EZ66_9CHLR S-adenosylmethionine:tRN A ribosyltransferase-isomerase OS=Caldilineae bacterium OX=2420332 GN=queA PE=3 SV=1
MRLSDFDYHLPPHLIAQKPLEPRHASRLMVVERATGRIAHRRFTDLPDYLRRGDVLVANDSRVMPARLFGRKETGGKMELLLLKRLGDRRWEALAGGKRLNEGVRFRITGGDLSGRIVEVLDGGRRVVQFDQPLSPRLHTVGHTPLPPYIHEPLADPERYQTIFSRVEGSAAAPTAGLHFSAEMLLALRQKGVALEYVTLHVGLDTFKPVEVEEIERHPIHSEWASLSAETARRINEAKLAGGRLLAVGTTAVRTLETAALRSAGVTGSLREASRLQVDLCPWRPVAAFEGQTDLYIYPGFRFRAVDMLLTNFHLPKSSLLMLVSAFGGLDLIRRAYEEAIAAEYRFYSFGDAMLVV

SEQ ID NO: 64609 - protein, 350 aa, Caldimicrobium thiodismutans
  misc_feature (1)..(350): tr|A0A2N7PKQ3|A0A2N7PKQ3_9BACT S-adenosylmethionine:tRN A ribosyltransferase-isomerase OS=Caldimicrobium thiodi smutans OX=1653476 GN=queA PE=3 SV=1
MPQIPKEFHLDYYDYSLPENLIAYYPPKERTESKLLVIDRKTKKFYFHEKFSEIENYFQEGDLLVLNNTKVFPARIKVRKKTGGEVELLLFKKPQGFFFETEALIKGKRLKPKMELFSEDRELKITLLESLSSGKFRIRLESSNLPLETIMEKVGKAPLPPYIKREPEELDLLRYQTVFAEKEGSIAAPTAGFHFDKALLERLQNRGIRIIYITLHVGYGTFAPIKVKDIRLHRVEPEYVEVSEEAVKEVVSALEEKRRVIACGTTVTRTLEFLARKEFKPYKGLCDLYIYPPFEFKVVSALITNFHLPKSSLLLLVCAFAGRDLILKAYEEAIKRGYRFYSYGDATFII

SEQ ID NO: 64610 - protein, 350 aa, Caldimicrobium thiodismutans
  misc_feature (1)..(350): tr|A0A0U4W471|A0A0U4W471_9BACT S-adenosylmethionine:tRN A ribosyltransferase-isomerase OS=Caldimicrobium thiodi smutans OX=1653476 GN=queA PE=3 SV=1
MTSIPPEFDINSYDYPLPEENIAYYPPKERVSSRLLVIERERGNLFFHEKFSELEVYLQEGDLLVLNDTKVFPARIKAVKKTGGIVEILLFNKPKGKSFETQGLVKGKRLKPGMSLSVPDGEIEIHLLEDLRGGRFKLRLETTGDDLERAIESIGKAPLPPYIKREPEDLDLLRYQTVFASKEGSIAAPTAGFHFDPPLLKKLKAKGVEIKFITLHVGYGTFAPIKVRDIRKHKIEPEYVEVSHETVSAIKKAKAQGRRVIGVGTTTARTLEFIAKYGLKPFKGLCDLYIYPGFEFRILSALITNFHLPRSSLLLLVCAFAGRDLILRAYKEAIQRGYRFYSYGDATFII

SEQ ID NO: 64611 - protein, 341 aa, Caldisalinibacter kiritimatiensis
  misc_feature (1)..(341): tr|R1CPR9|R1CPR9_9CLOT S-adenosylmethionine:tRNA ribosy ltransferase-isomerase OS=Caldisalinibacter kiritimatie nsis OX=1304284 GN=queA PE=3 SV=1
MKTRDFYFDLPEELIAQHPLKNRESSRLMVLDKNTGAIEHKVFADIIDYLNEGDCLVLNDTRVIPARLFGKREKTGGKVEFLLLNRLEGDKWETLVKPGRKAKIGTKIVFGDGLLKAKVIDIVEGGARIVKFEYDGIFEEVLDRLGEMPLPPYIKEKLEDKERYQTVYSKKEGSAAAPTAGLHFTNELLDKIKKKGVNIAYITLHVGLGTFRPVKVENIEEHDMHSEYYEISEEAAKLINETRENGGSVIAVGTTSTRTLESVAAGDGKVSAKKGWTDIFIYPGYKFKIVDKLITNFHLPESTLVMLVSALAGKENVLNAYNEAIEERYRFFSFGDAMFIK

SEQ ID NO: 64612 - protein, 342 aa, Caldiserica bacterium
  misc_feature (1)..(342): tr|A0A2H9MBA8|A0A2H9MBA8_9BACT S-adenosylmethionine:tRN A ribosyltransferase-isomerase OS=Caldiserica bacterium CG02_land_8_20_14_3_00_36_38 OX=1973932 GN=queA PE=3 S V=1
MNLEDLDFNLPHELIAQHPIYPRDYSKLMVLNRNTQEISHKKFYEILEFFKKGDILVLNDSKVIKARFYGSNEKTGGKREIFLLKQIDKFKWKAFASPNKRVHEGDNILISKKPLIKVKIEKKEVNEDTLIFETNNLSMEEVLKNFGEVPLPPYIKGKIEDESEYQTIYASIPGSVASPTAGLHFTEKLIKELENKGVIIEYVTLHVGPGTFKPIQEKSIEKHLMHEEEFFISEETAKNINNAKAKGGKLYACGTTVIRSLETTSTKEGILKPMDGKTKLFIKPGYNFKIVDAIITNFHFPRTTLLALVMSFSGKELVLSAYSNAIKEKYRFFSFGDAMLII

SEQ ID NO: 64613 - protein, 341 aa, Caldisericum exile
  misc_feature (1)..(341): tr|I0GJC5|I0GJC5_CALEA S-adenosylmethionine:tRNA ribosy ltransferase-isomerase OS=Caldisericum exile (strain DS M 21853 / NBRC 104410 / AZM16c01) OX=511051 GN=queA PE= 3 SV=1
MANLDFLDYNLDKELIAQHPIYPRDHARLMVVHRDTGEIEHRKFYNIVEYLKKGDCLVLNNSKVLKARFLGTNIRTGGKREIFLLKYLSYKKWLALTSPNDRVHVGDEILVSKDPEVKVRVLLKGEFGENTVEFESALEMEEVLKYGEVPLPPYIKAKVNLEEYQTVYANLLGSVASPTAGLHFTKELLKQIEEMGVCVKYITLHVGLGTFKPIKEDDLNKHKMHEEEFFISKDTAKTVNEVKANGGRIIAVGTTVVRALETASTRNHILKPYSGSTRLFIKPGYPFKMVDALITNFHFPKTTLLALVCAFASTELTLKAYNIAVKERYRFYSFGDAMLIL

SEQ ID NO: 64614 - protein, 341 aa, Caldisericum exile
  misc_feature (1)..(341): tr|A0A2J6X763|A0A2J6X763_9BACT S-adenosylmethionine:tRN A ribosyltransferase-isomerase OS=Caldisericum exile OX =693075 GN=queA PE=3 SV=1
MGNLDFLDYYLDKELIAQHPIYPRDHARLMVVHRDTGEIEHRKFYNIVEYLKKGDCLVLNNSKVLKARFLGTNRKTGGKREIFLLKYLSNKQWLALTSPNDRVHVGDEIIVSKDPEIVVKVISKGEFGENIIDFESALPMEEILKYGEVPLPPYIKAKVNLEEYQTVYASLLGSVASPTAGLHFTKELLKQIEEMGVCITYITLHVGLGTFKPIKEDDLNKHKMHEEEFFISEEAAKVINDARAIGGRIVAVGTTVVRVLETASTRNHILKPYSGSTRLFIKPGYPFKIVDALVTNFHFPKTTLLALVGAFASTELILKAYNIAVKERYRFYSFGDAMLIL

SEQ ID NO: 64615 - protein, 342 aa, Caldisericum sp.; identical to SEQ ID NO: 64612
  misc_feature (1)..(342): tr|A0A1J5BN93|A0A1J5BN93_9BACT S-adenosylmethionine:tRN A ribosyltransferase-isomerase OS=Caldisericum sp. CG2_ 30_36_11 OX=1805053 GN=queA PE=3 SV=1

SEQ ID NO: 64616 - protein, 339 aa, Calditerrivibrio nitroreducens
  misc_feature (1)..(339): tr|A0A2J6WK00|A0A2J6WK00_9BACT S-adenosylmethionine:tRN A ribosyltransferase-isomerase OS=Calditerrivibrio nitr oreducens OX=477976 GN=queA PE=3 SV=1
MSYLLKDYDFELPEELIAQYPAEKREESNLMIVDRSKKDFFITKFKNIVDYLPEKSFLVVNNTKVLKSRIYAQKISGGRVEIFFIEKIDDRSFKAMTRGKLKDGDILKINDSITLKILGSCEDNLRIVELSGIDIYSLLDKFGHIPLPPYIKREDNSHDETRYQTVYAQNPGSVAAPTAGLHFTEELIDQIRLKHDIVEITLNVGIGTFRPVKTENIKEHQMHSEKFFIPEESFKRINSLKSQGYKLISVGTTSTRCLEAVAKDGLLQSYGESETDIFIKPGYKFQIIDHLITNFHLPKSTLFILVSTFAGLDLMKKAYTYAIEKRMRFFSYGDAMLII

SEQ ID NO: 64617 - protein, 339 aa, Calditerrivibrio nitroreducens
  misc_feature (1)..(339): tr|E4TJ15|E4TJ15_CALNY S-adenosylmethionine:tRNA ribosy ltransferase-isomerase OS=Calditerrivibrio nitroreducen s (strain DSM 19672 / NBRC 101217 / Yu37-1) OX=768670 G N=queA PE=3 SV=1
MSHLLKDYDFELPEELIAQYPAEKREESNLMVVDRSKNDFFITKFKNIVDYLPEKSFLVVNNTKVLKSRIYAQKISGGRVEVFFIEKIDDHIFKAMTRGRLKDGDILKINDSITLKILGSCEDNLRIVELSGIDIYNLLDKFGHIPLPPYIKREDDSHDETRYQTVYAQKPGSVAAPTAGLHFTEELIERIRQKHEILEITLNVGIGTFRPVKTENIQEHQMHSEKFFIPEESFKRINLLKSNGHKLISVGTTTTRCLEAVAKDGLLQSYGESETDIFIKSGYKFQIIDHLVTNFHLPKSTLFILVSTFAGLDLMKKAYAYAIEKRMRFFSYGDAMLII

SEQ ID NO: 64618 - protein, 343 aa, Caldithrix abyssi
  misc_feature (1)..(343): tr|H1XP87|H1XP87_9BACT S-adenosylmethionine:tRNA ribosy ltransferase-isomerase OS=Caldithrix abyssi DSM 13497 O X=880073 GN=queA PE=3 SV=1
MKLSEIKYEVPEELIAQYPLEKRDESRLMVLNRKKQSWEHRIFRDVVDYLQEGDALVVNETKVFPARVIGIKDKTDAQVELLLLRQLEDTMWEVLVKPARKVRVGNRIQITNDFGCDVIDNTTSGGRVVRFDYNGSDFFEVLGRVGTSPLPPYIKREADEIDKEYYQTVYAKKIGAVAAPTAGLHFTDELLEKIKAKGVKVVPIVLHVGLGTFRPIKVEDVTRHNMDSEYYEVPEEAAHDINEVKLNGGRIIAVGTTTVRTLETVANADNLAKASSGWTDKFIYPPYQFKLVDGMITNFHLPASTLVLLVAAFAGKDFILKAYQEAVKEKYRFYSYGDAMLIV

SEQ ID NO: 64619 - protein, 342 aa, Caldithrix sp.
  misc_feature (1)..(342): tr|A0A523HJW3|A0A523HJW3_9BACT S-adenosylmethionine:tRN A ribosyltransferase-isomerase OS=Caldithrix sp. OX=196 2856 GN=queA PE=3 SV=1
MKLSDFKYKLPEKLVAQFPAEKRDRSRLMVLNREQQTIEQRVFKDIVDYFEKGDCLVVNETKVFPARLMGTKDKTDAQVEIFLLRELENGLWEVLVRPARKVRVGNRLSVNDKLYCDVIDNTVSGGRVVRFNYIGDFFEIIDKIGQSPLPPYINREPEQLDKQRYQTVYSRVRGAVAAPTAGLHFTKPLLKKIEQKGVKITPIILHLGLGSFRPVVVEDLSRHKMDSEYFEVTQATADIINQTRKEGGRVFTVGTSTTRALETAVTSEGWTKPAQGWTDKFIFPPYEFKITDAMITNFHLPSSTLLILVCALAGRDFVFKAYRKAIREKYNFYSYGDAMLIV

SEQ ID NO: 64620 - protein, 342 aa, Caldithrix sp.
  misc_feature (1)..(342): tr|A0A523HTU7|A0A523HTU7_9BACT S-adenosylmethionine:tRN A ribosyltransferase-isomerase OS=Caldithrix sp. OX=196 2856 GN=queA PE=3 SV=1
MKLSDFKYRLSDKMIAQYPAEKRDKARLMVLNRENQTIEMKVFSDITKHFKKGDCLVINETKVFPARLMGTKDKTDAQVEIFLLRELENGLWEVLVKPARKVRVGNRLSVNNKLYCDVIDNTVSGGRVVRFNYNGDFYEIVEKIGQSPLPPYINREPEPSDKQRYQTVYSEVRGAVAAPTAGLHFTKPLLRKLEQKGVQVVRIVLHLGLGSFRQVVVEDLSRHKMDSEYYEVYAKTADVINQTRKEGGRVFAVGTSTTRALETAVTSEGYAKMGRGWTDKFIYPPYEFKVVDCLITNFHLPSSTLLMLACASGGRDFVFKAYRKAIREKFRFYSYGDAMLIE

SEQ ID NO: 64621 - protein, 241 aa, Calditrichaeota bacterium
  misc_feature (1)..(241): tr|A0A3M1AEE1|A0A3M1AEE1_9BACT S-adenosylmethionine:tRN A ribosyltransferase-isomerase (Fragment) OS=Calditrich aeota bacterium OX=2212469 GN=D6813_02875 PE=3 SV=1
MKLSDFKYKLPEKLIAQYPAEKRDQSRLMVLNREKQSIEETVFAEIHKYFNEGDCLVINETKVFPARLMGTKDKTEAKVEIFLLRQLENGLWEVLVRPARKVRVGNRLSINNKLYCDVIDNTVSGGRVVRFNYIGDFFEIVDKIGQSPLPPYIHREPEPLDKERYQTVFARVRGAVAAPTAGLHFTKELLKKIEKKGVKIVPIVLHLGLGSFRPVVVEDLSRHKMDSEYYEIPEESAEKIN

SEQ ID NO: 64622 - protein, 342 aa, Calditrichaeota bacterium
  misc_feature (1)..(342): tr|A0A3M1ADK4|A0A3M1ADK4_9BACT S-adenosylmethionine:tRN A ribosyltransferase-isomerase OS=Calditrichaeota bacte rium OX=2212469 GN=queA PE=3 SV=1
MKLSDFKYNLPEKLIAQYPSEKRDKSRLMVLDRETQKIEDKIFSDVVDYINPGDCLVINETKVFPARLMGTKDKTDAKVEIFLLRELENGLWEVLVKPARKVRVGNRLSIGNELVCDVIDNTVSGGRVVRFRYDGDFFEIVERLGQSPLPPYVKREPEPLDKERYQTVYARVRGAVAAPTAGLHFTEDILKKLRKKGVKIVPVVLHLGLGSFRPVVVEDLSRHKMDSEYYEISEESAEIINTTMKEGGKIVAVGTSTVRALETQVTSEGWVKPEKGWTDKFIYPPYEFKIVDRLITNFHLPASTLLMMVCAFAGRDFIFKAYRRAIKEKYRFYSYGDAMLIL

SEQ ID NO: 64623 - protein, 343 aa, Calditrichales bacterium
  misc_feature (1)..(343): tr|A0A524LSG1|A0A524LSG1_9BACT S-adenosylmethionine:tRN A ribosyltransferase-isomerase OS=Calditrichales bacter ium OX=2528038 GN=queA PE=3 SV=1
MKLSDFKYDLPEKLIAQYPSDKRGGSRMMVLDRNDQSIKDTNFSNVVDFLQDGDAIVLNETKVFPARLIGFKEKTNAQVEVLLLRQLEDTMWEVLVKPARKVRIGNRLVIADKIGCDVIDNTISGGRVVKFDDNGKDFFDLVEEIGDSPLPPYIKRPTEAIDKERYQTIYAKKIGAVAAPTAGLHFTDDTLSRLKAKGVEIIPLVLHVGLGTFRPVQVEDLSRHQMDSEYYELSQESAERINAVRKKGGRIIAVGTTTVRVLETVAIPDKTVKASSGWTDKFIFPPYTFKSVDGMITNFHQSQSTLYILVCTFCGYDLAKTAYEKAIKAQYKFFSYGDAMLVL

SEQ ID NO: 64624 - protein, 341 aa, Caloramator australicus
  misc_feature (1)..(341): tr|I7KAC6|I7KAC6_9CLOT S-adenosylmethionine:tRNA ribosy ltransferase-isomerase OS=Caloramator australicus RC3 O X=857293 GN=queA PE=3 SV=1
MKVKEFYFHLPEELIAQKPLEKRDESRLMVLDRRTGEIEHKIFKEIIDFLNPGDCLVLNNSRVIPARLFGVKEDTMARAEFVLVKRLDRDRWEALVKPGKKVKTGSKFIFGNGELSCTILDNTDFGGRIIEFHYDGVFEEVLDKLGEMPLPPYIKEKLEDKERYQTVYSKVEGSAAAPTAGLHFTEELLERIKEKGINIAFLTLHVGLGTFRPVKVENIEEHKMHAEFYNLDEENAKIINETKKNGKRVIAVGTTSCRTLETIADEDGFVKASSGWTDIFIYPGYRFKILDGLITNFHLPESTLIMLVSAFAGKENIMRAYNIAVKERYRFFSFGDAMFIK

SEQ ID NO: 64625 - protein, 341 aa, Caloramator fervidus
  misc_feature (1)..(341): tr|A0A1H5W0R3|A0A1H5W0R3_9CLOT S-adenosylmethionine:tRN A ribosyltransferase-isomerase OS=Caloramator fervidus OX=29344 GN=queA PE=3 SV=1
MKVKDFYFDLPQELIAQKPLEQRDMSRLMILDKTTGDIEHRIFKDIVEYLNPGDCLVLNNSRVIPARLFGVKKNTLAKVEFVLLKRIDKDKWETLVKPGKKAKIGTRFVFGNGELECTILENTDYGGRVVEFHYDGIFENVLDKLGEMPLPPYIKEKLDDKERYQTVYSKVEGSAAAPTAGLHFTNELLEKIKQKGVKIAFLTLHVGLGTFRPVKVENVEEHKMHAEFYNIDEQNAQIINQTKKEGKRVIAVGTTSCRTLETVADANGYVKASSGWTDIFIYPGYKFKIIDGLITNFHLPESTLIMLVSAFAGRENIMRAYNIAVKEKYRFFSFGDAMFIK

SEQ ID NO: 64626 - protein, 342 aa, Caloramator mitchellensis
  misc_feature (1)..(342): tr|A0A0R3JWT2|A0A0R3JWT2_9CLOT S-adenosylmethionine:tRN A ribosyltransferase-isomerase OS=Caloramator mitchelle nsis OX=908809 GN=queA PE=3 SV=1
MMKVKDFYFDLPEELIAQEPLNERDKSRLMIIDRKSGEITHSIFRDIIDYLEAGDCLVLNNSRVIPARLFGVKDDTGARAEFVLLKRIDKDRWETLVKPGKKVKIGSSFTFGNGELRCKIIGNTDFGGRIVEFEYEGIFENVLDVLGEMPLPPYIKSKLEDKERYQTVYSKVQGSAAAPTAGLHFTEELLERIKQKGVKIAFVTLHVGLGTFRPVKVENISEHKMHEEFYNLDEENAKIINETKKSGKRIIAVGTTSCRTLETIADEDGLVKPMSGWTDIFIYPGYRFKILDGLITNFHLPESTLIMLVSAFAGKDLIMNAYETAVKERYRFFSFGDAMFIK

SEQ ID NO: 64627 - protein, 341 aa, Caloramator proteoclasticus
  misc_feature (1)..(341): tr|A0A1M4WTQ2|A0A1M4WTQ2_9CLOT S-adenosylmethionine:tRN A ribosyltransferase-isomerase OS=Caloramator proteocla sticus DSM 10124 OX=1121262 GN=queA PE=3 SV=1
MNVKDFYFDLPEELIAQTPIEPRDMSRLMVLDKKTGEIEHRIFRDIIEFLNEGDCLVLNNSRVIPARLFGVKEDTGANVEFVLLKRIDKDKWETLVKPGKKARIGSKFIFGDGELRCEVLDNTESGGRIIEFKYEGVFEQILDRLGNMPLPPYIKAELKDRERYQTVYSKVEGSAAAPTAGLHFTNELLEKIKNKGVKIAYLTLHVGLGTFRPVKVENIEEHKMHSEFYMIDEENAKIINNTKKNGKRIIAVGTTSCRTLETASDENGYVKPQSGWTDIFIYPGYNFKCVDCLITNFHLPESTLIMLVSALAGREKVLNAYNTAVREKYRFFSFGDAMFIK

SEQ ID NO: 64628 - protein, 341 aa, Caloramator quimbayensis
  misc_feature (1)..(341): tr|A0A1T4WUL9|A0A1T4WUL9_9CLOT S-adenosylmethionine:tRN A ribosyltransferase-isomerase OS=Caloramator quimbayen sis OX=1147123 GN=queA PE=3 SV=1
MNVHDFYFDLPEELIAQEPLKERDSSRLLVLHREDGRIEHRIFRDVIEYLEEGDCIVLNNSRVIPARLFGVREGTGAKMEFVLLKRIDKDRWETLVKPGKKAKIGSKFIFGDGELKCTILENTQAGGRIIEFEYEGIFEHILDKLGQMPLPPYIKKQLKDKERYQTVYSKVEGSAAAPTAGLHFTEKLLGDIEKKGVKIAYVTLHVGLGTFRPVKVENIEEHKMHSEFYLIDEKNANIINETKEKGKRVFAVGTTSCRTLETASDITGKIKPQSGWTDIFIYPGYKFKIVDSLITNFHLPESTLIMLVSALSGRENIMKAYDIAVKEKYRFFSFGDAMLIL

SEQ ID NO: 64629 - protein, 341 aa, Caloramator sp.
  misc_feature (1)..(341): tr|A0A5B7TDS4|A0A5B7TDS4_9CLOT S-adenosylmethionine:tRN A ribosyltransferase-isomerase OS=Caloramator sp. E03 O X=2576307 GN=queA PE=3 SV=1
MKVHDFYFELPEELIAQEPLKERDASRLLVLHREDGKIEHRIFRDIVEYLDEGDCLVLNNSRVIPARFFGVKEDTGAKMEFVLLKRIDKNRWETLVKPGKKAKIGARFLFGDGELKCTILENTEAGGRIIEFEYDGVFEEILDKLGQMPLPPYIKRQLKDKERYQTVYSKVEGSAAAPTAGLHFTKELLDRIEKKGVKIVYVTLHVGLGTFRPVKVEDIKNHKMHSEFYIIDDKTAEIINETKKKNKRVFAVGTTSCRTLETAADDNGIIHGKSGWTDIFIYPGYKFKAVDCLITNFHLPESTLIMLVSALAGREKIMEAYNIAVKERYRFFSFGDAMLII

SEQ ID NO: 64630 - protein, 341 aa, Caloranaerobacter azorensis
  misc_feature (1)..(341): tr|A0A096DQR6|A0A096DQR6_9CLOT S-adenosylmethionine:tRN A ribosyltransferase-isomerase OS=Caloranaerobacter azo rensis H53214 OX=1156417 GN=queA PE=3 SV=1
MRRQDFYFDLPEELIAQYPIEKRDSSRLMVLDKETGAIEHKEFKDIIDYLNKGDCLVLNDTRVIPARLFGKKKDTGGKIEFLLLNRVEKDKWQVLVKPGKRARIGTTFVFGDGLLKADVLDIDEEGVRIVEFKYDGIFEEVLDKLGEIPLPPYIKQKLEDRERYQTVYSKKEGSAAAPTAGLHFTDELLEKIKEKGVEIVYITLHVGLGTFRPVKVDNLDEHKMHSEFFEVSDKAANTINEIKKKGGKIIAVGTTTTRTLESSSNSEGLVIPKRGWTDIFIYPGYKFKVIDKLITNFHLPESTLIMLVSALAGRENVLRAYNIAVKEKYRFFSFGDAMLIK

SEQ ID NO: 64631 - protein, 341 aa, Caloranaerobacter azorensis
  misc_feature (1)..(341): tr|A0A1M5TRG3|A0A1M5TRG3_9CLOT S-adenosylmethionine:tRN A ribosyltransferase-isomerase OS=Caloranaerobacter azo rensis DSM 13643 OX=1121264 GN=queA PE=3 SV=1
MRRQDFYFDLPEELIAQYPIEKRDSSRLMVLDKKTGAIEHKEFRDIIDYLNKGDCLVLNDTRVIPARLFGQKEDTGGKIEFLLLNRVEKDKWQVLVKPGKRARIGTTFVFGDGLLKADVLDIDEEGVRIVEFKYDGIFEEVLDKLGEIPLPPYIKQKLEDRERYQTVYSKKEGSAAAPTAGLHFTDELLEKIKEKGVEIVYITLHVGLGTFRPVKVDNLDEHKMHSEFFEVSDKAANTINEIKKKGGKIIAVGTTTTRTLESSSNSEGLVVPKKGWTDIFIYPGYKFKIIDKLITNFHLPESTLIMLVSALAGRENVLRAYNIAVKEKYRFFSFGDAMLIK

SEQ ID NO: 64632 - protein, 341 aa, Caloranaerobacter sp.
  misc_feature (1)..(341): tr|A0A0P8V1D6|A0A0P8V1D6_9CLOT S-adenosylmethionine:tRN A ribosyltransferase-isomerase OS=Caloranaerobacter sp. TR13 OX=1302151 GN=queA PE=3 SV=1
MRRQDFYFDLPEELIAQCPIEKRDSSRLMILDKKTGAIEHKEFKDIIDYLNEGDCLVLNDTRVIPARLFGQKEKTGGKIEFLLLSRIEKDKWEVLVKPGKRAKVGTTFVFGDGILKADVLDIGEEGIRIVEFKYDGIFEEVLDRLGEVPLPPYIKEKLEDKERYQTVYSKKEGSAAAPTAGLHFTEELLERIKEKGVEIVYITLHVGLGTFRPVKVDKLDEHKMHSEFFEVSEEAANKINEIKKKGGKIIAVGTTTTRTLESTSNNEGFVVPKKGWTDIFIYPGYKFKVIDRLITNFHLPESTLIMLVSALAGKENVLRAYNIAVKEKYRFFSFGDAMLIK

SEQ ID NO: 64633 - protein, 390 aa, Calothrix brevissima
  misc_feature (1)..(390): tr|A0A1Z4JW92|A0A1Z4JW92_9CYAN S-adenosylmethionine:tRN A ribosyltransferase-isomerase OS=Calothrix brevissima NIES-22 OX=1973478 GN=queA PE=3 SV=1
MKHQVTPNNINQPLNPEVTNVELDCSLAGYDYELPPELIAQNPVVPRDSSRLLVINSRSIHHIFRELPEILQSGDLLVMNNSRVIPARLYGRKSTGAEVEVLLLEERRHNCWLALVKPGKRFKRGSQIIFEPREAEAKAAISPSSPSSLTATVLETDPATGGRLLQFELPEEVSLVQVLDVFGEVPLPPYITASEADDEQYQTVYAKHPGAIAAPTAGLHFTPELLEKLRDRGINQAFITLHVGVGTFRPVEVEDVTSHQMHEEWIEVPASTVEQIRATKAAGGRIIAVGTTAVRALEGAAQSGSLQPFCGKTDLFIYPGYKWQVVEGLITNFHLPRSSLLMLVSALIGRQRLLDVYQEAIASRYRFYSFGDAMLILPEAVINLNSPRQI

SEQ ID NO: 64634 - protein, 384 aa, Calothrix desertica
  misc_feature (1)..(384): tr|A0A3S1B2M1|A0A3S1B2M1_9CYAN S-adenosylmethionine:tRN A ribosyltransferase-isomerase OS=Calothrix desertica P CC 7102 OX=232991 GN=queA PE=3 SV=1
MQQDLEQLNFNPTSTDGEKYCDLDRSTAGYDYDLPEELIAQNPAVPRDSSKLLVVNSTSKNNISSPLHHIFRDLPDILRPGDLLIMNDTKVLSARLHGRKSTGAKLEVLLLEEREQNCWLALVKPGKRFKIGSQIFFEAPGFDGKLTATVIDSDKATGGRVLKFDVPSAQSLVQLLDTFGEVPLPPYITQSQASDEQYQTVYANTPGAVAAPTAGLHFTPELLDTLEKKGINRAFITLHVGVGTFRPVEVEDVTTHTMHSEWIEVPPATVEKIKATQQKGGRIIAVGTTVVRALEGAAAETGEIREFCGKTNLFIYPGFKWRVIEGLITNFHLPRSSLLMLVSALIGRKNLLNIYKEAINEKYRFYSFGDAMLILPEKEKSCSS

SEQ ID NO: 64635 - protein, 349 aa, Calothrix desertica
  misc_feature (1)..(349): tr|A0A3S1CS03|A0A3S1CS03_9CYAN S-adenosylmethionine:tRN A ribosyltransferase-isomerase OS=Calothrix desertica P CC 7102 OX=232991 GN=DSM106972_026100 PE=3 SV=1
MKAPFSFTLPNELAASLPPERRGIARDHVRLMVINRDNYEVEHSKFNHLGAFLRPNDLLVFNSSRTLPAAIDGYEVTHGQLVQVRLAQHLPDDNWLALLLCQPGENFACPLQSGMQIKFSPELSAVVLERDNNIPRLWKLRFSVGGTQLIDKIYKLGQPIRYEYVSAPWDLDYYQTVYATEPGSAEMPSAGRAFTWELMFSLKRQLIQTAYITLHTGLSSYMDDELDAKHPASEEEYLISESTANKINQTRAVGGRIIAVGTTVVRALESVVDLSSKVHAGHGYTRLHVTSEHKLKAVDGLLTGLHEPEASHLDLLTGFLPKQVIRSAYEQAVKERYLWHEFGDLNLII

SEQ ID NO: 64636 - protein, 387 aa, Calothrix elsteri
  misc_feature (1)..(387): tr|A0A2A2TQ34|A0A2A2TQ34_9CYAN S-adenosylmethionine:tRN A ribosyltransferase-isomerase OS=Calothrix elsteri CCA LA 953 OX=987040 GN=queA PE=3 SV=1
MTRELKAENLDLTPILVDKYYDLERSTAGYDYQLPEELIAQNPAVPRDSSKLLVVDSTTTGEENPPLNKIFRDLPEILRSHDLLIMNDTKVIPARLYGRKSTGADVEVLLLEERQHNCWLALVKPGKRFKIGSQIFFEGRIGNDEDAQFASLTATVIDSDASTGGRVLKFNLPNGKSLVQLLDRFGEIPLPPYITNSKAADDQYQTVYAQTPGAVAAPTAGLHFTPELLEKLEQKGINRAFITLHVGVGTFRPVEVEDVTTHIMHEEWIEVPSETVEQIRATKAAGGRIIAVGTTAVRALEGATAECGGELQAFCGKTNLFIYPGYNWEVVEGLITNFHLPRSSLLMLVSALIGRERLLRIYEHAIASQYRFYSFGDAMLILPEGVS

SEQ ID NO: 64637 - protein, 403 aa, Calothrix parasitica
  misc_feature (1)..(403): tr|A0A1Z4LX69|A0A1Z4LX69_9CYAN S-adenosylmethionine:tRN A ribosyltransferase-isomerase OS=Calothrix parasitica NIES-267 OX=1973488 GN=queA PE=3 SV=1
MMNYGKSNPLNSEIDSDSSSYSLNQDSTDINLDRSLDGYDYNLPPELIAQNPVVPRDSSRLLVVDSLDTGIKYIPEHRIFRDLSVILRPHDLLVMNDTKVIPARLYGRKSTGAQIEVLLLEEKQQNCWLALVKPGKRFKKGSEIVFTAKTNNLESNNPQELVATVLETDEATGGRLLKFYVPPGMSLIQLLEVFGEVPLPPYITASEAQSQQYQTVYAENPGAVAAPTAGLHFTPELLEKLEETGINRAFVTLHVGVGTFRPVEVEDVTTHEMHGEWIEVPVETVEKIRDTKAKGGRIIAVGTTVIRALEGAAKEGELQPFCGETNLFIYPGYQWKVVEGLITNFHLPRSSLLMLVSALIGRERLLSIYREAIESRYRFYSFGDAMLILPEAVNSEQRIGNRE

SEQ ID NO: 64638 - protein, 384 aa, Calothrix sp.
  misc_feature (1)..(384): tr|A0A1Z4G0C6|A0A1Z4G0C6_9CYAN S-adenosylmethionine:tRN A ribosyltransferase-isomerase OS=Calothrix sp. NIES-20 98 OX=1954171 GN=queA PE=3 SV=1
MKQQITQANLNDTSNIGVEDVNLDCSLAGYDYELPPELIAQNPVLPRDSSRLLVVNSRSIHHIFRDLPEILRSGDLLIMNNTKVIPARLYGNKSTGAEIEVLLLEERQQNCWLALVKPGKRFKRGAKIIFEPRGRGTEEVISPSSLTATVLETDEATGGRLLKFELPEGVSLVQLLAEFGEIPLPPYITASQASDEQYQTVYAKTPGAIAAPTAGLHFTPELLEKLRDRGIDRAFITLHVGVGTFRPVEVEDVTSHQMHEEWIEVPASTVEQIRATKAAGGRIIAVGTTAVRALEGAAQSGDLQPYCGKTDLFIYPGYKWRVVDGLITNFHLPRSSLLMLVSALIGRERLLKIYQEAIASRYRFYSFGDAMLILPEAVTASSSQ

SEQ ID NO: 64639 - protein, 440 aa, Calothrix sp.
  misc_feature (1)..(440): tr|A0A1Z4NLS8|A0A1Z4NLS8_9CYAN S-adenosylmethionine:tRN A ribosyltransferase-isomerase OS=Calothrix sp. NIES-39 74 OX=2005462 GN=queA PE=3 SV=1
MPVFSLQFSYSSYIFCNLGVFQKPMQPQSSPSELASDSKQQATDLDLDHNLMGYDYELPSQMIAQNPVVPRDRSRLLVVNSPLTGVTTPPIHTIFRNLPEFLQPGDLLVMNKTKVIPARLYGYKNTGAIIEVLLLEERSRDTWLALVKPGRRFKIGSQIMFVPPGVIHQSKGETEDLDWDDGEENQLPEFDPNQSYLKATVIDSDANTGGRILQFDLPGGVSSLIEILHQYGEIPLPPYIKNSTARDEQYQTVYADTPGSVAAPTAGLHFTPELLENLQKMDVGQAFVTLHVGVGTFRPVEVEDVTTHVMHEEWIEVTQETVDQVRSTLAQGGRIIAVGTTAVRSLEGAASISGELQAYCGKTNLFIYPGYKWRVVDGLITNFHLPRSSLMMLVSALIGRKRLLNLYQEAIRQEYRFYSFGDAMLILPEGREYKKLVCNS

SEQ ID NO: 64640 - protein, 394 aa, Camelimonas lactis
  misc_feature (1)..(394): tr|A0A4R2GQH3|A0A4R2GQH3_9RHIZ S-adenosylmethionine:tRN A ribosyltransferase-isomerase OS=Camelimonas lactis OX =659006 GN=queA PE=3 SV=1
MCFVFENQHFRKPLRVKVDLFDFELPESAIAVRPAEPRDAARLLRVVPSQDGASPELTDWQVHDLPGLLRPGDLLVLNDTRVIPARLSGLRLRGDNASRIEATLHMREAPDAWRAFARPAKRLAVGDLIRFGAQGASADDHGAACALGQLEARVEEKGESGEVLLRFSLSGAYLDEALELVGVMPLPPYIASKRPEDARDRLDYQTVYAREDGAVAAPTAGLHMTPRLFDDLKAAGVDHAFVTLHVGAGTFLPVKADDTDDHRMHAERGVISAETAARIAATRAAGGRIVAVGTTSLRLLESAAAADPQGAVRAWSGATDIFITPGFQFRAVDVLMTNFHLPRSTLFMLVSAFSGLPAMRAAYAHAIAAGYRFYSYGDASLLFRADAGATAPSI

SEQ ID NO: 64641 - protein, 340 aa, Caminibacter mediatlanticus
  misc_feature (1)..(340): tr|A0A4P9DY09|A0A4P9DY09_9PROT S-adenosylmethionine:tRN A ribosyltransferase-isomerase OS=Caminibacter mediatla nticus TB-2 OX=391592 GN=queA PE=3 SV=1
MESDLLVSNYDYDLPEELIAKYPITPRDEAKLLVYDRKKDKIIHTKFKNILDFVGDKRFIFNDTKVIKARIFGKKESGGRVELLLNRPFNNDFLVYIRGKVKRGTKLFFDRGLVAEVKELLEDGSRIVKFKCKMKNGEWKILDFYELVNILEEIGHIPLPPYIKRKDEEIDEKEYQTIFAKKEGAVAAPTASLHFTKNLLDKIEKKAYLTLHVGAGTFKPVEVEDIRFHKMHSEFFEIPKNTAKILDSNEEIVAVGTTATRTIEYYARTKKLKGECDLFLHPLNPPIRVNHLITNFHLPKSTLIMLVASFIGRKKTLEIYEIAKKEKYRFYSYGDAMLII

SEQ ID NO: 64642 - protein, 340 aa, Caminicella sporogenes
  misc_feature (1)..(340): tr|A0A1M6M242|A0A1M6M242_9CLOT S-adenosylmethionine:tRN A ribosyltransferase-isomerase OS=Caminicella sporogene s DSM 14501 OX=1121266 GN=queA PE=3 SV=1
MKTSDFYFDLPQELIAQVPLEKRDMSRLMVLDKKTGDVEHKIFKDIIEYLDEGDCLVLNDTRVIPARLFGQKDTGANVEFLLLRRIDKDRWQTLVKPGKRAKVGSKFTFGDGELRGEIVDLAEEGTRIIKFSYEGIFEEVLDKLGNMPLPPYITEKLEDRERYQTVYSKHSGSAAAPTAGLHFTENLLKKIKDKGVKIAFITLHVGLGTFRPVKVENINEHKMHSEFYIVSKETADIINETKKNGGKIISVGTTATRALETAASDNGHMKECSGWTDIFIYPGYRFKVIDRLITNFHLPESTLIMLVSALAGRENVLNAYKIAVKEKYRFFSFGDAMFIK

SEQ ID NO: 64643 - protein, 342 aa, Campylobacter avium
  misc_feature (1)..(342): tr|A0A222MWF3|A0A222MWF3_9PROT S-adenosylmethionine:tRN A ribosyltransferase-isomerase OS=Campylobacter avium L MG 24591 OX=522484 GN=queA PE=3 SV=1
MKIMLNEDLLLKNYDYKLDESLIAKYPVLPKEEARLLVYYRKTDELKHLKFKDLNQILPQCSIIFNDSKVIKARIYGHKISGAKVELFFHKALNNFEFIVQLRARVKKDDVLLFAEGLKARVIELLPDGLRKVEFFKEKKLEHKELLEFLEKNGHIPLPPYIKRADEKADEKEYQSIFAKNLGSVAAPTASLHFSKELLKELEKKHKLYYLSLHIGAGTFKNVECENINEHKMHEEAFFIDENLEKILLSEEKILAVGTTVARTIENFQRTGQKTGLCSLFLHPKNPPQRIDYLLTNFHLPKSSLIMLVSAFIGRKKTLELYELAMKERYRFYSYGDAMLIL

SEQ ID NO: 64644 - protein, 339 aa, Campylobacter blaseri
  misc_feature (1)..(339): tr|A0A2P8R212|A0A2P8R212_9PROT S-adenosylmethionine:tRN A ribosyltransferase-isomerase OS=Campylobacter blaseri OX=2042961 GN=queA PE=3 SV=1
MNDLDLISSYDYELPKELISSKPTLPKENARLLVYDRKKDLISHYKFGDLVEILPPCDIIFNDTKVVKARVYGVKDTGGKVELLLNTPLEDSKFNVYIKGHVKIGTILNFNKNLKAKVIEINSDGTRIVSFSFKNSPLSTDEIFNFFNNIGHIPLPPYIKRDDNNDDEIWYQSIFAKHLGAVAAPTASLHFSDEMANELKKTHELHYLTLHVGAGTFKAIKCENIHEHNMHSEYFNIPSKTAEILKTNKPILGVGTTVTRVVEEFARNGKQNGYCKLFLNHSNRPIRLNYLLTNFHLPKSTLIMLVSSFLGLEKTMEIYEIAIKERYKFYSYGDGMLIL

SEQ ID NO: 64645 - protein, 341 aa, Campylobacter coli
  misc_feature (1)..(341): tr|W8KZN7|W8KZN7_CAMCO S-adenosylmethionine:tRNA ribosy ltransferase-isomerase OS=Campylobacter coli RM4661 OX= 1183379 GN=queA PE=3 SV=1
MKDLLLSSYDYTLPNELIATYPVHPKEDAKLLVFERKNNQISHTTFKNLQDFLPDCALFFNDTKVIKARIYGNKSSGGKIELFLHQPCLDSQDSLFLAQIKGRVKKDEILSFEQNLKVKVIELLDDGLRKVHFFQNDEVLNTFKLYELLDTIGHIPLPPYIKRSDEKSDLEDYQSIFAKNLGAVAAPTASLHFSENMLENLKKRHEIYHLTLHVGAGTFKSVECENLENHKMHSEFFDIPRKACEAIDSQKKILGVGTTVTRTIEYYARTKQNQGFCDLFLHPHNPPLRQDYLLTNFHLPKSTLIMLVSAFIGRQNCLKLYDIAIKEKYRFYSYGDAMLIL

SEQ ID NO: 64646 - protein, 341 aa, Campylobacter coli; identical to SEQ ID NO: 64645
  misc_feature (1)..(341): tr|A0A3Z9WH51|A0A3Z9WH51_CAMCO S-adenosylmethionine:tRN A ribosyltransferase-isomerase OS=Campylobacter coli OX =195 GN=queA PE=3 SV=1

SEQ ID NO: 64647 - protein, 352 aa, Campylobacter concisus
  misc_feature (1)..(352): tr|U2EF33|U2EF33_9PROT S-adenosylmethionine:tRNA ribosy ltransferase-isomerase OS=Campylobacter concisus UNSW3 OX=1242966 GN=queA PE=3 SV=1
MNKIATQTATQAMSDINDISSYDYFLPNELIAKEPVLPKEEARLLVYFKKTKEIKHYKFKDLSSLIPEDAAVIFNNTKVVKARILGHKQSGGACEVMLNQPLNDNKFSVYIRGRVSVGSILNFADSINVNVLELNDDGSRVVNFTKDGVILDTARLFSELEKIGHVPLPPYIKRADTKDDESWYQSIFAKNSGAVAAPTASLHFSEQMLEQIKAKHEVAYITLHVGAGTFKGVECQNINDHKMHSEFYELSKKAQEIINSNKPILGVGTTVTRCVEEFARSKQPSGFCKLFLNLNNRPIRQNYLLTNFHLPKSTLIMLVTSFIGLEETMRIYKTAVSEKYRFYSYGDGMLVI

SEQ ID NO: 64648 - protein, 340 aa, Campylobacter concisus
  misc_feature (1)..(340): sp|A8Z6M6|QUEA_CAMC1 S-adenosylmethionine:tRNA ribosylt ransferase-isomerase OS=Campylobacter concisus (strain 13826) OX=360104 GN=queA PE=3 SV=1
MSDINDISSYDYFLPEMLIAKEPVLPKEEARLLVYLKKTKEIKHYKFKDLASLIPDDAAVIFNNTKVIKARILGHKQSGGACEVMLNQPLGDNKFSVYVRGRVSVGSVLNFADDIKVNVLELNDDGSRVVNFTKNGVILDTAQLFSELEKIGHVPLPPYIKRADTKDDESWYQSIFAKNSGAVAAPTASLHFSEQMLERIKAKHDIAYITLHVGAGTFKGVECQNINDHKMHSEFYELSEKAQEIISSNKPILGVGTTVTRCVEEFARSKQSSGFCKLFLNLNNKPIRQNYLLTNFHLPKSTLIMLVTSFIGLEETMRIYETAVSEKYRFYSYGDGMLVI

SEQ ID NO: 64649 - protein, 339 aa, Campylobacter cuniculorum
  misc_feature (1)..(339): tr|A0A1W6BWJ4|A0A1W6BWJ4_9PROT S-adenosylmethionine:tRN A ribosyltransferase-isomerase OS=Campylobacter cunicul orum DSM 23162 = LMG 24588 OX=1121267 GN=queA PE=3 SV=1
MHKDLKLHNYDYHLPKELIATYPITPKEDAKLLIYERKKDKITHTYFGKLPEFLPPCAIFFNDTKVIKARIFGTKTSGAKIELFLHQAYTEFEFLVQIKGRVKAGEILSFEKNLQAEILELLKDGRRKVRFKQNHTFLDSTKLYELLNLIGHIPLPPYIKRKDELSDESDYQSIFAKNLGAVAAPTASLHFSQEMLNLLKQKHEIYYLTLHIGAGTFKNVECENLKEHIMHTESFFIDDKAAKLIKSKTPILGVGTTTTRSIEYFFRTGIQSGTCDLFLHPFNKPLRQNYLLTNFHLPKSTLIMLVSSFIGREKTLELYKIAIEKRYRFYSYGDAMLIL

SEQ ID NO: 64650 - protein, 343 aa, Campylobacter curvus
  misc_feature (1)..(343): tr|A7GXR3|A7GXR3_CAMC5 S-adenosylmethionine:tRNA ribosy ltransferase-isomerase OS=Campylobacter curvus (strain 525.92) OX=360105 GN=queA PE=3 SV=1
MQTNKDINDISSYDYDLPKELIANEPVLPKEQARLLVYFRQTGNIEHLKFKDLCELIPGDTAVVFNDTKVIKARILGHKRSGGACEVMLNQPLGDAKFSCYVKGRVSAGKILEFADGVSAEILELNSDGTRIVEFSKNGVSLDTAMLFKELEKIGHIPLPPYIKRADTKEDESWYQSVFAAHSGAVAAPTASLHFSEDMLKRIKAKHESAYLTLHVGAGTFKGVECEDIRSHVMHSEFYEIPQDTQELINSDKKILGVGTTVTRCVEEFARSKNASGFCKLFLNLNNPPIRQNYLLTNFHLPKSTLIMLVTSFIGLDETMRIYKAAIEEKYRFYSYGDGMLVL

SEQ ID NO: 64651 - protein, 339 aa, Campylobacter fetus
  misc_feature (1)..(339): tr|A0A0E1GIV4|A0A0E1GIV4_CAMFE S-adenosylmethionine:tRN A ribosyltransferase-isomerase OS=Campylobacter fetus s ubsp. fetus 04/554 OX=1240980 GN=queA PE=3 SV=1
MSDIFSLSSYDYKLPQDLIAAAPTMPKEEARLLVYDRQKDSVCHLKFKNLSEILPECAIIFNDTKVIKARIYGRKDSGAEIQMLLNQPLQNSLFSCYIRGKVKVGTKLKFDLGVEAEVLELKDDSSRIVKFKKNEQILNTSEIYNILSHIGHVPLPPYIKREDTPDDEIWYQSIFAKNEGAVAAPTASLHFNDQMLDDLNKTHDISYITLHVGAGTFKGVEHCDIREHKMHSEFYCISKKAKNIIDSDIKLLGVGTTVTRCIEYYYRTKQPKGFCDLFLHPDNKPLRQDFLLTNFHLPKSTLIMLVASFIGLEKTMEIYKQAVENRYKFYSYGDGMLII

SEQ ID NO: 64652 - protein, 339 aa, Campylobacter fetus
  misc_feature (1)..(339): sp|A0RPZ6|QUEA_CAMFF S-adenosylmethionine:tRNA ribosylt ransferase-isomerase OS=Campylobacter fetus subsp. fetu s (strain 82-40) OX=360106 GN=queA PE=3 SV=1
MSDIFSLSSYDYKLPQDLIATAPTMPKEEARLLVYDRQKDSVFHLKFKNLSEILPECAIIFNDTKVIKARIYGRKDSGAEIQMLLNQPLQNSLFSCYIRGKVKVGTKLKFDLGVEAEVLELKDDSSRIVKFKKNEQILNTSEIYNILSHIGHVPLPPYIKREDTPDDEIWYQSIFAKNEGAVAAPTASLHFNDQMLDDLNKTHDISYITLHVGAGTFKGVEHCDIREHKMHSEFYCISKKAKNIIDSDIKLLGVGTTVTRCIEYYYRTKQPKGFCDLFLHPDNKPLRQDFLLTNFHLPKSTLIMLVASFIGLEKTMEIYKQAVENRYKFYSYGDGMLII

SEQ ID NO: 64653 - protein, 338 aa, Campylobacter geochelonis
  misc_feature (1)..(338): tr|A0A128EE12|A0A128EE12_9PROT S-adenosylmethionine:tRN A ribosyltransferase-isomerase OS=Campylobacter geochel onis OX=1780362 GN=queA PE=3 SV=1
MSDINSLSSYDYELPARLIANKPVLPKESAKLLVYERKSGEISHLTFGDLSKILPPCDVVFNDTKVIKARIYGKKESGGKIELLLNSPLQDAFSAFIKGRVKVGSVLEFDEGLKAIVKELLDDGSRVVQFFANSKALDTSEIYQICEKIGHVPLPPYIKRQDSKEDESWYQSIFAKNNGAVAAPTASLHFSDEMILELKKTHDIHYLTLHVGAGTFKGVENDDITKHTMHSEFYHIPQDTAHVLDSDTPILGVGTTVTRCVENYARDGRLDGACKLFLNLNNKPIRQNYLLTNFHLPKSTLIMLVSAFIGLEKTMEIYKIAIENNYRFYSYGDGMLII

SEQ ID NO: 64654 - protein, 339 aa, Campylobacter gracilis
  misc_feature (1)..(339): tr|C8PLH2|C8PLH2_9PROT S-adenosylmethionine:tRNA ribosy ltransferase-isomerase OS=Campylobacter gracilis RM3268 OX=553220 GN=queA PE=3 SV=1
MADLNLVGSYDYELPSELIASAPVMPKQSARLLIYDRAKQQITHAHFGDLADALPPCDIIFNDTRVIKARLFGHKNSGGKIELLLNSPLEGNKFSAYIRGSVKVGSELKFQSGLEARVCELMEGGLRIVQFECGGKALNTHDVFEICERIGHVPLPPYIKRADTKQDVSWYQSIFAREQGAVAAPTASLHFNDAMLNDLRKRHEIYFITLHVGAGTFKPVEVADLREHKMHGELYSIPPQTTQILKSERKILGVGTTVTRTIENFARNGQSSGICELFLHPGNPPIRQNFLLTNFHLPKSTLIMLVASFIGLERTLELYRIAVEKRYRFYSYGDGMLVL

SEQ ID NO: 64655 - protein, 339 aa, Campylobacter helveticus
  misc_feature (1)..(339): tr|A0A1V0RF72|A0A1V0RF72_9PROT S-adenosylmethionine:tRN A ribosyltransferase-isomerase OS=Campylobacter helveti cus OX=28898 GN=queA PE=3 SV=1
MHEDLKLCNYDYFLPKEQIASHPIYPKEAAKLLIYEREKDKVTHSHFANLMHFLPDCAIFFNDTKVIKARIYGKKESGGKIELFLHSSVGEFEFIAQIKGKVKKDEILYFEKGLSAEILELYDDGLRKVCFRQNETTLSTPALYALLEKIGHIPLPPYIKRADTLKDESDYQSIFAKNLGAVAAPTASLHFSKMMLEELKKRHEIHTLTLHIGAGTFKSVECEDIREHKMHSEIFHIDENAKACIDSKKAILGVGTTATRSIEHYARSGICSGKCDLFLHPLNRPIRQNFLLTNFHLPKSTLIMLVSAFIGREKTLALYKEAIELNYRFYSYGDAMLII

SEQ ID NO: 64656 - protein, 339 aa, Campylobacter hepaticus
  misc_feature (1)..(339): tr|A0A424Z109|A0A424Z109_9PROT S-adenosylmethionine:tRN A ribosyltransferase-isomerase OS=Campylobacter hepatic us OX=1813019 GN=queA PE=3 SV=1
MKDLLLSSYDYNLANDLIALYPSYPKEDTKLLVFKRANSKITHTTFRNLQDFLPDCAIFFNDTKVIKARIYGTKKSGAKIELFLHQNFHTQDLFLVQIKGRVKQDEILYFQENLQAQIIELLDNGFRKVQFFQNNKIINTSSLYQILDKIGHIPLPPYIKRKDENSDLQDYQSIFAKNLGAIAAPTASLHFNQNILKKLSQKHKFYHLTLHVGAGTFKSVECENIKDHHMHSEFFNIPKNACKVIDSTQAILGVGTTVTRSIEYYARTKQNKGFCDLFLHPNNPPIRQNYLLTNFHLPKSTLIMLVSAFIGREQCLKLYELAMKEKYRFYSYGDAMLIL

SEQ ID NO: 64657 - protein, 340 aa, Campylobacter hominis
  misc_feature (1)..(340): tr|A7I2A8|A7I2A8_CAMHC S-adenosylmethionine:tRNA ribosy ltransferase-isomerase OS=Campylobacter hominis (strain ATCC BAA-381 / LMG 19568 / NCTC 13146 / CH001A) OX=360 107 GN=queA PE=3 SV=1
MLIDLDLVESYDYELPRELIANAPVMPKEAARLLVYNRANGEISHLHFGDLAEILPDCAIIFNDTKVIKARIFGHKDSGGKIELLLNSPLGEGKFSVYVRGSVKIGAILEFDKNLKAEILELFDDGLRVARFSQNSHILETHELFKILDEIGHVPLPPYIKRADTKDDESWYQTIFAKNEGAVAAPTASLHFSDEMLADLKAKHDIYYLTLHVGAGTFKPVEVANIKDHKMHGEYYSIPERTAKLLDSEREILGVGTTCTRTIEFYARTHKIGGICELFLHPNNPPIRQNHLLTNFHLPKSTLIMLVASFIGLEKTLELYKIAVEKKYRFYSYGDGMLIL

SEQ ID NO: 64658 - protein, 340 aa, Campylobacter hyointestinalis
  misc_feature (1)..(340): tr|A0A381CLS8|A0A381CLS8_CAMHY S-adenosylmethionine:tRN A ribosyltransferase-isomerase OS=Campylobacter hyointe stinalis OX=198 GN=queA PE=3 SV=1
MNNQVFALSSYDYELPSDLIATSPTIPKEDGKLLVYDRNKDQIFHYKFGDLAKILPPCNIIFNDTKVIKARIYGTKQSGGKIELLLNSPLNDNKFSCYIKGKTSVHTILNFDLNLKAEVLELGDDASRVVRFTKDGKVITISELYEILASIGHVPLPPYIKREDSKDDENWYQSIFAKNPGAVAAPTASLHFSPEMLTNLKKNHEISYITLHVGAGTFKGVGSDDIRDHKMHSEFYDIPKNTEGIINSNAKILGVGTTVTRCIEYYARTKQANGFCDLFLHPQNRPQRQDYLLTNFHLPKSTLIMLVASFIGLEKTMEIYKIAVENRYKFYSYGDSMLII

SEQ ID NO: 64659 - protein, 344 aa, Campylobacter hyointestinalis
  misc_feature (1)..(344): tr|A0A2S5J718|A0A2S5J718_CAMHY S-adenosylmethionine:tRN A ribosyltransferase-isomerase OS=Campylobacter hyointe stinalis subsp. hyointestinalis OX=91352 GN=queA PE=3 S V=1
MSKKMNNQVFALSSYDYKLPSDLIATSPTIPKEDGKLLVYDRNKDQIFHYKFGDLAKILPPCNIIFNDTKVIKARIYGTKQSGGKIELLLNSPLNDNKFSCYIKGKTSVHTILNFDLNLKAEVLELGDDASRVVRFTKDGKVITISELYEILASIGHVPLPPYIKREDSKDDENWYQSIFAKNPGAVAAPTASLHFSPEMLTNLKKNHEISYITLHVGAGTFKGVGSDDIRDHKMHSEFYDIPKNTEGIINSNAKILGVGTTVTRCIEYYARTKQANGFCDLFLHPQNRPQRQDYLLTNFHLPKSTLIMLVASFIGLEKTMEIYKIAVENRYKFYSYGDSMLII

SEQ ID NO: 64660 - protein, 338 aa, Campylobacter iguaniorum
  misc_feature (1)..(338): tr|A0A076F9W3|A0A076F9W3_9PROT S-adenosylmethionine:tRN A ribosyltransferase-isomerase OS=Campylobacter iguanio rum OX=1244531 GN=queA PE=3 SV=1
MNSIFDISSYDYELPKELIANAPTLPKEDARLLVYDRKNDKISHLKFKNLSEILPPCDIIFNDTKVVKARIFGKKDSGASIELLLNSPLNDNKFSCYIRGKVREQTRLYFDDLEAEVLELFEDGSRIVKFSQNQKELCVSELYEILEHIGHVPLPPYIKRADQKEDESWYQSIFAKNQGAVAAPTASLHFDEKILNELKQNHNISYITLHVGAGTFKGVEASDIREHKMHSEFYDIPNLAADLISSNKPILGVGTTVTRSVEYFARTKQKSGFCNLFLNPDNRPIRQNYLLTNFHLPKSTLIMLVASFIGLEKTMELYKIAVENRYKFYSYGDGMLII

SEQ ID NO: 64661 - protein, 339 aa, Campylobacter insulaenigrae
  misc_feature (1)..(339): tr|A0A0A8H0B4|A0A0A8H0B4_9PROT S-adenosylmethionine:tRN A ribosyltransferase-isomerase OS=Campylobacter insulae nigrae NCTC 12927 OX=1031564 GN=queA PE=3 SV=1
MSEDFLLSNYDYTLPNELIANFPILPKENARLLVYIRKKNEILHLHFKDLASILPPCAIVFNDTKVIKARIYGQKETGSKIELFINNPFKNDTFAVQIKGKVKENQELYFKENLKAKVLKLNDDGTRIVEFFSKNIKLKHHQVFSILDCIGHIPLPPYIKRADQDSDIINYQSIFAKKEGAVAAPTASLHFSEEMIQNLRKKHDIYTTTLHVGAGTFKSVECQDLRAHKMHSEYFHIDKNTCNLINSKEKLLAIGTTVTRCIEYYIRTKKNEGFCDLFLHPQNKIQRVDYLLTNFHLPKSTLIMLVASFIGRKTTLEIYQEAIDKKYRFYSYGDGMLII

SEQ ID NO: 64662 - protein, 342 aa, Campylobacter jejuni
  misc_feature (1)..(342): sp|Q9PHT9|QUEA_CAMJE S-adenosylmethionine:tRNA ribosylt ransferase-isomerase OS=Campylobacter jejuni subsp. jej uni serotype O:2 (strain ATCC 700819 / NCTC 11168) OX=1 92222 GN=queA PE=3 SV=1
MNKDLLLSSYDYTLANELIANYPTNPKEDARLLVFDRKNKEIFHTTFKNLQDFLPNCAIFFNDTKVIKARIYGNKASGGKIELFLHQPFLNSHNPLFLAQIKGRIKKDEILYFKEDLKVRVVELLNDGLRKVQFFQNDKTLDTSNLYNLLDKIGHIPLPPYIKREDEKSDLKDYQSIFAKNLGAVAAPTASLHFSETMLENLRKKHEIYHLTLHVGAGTFKSVECENIQEHKMHSEFFNIPQQACEIIDSKQAILGVGTTVTRTIEYYTRTKTKNGFCDLFLHPQNPPIRQNHLLTNFHLPKSTLIMLVSAFIGREQCLKLYELAIKEKYRFYSYGDAMLIL

SEQ ID NO: 64663 - protein, 342 aa, Campylobacter jejuni
  misc_feature (1)..(342): sp|A1VYT7|QUEA_CAMJJ S-adenosylmethionine:tRNA ribosylt ransferase-isomerase OS=Campylobacter jejuni subsp. jej uni serotype O:23/36 (strain 81-176) OX=354242 GN=queA PE=3 SV=1
MNKDLLLSSYDYTLANELIANYPANPKEDARLLVFDRKNKEIFHTTFKNLKDFLPDCAIFFNDTKVIKARIYGNKASGGKIELFLHQPFLNSHNPLFLAQIKGRVKKDEILYFKEDLKARVVELLDDGLRKVQFFQNDKTLDTSNLYNLLDKIGHIPLPPYIKREDEKSDLKDYQSIFAKNLGAVAAPTASLHFSETMFENLRKKHKIYHLTLHVGAGTFKGVECENIQEHKMHSEFFNIPQQACEIIDSKQAILGVGTTVTRTIEYYARTKTKSGFCDLFLHPQNPPIRQNHLLTNFHLPKSTLIMLVSAFIGREQCLKLYKLAIKEKYRFYSYGDAMLIL

SEQ ID NO: 64664 - protein, 340 aa, Campylobacter lanienae
  misc_feature (1)..(340): tr|A0A381D9W2|A0A381D9W2_9PROT S-adenosylmethionine:tRN A ribosyltransferase-isomerase OS=Campylobacter laniena e OX=75658 GN=queA PE=3 SV=1
MMKNNIFDLDSYDYELPSSLIASSPANPKESANLLVYQRSNNKITHTKFGNLMEFLPDCDIIFNDTKVIKARIYGKKSSGGAVELLLNQPLGQGKFSTLIKGRVKAGTILEFDNGLSCEVIELLDEYRIVKFNQNGNEIKTENLYQILNQIGHIPLPPYIKRADQKSDEIWYQSIFAKNDGAVAAPTASLHFSQQMIQDIKNKHNISYITLHVGAGTFKGVEVSDIREHKMHSEIYTISDEAINTINSNKPILGVGTTVTRCIEYFYRTRVKDGLCDLFLHPANPPQRQNYLLTNFHLPKSTLIMLVASFVGLENVKQIYKQAIEKEYKFYSYGDAMLVI

SEQ ID NO: 64665 - protein, 338 aa, Campylobacter lanienae
  misc_feature (1)..(338): tr|A0A562Y546|A0A562Y546_9PROT S-adenosylmethionine:tRN A ribosyltransferase-isomerase OS=Campylobacter laniena e OX=75658 GN=queA PE=3 SV=1
MSDIFALSSYDYELPSHLIATTPAKPKESANLLIYDRSNSKITHTKFGNLMEFLPPCDIIFNDTKVIKARIYGKKSSGGAVELLLNQPLGDGKFSTLIKGRIKAGSVLEFDNGLSCEICDILNEYRVVKFYKNSKLLDTPNLYQILDQIGHIPLPPYIKRDDEKSDEIWYQSVFAKNSGAVAAPTASLHFSDEMIENLKSKHNISYITLHVGAGTFKSVESSDIREHKIHSEIYSMSDQAIQAINSDRAILGVGTTVTRCVEYFYKNGVKNGLCDLFLHPANPPKRQNYLLTNFHLPKSTLIMLVASFVGLDNVKEIYKQAIEKEYKFYSYGDAMLVI

SEQ ID NO: 64666 - protein, 342 aa, Campylobacter lari
  misc_feature (1)..(342): tr|A0A0A8H4T7|A0A0A8H4T7_CAMLA S-adenosylmethionine:tRN A ribosyltransferase-isomerase OS=Campylobacter lari su bsp. concheus LMG 11760 OX=1031536 GN=queA PE=3 SV=1
MKMIDKDLLLSSYDYDLPNELIANFPILPKENAKLLVYERCKDQISHLHFKDLARILPPCEIIFNDTKVIKARIYGNKESGSKIELFINHPLKNNKFLVQIRGKVKEGQILYFENSLKAKIKKLHDDGTREVEFFNDEKELSHHEVFEVLEKIGHIPLPPYIKRADEVQDSINYQSIFAKNQGAVAAPTASLHFDEAMINELKKNHNIHTITLHVGAGTFKGVECEDIRDHKMHSEFFHIDNETCALIDSSKKILGVGTTVTRCIEYYHRKKLKEGFCDLFLHPQNTPQRLDYLLTNFHLPKSTLIMLVAAFIGREKTLELYYEAIKNNYRFYSYGDGMLII

SEQ ID NO: 64667 - protein, 342 aa, Campylobacter lari
  misc_feature (1)..(342): tr|A0A0A8HVW0|A0A0A8HVW0_CAMLA S-adenosylmethionine:tRN A ribosyltransferase-isomerase OS=Campylobacter lari NC TC 11845 OX=1388749 GN=queA PE=3 SV=1
MKMIDKDLLLSSYDYNLPNQLIANFPILPKENAKLLVYERYKDQISHLHFKNLAKILPPCEIIFNDTKVIKARIYGTKESGSKIELFINHPLKNNDFLVQIRGKVKEGQILYFENSLKIKIKKLHSDGTREVEFFNDEKKLNHHEVFKILEKIGHIPLPPYIKRADEAQDSINYQSIFAKNQGAVAAPTASLHFDEAMIDELKKNHNIHTITLHVGAGTFKGVECEDIREHKMHSEFFHIDDETCALIDSSKKILGVGTTVTRCIEYYHRKKIKEGFCDLFLHPQNTPQRLDYLLTNFHLPKSTLIMLVAAFIGREKTLELYHEAIKNNYRFYSYGDGMLII

SEQ ID NO: 64668 - protein, 340 aa, Campylobacter ornithocola
  misc_feature (1)..(340): tr|A0A1C2FTL1|A0A1C2FTL1_9PROT S-adenosylmethionine:tRN A ribosyltransferase-isomerase OS=Campylobacter ornitho cola OX=1848766 GN=queA PE=3 SV=1
MINKDLLLSSYDYDLPSELVANFPILPKENAKLLVYERCKDQISHLHFKDLAKILPPCEIIFNDTKVIKARIYGTKESGSKIELFINHPLKNNDFLVQIRGKVKEGQILYFENSLKVKIKKLHDDGTREVEFFNGDKKLNHHEVFEILEKIGHVPLPPYIKRSDEAQDNINYQSIFAKNQGAVAAPTASLHFDEAMIDGLKINHNIHTITLHVGAGTFKGVECEDIREHKMHSEFFHIDDEVCALINSSKKILGVGTTVTRCIEYYHRKKTKEGFCDLFLHPQNTPQRLDYLLTNFHLPKSTLIMLVAAFMGREKTLELYHKAIENNYRFYSYGDGMLII

SEQ ID NO: 64669 - protein, 340 aa, Campylobacter peloridis
  misc_feature (1)..(340): tr|A0A5C7DZV1|A0A5C7DZV1_9PROT S-adenosylmethionine:tRN A ribosyltransferase-isomerase OS=Campylobacter pelorid is OX=488546 GN=queA PE=3 SV=1
MIDKDLLLSSYDYNLPNNLIANFPILPKENAKLLVYKRYKDQISHLHFKDLVKILPPCAIVFNDTKVIKARIYGYKESSSKVELFINHPLKNNDFLVQIRGKVKEGQILYFENSLKAKIKKLHDDGTREVEFFINEKELNHHEVFEILEKIGHVPLPPYIKRADEEQDNINYQSIFAKNQGAVAAPTASLHFDETMINELKKNHDIYTITLHVGAGTFKGVECEDIREHKMHSEFFHIDDKTCALIDSSKKILGVGTTVTRCIEYYHRKKIKEGFCDLFLHPQNTPQRLDYLLTNFHLPKSTLIMLVASFIGREKTLELYYEAIKNNYRFYSYGDGMLII

SEQ ID NO: 64670 - protein, 342 aa, Campylobacter peloridis
  misc_feature (1)..(342): tr|A0A0A8GRQ6|A0A0A8GRQ6_9PROT S-adenosylmethionine:tRN A ribosyltransferase-isomerase OS=Campylobacter pelorid is LMG 23910 OX=1388753 GN=queA PE=3 SV=1
MKMTNKDLLLSSYDYNLPNNLIANFPILPKENAKLLVYERYKDQISHLHFKDLVKILPPCVIVFNDTKVIKARIYGKKENGNKIELFINHPLKNNDFLVQIRGKVKEDQELYFDNSLKAKIKKLRNDGTREVEFFINEKKLNHHEVFEILEKIGHVPLPPYIKRADEEQDNINYQSIFAKNQGAVAAPTASLHFDETMIKKLKENHDIYTITLHVGAGTFKGVECEDIREHKMHSEFFYIDDKTCTLIDSSKKILAIGTTVTRCIEYYFRQKRNEGFCDLFLHPQNTPQRIDYLLTNFHLPKSTLIMLVASFIGREKTLELYHEAIKNNYRFYSYGDGMLII

SEQ ID NO: 64671 - protein, 339 aa, Campylobacter pinnipediorum
  misc_feature (1)..(339): tr|A0A1S6TQQ7|A0A1S6TQQ7_9PROT S-adenosylmethionine:tRN A ribosyltransferase-isomerase OS=Campylobacter pinnipe diorum subsp. pinnipediorum OX=1660067 GN=queA PE=3 SV= 1
MNDINALSSYDYNLPNELIANEPIMPKEDARLLVYHKNSKKIQHLKFGDLADILPKCAVIFNDTKVIKARIIGKKQSGGQTEIMLNQPLGDGKFSAYIRGKVNQGSMLIFDNEINAEVLKLNDDGTRVVSFLKSNKKLDTNEVFKELEIIGHIPLPPYIKRADTKEDESWYQSIFAQNSGAVAAPTASLHFSNEMLEKIKNTHKTSYITLHVGAGTFKGVESENINEHKMHSEFFSIPQATLDIINSDTPILGVGTTVTRCIEEYARSKKDSGFCNLFLNLNNPPIRQQYLLTNFHLPKSTLIMLVSSFIGLDETMEIYKTAIEKKYRFYSYGDGMIII

SEQ ID NO: 64672 - protein, 339 aa, Campylobacter pinnipediorum
  misc_feature (1)..(339): tr|A0A1S6U8A3|A0A1S6U8A3_9PROT S-adenosylmethionine:tRN A ribosyltransferase-isomerase OS=Campylobacter pinnipe diorum subsp. caledonicus OX=1874362 GN=queA PE=3 SV=1
MNDINALSSYDYNLPNELIANEPIMPKEDAKLLVYHKNSKKIQHLKFGDLADILPECAVIFNDTKVIKARIIGKKQSGGQTEIMLNQPLGDGKFSAYIRGKVNQGSMLIFDNDINAEVLKLNDDGTRVVSFLKSNKKLDTNEIFKELEIIGHIPLPPYIKRPDTKEDESWYQSIFAQNSGAVAAPTASLHFSNEMLEKIKKAHKTSYITLHVGAGTFKGVESENINEHKMHSEFFSIPQATLDIINSNTPILGVGTTVTRCIEEYARSKKESGFCNLFLNLNNPPIRQQYLLTNFHLPKSTLIMLVSSFIGLDETMEIYKTAIENKYRFYSYGDGMIII

SEQ ID NO: 64673 - protein, 342 aa, Campylobacter rectus
  misc_feature (1)..(342): tr|A0A3P1XB52|A0A3P1XB52_CAMRE S-adenosylmethionine:tRN A ribosyltransferase-isomerase OS=Campylobacter rectus OX=203 GN=queA PE=3 SV=1
MSQILNPNLLDAYDYELPPELIANFPTLPKEDARLLVYERASEKISHLKFGDLPEILPPCDIIFNDTKVVKARIFGKKQSGGETELLLNSPLADGKFSVYIKGKVRAGSILNFSENLTAEVCELFKDGSRTVKFSQSGRLLDAAALYKILSHIGHVPLPPYIKRSDTKDDESWYQSVFAKNEGAVAAPTASLHFSDEMIAGLAKDREIAYLTLHVGAGTFKGVESEDITQHKMHAEFYDIPQDTQNLINSDKPLLGVGTTVTRCVEEFARSGKASGECRLFLNLNNKPIRQNYLLTNFHLPKSTLIMLVTSFVGLEQTMRIYKTAVEQKYKFYSYGDAMLVI

SEQ ID NO: 64674 - protein, 342 aa, Campylobacter rectus
  misc_feature (1)..(342): tr|B9D1J1|B9D1J1_CAMRE S-adenosylmethionine:tRNA ribosy ltransferase-isomerase OS=Campylobacter rectus RM3267 O X=553218 GN=queA PE=3 SV=1
MSQILNPNSLDAYDYELPQGLIANFPTLPKEDARLLVYERAGEKISHLKFGDLPEILPPCDIIFNDTKVVKARIFGKKQSGGETELLLNSPLADGKFSVYIKGKVRAGSILNFSENLTAEVCELFKDGSRTVKFSQNGRLLDAAALYKILSHIGHVPLPPYIKRSDTKDDESWYQSVFAKNEGAVAAPTASLHFSDEMIAGLAKDREIAYLTLHVGAGTFKGVESEDITRHKMHAEFYDIPQDTQNLINSDKPLLGVGTTVTRCVEEFARSGKASGECRLFLNLNNRPIRQNYLLTNFHLPKSTLIMLVTSFVGLRQTMRIYKTAVEQKYKFYSYGDAMLVI

SEQ ID NO: 64675 - protein, 342 aa, Campylobacter showae
  misc_feature (1)..(342): tr|C6RCU4|C6RCU4_9PROT S-adenosylmethionine:tRNA ribosy ltransferase-isomerase OS=Campylobacter showae RM3277 O X=553219 GN=queA PE=3 SV=1
MSRILNPNSLDAYDYDLPPELIANFPTFPKENARLLVYERASEKISHLKFGDLPKILPPCDIIFNDTKVVKARIFGKKDSGGETELLLNSPLADAKFSVYIKGKVRAGSILNFGENLTAEVCELFEDGSRTVKFSQNGELLDTAALYKILSHIGHVPLPPYIKRSDTKDDESWYQSVFAKNEGAVAAPTASLHFSDEMIARLAKDREIAYLTLHVGAGTFKGVESEDITQHKMHAEFYDIPQDTQNLIRSNRPILGVGTTVTRCVEEFARSGKSSGECRLFLNLNNKPIRQNYLLTNFHLPKSTLIMLVTSFVGLRQTMRIYKTAVEQKYKFYSYGDAMLVV

SEQ ID NO: 64676 - protein, 342 aa, Campylobacter showae
  misc_feature (1)..(342): tr|M5IIL0|M5IIL0_9PROT S-adenosylmethionine:tRNA ribosy ltransferase-isomerase OS=Campylobacter showae CSUNSWCD OX=1244083 GN=queA PE=3 SV=1
MSQILNPNSLDAYDYELPPELIANFPTFPKEDARLLVYERASGKISHLKFGDLPEILPPCDIIFNDTKVVKARIFGKKQSGGETELLLNSPLADGKFSVYIKGKVHAGSVLNFDENLTAEVCELFGDGSRTVKFSQNDQLLDAAALYRVLSHIGHVPLPPYIKRSDTEDDESWYQSVFAKNEGAVAAPTASLHFSDEMIARLAKGREIAYLTLHVGAGTFKSVESEDITQHKMHAEFYDIPQDTQNLIRSNRPILGVGTTVTRCVEEFARSGKSSGECRLFLNLNNKPIRQNYLLTNFHLPKSTLIMLVTSFIGLEQTMRIYKTAVEQKYKFYSYGDAMLVI

SEQ ID NO: 64677 - protein, 340 aa, Campylobacter sp.
  misc_feature (1)..(340): tr|A0A420VNG0|A0A420VNG0_9PROT S-adenosylmethionine:tRN A ribosyltransferase-isomerase OS=Campylobacter sp. P25 5 OX=1979368 GN=queA PE=3 SV=1
MNDKDLLLSSYDYNLPSELIANFPILPKENAKLLVYERYKDQITHLHFKDLAQILPPCEIIFNDTKVIKARIYGNKESGSKIELFINHPLKEDNFLVQIRGKVKEGQILYFENKLQAKIKKLHQDGTREVEFYNEQKTLTHHEVFKILENIGHVPLPPYIKRADEAQDNINYQSIFAKNQGAVAAPTASLHFDEAMINELKKSHSIHTITLHVGAGTFKGVECEDIREHKMHSEFFCISDATRALIDSSKKILGVGTTVTRCIEYYYQNKIQEGYCDLFLHPQNTPQRLDYLLTNFHLPKSTLIMLVASFIGREKTLELYHEAIKNQYRFYSYGDGMLII

SEQ ID NO: 64678 - protein, 339 aa, Campylobacter sp.
  misc_feature (1)..(339): tr|A0A1X9T253|A0A1X9T253_9PROT S-adenosylmethionine:tRN A ribosyltransferase-isomerase OS=Campylobacter sp. RM8 964 OX=1660074 GN=queA PE=3 SV=1
MKNNIFDLDSYDYELPSSLIASSPANPKESANLLVYQRSNNKITHTKFGNLMEFLPDCDIIFNDTKVIKARIYGKKSSGGAVELLLNQPLGQGKFSTLIKGRVKTGTILEFDNELSCEVIELLDEYRIVKFYQNNRLVDTACLYQILNTIGHVPLPPYIKREDQKSDEIWYQSIFAKNDGAVAAPTASLHFSPQIIQNLKSKHNISYITLHVGAGTFKGVEVSDIREHKMHSEIYTISDEAINTINSNKPILGVGTTVTRCIEYFYKTGVKDGLCDLFLHPANPPQRQNYLLTNFHLPKSTLIMLVASFVGLDNIKEIYKQAIEKNYKFYSYGDAMLVI

SEQ ID NO: 64679 - protein, 339 aa, Campylobacter sputorum
  misc_feature (1)..(339): tr|A0A381DIM8|A0A381DIM8_9PROT S-adenosylmethionine:tRN A ribosyltransferase-isomerase OS=Campylobacter sputoru m biovar sputorum OX=32024 GN=queA PE=3 SV=1
MIDLLKTSSYDYFLPQEFIAKEPVLPRENAKMLVYDRKKDTILHKHVKDLPEILPECSIVFNDTKVVKARAYGVKSSGGKVEILLNAPLINGNFGAYIKGRVKVGSEIALSDSFKFIVKSLFDDGLREVEFYLKDKKLNTTEVFNEMDCIGHVPIPPYIKRDDNKNDEIWYQSIFAKYQGAVAAPTASLHFSSELVDKLKINYDIYTLTLHVGAGTFKGIESEDITKHKMHEEWYHLPQNTINLINSTDKILGIGTTVTRVIEDFARNGRSSGVCELFLNPFNKPIRQDYLLTNFHLPKSTLIMLVCSFIGFEKTMEIYDIAIKNNYRFYSYGDCMLVL

SEQ ID NO: 64680 - protein, 340 aa, Campylobacter subantarcticus
  misc_feature (1)..(340): tr|A0A0A8H8U8|A0A0A8H8U8_9PROT S-adenosylmethionine:tRN A ribosyltransferase-isomerase OS=Campylobacter subanta rcticus LMG 24374 OX=1388751 GN=queA PE=3 SV=1
MNDKDLLLSSYDYNLPSELIANFPILPKENAKLLVYKRCKNQITHLHFKNLAQILPPCEIIFNDTKVIKARIYGNKESGSKIELFINHPLKNNDFLVQIRGKVKEGQILYFENKLQVKIKKLHQDGTREVEFYNEQKTLTHHEVFKILEEIGHVPLPPYIKRADEAQDNINYQSIFAKNQGAVAAPTASLHFDEAMINELKKNHSIHTITLHVGAGTFKSVECEDIREHKMHSEFFYISDATRALIDSSKKILGVGTTVTRCIEYYYQNKIQEGYCDLFLHPQNTPQRLDYLLTNFHLPKSTLIMLVASFIGREKTLELYHEAIKNQYRFYSYGDGMLII

SEQ ID NO: 64681 - protein, 341 aa, Campylobacter upsaliensis
  misc_feature (1)..(341): tr|A0A381DWL6|A0A381DWL6_CAMUP S-adenosylmethionine:tRN A ribosyltransferase-isomerase OS=Campylobacter upsalie nsis OX=28080 GN=queA PE=3 SV=1
MTMCEDLKLSNYDYFLPKELIATHPVQPKEAARLLIYEREKDKITHSTFANLEQFLPDCAIFFNDTKVIKARIYGKKESGGKIELFLHSSVSECEFNAQIRGRVKKGEILHFKEGLSAEILELYADGLRKVCFKQDENLLNTSKLYALLEKIGHIPLPPYIKRADTLKDTQDYQSIFAKNLGAVAAPTASLHFSKAMLKSLKKRHEIHTITLHIGAGTFKSVECEDIREHQMHSEFFHINEAAKACIDSKKAILGVGTTATRSIEYYARTGLCSGACDLFLHPFNKPLRQNFLLTNFHLPKSTLIMLVSSFIGREKTLALYKEAVSLQYRFYSYGDAMLIL

SEQ ID NO: 64682 - protein, 339 aa, Campylobacter upsaliensis
  misc_feature (1)..(339): tr|A0A3X8R4H8|A0A3X8R4H8_CAMUP S-adenosylmethionine:tRN A ribosyltransferase-isomerase OS=Campylobacter upsalie nsis OX=28080 GN=queA PE=3 SV=1
MCENLKLSNYDYFLPKELIATHPAQPKEAARLLIYEREKDKITHSTFANLEQFLPDCAIFFNDTKVIKARIYGKKESGGKIELFLHSSVSECEFNAQIRGRVKKGEILHFKEGLSAEILELYADGLRKVCFKQDENLLNTSKLYALLEKIGHIPLPPYIKRADTLKDTQDYQSIFAKNLGAVAAPTASLHFSKAMLESLKKRHEIHTITLHIGAGTFKSVECEDIREHQMHSEFFHINEAAKACIDSKKAILGVGTTATRSIEYYVRTGLCSGACDLFLHPFNKPLRQNFLLTNFHLPKSTLIMLVSSFIGREKTLALYKEAVSLQYRFYSYGDAMLIL

SEQ ID NO: 64683 - protein, 342 aa, Campylobacter ureolyticus
  misc_feature (1)..(342): tr|A0A2I1NB73|A0A2I1NB73_9PROT S-adenosylmethionine:tRN A ribosyltransferase-isomerase OS=Campylobacter ureolyt icus OX=827 GN=queA PE=3 SV=1
MKKMNKLDNINSYDYYLPNELIATAPIMPKEEAKLLVYDRKNNSISHHKFGDLPEILPQCDIIFNDTKVIKARIYGTKQSGGKIELLINCPLNDGKFSVYIKGKVKPFDKLYFNENLIAKVLEIFDDGSRIVEFYSGDKILNLSEVFEILNKIGHIPLPPYIKRNDTKDDEIWYQSVFAKHSGAVAAPTASLHFSDEMLEVLRKQHEIYYLTLHVGAGTFKGVEFEDINKHIMHSEYFNIPNDTAEILKSNRPILGVGTTVTRVVEDYARNHVLSGECKLFLNYKNRPIRQNYLLTNFHLPKSTLIMLVTAFIGYEKTMEIYKVAVDEKYRFYSYGDAMLVI

SEQ ID NO: 64684 - protein, 339 aa, Campylobacter ureolyticus
  misc_feature (1)..(339): tr|S3YHJ7|S3YHJ7_9PROT S-adenosylmethionine:tRNA ribosy ltransferase-isomerase OS=Campylobacter ureolyticus ACS -301-V-Sch3b OX=883165 GN=queA PE=3 SV=1
MNKLDNINSYDYYLPNELIATTPIMPKEEAKLLVYDRKNNSISHHKFGDLPEILPQCDIIFNDTKVIKARIYGTKQSGGKIELLINRPLSDGKFSVYIKGKVKPFDKLYFNENLIAKVLEIFDDGSRIVEFYSGNKILNLSEVFEILNKIGHIPLPPYIKRDDTKDDEIWYQSVFAKHSGAVAAPTASLHFSDEMLEILRKQHEIYYLTLHVGAGTFKGVEFEDINKHIMHSEYFNIPNNTAEILKSNRPILGVGTTVTRVVEDYARNHVLNGECKLFLNYKNRPIRQNYLLTNFHLPKSTLIMLVTAFIGYEKTMEIYKVAVDEKYRFYSYGDAMLIL

SEQ ID NO: 64685 - protein, 339 aa, Campylobacter volucris
  misc_feature (1)..(339): tr|A0A5C8L061|A0A5C8L061_9PROT S-adenosylmethionine:tRN A ribosyltransferase-isomerase OS=Campylobacter volucri s OX=1031542 GN=queA PE=3 SV=1
MNEDFLLSNYDYSLPNELIANFPILPKENARLLVYERKKDQISHLYFKDLNSILPQCDIIFNDTKVIKARIYGHKDTGSKIELFINNPFANESFLVQIRGKVKKDQILYFEQNLQAKILQLNNDGTRIVEFFTHQKKLNHQEVFDILDHIGHIPLPPYIKRADENSDSINYQSIFADKKGAVAAPTASLHFSEDMIKQLKKNHNIHTITLHVGAGTFKSVECDNIKDHKMHSEFFQINDETCKIIDSNQALLGVGTTVTRCVEYYSRYKIKEGFCDLFLHPHNKPQRLNYLLTNFHLPKSTLIMLVSAFIGREKTLQIYTQAIKNKYRFYSYGDSMLII

SEQ ID NO: 64686 - protein, 339 aa, Campylobacter volucris
  misc_feature (1)..(339): tr|A0A5C7DQE9|A0A5C7DQE9_9PROT S-adenosylmethionine:tRN A ribosyltransferase-isomerase OS=Campylobacter volucri s OX=1031542 GN=queA PE=3 SV=1
MNEDFLLSNYNYSLPNELIANFPILPKENARLLVYERKKDQISHLYFKDLNSILPQCDIIFNDTKVIKARIYGHKDTGSKIELFINNPFANDSFLVQIRGKVKKDQILYFEQNLQAKILQLNNDGTRIVEFFTHQKKLNHQEVFDILDHIGHIPLPPYIKRADENSDSINYQSIFADKKGAVAAPTASLHFSEDMIKQLKKNHNIHTITLHVGAGTFKSVECDNIKDHKMHSEFFKINDETCKIIDSNQALLGVGTTVTRCIEYYSRYKIKEGFCDLFLHPYNKPQRLNYLLTNFHLPKSTLIMLVSAFIGREKTLEIYTQAIKNKYRFYSYGDGMLII

SEQ ID NO: 64687 - protein, 349 aa, Campylobacteraceae bacterium
  misc_feature (1)..(349): tr|A0A1V4R9N8|A0A1V4R9N8_9PROT S-adenosylmethionine:tRN A ribosyltransferase-isomerase OS=Campylobacteraceae ba cterium 4484_166 OX=1956165 GN=queA PE=3 SV=1
MSLKRVARKSIRFYTKNYDFFLPKDLIASKPVYPADEAKLLIFDRKTKKTTHDTFKNIINYLPQNLSVYLNNTKVIKARIYGFKPTKGKIELLVLRYLDDIKCLVYIKGKVQKDMELLFEDNLIAKVIDILDDGSKIVHFYQNNQKIKFDNLVTILDKIGHVPLPSYIKRDDDIEDIKDYQTIFAKTYGAVASPTASLHFTQELFNRFKEKFDINYLTLHIGAGTFKPVDVEDIREFKIHKECYDIPKTTIESLQNKTTKKMAIGTTVTRTIEYYNKTKLSSGLCDLFLHPHNKPQITDILLTNFHLPRSTLIMLVASFVGVEQTIKLYDEAIKKDYRFYSYGDAMLVV

SEQ ID NO: 64688 - protein, 341 aa, Campylobacterales bacterium
  misc_feature (1)..(341): tr|A0A258WZH9|A0A258WZH9_9PROT S-adenosylmethionine:tRN A ribosyltransferase-isomerase OS=Campylobacterales bac terium 16-40-21 OX=1970501 GN=queA PE=3 SV=1
MTKDPLLTSSYEYHLPDGLIATHPVHPRDHARLLVYNRNDRSITHTRFDRLNDFLPKECAIIFNDTKVIKARLYGKKESGGAVELLINRPLNAHTINVYIKGRVKINTILYFDANVTAIVKALHEDGSREVTFYLNDVRLRFEELLPLLDKIGHIPLPPYLGREDNSEDEREYQSVFAAHEGAVAAPTASLHFTDELFELVCSSHPHAFVTLHVGSGTFKPVECATITDHPMHSEYFEISDAALQLIQSSTPLLSIGTTSTRTIEYHTRTGELHGEANLFLHPHNPPQRVDHLITNFHLPQSTLLMLVASFVGLEETHRLYQEAIDEKYRFFSYGDAMLIL

SEQ ID NO: 64689 - protein, 350 aa, Scalindua sp.
  misc_feature (1)..(350): tr|A0A286U1Q9|A0A286U1Q9_9BACT S-adenosylmethionine:tRN A ribosyltransferase-isomerase OS=Candiadtus Scalindua japonica OX=1284222 GN=queA PE=3 SV=1
MNTTPYKTSNYDYDLPKNLIAQYPITKRDESRLLVLHKKSSRIEHRKFHEIIEYLNCGDVLVLNDTKVSPARIHGTRTTGGKVEGLIIKELEENTWEVLLQSNHRLKENEVLNFDNGVKGQILWRNETGSWIIRSEDREKFIKMIESSGRMPLPPYIKRDSNNKSHGIHDEERYQTIYAKTTGAIAAPTAGLHFTSKLLEEITCKGINIVYITLHVGLGTFKPIHKEDFRQHTIHKEFYNIPEEAIDTINKAKSHGKRIIATGTTTCRALETIAKNQTTGKNSGWTNLFIYPPYKFKLTDSLITNFHLQRSTLLLLVSAFAGRENIATSYEEAISHSYRFYSYGDCMLIL

SEQ ID NO: 64690 - protein, 353 aa, Unknown
  misc_feature (1)..(353): tr|A0A1F4S8Q9|A0A1F4S8Q9_9BACT S-adenosylmethionine:tRN A ribosyltransferase-isomerase OS=candidate division WO R-1 bacterium RIFOXYB2_FULL_36_35 OX=1802578 GN=queA PE =3 SV=1
MPTFNSNILKTSDFDYYLPFDFIAQFPVTKRDESRLMVLSRRESSLEHRFFSDIVDCLSSGDLLVLNDTKVIPANLVGRKAEGIARIEVLLAKHVEKSEWLCLVKPGKRLKVGSKVIFSSYLTGEVLKKLESGEQIIRFNGELDRFMKEKGEIPLPPYITDLRQQPADHKLQEMTNRYQTVYAQKDGATAAPTAGLHFTPELLARIESKGVEIKKITLHTGLGTFKPVYTEYIKDHKMHEEDFEISVDVLRSIKKAKRVIAVGTTTVRTLETLAHSNRLNALNDIYGSTDIFIYPGFKFKVVDAMITNFHVPKSTLLMLVSAFAGREFILNAYKEAIDNYYRFFSFGDAMLIF

SEQ ID NO: 64691 - protein, 374 aa, Unknown; identical to SEQ ID NO: 63949
  misc_feature (1)..(374): tr|A0A2M7WYG4|A0A2M7WYG4_9BACT S-adenosylmethionine:tRN A ribosyltransferase-isomerase OS=candidate division WW E3 bacterium CG_4_9_14_3_um_filter_43_9 OX=1975082 GN=q ueA PE=3 SV=1

SEQ ID NO: 64692 - protein, 80 aa, [Bacteroides] periocalifornicus
  misc_feature (1)..(80): tr|A0A0Q4B4I4|A0A0Q4B4I4_9BACT S-adenosylmethionine:tRN A ribosyltransferase-isomerase (Fragment) OS=Candidatus [Bacteroides] periocalifornicus OX=1702214 GN=AL399_09 355 PE=3 SV=1
TLSSALSRERNAHSAAGTNYWVDFDWDAADVSFAEILESVGELPIPPYLNRDTEESDKTSYQTVYSKIKGSVAAPTAGLH

SEQ ID NO: 64693 - protein, 349 aa, [Bacteroides] periocalifornicus
  misc_feature (1)..(349): tr|A0A0Q4BA51|A0A0Q4BA51_9BACT S-adenosylmethionine:tRN A ribosyltransferase-isomerase OS=Candidatus [Bacteroid es] periocalifornicus OX=1702214 GN=queA PE=3 SV=1
MKLSQFQFDLPQELVARYPTEERDKARLMVGTRRNGKIEHKQFKDLLHYLGDGDTLVMNDTKVFPARLHGKKEKTQADIEVFLLRELNAESRLWDVLVDPARKIRIGNKLYFGEGDMMVAEVVDNTTSRGRTLRFLYDGPHEEFRARLFELGETPLPKSVGRPPEPVDVERYQTIYAEHEGAVAAPTAGLHISRELLKRLQIKGVNLGFITLHVGLGNFRRIEVEDLSKHKADAEQIVITQAAADLINNTLDKGKQVCAVGTTVVRTLESSVTTDNRVLSFSGWTNKFIFPPYAVQLPTMLVTNFHLPCTAQMMTVASFTGYEFMREMYEIAVREKYQFGTYGDAMLVL

SEQ ID NO: 64694 - protein, 352 aa, Abawacabacteria bacterium
  misc_feature (1)..(352): tr|A0A1F4XJZ0|A0A1F4XJZ0_9BACT S-adenosylmethionine:tRN A ribosyltransferase-isomerase OS=Candidatus Abawacabac teria bacterium RBG_16_42_10 OX=1817814 GN=queA PE=3 SV =1
MGKDSQEISPSYKLDSYDFNVPEELIAKEPIEPRDHARLLMYNRADQSITHHYFYELPELLPKNLALVLNNSKVFLARTMARKKESTSTSNIEVLFVRDLGNHRWETLMRPGKRMREGQHVIFADGSEAKLISKGDAVCVLEWNNTKPQEFFEKYGQLPLPPYLAGSHAKKSDYQTVYANSIGSSAAPTAGLHFTDVLLRKLAKSHPLHYVTLHVGLGTFKPVQTEDIREHTMHEEYVELSGEVARALNEGGDEDGGKMKICAVGTTSLRTLETAFKNNNFHELHGVTDLYLYPGKKLQAVDMLITNFHTPKSSLFILVASIVGLDEAKRIYQEAIDKKYRFFSFGDAMLIV

SEQ ID NO: 64695 - protein, 343 aa, Abyssubacteria bacterium
  misc_feature (1)..(343): tr|A0A3A4P4M0|A0A3A4P4M0_9BACT S-adenosylmethionine:tRN A ribosyltransferase-isomerase OS=Candidatus Abyssubact eria bacterium SURF_5 OX=2093360 GN=queA PE=3 SV=1
MKLSDFDYELPQELIAQHPRQTRGQSRLMVINRSDGSIRVGTFNDILTYLQPGDALVLNDTKVFPARLRARKSSTGAAIELLLLNEVKPGEWEALVRPGRRVEVGTRLSLIGARQADTVEVAADCGKTKILRFYVEDVRRLCWRIGEIPLPPYIKRRTEPADHARYQTVFAKRVGAAAAPTAGLHFTTELLKELRDRDVQLEYVTLHIGLGTFQPLEYEEVEKNMLHQEAYALTEKTASRLNEARKRKKKIVAVGTTTLRLLETVVNENCLFEPKNGFSDIFIYPGHTCRSADALVTNFHLPRSSLLLLVSAFAGRDLILRAYKRAIQERFLFYSYGDAMLIL

SEQ ID NO: 64696 - protein, 343 aa, Abyssubacteria bacterium
  misc_feature (1)..(343): tr|A0A419F6L7|A0A419F6L7_9BACT S-adenosylmethionine:tRN A ribosyltransferase-isomerase OS=Candidatus Abyssubact eria bacterium SURF_17 OX=2093361 GN=queA PE=3 SV=1
MKLSDFDYDLPPELIAQHPAPRRGHSRLMVVDRASNSIRIGTFPEIIGHFGSGDALVLNDTKVFPARLRARKVETGAHVELLLLNEIEKGTWEAMARPGRRLKAGTLLSIEGARQADTVEVVEDRGAIKTLKFSVGDVRRLCWRVGEIPLPPYIRREAESDDIHRYQTVFARREGASAAPTAGLHFTSELLKELSDKGVSVEFVTLHIGLGTFQPLEHEEVEKNTIFPERYRMTAKTARRLNEVRRREGRVIAVGTTTLRLLETVVTEKGEYEAGEGIADIFIYPGHTFRSADALITNFHLPRSSLLLLVCAFAGRDLIMRAYETAVKEQFRFYSYGDAMLIL

SEQ ID NO: 64697 - protein, 358 aa, Accumulibacter aalborgensis
  misc_feature (1)..(358): tr|A0A1A8XZ57|A0A1A8XZ57_9PROT S-adenosylmethionine:tRN A ribosyltransferase-isomerase OS=Candidatus Accumuliba cter aalborgensis OX=1860102 GN=queA PE=3 SV=1
MLTLDDFDFDLPSALIAQHPTAERTASRLLQVTDQALHDHRFGDLPELIAAGDLLVFNDTRVIRARLFGRKESGGRIEVLIERISDARHALAQIRASKSPKPGSRILLEDAITLIVRERSGEQGEFFALELAGEGDLWALIEKHGRLPLPPYITHAAGSDDEKRYQTVFARHPGAVAAPTAGLHFDDALLAQLGERGIEAAWLTLHVGAGTFQPVRVHSVAEHRMHAERFEIPPATIAAIARTHARGGQVIAVGTTSLRALEAAAQGGELHAGPAETDIFITPGYPFRVVDRLITNFHLPKSTLLMLVSAFAGMDAIRSAYRHAISHGYRFFSYGDAMFLDRRESPRAALSDLSNTCQ

SEQ ID NO: 64698 - protein, 343 aa, Accumulibacter sp.
  misc_feature (1)..(343): tr|A0A533QIX8|A0A533QIX8_9PROT S-adenosylmethionine:tRN A ribosyltransferase-isomerase OS=Candidatus Accumuliba cter sp. OX=2053492 GN=queA PE=3 SV=1
MLTLDDFDFDLPAELIAQEPAAERSGSRLLQVCGSGISDHRFNELPALLSAGDLLVFNDTRVIRARLLGRKASGGRIEVLVERIVDARHAVAQIRASKSPRPGSLILLEDAITLRVCGRSGEQGEFFALELAGDGDLWRLVERHGRLPLPPYITHAAADADEERYQTVFARSPGAVAAPTAGLHFDAALLQRLAGHAVGAAWLTLHVGAGTFQPVRVRNLAEHRMHSERFEIPAATVDAIARTRSGGGRVVAVGTTSLRALEAAAQSGELRAGAGETDLFITPGYEFRIVDRLLTNFHLPKSTLLMLVSAFAGREPVRRAYEHAIRQRYRFFSYGDAMLLARQ

SEQ ID NO: 64699 - protein, 400 aa, Acididesulfobacter guangdongensis
  misc_feature (1)..(400): tr|A0A519BHL8|A0A519BHL8_9DELT S-adenosylmethionine:tRN A ribosyltransferase-isomerase OS=Candidatus Acididesul fobacter guangdongensis OX=2597225 GN=queA PE=3 SV=1
MKLEDFNYFFDEKLIAKYPLKNRDESKLLAVNVKKFTVEHKKFYDIIDYINPGDVITVNSSYVKKARIFGKRETGGKVEIFILDFPNKITFPLTLKCLLKTHKKIKKNERITVLSSNGEKNTACDNRHTSEYFDFKEDFKEDRNRKNEDSCCDNYNNYNNGNQNNNFFITASNYLGESTWEIIIQNENDYNFIFDNCAAVPLPPYIKRPTDKNDEIYYQTIYAKEASGFSVAAPTAGLHFTENLINKIKNKGGIFTDISLNIGLGTFAPVREKDIENHNMHEERYKISEKTANIINNALKNGNKLIATGTSSVRCLESSTGNDGTVRPESDAITSLYIYPGYKFKITKNLITNFHQPKSSLFIMLSALIGLDKMKILYEEAMNNDYKFFSYGDAMFLYNI

SEQ ID NO: 64700 - protein, 396 aa, Acididesulfobacter diazotrophicus
  misc_feature (1)..(396): tr|A0A519BN69|A0A519BN69_9DELT S-adenosylmethionine:tRN A ribosyltransferase-isomerase OS=Candidatus Acididesul fobacter diazotrophicus OX=2597226 GN=queA PE=3 SV=1
MDLEDFNYLFDEKLIAKYPLKNRDESKLLAVDIKKFKIEHRKFYDIIDYINPGDVIAVNSSYVKKARIFGKRKTGGKVEIFVLDFPNEITFPLKLKCLIKTHKKIKENELIIISPINNNKINNKKNTANSTNTTNILEYTDFEENSNDNDNTNNVNDNDHEISITASNCFGKGEWEIIIQNENDYNFIFDNCSAVPLPPYIKRQTDKNDEVYYQTIYANKDSGFSVAAPTAGLHFTEKLINKIKNKGGIFTDISLNIGLGTFEPVRERNITNHNMHEERYKISKETANAINNAVKNGNKIIATGTSSVRCLESSTDVDGAVHSENDAITSLYIYPGYKFKITKNLITNFHQPKSSLFIMISALIGLDKMKILYEEAINNDYKFFSYGDAMFLYNID

SEQ ID NO: 64701 - protein, 373 aa, Acidulodesulfobacterium ferriphilum
  misc_feature (1)..(373): tr|A0A519BC81|A0A519BC81_9DELT S-adenosylmethionine:tRN A ribosyltransferase-isomerase OS=Candidatus Acidulodes ulfobacterium ferriphilum OX=2597223 GN=queA PE=3 SV=1
MELDLFDYKFDEKLIAKYPLKKRDEARLLAVDVKNFKMEHKKFYDITNYINKNDAVIVNNSFVKKARIFGRRQTGGKVEIFITEFPFNISFPLRLNALIKSHKTVKEGEKILITEENKTENKAGEEGDRENTFIKSGNYLKITALKNHGNGNYDILINNKEDGDFLFDKCAGIPLPPYLKRSPENIDESYYQTVYADNLSGFSVAAPTAGLHFTDDLINKINGKGGIFANVSLNIGLGTFMPVREKDISKHNIHPETYTISEKTARLINETLKSGNKIIITGTSSVRCLESGADSGGILIPAAEKSTSLYIRPGYKFKITKNLITNFHQPKSSLFIMICALIGIDKTKAVYEEAVKNGYSLFSYGDAMYLYNI

SEQ ID NO: 64702 - protein, 331 aa, Actinomarina minuta
  misc_feature (1)..(331): tr|S5DQK5|S5DQK5_9ACTN S-adenosylmethionine:tRNA ribosy ltransferase-isomerase OS=Candidatus Actinomarina minut a OX=1389454 PE=3 SV=1
MPFKSSIFDYHLPPESINQNPYKDPNKSQLLIANTRDIITFENLPSIINTPSLFILNKSTVKNVRVKTNKLTGGSIEIFFLEILEDKIAKCLIKSSDKKHLNKHYKLNIFDFEIININNDTFHIKTSLNIEQILSKHGKTPLPPYIEDDEYKYKYYNNQFSNGGFSVASPTAGLHFTNDLIERLKKDGHEFVYINLDVNIDTFKPVTSEYLEHHNIHEEKYRVLDGDFNKILKAKDLGVDIYCVGTTSLRTIETVYLTNNLVGKTDYFIFPDTKINIPDYLITNFHAPKSSLLSIVSAVYGKEWIDLYKYALDSDMKFLSFGDAVIFEVNE

SEQ ID NO: 64703 - protein, 332 aa, Actinomarinales bacterium
  misc_feature (1)..(332): tr|A0A520VS36|A0A520VS36_9ACTN S-adenosylmethionine:tRN A ribosyltransferase-isomerase OS=Candidatus Actinomari nales bacterium OX=2510331 GN=EVA29_02195 PE=3 SV=1
MIKTKTDTLNYDLSKKNIAQTRYENPNESKLLIADTKEIITFKELKNILPKKSVLVFNKSTVEDVRIKTTKKDTGGKIEIFILNKISNNLCECLLKFNGTKNIGTTLNTVNFEFKIMDKKDEIFIIKTSSSINNIIKNYGLTPLPPYIKDNKSQYKYYKTDYSKGGFSIAASTAGLHFNKEIIDKFKKDGIVIKYINLDIGLGTFKPINTEYINEYEIHKESYSMYEKDYIHLLKLKENGYVIISIGTTVLRTLETIALNGKFHGDTNLYITPGFNFKIVDFLITNFHAPKSTLLSIVLTIYGKKWKELYMYAQKKKLKFLSFGDAVLFKIK

SEQ ID NO: 64704 - protein, 331 aa, Actinomarinales bacterium
  misc_feature (1)..(331): tr|A0A520VZV0|A0A520VZV0_9ACTN S-adenosylmethionine:tRN A ribosyltransferase-isomerase OS=Candidatus Actinomari nales bacterium OX=2510331 GN=EVA27_02250 PE=3 SV=1
MPFESKVYNYILPKESINQNPYTEPNLSKLLIADTKLIIEFKDISSIIKKPSLFILNKSQVQSVRVVSKKSTGGKIEVFVLDIQSPYIAKCLIKSTDKKVLNKKYKLQKFNFEIIRILNDTYEIKFNIPVTEIIKSHGQIPLPPYIKDDSSKYEYYNNQFAEGGFSVASPTAGLHFSNQQINKLTNEGHQFIFINLDVNIDTFKPITERYLEDHKIHKENYQISKNDFEIILNAKNSNIDIYCVGTTSLRAIESAYLTGELSSSTDYFIYPDTKINIPNYLITNFHAPNSSLLSIVDCIYGSQWKDLYNFAIDSELKFLSFGDAVLFNVNE

SEQ ID NO: 64705 - protein, 345 aa, Aegiribacteria bacterium
  misc_feature (1)..(345): tr|A0A1V4N050|A0A1V4N050_9BACT S-adenosylmethionine:tRN A ribosyltransferase-isomerase OS=Candidatus Aegiribact eria bacterium MLS_C OX=1775674 GN=queA PE=3 SV=1
MKLDDFRYDLPPELIAQRPLEDRSSSRLLAARVFDHGLRDMFFRQLPEILHSGDLLVLNDTRVFRARLKGRKAATGGMVEVFLLKRFEDDLWKAMVRPGRSAKAGAVFDFGGRLSCTVEERLEHGRAMVRFSAGGNLSETLEAEARVPLPPYIRREPEELDRHRYQTVFASAKGAVAAPTAGLHFTRELLDRLAEGGVDRTFVTLHVGPGTFQPLRFAEISRNRLEPEEYYVPAASLESIRSARSRGGRIVAVGTTTTRILETVDLDSTGPLSGETDMFIFPPYSFRNVDVLITNFHLPESSLLCLVAAFMGYDFMMRAYTHAVENSYRFYSYGDAMIIEKEPAG

SEQ ID NO: 64706 - protein, 322 aa, Aerophobetes bacterium
  misc_feature (1)..(322): tr|A0A497E2E6|A0A497E2E6_9BACT S-adenosylmethionine:tRN A ribosyltransferase-isomerase (Fragment) OS=Candidatus Aerophobetes bacterium OX=2030807 GN=DRJ00_07235 PE=3 SV=1
MKLEDFDYHLPRQLIAQKPVFPRDSCRLLVLHKKEGRIEHRKFYQILEFLREGDVVVLNNTRVIPARLMGRKKKTGGKAELFLLRKRGDEDWECLLKPAKRIREGAQIFFPGSSLLATVVRREEGARGIVRFSVSGNVEEVIAQVGRLPLPPYIKRRGGPTSEDEESYQTVYAKEKGAVAAPTAGLHFTPSLLEKMKEKGIKVVEITLHTGWASFKPLDKERIQDNKIAEEYFKVSGEAALAINEAKKSGFRVVAVGTTTTRALETQAEPSGTLRQGEGWTSLFIYPGYRFKVVDALLTNFHMPRSSLILLVCAFAGREKIL

SEQ ID NO: 64707 - protein, 345 aa, Aerophobetes bacterium
  misc_feature (1)..(345): tr|A0A523S3K1|A0A523S3K1_9BACT S-adenosylmethionine:tRN A ribosyltransferase-isomerase OS=Candidatus Aerophobet es bacterium OX=2030807 GN=queA PE=3 SV=1
MKLEEFDYYLPKELIAQQPFISRDSSRLLVLHRDRDEIEHKRFYEIVEFLQKGDLLVLNNTRVIPARLKGRKKETGGKVEIFLLQKKRMSSWECLLKPAGRIREGTQIYFSQTRLMARVVSKDQGAKAVVEFTPSKGVEEILAEIGQIPLPPYIKRDKDPSLEDRKRYQTVYAKEEGAVAAPTAGLHFTYSLFERIKEEGIKVVEITLHTGWASFKPLSREEVEKNKIPEEYFMINKEAAAAINEVKKGKGRIVAVGTTTTRTLETQATYSGQVKPGEGWTNLFIYPGYKFKVIEGLLTNFHMPKSSLILLVAAFAGKKKLLAAYREAVKENYHFLSFGDAMLII

SEQ ID NO: 64708 - protein, 305 aa, Amesbacteria bacterium
  misc_feature (1)..(305): tr|A0A0G1XU80|A0A0G1XU80_9BACT S-adenosylmethionine:tRN A ribosyltransferase-isomerase OS=Candidatus Amesbacter ia bacterium GW2011_GWB1_48_13 OX=1618362 GN=UY28_C0012 G0039 PE=3 SV=1
MSIDSRTGALSHHIFRDLPSLLTAGDVLVFNDSAVFPARLIGRKPTGGKVEILLLHRLPDGNWKYISRPGFKSGHKVIISPDFWANIIDSEILKLSSNDEKLITKYGHTPLPPYIPDSAPEKILRRRYQTVYARNKGSAAAPTAGLHFTPRLLSLLKNNGIELEFLTLHVGLGTFKPPTVQQIAEGRLHSEQFLLKKDTARRLSQAKSSGRRIIAVGTTTTRVLETLSSTSGNLSPDSGQTDIFIKSPYRFKFVDGLITNFHLPGSSLLMLVSAFASSDIISRAYQTAIKRNYRFYSFGDAMLII

SEQ ID NO: 64709 - protein, 331 aa, Amesbacteria bacterium
  misc_feature (1)..(331): tr|A0A1F4YIY8|A0A1F4YIY8_9BACT S-adenosylmethionine:tRN A ribosyltransferase-isomerase OS=Candidatus Amesbacter ia bacterium RIFCSPHIGHO2_01_FULL_48_32b OX=1797253 GN= queA PE=3 SV=1
MKLGEFDYQLPKELIAQEPVRPRDRSRLMIVNRLARTIEHDYFYNLPKYLRRDDLLVFNDTKVFPARLVGKKESGGRVEILLLTSEGGGWRFIGKNIGRAKRVIFGNGLEGEIVRPGVIKFNVDSNRLTVLIDRIGYTPVPPYIHPRGAWPEPKLRRMYQTVYAREFRLRAGGMGSAAAPTAGFHFTKKMLAKIPKKIFVTLWVGLGTFAPVREENIEEHKMHEERFSISSGTRAEILRAKKGGERIVAVGTTSVRVLESDWTRNETNIFIYPGYKFKYVDTMITNFHLPKSTLLILVCAFAGKELVMKAYEEAIKKKYRFYSFGDAMLVV

SEQ ID NO: 64710 - protein, 343 aa, Aminicenantes bacterium
  misc_feature (1)..(343): tr|A0A1F5AUV8|A0A1F5AUV8_9BACT S-adenosylmethionine:tRN A ribosyltransferase-isomerase OS=Candidatus Aminicenan tes bacterium RBG_13_59_9 OX=1797268 GN=queA PE=3 SV=1
MLVSDFNYNLPPELIAQRPLPRRDDSRMMVLRRRESEIIHARFKDLPQYLGPGDVLVLNAIKVIPAKTWGKADRREVEFLFLEEKQKGLWEVLCRPAKRVKAGGKIFFSPGLEGEVAGMGPRGKRLLRFSSGDVSKELQEIGYAPLPPYIKRGKKDPGLREFDLKRYQTVFARREGAIAAPTAGLHFTPETMASLREKGVLIMTVNLEVGQATFQPVEAERVEDHRMLSEEYSIGASAARSINQAKKESRPVTAVGTTVVRALESAWRDGRLRSGSRSTDIFIHPGFKFQAVDRLLTNFHLPKSTLLMLVSGFAGRDLVLKAYSEAVRERYRFFSYGDCMLIL

SEQ ID NO: 64711 - protein, 343 aa, Aminicenantes bacterium
  misc_feature (1)..(343): tr|A0A523ZVE4|A0A523ZVE4_9BACT S-adenosylmethionine:tRN A ribosyltransferase-isomerase OS=Candidatus Aminicenan tes bacterium OX=2052149 GN=queA PE=3 SV=1
MLVADFDYELPAGLIAQKPLPERQQSLMMILHRETGEIIHSRFSEFPAYLQKDDVLVLNTSKVIPARVYGKIEGKEIEFLFLKELGDGLWEVLCRPAKKVRLGDAVVFSDEFEAKIASIGPEGKRTIQFTSGDILPKLKKVGFAPLPPYIKRKSKNSELRAMDIKRYQTVFAEHDGAIAAPTAGLHFTPDILKEIAARGAAIVRITLDVGLATFQPVRVTKIENHQMLEEDYTISPSASRIINSAKKESRPLTAVGTTSVRALESAFQEGKIQPGKGSTRLFIYPGYSFKAVDRLLTNFHLPKSTLLMMISAFAGLDFIKRAYEEAVRQEYRFYSYGDCMLII

SEQ ID NO: 64712 - protein, 348 aa, Amoebophilus sp.
  misc_feature (1)..(348): tr|A0A1Q3W696|A0A1Q3W696_9BACT S-adenosylmethionine:tRN A ribosyltransferase-isomerase OS=Candidatus Amoebophil us sp. 36-38 OX=1895716 GN=queA PE=3 SV=1
MKLSSFKFTLPSKLIASHPVENREESRLMVVHKATGKIEHKTFKDVLDYFGQDDTLVLNDTKIFPAKLYGSKEKTGAQIEVFLLRELESGEHLWDTLVEPARKIRVGNKLYFGDGELVAEVLDNTTSRGRTLKFLFEGTREEFYDIVDQLGLVPLPNQLKRKPEPEDRDRYQTVYAKKIGAVVPPGAGLHFTSHLLKRLELKGVNILPVTLHIGLNILKVIDVEDLTKYKTGSEYFTISDDTVTAVNTALDTKKQVCAVGTSTAKALETSVSVAGRLKPADGWTNKLIFPPYDFKICTSLISNFHLPESMPLVNATAFGGYELIMEAYQVAIKEKYRFFVYGDAMLIL

SEQ ID NO: 64713 - protein, 411 aa, Amulumruptor caecigallinarius
  misc_feature (1)..(411): tr|A0A4Q0UAM9|A0A4Q0UAM9_9BACT S-adenosylmethionine:tRN A ribosyltransferase-isomerase OS=Candidatus Amulumrupt or caecigallinarius OX=2109911 GN=C7K11_02305 PE=3 SV=1
MNVKDIDISAFDYELPDARIAKHPLARREQCLLLMRDHDGSLSTHIFAELPRLLPDDTMLVYNATRVINARLRFRKQPSATDGGAATQGALIEIFCLEPYSPRDYAVNFASTDGCDWICLVGNSKKWKSGILSLPLEIDGRSVTLNAKRIDRVGNSSVIRFSWSDPTVTFATIIGAAGEIPIPPYLNRSTEESDSTDYQTVYGHIDGSVAAPTAGLHFTDDVLAEIDSRGIPRHEVTLHVGAGTFQPVKSDTIGEHPMHNEFFAVDRHVIEALAQSDRRVIAVGTTSVRTLESLYHLGCMKHAGIEGDEVPQWYPYDPAHPHLSARESMEALLRHLDATSTPTIVASTRLIIAPGYTPGIVKGMVTNFHQPRSTLLLLVSAFTGGNWRTMYDYALAGDYRFLSYGDACLIL

SEQ ID NO: 64714 - protein, 349 aa, Amulumruptor caecigallinarius
  misc_feature (1)..(349): tr|A0A4Q0U816|A0A4Q0U816_9BACT S-adenosylmethionine:tRN A ribosyltransferase-isomerase OS=Candidatus Amulumrupt or caecigallinarius OX=2109911 GN=queA PE=3 SV=1
MKLSQFNFNLPKELIAYTPADERDEARLMVINRATGEIEHHVFKEIINYFDDGDVMVFNDTKVFPARLFGNKEKTNALIEVFLLRELNEENKLWDVLVEPARKIRIGNKLYFGDDDSMVAEVIDNTTSRGRTLRFLYDGPHEEFKEELFKLGETPLPYYIDRKPTADDAERYQTIFAQHEGAVVAPAAGFHFSRELMKRLEIRGVKPEYLTLHIGLGIFREIDVEDLTKHRMDSEQVNITQHLVDVVNDAKDHNKQVCAVGTSALRGLASAVSMGGHIKTYTGWTNKFIFPPYDFSVTTSLVTNFHLPYSTMLMMVCAFGGYDLVMKAYKEAIKEKYRFGAYGDAMLII

SEQ ID NO: 64715 - protein, 353 aa, Annandia adelgestsuga
  misc_feature (1)..(353): tr|A0A3S9J7S2|A0A3S9J7S2_9ENTR S-adenosylmethionine:tRN A ribosyltransferase-isomerase OS=Candidatus Annandia a delgestsuga OX=1302411 GN=queA PE=3 SV=1
MHLKNFYFKLSKNMISQHPIINKNKKKLMILDSIKKKVYHGKFNNIINILNKGDLLILNNTRVIPARIFAKKISGGKIEILIEKILNNNMVLGKIKSNKKIKINTFLIINYENNIYATIKSKYNIFYKIKFISSITVWNIIKIYGKIPLPPYIKKKIDKKNKNEYQTIYSSKYGSIASPTAGLHFDKILFKNLIKKGIKIIFITLHIGSGTFQSIKSLNIKNHKIHKEQCIVTKNVIKKIIKCKLKGNRIVAVGTSTLRALESTVFKSKYIISLKKETNIFIYPGYKYKIVDALITNFHLPCSTLIILVSSFAGYYNIMSSYRIAIKNKYKFFSYGDSMFIIHNPKAFLDKIN

SEQ ID NO: 64716 - protein, 355 aa, Aquarickettsia rohweri
  misc_feature (1)..(355): tr|A0A429XIA8|A0A429XIA8_9RICK S-adenosylmethionine:tRN A ribosyltransferase-isomerase OS=Candidatus Aquaricket tsia rohweri OX=2602574 GN=queA PE=3 SV=1
MQLSEFDFELPKNLIAKHPIYPRGNSKLLYLDNSAKIFDYKFPEIINLFKKGDLLIFNNSKVIPAYLVGKVNNSFNISKEIVIYLNREITPNKWLAFAKPKKLLSLNKEIIFTNNLKGEVVKILNSGEITLKFNYSNPILLNKICNIGMMPIPPYLKRKPEETDNQDYQTVFAKEYGSVAAPTAGLHFTNSLLDKIKSIGVKINFIRLDVGSGTFLPVKSKNIFEHKMHLEKFFIPQETAEAINKTKQDGNRVICVGTTTLRAIESSSDSNGFIKYQNSETNIFITPGYQFKVVDCLITNFHTPKSTLLMLISAFSGINNIKLLYTHAIKNNYRFFSYGDACWLDRIKNNYTTNS

SEQ ID NO: 64717 - protein, 343 aa, Arthromitus sp.
  misc_feature (1)..(343): tr|A0A1B7LMY5|A0A1B7LMY5_9CLOT S-adenosylmethionine:tRN A ribosyltransferase-isomerase OS=Candidatus Arthromitu s sp. SFB-turkey OX=1840217 GN=queA PE=3 SV=1
MDINLFDFHLPSECIAQKPLKNRQDSKMMVVNRNNDTIEHKNFCDIIDYLNKDDVLVLNNTRVISARIKGINIESNGKMEMLLVRNVKDNIWEIMCKPGKRALIGKKFLFGDGKLEIEIIDIKDDGNRIAEFKFNGNIYEILNEIGEVPLPPYIKEKLNDSERYQTVYSDKIGSIAAPTAGLHFTDNLLNEIKLKGIKIVYITLHVGLGTFMPVKVNDLNEHKMHSEYYEIKKEVVDIINVAKKNGNRVISVGTTTMRTLETVASKSDDGLLFESYGYTDIFIKPGYNFKIVDSLITNFHLPKSTLLILISAFYDRNKILDAYSEAILNGYRFFSFGDSMFII

SEQ ID NO: 64718 - protein, 340 aa, Arthromitus sp.
  misc_feature (1)..(340): tr|G2IHL1|G2IHL1_9CLOT S-adenosylmethionine:tRNA ribosy ltransferase-isomerase OS=Candidatus Arthromitus sp. SF B-rat-Yit OX=1041504 GN=queA PE=3 SV=1
MDIALFDFDLPERLIAQKPLKNRDASKLMVVDRKNGNIVHSEFVNVINYMNKDDVLVLNDTRVFPARIYGESSYGGKIEVLLVKNIEGKIWEVMCKPGKRALVGKKFHFINGKIEMEVIGINPDGNRIVNFTYDGEIYDILNKNGTIPLPPYIKDVLEDKEKYQTVYSNKIGSIAAPTAGLHFTNELLLKIRNKGVKIVYITLHVGLGTFLPVKTNDIDNHNMHSEYYEISNEAAEFINLAKSKGNKIVSVGTTTVRVLETVFSKNGKCVGEKGYTDIFIKPGYKFSAVDSLITNFHLPKSTLIILISAFYNREKILTAYEEAILNEYRFFSFGDSMIII

SEQ ID NO: 64719 - protein, 361 aa, Atelocyanobacterium thalassa
  misc_feature (1)..(361): tr|A0A086CII6|A0A086CII6_9CHRO S-adenosylmethionine:tRN A ribosyltransferase-isomerase OS=Candidatus Atelocyano bacterium thalassa isolate SIO64986 OX=1527444 GN=queA PE=3 SV=1
MNDDYSLSNYNYHLPSELIAQNPLVPRDSSRLLVVNSSNTHVHSFFNELPKWLLPGDLLVFNDTRVVPARLYGQKTTGAKVEVLLLEEKEPFTWIVLVKPGKRFKIGSKILFTAVLDEFKQDYLLEATVIDHDEKTGGRVLKFNVSSKSEFWEALERIGHLPLPPYLTNSSANPSQYQTIYAQKPGAVAAPTAGLHFTQELLQNLQKKGINQAYVTLHVGLGTFRPVNTDNIKEHTMHQEWIEVSNQTIQKINKTKSSGGRVIAVGTTVVRALEGMADVTSIDNKYDIKSFSGKTNIFIYPGYKWHLVDGMITNFHLPKSSLLMLVSALIGRDRLLELYKIAIEEKYRFYSFGDGMLVLLS

SEQ ID NO: 64720 - protein, 342 aa, Atribacteria bacterium
  misc_feature (1)..(342): tr|A0A1F5BZL0|A0A1F5BZL0_9BACT S-adenosylmethionine:tRN A ribosyltransferase-isomerase OS=Candidatus Atribacter ia bacterium RBG_16_35_8 OX=1797290 GN=queA PE=3 SV=1
MKLEEFDYYLPSGFIAQKPIKPRDRSRLMVLNRSRNEIQHKIFKDIKDYLKKGDLLVLNNTKVLPARLYGFKEKTKGKVEILLLESKKDRYWEVLVRPGKIVHTDTKIIFGPELEGIVEGKNEEKGSYFIQFNFKGNFKEILNKIGKMPIPPYIKEELKTGNDYQTVYAAQDGSIAAPTAGLHFTKSLLGDLTHKGIEIVYLTLHVGRGTFEPIRTSKVEEHKMDSEFYSVSSNVAQKIDQARSEKRRVISVGTTTTRTLESAFDFNQGRIVSGSNWSDIFIFPGYKFKVVDVLITNFHLPQSTPLMLVAAFTGKNFLLKAYQEAIRERYRFYSFGDAMIIV

SEQ ID NO: 64721 - protein, 342 aa, Atribacteria bacterium
  misc_feature (1)..(342): tr|A0A1V5T3N8|A0A1V5T3N8_9BACT S-adenosylmethionine:tRN A ribosyltransferase-isomerase OS=Candidatus Atribacter ia bacterium ADurb.Bin276 OX=1852833 GN=queA PE=3 SV=1
MILTDQFNFHLPDELIAQRPVVPRDQCRLMVINRLSQEIEHRRFFDLGHYLKPKDLIVINDSRVIPARFYTQKNPTGGKVEILFLHRHQELWACMLNHSRRVKEGTILSLPEHPEIFWQVEGREKDWWLLRPSFPPEKEDEIFFNYGTTPTPPYIKTPNVKLEEYQTIYAQRKGSVAAPTAGLHFTQSLIDQLKNLGIQFASLTLHVGLGTFFPVKTSTIEEHHMHSEWYEVDQKTAEMIQETKKNEGRVIAVGTTVVRVLESIYRQRGRIVEQSGETDIFIYPGFQFQVINAMITNFHIPRSTLFMLVCAFAGTEFMKAAYRGAVEKHYRFFSFGDATFIM

SEQ ID NO: 64722 - protein, 349 aa, Aureabacteria bacterium
  misc_feature (1)..(349): tr|A0A3A4QTK7|A0A3A4QTK7_9BACT S-adenosylmethionine:tRN A ribosyltransferase-isomerase OS=Candidatus Aureabacte ria bacterium SURF_26 OX=2093366 GN=queA PE=3 SV=1
MRTEEFNYSLPESLIAQQPAKNRHDSRLMVLYYKSKKVVHSTFRDICSFLSPAHLLVVNDTKVFPARLLGRKESGGAVEILLVREVDGLRWEAMVQPSARVKEGTPVAIDGWNKQVSVEERLPGGSRLVQFPDECEPLDIAFQYGHMPLPPYIKRDVSDKEQSAFDFQRYQTIFARDAGSVAAPTASLHFTDTVLAELQERSVGIQHITLHVGPGTFKPVKTDTITDHVMDYEYYAVSQETERNINTHISNGGTVCGVGTTVVRTLEAISDESGRIHAGNGKTDLFIYPGYSFKIVRNMLTNFHLPKSTLLMLVCALAGSDFVLSAYHEAIREKYRFYSYGDAMLLLNQ

SEQ ID NO: 64723 - protein, 382 aa, Azambacteria bacterium
  misc_feature (1)..(382): tr|A0A1F5C6K3|A0A1F5C6K3_9BACT S-adenosylmethionine:tRN A ribosyltransferase-isomerase (Fragment) OS=Candidatus Azambacteria bacterium RIFCSPLOWO2_01_FULL_37_9 OX=179 7297 GN=A2907_02845 PE=3 SV=1
MKLSDFNYNLPQNFIAQKPTKPRDHCRLLILDRETGDIKHKKFFEISQFIKNGDVLVFNDSKVIPARLHGNKITGLPSVALAKEGGNVEILLIKKISSDTWEALLKNFKEKEFGKKIIIAKNFIASPEKNIDGGLWQIKFNQLAGGKDKNLDKLIYKYGQTPLPPYIKKMAKLSDYQTIYAKREGSVAAPTAGLHFTKKLLNSLKKQGAKLETITLHIGLGTFAPIKDNNIEKHKIHSEYAEISAKTAKAINKARSEGRRIIAVGTTSARTLEAFAMSTDNQQQTSNNKNKQKFRQSDDRQTGGILPFGKLWVDIFIKPGYKFKIVDGMITNFHLPETSLMILVSAFAGRPAGRHGRKNILKAYQEAINKKYKFFSFGDAML

SEQ ID NO: 64724 - protein, 353 aa, Baumannia cicadellinicola
  misc_feature (1)..(353): tr|A0A088N2E6|A0A088N2E6_9GAMM S-adenosylmethionine:tRN A ribosyltransferase-isomerase OS=Candidatus Baumannia cicadellinicola OX=186490 GN=queA PE=3 SV=1
MRVADFSFDLPKHLIARHPQQERSACRLLSLDGPSGTVKHQVFTDIIDLLFIGDLLVFNNTRVIPARLFGRKISGGKVEVLVERVLDNKRVFAYVRTSKTPKVGTLLLLGDDESIYATIVARHNVLFELIFDDQRDVLTLLNDAGHIPLPPYIDRPDDATDRELYQTVYSKRPGAIAAPTAGLHFDEQLLSALRAKGVDMVFLTLHVGAGTLQPIRVENLKQHQMHSEYTEVSRTVVDAVLACKARGNRVVAVGTTSVRSLESAIVSNGANAIIAPFLGDTSIFIYPGYHFRIIDALITNFHFPKSTPIMLVSAFAGYHHTFAAYRQAINLAYRFFSYGDAMFITRNPSACDQ

SEQ ID NO: 64725 - protein, 248 aa, Berkelbacteria bacterium
  misc_feature (1)..(248): tr|A0A2M6YC23|A0A2M6YC23_9BACT S-adenosylmethionine:tRN A ribosyltransferase-isomerase (Fragment) OS=Candidatus Berkelbacteria bacterium CG08_land_8_20_14_0_20_39_8 O X=1974511 GN=queA PE=3 SV=1
LSEKIFFSQSLQAEVVKKDGKNGVLKFNLSGNVFWQIVNKIGKTPIPPYIKNLELSERELKSKYQTVFAENFGSAAAPTAGLHFTSELIGKLKSSGIQFATVDLHVGLGTFFPIDENEVKAKKLHSEVYSIPLETTKKILTTKKSGGRIFAVGTTVARSLESASSEISSEKSFSGKTDIFIQPGDKFRVVDSLITNFHLPKSSLMMLVAAFIESKTNFDGREKLLEIYKYAINEKYRFYSFGDVMLLI

SEQ ID NO: 64726 - protein, 376 aa, Berkelbacteria bacterium
  misc_feature (1)..(376): tr|A0A554LGU2|A0A554LGU2_9BACT S-adenosylmethionine:tRN A ribosyltransferase-isomerase OS=Candidatus Berkelbact eria bacterium Licking1014_96 OX=2017149 GN=CEN92_175 P E=3 SV=1
MQTKKFDYYLPKKLIAQKPISPRDHSRLLVLKKRMGKIIHDHFYNLGHYLRKGDVVVLNNTKVIPARLITDQGKEIFLLKSLDKNDSKWLCLTRCKGSSFIKFAGSTLVGRIDQKIIKFNLRGREFWKEVEKIGEVPTPSYVKSHKKYRKAKKDFYQTIFAKKKGSIAAPTAGFHFTQKLVDRLKKKGVKVAFITLHVGLGTFASIRAERVEEHQMHAEWFELSKYTADLLNRAKREGHRIVAVGTTAARVLESCAITPLPHQNFFLLIPCSGETKIFIKPGYKFKFVDALITNFHLPCSTPLLLASAFIEDHHRKLSFRDPSIARVEKSRSDEISHCVRNDRGKNEGIRILLQSYREAIKKKYRFYSFGDAMLIV

SEQ ID NO: 64727 - protein, 339 aa, Borkfalkia ceftriaxoniphila
  misc_feature (1)..(339): tr|A0A4Q2K6B7|A0A4Q2K6B7_9FIRM S-adenosylmethionine:tRN A ribosyltransferase-isomerase OS=Candidatus Borkfalkia ceftriaxoniphila OX=2508949 GN=queA PE=3 SV=1
MKKSDYYYDLPEELIAQTPAEPRDSSRLLVYDRATNTTEHRIFREITEYLRAGDVLVVNNTKVLPARLFAFTKNGGRVEILLLKRLDLTHWEVLVRPGKKAKTGVELFISEELSLVVKDRTETGERIVEFLFDGVFEDIVSRAGTVPLPPYIHEKLEDPDRYQTVYCKTDGSAAAPTAGLHFTEELLAKIKGMGVEVAEVLLHVGLGTFRPVKEDDLTDHKMHSEFYRVDEKAAETVNAAKREGRRVIAVGTTSVRTLESVADENGFLRPCSGDTEIFIYPPYRFKCVDALVTNFHLPESTLIMLISALMGRENALAVYREAIEKKYRFFSFGDAMFIK

SEQ ID NO: 64728 - protein, 358 aa, Brocadia caroliniensis
  misc_feature (1)..(358): tr|A0A1V4AWQ9|A0A1V4AWQ9_9BACT S-adenosylmethionine:tRN A ribosyltransferase-isomerase OS=Candidatus Brocadia c aroliniensis OX=1004156 GN=queA PE=3 SV=1
MNSTASKPSNFYPKLSDYNYDLPRELIAQRPLENREDARLLILCRRTGKIEHRKFYEITEYLRPGDLLVLNNTKVIPALLQGKRISGANLELLLIEEREENQWRALIKSNAKLKIDEEIYLGDRILSAKLLRKNQDGSWLIQFDKNCHIKDMLIRIGKMPLPPYIKRTENNSSLCSSDKERYQTVFAQKEGAIAAPTAGLHFSQRTLERVKKHGVEIGFVTLHVGLGTFLPIKTDDIQKHHMHAEYYECPGEMIEKIKETKEHQHRVIAVGSTSCRVLESVAMNNNPPHTSGWTNLFIYPPYHFQHVDVLLTNFHLPKSTLLVLVCAFAGRENILNAYEIAKKEGYRFFSYGDCMMIV

SEQ ID NO: 64729 - protein, 359 aa, Brocadia sapporoensis
  misc_feature (1)..(359): tr|A0A1V6LY29|A0A1V6LY29_9BACT S-adenosylmethionine:tRN A ribosyltransferase-isomerase OS=Candidatus Brocadia s apporoensis OX=392547 GN=queA PE=3 SV=1
MDFTAKKPVQFYSKLSDYTYDLPRELIAQHPLENREDARLLILYRNSGRIEHRRFYEITEYLCPGDFLVLNNTKVIPALLTGKRISGASLELLLTEEGEEENQWKVLIKSNAKLKAGEEIIVADNVLPAKLLMKNEDGSWLIQFDKNHPIKDLLVQTGKMPLPPYIKRTGKNGTCYSSDKERYQTVFAQNEGAIAAPTAGLHFSHDTLEKLKNQGVEIGFVTLHVGMGTFMPMKTEDIQKHQMHKEHYECSQEIMEKIKKTKERRNRVIAVGSTSCRVLESVAINNQTPQTSGRTNLFIYPPYHFQYVDVLLTNFHLPKTTLLVLVCAFAGRENILNAYEIAKNRGYRFFSYGDCMMII

SEQ ID NO: 64730 - protein, 367 aa, Brocadiaceae bacterium
  misc_feature (1)..(367): tr|A0A5C6D8F0|A0A5C6D8F0_9BACT S-adenosylmethionine:tRN A ribosyltransferase-isomerase OS=Candidatus Brocadiace ae bacterium S225 OX=2528033 GN=queA PE=3 SV=1
MHKDFFVLKGHFLSEKIMSEASYKISNYDYNLPKHLIAQYPTTKRDESRLLVLHKESSKIEHRRFYEIIEYLNCGDVLVLNDTKVSPARILGTRTTGGRVECLIIREVEENTWEVLLQSNHRLKENEFLTFDDSVKGKILYRNDTGSWIIRVEDKKKFTEMLESSGRMPLPPYIKRNSNNKSQGIHDDERYQTIYAKKVGAIAAPTAGLHFTTNLLREISCKGIKIVYITLHVGLGTFKPIHKEDFRQHTIHKEFYNISEETVSTINKAKSLGKKIIATGTSTCRVLETIAKNHTTEKSSGWTKLFIYPPYKFKLTDSLITNFHLQRSTLILLASAFAGRENIATSYEEAISLNYRFYSYGDCMLIL

SEQ ID NO: 64731 - protein, 351 aa, Brocadiaceae bacterium
  misc_feature (1)..(351): tr|A0A5C6EY70|A0A5C6EY70_9BACT S-adenosylmethionine:tRN A ribosyltransferase-isomerase OS=Candidatus Brocadiace ae bacterium B188 OX=2528032 GN=queA PE=3 SV=1
MQFYSKLSDYTYDLPRELIAQHPLENREDARLLILYRNSGRIEHRRFYEITEYLCPGDFLVLNNTKVIPALLTGKRVSGASLELLLTEEGEEENQWKVLIKSNAKLKAGEEIIVADNVLPAKLLMKNEDGSWLIQFDKNHPIKDLLARTGKMPLPPYIKRTGKNGICYSSDKERYQTVFAQNEGAIAAPTAGLHFSHDTLEKIRNQGVEIGFVTLHVGMGTFMPMKTDDIQKHQMHKEHYECSQEIMEKIKRTKERQNRVIAVGSTSCRVLESVAINNQTPQISGWTNLFIYPPYHFQHVDVLLTNFHLPKTTLLVLVSAFAGRENILNAYEIAKNRGYRFFSYGDCMMII

SEQ ID NO: 64732 - protein, 348 aa, Brocadiae bacterium
  misc_feature (1)..(348): tr|A0A524HK40|A0A524HK40_9BACT S-adenosylmethionine:tRN A ribosyltransferase-isomerase OS=Candidatus Brocadiae bacterium OX=2517210 GN=queA PE=3 SV=1
MKTELFNYDLPSELIAQRPADVRSESRLLLVDRCRPDFIDSRFSSIGEYLRHGDCLVLNDTRVLPARFYAARKSGASLEGLFLKENPAGIWHVMLKGARKVKTGEIIILKGPQNDELEAEVIEKNDAGLCLLKVHSVLAPETLLNSIGFAPLPPYIKRKGDPEVDMIDRQRYQTVYARSAGAVAAPTAGLHFTDELMDSLKKSGVMFANVTLHVGAGTFKPVTAEDIDEHEIHEELYFLDGENADVINQAKSNGGRIIAVGTTAVRTLETTADNSSVNPGTGQTRLFIKPGYQFKIVNAMVTNFHLPKSTLLALVSAFAGLDKTMAAYRHAVEMRYRFYSYGDAMLIL

SEQ ID NO: 64733 - protein, 347 aa, Buchananbacteria bacterium
  misc_feature (1)..(347): tr|A0A1G1YLS1|A0A1G1YLS1_9BACT S-adenosylmethionine:tRN A ribosyltransferase-isomerase OS=Candidatus Buchananba cteria bacterium RIFCSPLOWO2_01_FULL_39_33 OX=1797543 G N=queA PE=3 SV=1
MPLKRFDYQLPSQLIGQRPVKPRDSARLLILNKKNGQIEHKKFYHIINYLKPGDVLVLNNSRVIPARLIGQKETGGKIEIFLLKKMSLRGSLSDCGNPMLEKNTWQCLIGGKIKVGEKILFPKNIKAKIIKKYDDQSWLVEFNASAKKLLASGQTPLPPYIKKMAKLADYQTVYAKTSGSVAAPTAGLHFTKRLINKLKKQGVIIEYITLHIGLGTFQPIKSRYIQDHKIHSEWATLNKKTADKLNQAKKSGRSIIAVGTTTLRTLEAFSDDRGKLKPQSGWLNIFIYPGYKFKFVKTLITNFHLPKSTLLVLVSALVGEKLIKKSYQAAIKKKYKFFSFGDAMFIR

SEQ ID NO: 64734 - protein, 312 aa, Buchananbacteria bacterium
  misc_feature (1)..(312): tr|A0A1G1XQW9|A0A1G1XQW9_9BACT S-adenosylmethionine:tRN A ribosyltransferase-isomerase (Fragment) OS=Candidatus Buchananbacteria bacterium RBG_13_36_9 OX=1797530 GN=A 2Y82_03930 PE=3 SV=1
AGLVRGDVLVFNNSKVIPARLIGRKPTGGKVEILLLRQIKPNIWECLVGNLPIKKQVGTEIIFAPNSRMEQVLHPTHIRGRKEHLLFSGKIISRAKDTAQIKFNLSGQKLMTEIFKLGQMPTPPYIKRIAKANEYQTFFAEKLGSVAAPTAGLHFTPRIFKKLKRKGVQIEFVTLHVGLGTFQPIKADDITKHQIHEEYFELDKATAKRLNQAKQGKRRIIAVGTTTVRVLETCSSKNSLLKPQNSHTKIYICPGYKFKFVDSMITNFHLPKSSLLLLISAFAGTNFIKKAYQYAIKKKYRFYSFGDVMLIK

SEQ ID NO: 64735 - protein, 356 aa, Burkholderia pumila
  misc_feature (1)..(356): tr|A0A0J7JQ47|A0A0J7JQ47_9BURK S-adenosylmethionine:tRN A ribosyltransferase-isomerase OS=Candidatus Burkholder ia pumila OX=1090375 GN=queA PE=3 SV=1
MKFVRRSRVTVHVMFTLSDFDFNLPPALIAQSALTERSASCLLDVSGNTFIDRRFSELPNLLDAGDLLVFNDTKVLKARFFGQKASGGRVEVLIERLAGATTALVQIRASKSPTEGSTIKLADAFDVTVGERVEPFYTLHFPSDCLTLIEQYGRLPLPQYIEHDADSYDETLYQTVYAANPGAVAAPTAGLHFDDALFAALDAKGVERATLTLHVGAGTFQPVRVENIAEHKMHSEWYDLPQTLVDRIAAVKARGNKVIAVGTTSARALEAAARDAAQAGKPLAATQAETDIFITPGYEFRVVDRLVTNFHLPKSTLMMLVSAFANMDTIRDAYKHAIEQKYRFFSYGDAMILTRA

SEQ ID NO: 64736 - protein, 348 aa, Burkholderia verschuerenii
  misc_feature (1)..(348): tr|A0A0L0MAG4|A0A0L0MAG4_9BURK S-adenosylmethionine:tRN A ribosyltransferase-isomerase OS=Candidatus Burkholder ia verschuerenii OX=242163 GN=queA PE=3 SV=1
MFTLSDFDFNLPPELIAQSALTERSASRLLEVDNRATPVTLTDRHFSDLPNLVDAGDLLVFNDTKVLKARFFGQKASGGKIEVLIERLTGATTALAQIRASKSPLQGSTIRLADAFDVTVGERVEPFYTLHFPADCLTLIEQYGRLPLPHYIAHDADAYDETRYQTVYAANPGAVAAPTAGLHFDDALFARLDARGVERATLTLHVGAGTFQPVRVENIAEHKMHSEWYDLPQSLVDRIAAVKARGNRVIAVGTTSMRALEAAARDAADAGRPLAATQAETDIFITPGYAFRVVDRLVTNFHLPKSTLMMLVSAFAGMETIREAYRHAIEQRYRFFSYGDAMLLTRQS

SEQ ID NO: 64737 - protein, 344 aa, Carbobacillus altaicus
  misc_feature (1)..(344): tr|A0A2R6Y5B4|A0A2R6Y5B4_9BACL S-adenosylmethionine:tRN A ribosyltransferase-isomerase OS=Candidatus Carbobacil lus altaicus OX=2163959 GN=queA PE=3 SV=1
MMDVSLFDYDLPVELIAQSPPKERGSSRLMVLNRATGKIEHAHFSALGRYVNPGDVLVINDSKVIPARLLGQKKETGGMIEVLLIKPRHEADTWDVLVRPARRVRIGTRLFFGNDQELEAVVKERLPDGGAVVTFRYEGDWESLLDRLGEMPLPPYIREKLSDPSRYQTVYAAHAGSVAAPTAGLHFTEAHLQALVKEGVQLARLTLHVGIGTFRPVKVDQVEAHTMHSERFTIPEETVQRIHEAKAAGRRVIAVGTTSLRTLEGAYHTYGRLFAHSGETDIFIYPGFTFHVVDALLTNFHLPRSTLLMLVSAFATREQILAAYQEAMKKQYRFFSFGDAMLIV

SEQ ID NO: 64738 - protein, 348 aa, Cardinium hertigii
  misc_feature (1)..(348): tr|A0A2Z3LH15|A0A2Z3LH15_9BACT S-adenosylmethionine:tRN A ribosyltransferase-isomerase OS=Candidatus Cardinium hertigii OX=247481 GN=queA PE=3 SV=1
MKLSNFKFELPKDLIAQYPIESKEAARLMVVHKNSGQIEHKTIKELASYFEKGDTLVANDSKVLPCKLYGYKEKTNAEVEVILLRKLSHEHALWDTIVEPARKIRIGNKIYFGNGELVAEIIDNTTSRGRTLKLLFEGGESDFYALIEQIGHVPLPPQIGRSSTPEDSLYYKTLFAKNIGSIVLPAAGLHFTPYLLKYLELCNISVTCVTLHIGLGELKTIDMEDLTKVKAASERFIITEEAAHVVNQSLAKQKKVCAVGTSVLKAIESSVSVSCHLKANNGWTNKFILPSYPFKICNALLTTFHLPFSSSLVNIAAFGGDELVLAAYAEAIKEKYRFFLYGDAMLII

SEQ ID NO: 64739 - protein, 348 aa, Cardinium hertigii
  misc_feature (1)..(348): tr|A0A3N2QCA9|A0A3N2QCA9_9BACT S-adenosylmethionine:tRN A ribosyltransferase-isomerase OS=Candidatus Cardinium hertigii OX=247481 GN=queA PE=3 SV=1
MKLSNFKFELPAHNIAQYPMHPKEDARLMVLHKDSGQIEHKTLKDLPSYFSEGDTLVANDSKVLPCKLYGYKEKTNAKVEVLLLRKLNNENALWDTIVEPARKIRIGNKIYFGNGELVAEIIDNTTSRGRTLKLLFDGTEEEFYALIDQIGHMPLPNQIERPSTLDDRTYYQTIFAQNIGSIVLPAAGLHFTPYLLKYLELQNISVVSVTLHIGLGELKIIDMEDLTKVKASSERFIITQESADVVNQSIANQKKVCAIGTSVLRAIESSVSVSCKLKANNNWTNKFILPSCSFKICNALLTTFHLPSSISLVSVAAFGGEELVLAAYAEAIDKHYRFFLYGDAMLII

SEQ ID NO: 64740 - protein, 380 aa, Cerribacteria bacterium
  misc_feature (1)..(380): tr|A0A317JN14|A0A317JN14_9BACT S-adenosylmethionine:tRN A ribosyltransferase-isomerase OS=Candidatus Cerribacte ria bacterium 'Amazon FNV 2010 28 9' OX=2081795 GN=queA PE=3 SV=1
MLLSDFDYHLPDNRIAQTPIEPRDHSKLLVINRRTGQLSDDHFYELADLLTANDVLVVNDTKVFPARLFVQRVGTGHCPVPTKTIELLLEKEVEVTAKSITWATLTKPGLKLGDTIVIPNTNATGVCIQVNEYTREVKFDVNREQFFVLLDKWAKTPIPPYIHWEKDDEKHLRERYQTVYASRQGAVAAPTAGLHFTPELLKKLDQKGVVIEKVTLHVGLGTFLPVKTDDVTTHPMHSEWYELCDDVATHLNEAKQRGKRIIAVGTTTVRVLETCADSSYYLTPHTGNTQIFIYPPYQFKFVDALITNFHTPKSTLLMLVSAFVSAPNTPQCLKIENCKLKIAPLPSFSTFATSLMGKAYQRALENGYRFYSFGDAMLIE

SEQ ID NO: 64741 - protein, 349 aa, Chryseobacterium massiliae
  misc_feature (1)..(349): tr|A0A3D9AUI3|A0A3D9AUI3_9FLAO S-adenosylmethionine:tRN A ribosyltransferase-isomerase OS=Candidatus Chryseobac terium massiliae OX=204089 GN=queA PE=3 SV=1
MKTSDFNFDLPAELLAEHPSEHRDEARLMVLDRKTQTIEHKLFKDVVDYFEEDDLFIFNNTKVFPARLYGNKEKTGAKIEVFLLRELDKETRVWDVLVDPARKIRIGNKLFFTEDESLVAEVIDNTTSRGRTLRFLFDGSYEEFRAKLKELGETPLPKYIKRDVEPEDAERYQTIYAKVEGAVAAPTAGLHFSKHLMKRLEIKGINFAEVTLHVGLGTFNPIEVEDLSKHKMESEEIFIDEKNAQIINNAVDANRRVCAVGTTTMRTLETSVSSNKKISAFHGWTNKFIYPPHDFGVANCMITNFHTPKSTLIMMIAAFAGRDFVMHAYEEAVKEKYKFYSYGDAMLIL

SEQ ID NO: 64742 - protein, 346 aa, Chrysopegis kryptomonas
  misc_feature (1)..(346): tr|A0A0P1NW54|A0A0P1NW54_9BACT S-adenosylmethionine:tRN A ribosyltransferase-isomerase OS=Candidatus Chrysopegi s kryptomonas OX=1633643 GN=queA PE=3 SV=1
MKLSDFNYQLPKNLIAKYPVEPRDSARLLVLDRKNKTIEDKVFTDIIDYLEEGDSLVLNKTKVFPARLIGRKEKTGAKIEILLLRELNPEEHLWDVLVEPARKVRIGNKIYFGDNNEVYCEVIDNTTSRGRTLKFHYEGDFFKFIEKYGQVPLPPYIKRQPEEGDKEWYQTVYAEVVGSVAAPTAGLHLSKKMLKRIEKERVKNVPIVLHIGIGTFRKVEVEDLSKHRMDSEYFEIPAESARLINETIDKKKSVVAVGTSVVRALESSVSADGHVKPYKGWTDKFIYPPYEFKIVNKLITNFHAPESTPLMLVAAFAGLDFLMQAYKHAIKNGYRFLSYGDAMLII

SEQ ID NO: 64743 - protein, 343 aa, Cloacimonas sp.
  misc_feature (1)..(343): tr|A0A1V4R183|A0A1V4R183_9BACT S-adenosylmethionine:tRN A ribosyltransferase-isomerase OS=Candidatus Cloacimona s sp. 4484_140 OX=1956163 GN=queA PE=3 SV=1
MKKFVVSDFDYHLPDGMIAQYPTENREESKLMIVNRKENSISIDVFKNILNYLNINDFLVMNETKVIPARLVGKKPSGGKIEVLLLEQVDEHTWKCLVKPGRRLKIGSEMILGDLLHGKIIEWGDKGERLIRFSYDGDFFKIIDEIGRVPLPPYIKREATDLDAERYQTVFADKQGSVAAPTAGLHFTPQLLNTLKSNGISSAKVNLRIGLDTFRPVMVEHIEDHTMHTEYCSIHQAESVKINNAMEKGKNIAAVGTTSVRTLESFAEGRHIASGNKHTDIFIYPGYSFKIVDKLITNFHLPRSTLLMLVSAFAGYEFIMKAYQKAIDENFRFYSYGDAMLIL

SEQ ID NO: 64744 - protein, 347 aa, Cloacimonas sp.
  misc_feature (1)..(347): tr|A0A3D5U5W7|A0A3D5U5W7_9BACT S-adenosylmethionine:tRN A ribosyltransferase-isomerase OS=Candidatus Cloacimona s sp. OX=2053534 GN=queA PE=3 SV=1
MTPDLNRREAFSYHLPTELIAQYPAEKRENSRLMHLHTGDQSINHRLFVELPSLLRSGDLLVLNNSKVFPARLFGRKDNGTKIEVLLLNPSSEPDKWKCLLYPAKRIKQEQYITFSNNMKGWVYPQRIDDVYEIKLEYKGDFWQEIESIGHIPLPPYIARPDESSDKTRYQTVYARQHGSVAAPTAGLHFSKDLIHKCKDMGVQFTELTLHVGIGTFRPVKTELITEHTMHSECVEILPETAKTINKAKAEGRRIISVGTTSVRGLESFWEAGKLQSGNRWTDIFIYPGYTFKVPDAIITNFHLPESTLLMMVSAFAGFEFIRKAYQVAIAERYRFFSYGDAMYIEL

SEQ ID NO: 64745 - protein, 136 aa, Cloacimonetes bacterium
  misc_feature (1)..(136): tr|A0A496ZQL0|A0A496ZQL0_9BACT S-adenosylmethionine:tRN A ribosyltransferase-isomerase (Fragment) OS=Candidatus Cloacimonetes bacterium OX=2030808 GN=DRI23_10655 PE=3 SV=1
MNDLTKTSSYWYHLPTELVAQYPVENRSESRLLKLDKITGAVSHHTFSDIIDFLETGDVLVINKTKVIPARLFGSKSTGAKVEVFLLNQLEEDTWECLVKPGRRLQIGAKINFSENFKAEIIDHAEEGGRIVKFIW

SEQ ID NO: 64746 - protein, 345 aa, Cloacimonetes bacterium
  misc_feature (1)..(345): tr|A0A2N2L1J1|A0A2N2L1J1_9BACT S-adenosylmethionine:tRN A ribosyltransferase-isomerase OS=Candidatus Cloacimone tes bacterium HGW-Cloacimonetes-2 OX=2013734 GN=queA PE =3 SV=1
MCPDLFDINAYDYDLPKELIAQYPLEERTESRLMVLNRAARSIVDRKFKDIRDYLMPGDLLVLNSSKVFPARLFGTKHNGTRIEVLLMNEIEPGIWKAMVHPGKRLKEKQILVFSPRLSGEIGLPDEDGFREIAFSVDGDFWEELNQVGHIPLPPYIERLDVTEDKGRYQTVYAKHTGSIAAPTAGFHFSEDLIDDLKRDGIKIAELVLHVGIGTFRPVKTERIDQHKMHSEYCVIDQDLADLYRETRATGGRVIAVGTTSLRTMESFYKDGEIIAGSAWTDIFLHPGKKVQSIDALITNFHLPKSTLLMLVSAFAGYEMTREAYHRAVTEAYRFFSYGDAMFIY

SEQ ID NO: 64747 - protein, 270 aa, Coatesbacteria bacterium
  misc_feature (1)..(270): tr|A0A1W9S0S8|A0A1W9S0S8_9BACT S-adenosylmethionine:tRN A ribosyltransferase-isomerase (Fragment) OS=Candidatus Coatesbacteria bacterium 4484_99 OX=1970774 GN=B6D57_0 4215 PE=3 SV=1
MNEGENISLEELDYELPEALIAQRPSEKRDECRLLVYNRTDGEISHHIFHDIVRYLREGDILVLNDAKVIKARLFFRKAETGAEIEVLLLRQIDENRWISLTRPAKRLKIGTELKHESGVLCARVIAVLEGGERLLELNYDGDLLRILEDIGEIPLPPYIKRKGIESDFNDDEYYQTVFAKNLCAIAAPTAGLHFTESLINELMKNGVSVKTITLRVGYGTFKPITTDNIRNHRMEQEDYFIPRKTATDINKGIATGRRIVACGTTVVRA

SEQ ID NO: 64748 - protein, 348 aa, Coatesbacteria bacterium
  misc_feature (1)..(348): tr|A0A1F5FGB5|A0A1F5FGB5_9BACT S-adenosylmethionine:tRN A ribosyltransferase-isomerase OS=Candidatus Coatesbact eria bacterium RBG_13_66_14 OX=1817816 GN=queA PE=3 SV= 1
MPISASDYDYELPRERIAQRPAERRDASRLMVLVGNRPPEHRLFTDLPKMLREGDVLVANDSRVIPARIRGVKREGGAEVEALLLRDLGDGRWTALAKPGKRLKLGTRIDFRGELFGEVLAKLEGGLVVLGLAGARPIGEILDEFGEAPLPPYIERPTGADSSDSRRYQTVYSRHPGSVAAPTAGLHFTPDLLERLRARGVEWLTLTLHVGYGTFAPLPEGDLTGHRLHTESYSLGKSTARGVNRARLEGRRVISVGTTAARVLEAASDETGLVTAASGETDLFIHPPYRFRAVDGLLTNFHLPRSSLVMLVAALVGRERILDAYREAIAEGYRFYSYGDATLLLPTG

SEQ ID NO: 64749 - protein, 353 aa, Collierbacteria bacterium
  misc_feature (1)..(353): tr|A0A1J4RXL2|A0A1J4RXL2_9BACT S-adenosylmethionine:tRN A ribosyltransferase-isomerase OS=Candidatus Collierbac teria bacterium CG1_02_44_10 OX=1805087 GN=queA PE=3 SV =1
MNISDFHFELPEELIGQQAIEPRDSCRLLVVNRSDQSLNHHIFRDLVDLLDDQCVLVLNDTKVFPARLFGTKETGGKIEILLLKQTSLDTFECIARGKLQVNQRLVFGPSLTCTIQSKEVTGEIHIRFNFSGLDLIAKIDELGKTPLPPYIHSDSKEAELREQYQTVYAREKGSAAAPTAGLHFTPELLNSLQERGVQIEKLTLHVGLGTFKPVTEEQVANKILHSESFTLSSDVADRLNIAKKSGKKIIAVGTTSCRVLETLFDESGNLSGGAGETHIFFQLGYRFKFIDGMITNFHLPSTSLLMLVSALVSFPNSPIHFTNFYDSLMGQAYAEAIKSKYKFFSFGDSMLIV

SEQ ID NO: 64750 - protein, 350 aa, Collierbacteria bacterium
  misc_feature (1)..(350): tr|A0A1F5F3V2|A0A1F5F3V2_9BACT S-adenosylmethionine:tRN A ribosyltransferase-isomerase OS=Candidatus Collierbac teria bacterium RIFOXYA2_FULL_46_10 OX=1817726 GN=queA PE=3 SV=1
MSLSLHDFQYYLPEKLIAQSPAHPRDSARLLLLNRQTHTISHHRISDLPNLLPPSYDLVVNNTKVFPARLLGHKATGGAVEILLLHKLSSARYHVITRPGLKVDQTIILSPTLSARVTHVAGRIRTLIFSQTDPTLTESLAQLGSMPTPPYIKRLLKDPADYQTVYAKYGFSAAAPTAGLHFTPHLIHTIKQAHAWHELTLNVGLGTFLPVKAEKITDHLMHAESYTLSPSTSLALTHLVHSSRRLLAVGTTTVRALESNLANHPSFTPGTFSTSIFMYPPYRFRATDALLTNFHLPGSTLLMLVSAFVSAPNTKDPFTTFAASLLGKAYAEAVQEGYRFFSFGDAMLIL

SEQ ID NO: 64751 - protein, 345 aa, Colwellbacteria bacterium
  misc_feature (1)..(345): tr|A0A1G1Z4W6|A0A1G1Z4W6_9BACT S-adenosylmethionine:tRN A ribosyltransferase-isomerase OS=Candidatus Colwellbac teria bacterium RIFCSPHIGHO2_12_FULL_44_17 OX=1797689 G N=queA PE=3 SV=1
MSSQFENLLKRYDYILPPELIAQKPALPRDSAKLLVYNKKNKKVSYDTFFNLPKYLPERAVLVFNETKVVPARLTLMKETGGKVRILYLRTVGNLIEAMVDRRIEIGSRLSLTSKLFFIVTRRGKYYFLKPSFPISRLSSILERYGSTPIPPYIKDSPLSESALRREYQTIFARQEGSVAAPTASLHFTHRLFQKLKRAGFDVRFVTLHVNLGTFASLTEEQVKEKKLHKEWYEISKETARFLNRARKEGRPIIAVGTTVTRTLESASDSRSVLKRLTGETDLFINEKYRFKFIDGLITNFHVPKSSLLMLVSAFVGRDQLFDLYRKAIRKKFRFFSFGDGMLIV

SEQ ID NO: 64752 - protein, 345 aa, Colwellbacteria bacterium; identical to SEQ ID NO: 64751
  misc_feature (1)..(345): tr|A0A1G1Z3Y4|A0A1G1Z3Y4_9BACT S-adenosylmethionine:tRN A ribosyltransferase-isomerase OS=Candidatus Colwellbac teria bacterium RIFCSPLOWO2_02_FULL_44_20b OX=1797691 G N=queA PE=3 SV=1

SEQ ID NO: 64753 - protein, 346 aa, Competibacter denitrificans
  misc_feature (1)..(346): tr|W6M7X1|W6M7X1_9GAMM S-adenosylmethionine:tRNA ribosy ltransferase-isomerase OS=Candidatus Competibacter deni trificans Run_A_D11 OX=1400863 GN=queA PE=3 SV=1
MLQRQDFYFDLPSELIAQQPPAQRGDSRLLALDGATGQVADQRFSDLLELLRPDDLLVFNDTRVIPARLSGRKASGGRVELLVERVLDEQRALVQIRANRAPKPGSLLVFDAGGTAIVVDRQQDLFEIRVDIDQPLPTWLEQHGRLPLPPYITREPTAHDAERYQTVYARQPGAVAAPTAGLHFDQALLTRISEMGVASTFITLHVGAGTFQPIRMEQITEHVMHAERFAITPETCEQIRATQERGGRVIAVGTTTLRALETASDEQGVPQPGPDETRIFIYPGYRFRCVDALITNFHLPESTLLMLVAAFAGRAAILEAYRHAVAAGYRFFSYGDAMFITRAPHN

SEQ ID NO: 64754 - protein, 358 aa, Competibacteraceae bacterium
  misc_feature (1)..(358): tr|A0A433I711|A0A433I711_9GAMM S-adenosylmethionine:tRN A ribosyltransferase-isomerase OS=Candidatus Competibac teraceae bacterium OX=2053538 GN=queA PE=3 SV=1
MQTQPDPAGSTSEWQRQDFDFELPPELIAQHPPAQRGDSRLLVLHNADGKLQDRRFRDLPELLQPGDLMVFNDTRVIPARLFGRKASGGRIELLVERVLDLQRALVHLRASKPPQIGAHLQFDAGFAATVLARHDDLFEICVDSDQPLSALLEQHGQLPLPPYITRAPTAEDRDRYQTVYARQPGAVAAPTAGLHFDQALLERIAAQGVQRAFITLHVGAGTFRPVRVERLADHVMHAERIEVGPETCQQIRATRARGGRVIAVGTTVVRALETATGEDGVPQPWCGETRIFIRPGYRFRGVDALITNFHLPESTLLMLVAAFAGHAEIMAAYRHAVEQRYRFFSYGDAMFLTRRSVP

SEQ ID NO: 64755 - protein, 345 aa, Competibacteraceae bacterium
  misc_feature (1)..(345): tr|A0A3C1STX8|A0A3C1STX8_9GAMM S-adenosylmethionine:tRN A ribosyltransferase-isomerase OS=Candidatus Competibac teraceae bacterium OX=2053538 GN=queA PE=3 SV=1
MRRQDFRFDLPAELIAQQPPDRRGDSRLMVLDGASGALEDRRFDELPNLLHPGDLLVFNDTRVIPARLHGRKNSGGRVELLVERLLDQRRALVHLRASKPPKPGGVLAMDAGFSVTVLGRHDDLFEIRTESDQPLLSLLEQHGQIPLPPYIARPPTATDRDRYQTVYARDPGAVAAPTAGLHFDQALLDRLQDLGVAKTFITLHVGAGTFQPVRAERLTDHRMHAERIEVGEDACEQIRAARARGGRVIAVGTTAVRALESVCDERGTPQPQRAETRIFIYPGYRFRCVDALVTNFHLPESTLLMLVAAFAGREAIMNAYRHAVERRYRFFSYGDAMLIAHRSPR

SEQ ID NO: 64756 - protein, 373 aa, Contendobacter odensis
  misc_feature (1)..(373): tr|A0A2G6PG49|A0A2G6PG49_9GAMM S-adenosylmethionine:tRN A ribosyltransferase-isomerase OS=Candidatus Contendoba cter odensis OX=1400860 GN=queA PE=3 SV=1
MREQGFNDGSLKPENNQCQSQQTIIAAEPQRQDFYFDLLPELIAQYPLAQRSNSRLLTLDGATGHLEDRLFHELPQLLRSDDLLIFNDTRVIPARLFGRKASGGRIEVLLERLVDEQRALVHIRASKSPKTGGLLILDAGFTATVQGRQDDLFEITVESDESLLSLFEKHGRLPLPPYISREPDAEDRERYQTIYARQPGAVAAPTAGLHFNQALFDELTKLGIEQAFITLHVGAGTFQPLRVERVTEHVMHAERIAVDAAVCERIMATRQRGGRVIAVGTTVVRALETAAANAEGVPQPWCGETRIFIYPGYRFRCVDALITNFHLPESTLLMLVSAFVGRTKILRAYDHAIKQRYRFFSYGDAMFLTRPRF

SEQ ID NO: 64757 - protein, 57 aa, Cryosericum odellii
  misc_feature (1)..(57): tr|A0A398DFW3|A0A398DFW3_9BACT S-adenosylmethionine:tRN A ribosyltransferase-isomerase (Fragment) OS=Candidatus Cryosericum odellii OX=2290917 GN=SMC5_02960 PE=3 SV=1
MHFTPELLDNVRGLGVDIEHVTLDVGLGTFQPVRVDTVEDHHMHTERFTLPEETARA

SEQ ID NO: 64758 - protein, 110 aa, Cryosericum odellii
  misc_feature (1)..(110): tr|A0A398DRM1|A0A398DRM1_9BACT S-adenosylmethionine:tRN A ribosyltransferase-isomerase (Fragment) OS=Candidatus Cryosericum odellii OX=2290917 GN=SMC5_02965 PE=3 SV=1
PEETARAVNAARANHAAVTAIGTTVARTLESCINPDGTVRADNGETSIFIYPPHEFHGFDHLVTNFHLPKSTLLMLVGAYMGMDLMWKAYHEAISERYRFFSFGDAMLIL

SEQ ID NO: 64759 - protein, 348 aa, Cyclonatronum proteinivorum
  misc_feature (1)..(348): tr|A0A345UIH8|A0A345UIH8_9BACT S-adenosylmethionine:tRN A ribosyltransferase-isomerase OS=Candidatus Cyclonatro num proteinivorum OX=1457365 GN=queA PE=3 SV=1
MKLTDFKYETEGLNIPEFGVEPRDSAKLMVIDRANKTITHEVFSNIHKYFEKGDCLVYNNTKVFPARLKGRKEKTDAYIEVFLLRELQPENMLWDVLVEPARKIRIGNKLYFGDELVAEVVDNTTSRGRTIRFLYDGPNEELYEKLDAVGEMPMPPYIKREPVLEDKDRYQTIFAKERGAVAAPTATMHFTPELVDKLTQKGVIMAPVTLHIGWGTFRAVEVEDLTKHRMDSEYFFIPEESAELINQVRTSKTNKVVAGGTTAVRAIESSITASGLLKPTVGWTDKFIYPPYDFKLTEGLITNFHQPESTLLMLAAAFCEFDFLMHAYEEARKHDYRFFSFGDAMIII

SEQ ID NO: 64760 - protein, 332 aa, Cyclonatronum proteinivorum
  misc_feature (1)..(332): tr|A0A345UGC3|A0A345UGC3_9BACT S-adenosylmethionine:tRN A ribosyltransferase-isomerase OS=Candidatus Cyclonatro num proteinivorum OX=1457365 GN=queA PE=3 SV=1
MRSFTLSDFDYELPAEHIAQKPAEPRDHARLLVYRRSTGEITDAVFHQLGAFLHPGTTLVMNNSRVEKARLLFGNREVFITHTHNPHTVDAMVRPGRKFKLGREVQLTESIRAMVNHIEDDGLRRLTFNLPLDHPAFEPHRNTPFPPYIAPDESLAGRYQTVYAKPEGSKAAPTAGLHFTTKLLDELREAGHPTAEVTLHVGLGTFAPVKTDDISAHKLHTESWMVGPQAAEKLSAAKHITAVGTTTTRVLESLPDNGRRFSAGAGDTGIYIKPGYRFRHTDSMITNFHLPKSTLLMMIAAFAGYDEMRHIYAHAIQKNYRFYSFGDAMLLI

SEQ ID NO: 64761 - protein, 343 aa, Dactylopiibacterium carminicum
  misc_feature (1)..(343): tr|A0A272EQA5|A0A272EQA5_9RHOO S-adenosylmethionine:tRN A ribosyltransferase-isomerase OS=Candidatus Dactylopii bacterium carminicum OX=857335 GN=queA PE=3 SV=1
MLSLDDFDYPLPPELIAQHALADRAASRLLLAKPDALEDRAFRDLPQLLRANDLLVFNDSRVLHARLFGQKETGGQVEVMVERPIGDHEVLAMVRASKSPKPGTRLRLMEAFDAEVVGRAGANDEFFQLRFPSDAMAVDYIERHGRLPLPPYIEHAATESDESRYQTVYARELGSVAAPTAGLHFDESLFAELAAMGVRRAFVTLHVGAGTFQPVREQDLSRHKMHRELYSIPQDTVDAVAATRAAGGRVICVGTTSLRAVESAAQAGTLRAGSSETGIFITPGYDFRVADGLITNFHLPKSTLLMLVSALAGMDTIRRAYAHAVEQRYRFFSYGDAMLLERN

SEQ ID NO: 64762 - protein, 335 aa, Dadabacteria bacterium
  misc_feature (1)..(335): tr|A0A1F5IV11|A0A1F5IV11_9BACT S-adenosylmethionine:tRN A ribosyltransferase-isomerase OS=Candidatus Dadabacter ia bacterium RIFCSPHIGHO2_12_FULL_53_21 OX=1797756 GN=q ueA PE=3 SV=1
MKTSDFDYNLPEERIAYRPAAERQNSKLMVLDREKGEITHRKFFELPGLLKPGDLLVLNNTRVIPARLFGRKKSGERAEILLVEKQDSRTWKCLVRNPKEGLVIEFEDGPSGRLFSGEAGVWLVEFSGDADSYIDDSGSMPLPHYIKREPDAEDRVSYQTVYAEKPGAIAAPTAGLHFTPGLLKEIEHGGVRMTHVTLHVGIGTFKPVKTELVREHDMHPEFREIPPATADAVNAAKSRGGRVIAVGTTVMRTLESSVNEAGEVVPCKGETGLFILPGYGFRGADALITNFHLPRSTLLMLVSAFAGREFIFRAYNEALNRDYRFLSYGDAMFIK

SEQ ID NO: 64763 - protein, 334 aa, Dadabacteria bacterium
  misc_feature (1)..(334): tr|A0A520VBF9|A0A520VBF9_9BACT S-adenosylmethionine:tRN A ribosyltransferase-isomerase OS=Candidatus Dadabacter ia bacterium OX=2080303 GN=queA PE=3 SV=1
MNLSDYDFDLPKELIADRPRRPRGTSKLLVIEKKTGKIKATTFNRIFDYFTRKDLFIFNDTKVNPVSLSLNDEFGKQYKILLVEEVNKNVWKILIKKPKIKIFKFSGGLECEIFNDPASKEWFIKFNSESKLFIDRFGMMPIPPYLNREPDINDFVDYQTVYAKKEGSIAAPTAGLHFTKDLMKKIRMKDIGLEFLTLHVGMGTFLPIKDKIIENHKMHYEEFFISSKLISEIELTKRRGNRILTVGTTTLRALESYNLFTPPSNSWFKTDIFINQGFEFGLTDALLTNFHLPKSSLLVLISSFLGYELTKVSYEYAIKEKFKFYSYGDAMLIV

SEQ ID NO: 64764 - protein, 342 aa, Delongbacteria bacterium
  misc_feature (1)..(342): tr|A0A348NZV8|A0A348NZV8_9BACT S-adenosylmethionine:tRN A ribosyltransferase-isomerase OS=Candidatus Delongbact eria bacterium OX=2044594 GN=queA PE=3 SV=1
MYEVSDYDFILPKRLIAQKPTGKRDKSRLLTIDRKYGTIGTGIFSEIEKWFDPGDVLVLNETKVIPARLYGRTEDDAEIEILLLREIEENLWEIMVKPGRKVKINGTIFFDGNASCTIQKITAEGNRTAIFECEQNFFDFIETYGKVPLPPYIERDAVELDKNRYQTVYAKVPGAVAAPTAGLHFTDDLLGSLKIKGVNICTIVLHVGAGTFKPIKVKSILDHKMHREYYEVTEQAAELINNAKSRGNKIFAVGTTAARTLETVSDKSGKIAPSKGETDIFIYPGYKFKIVDHLITNFHLPKSSLILLVSAFSSIEMIKKAYDLAIKEEFRFYSYGDAMLIL

SEQ ID NO: 64765 - protein, 343 aa, Delongbacteria bacterium
  misc_feature (1)..(343): tr|A0A2G6P7S6|A0A2G6P7S6_9BACT S-adenosylmethionine:tRN A ribosyltransferase-isomerase OS=Candidatus Delongbact eria bacterium OX=2044594 GN=queA PE=3 SV=1
MRVDDFDYTLPEELIAQKPLENRDLCKMLTVDRKSGETRSLQFRDIKKILKRGDLLVVNETKVIPARFYAKREDNPNSSTVEIFLIKEISLNKWEVLVKPGRRAKVGHSFIFGDDIKGKIVEVLESGNRILYFDYNEDIKYNLFTIGNIPLPPYIKRESNERDISDYQTVFAQKEGAVAAPTAGLHFTRSLLEEIESIGVEIVKIVLHVGIGTFRPVKVDTVEEHEMHNESYEIEVDAAERINKAIDEKRRIIAVGTTSVRTLESGAIGNKVVSGKGNTKIFIYPGYNFKIINGLITNFHLPKSTLIMLVSAFAGRENIMNAYKRAVEEKYRFFSYGDAMLII

SEQ ID NO: 64766 - protein, 343 aa, Dependentiae bacterium
  misc_feature (1)..(343): tr|A0A1V5UAW3|A0A1V5UAW3_9BACT S-adenosylmethionine:tRN A ribosyltransferase-isomerase OS=Candidatus Dependenti ae bacterium ADurb.Bin246 OX=1852839 GN=queA PE=3 SV=1
MIDVLKTSSYDFNLPASQIATFPVNPPSSAKMLVYNREKNEIFHSTFENILEFLPQDLTIFLNDTKVIKARIFGQKSTGAKLELLLNKPLFMDRYLVMIKGKVKIGTKIFFDENLIAEVLELNEDGTRVVSFFKDENSKKRVDFLSLVEILNKIGHIPLPPYMQRDDKKEDEVNYQTLFAKNYGAVAAPTASLHFTKELLEEIEKKYGLNYLTLHVGAGTFKPVDVEDILSHPMHSEYFEIGIDAKKNLDNAKKVLAVGTTVTRTIEYYARTNKIQGECDLFLNPMNKPIKVDYLLTNFHLPKSTLIMLVASFIGLEKTLELYNIAIKENYRFYSYGDGMLII

SEQ ID NO: 64767 - protein, 343 aa, Desantisbacteria bacterium
  misc_feature (1)..(343): tr|A0A1J4S9X2|A0A1J4S9X2_9BACT S-adenosylmethionine:tRN A ribosyltransferase-isomerase OS=Candidatus Desantisba cteria bacterium CG1_02_38_46 OX=1817893 GN=queA PE=3 S V=1
MNIADFEYNLPKELIAQEPADKREDSRLMVVFCKEKKWDHCYFKNLIDYLKSGDILVVNDTRVIPARLKGIKKGDGKVEILLVCQRGINLWDVFVRPGKKVKAGDVIQFGSSLAGVIKEITPGRGRLIEFVTNGDFKKILEEIGEVPLPHYIKRTGPPTQRDKIRYQTIYASKDGAIAAPTAGLHFSDEIMQEIIKKGVEVFTITLHVGPGSFRPIRLNDISMHKMEGEYFEISSNTFQEVMSARKSDRRVIAVGTSTVRALESAVNIPGFNGGSRWTDLYIYPGYKFKTIDALITNFHLPHSTPLVLVCAFAGMELIFKIYQEAIDKCYRFLSFGDAMLILT

SEQ ID NO: 64768 - protein, 333 aa, Desantisbacteria bacterium
  misc_feature (1)..(333): tr|A0A2M7P1A7|A0A2M7P1A7_9BACT S-adenosylmethionine:tRN A ribosyltransferase-isomerase OS=Candidatus Desantisba cteria bacterium CG_4_10_14_3_um_filter_40_18 OX=197454 4 GN=queA PE=3 SV=1
MKTIEFDYYLPSHLIAQHPVDERDMSRLLVLHKDSGEIEHRNFKDIIEYLSNGDVLILNDTKVIPARLFGYTNQEKPFEVLLVKQLQTNLWEVLVKPIRKARIGLELVFSDELKGVICKYRHGRSVMEFSFLGDFFSVLEMIGHMPLPPYIKRFDNSRDHQQYQTTYAANPGAIAAPTAGLHFTPELLSMIQKKGVQIAYITLHVGIGTFKPIQTQDIHDHQMESEYYIIPDETKEILISNPSRVIAVGTTSVRTIESFFTTNAQAGWTDIFIYPGYRFKRVDVLITNLHTPHSTPLMLASAFAGKDILLETYQEAIEKEYRFYSYGDSMLIV

SEQ ID NO: 64769 - protein, 352 aa, Desulfofervidus auxilii
  misc_feature (1)..(352): tr|A0A127AKB8|A0A127AKB8_9DELT S-adenosylmethionine:tRN A ribosyltransferase-isomerase OS=Candidatus Desulfofer vidus auxilii OX=1621989 GN=queA PE=3 SV=1
MEKEWLYKLSSYDYPLPKELIAQEALPQRDKARLLILNRHTGKIVHSEFRHIVNYLGSNDVLVINDTKVIPARLFGKKETGGKVEVLLLDFNPLEGEKKVVITGALLKASRPPRLGQVIYFEDGLKAEVLDYKEGKAKLCFYAKRSFRETLFNIGHMPLPPYIKREDKPEDRRDYQTVYATKEGAIAAPTAGLHFTPKILTALRQKGVEIVRVTLHVGYGTFIPVKVDDIRKHKMHGEYYELKEETAQQLNKAFEAGKKIVAVGTTTTRLLEYLMTRYGKIQPGCGICDLFIFPGYQFKIVQAMITNFHLPKSTLVMLVSAFAGRERILNAYLEAIKKRYRFYSYGDVMFIF

SEQ ID NO: 64770 - protein, 341 aa, Desulforudis sp.
  misc_feature (1)..(341): tr|A0A3A6N0N2|A0A3A6N0N2_9FIRM S-adenosylmethionine:tRN A ribosyltransferase-isomerase OS=Candidatus Desulforud is sp. OX=2093368 GN=queA PE=3 SV=1
MRVAEFDYELPDELIAQEPLPFRDESRLLVIGRHETGLAHRHFRDIPDYLRPGDLLVVNETRVLPVRLFGHKTTGGRVEVLLLRPVVEGRWEALVRPGRRLPEGTRVEFGPELSGKILSRTEAGGRIIEFEYEGRFEEVLERIGHVPLPPYIKRDLPAEERDRYQTVYARHSGSAAAPTAGLHFTPELLEKVKAMGVSVVSVVLHIGLDTFRPVKVENVHEHRMHSEWYSVPKASSRAITETKRVGGRVIAVGTTVTRCLEAAAGEDGTVSPGAASTDIFIYPGYKFKVIDGLVTNFHLPRSTLLMLVSALVGRERLLEAYREAVRMRYRFFSFGDAMLII

SEQ ID NO: 64771 - protein, 297 aa, Desulforudis audaxviator
  misc_feature (1)..(297): tr|A0A3S8S440|A0A3S8S440_9FIRM S-adenosylmethionine:tRN A ribosyltransferase-isomerase OS=Candidatus Desulforud is audaxviator OX=471827 GN=Daudx_0738 PE=3 SV=1
MSETVFSAVVNWLEPGDVLVINDTKVMKARLFGKKPTGGKLEIFLLHPLGDSRWEALLKPYPKGGVLLLGDSVRVQVLEKTARSTFVLQFPTPEAAVEAMGKWGETPLPPYIKEPLADQDRYQTVLAKVHGSSAAPTAALHFTPELLQRVRDKGVQVVNFTLHMGVGSFRPIKTEYVADHNLPLEFYHLPEETVVAVQQAKRQGSRVVACGTDAVRALESAALKEFRPGSGWTDLFITPGYRFQVVDRIITNLHLPCSSHLVLVSAFASREFALQAYAYAVREKFRFLSFGDATLII

SEQ ID NO: 64772 - protein, 340 aa, Desulfosporosinus infrequens
  misc_feature (1)..(340): tr|A0A2U3LJW4|A0A2U3LJW4_9FIRM S-adenosylmethionine:tRN A ribosyltransferase-isomerase OS=Candidatus Desulfospo rosinus infrequens OX=2043169 GN=queA PE=3 SV=1
MNVADFDFELPETLIAQHPMEPRDASRLMVVNRDSKRIEHHTFRDLVSLLKKGDVLVLNNTRVIPARMIGEKEGTEAKIEVLLLKRLELDVWEALVKPGKRLKVGQKILFGNGILTCVLLDILENGNRRIRFSYSGVFETILDQLGQMPLPPYITAQLKDQGRYQTVYAKERGSVAAPTAGLHFTPELLNDLQKKGVEIVEILLHVGLGTFRPVKVEDIREHVMHSEYYQVDVKAAEQINRAKQEGRRVIAVGTTAARTLESVSKQGRVVPGVGWTDIFIYPGYSFQIVDALLTNFHFPKSTLLMLVSALAGRELILKAYGIAIAEQYRFYSFGDAMLIL

SEQ ID NO: 64773 - protein, 368 aa, Desulfovibrio trichonymphae
  misc_feature (1)..(368): tr|A0A1J1E390|A0A1J1E390_9DELT S-adenosylmethionine:tRN A ribosyltransferase-isomerase OS=Candidatus Desulfovib rio trichonymphae OX=1725232 GN=queA PE=3 SV=1
MTPDEADFLLSSYQYELPPEQIAQFPPEKRGSSRLLVMQRAGELALAHKNFNDLPDCLPDKALLVVNNARVLQARLTGARATGGKADFLLLTPLPIVLKRARCDAAAADNAFYAEVKGLLRAGGSVRDGESLHFGAGISVTVLETAPFGVRRVRLSWREDLAASFATAGHIPLPPYIKRPDNEEDAARYQTIYAANSKTGAVAAPTAGLHFTPLLRESLTAKGFEWVEITLYVGYGTFSPVRCEDIRSYNMYKEYIEIQEDAANAIIKARAQGRPVLAVGTTSARALEGVAELCGKVRPYTGWTDIFLCPGKKFRVVDALLTNFHLPKSSLLMLVSAFAGRERVLAAYTEGVRGGYRFFSYGDAMLLR

SEQ ID NO: 64774 - protein, 346 aa, Dojkabacteria bacterium
  misc_feature (1)..(346): tr|A0A2N2F2Z1|A0A2N2F2Z1_9BACT S-adenosylmethionine:tRN A ribosyltransferase-isomerase OS=Candidatus Dojkabacte ria bacterium HGW-Dojkabacteria-1 OX=2013761 GN=queA PE =3 SV=1
MKIEEFKYNLPEELIAKYPPKKRGTSNLLVLDKESGEITHRKYFNIPEYIQKGDIVVLNETKVINSRTFFFTPKGKRVEVLFLENIGNDIWYVLIGRARNVDIEDTLVNEEGQEVQIQIKERKENGFVVLFTKGSSHILFEKYGHTPLPPYMKREDEESDKERYNTIFSKIQGAVAAPTASLNLTDEILKEIEKRGAKILKVELRVGWGTFAPIREEDIENHKIHTEYINISQEVAEAINNRKGKVWAFGTTVARTLESVAYEQNGKYLLKSYSGDTSLYIYPGYKWKIVDTLVTNFHMPDSSLILLVSSFAGKENIKQAYEEAVSKKYKFLSYGDSMLIGNNLSK

SEQ ID NO: 64775 - protein, 379 aa, Dojkabacteria bacterium
  misc_feature (1)..(379): tr|A0A2M7W3N7|A0A2M7W3N7_9BACT S-adenosylmethionine:tRN A ribosyltransferase-isomerase OS=Candidatus Dojkabacte ria bacterium CG_4_10_14_0_2_um_filter_Dojkabacteria_WS 6_41_15 OX=2014249 GN=queA PE=3 SV=1
MKESMNLSDYDYQFPQDAIAMYPPEKRGTTKLFVVNTQTGEIEIDQYENLDKHLTAQDVLVRNITKVFHARLFGMAINKTGQSGKQVEVFFTEPHAQSLEEYARRQYDPKEKGYKLEFLTALRGIRLDSIRYIDFGDNLRLKKISKNNDSLTGILYKTDSDFSVEELFTMFEQKGKVPLPPYIKRSTVVSDDERYQTIFAEKLGSVAAPTASLNFTKTLEARLAKQGTAIAEVTLHVGRGTFMPLRHERIEDNILHSEPYFVKNSTITALHLAKQDQKRIIAMGTTTTRTLESIAPQILDANTSHDILSETKLFVYPPFRFKIVDGLLTNFHFPRSSLITLVDAFLQYKRSKLSWRTIYEFAMKNEARLFSYGDSMLIL

SEQ ID NO: 64776 - protein, 347 aa, Dormibacter sp.
  misc_feature (1)..(347): tr|A0A2W5YYV0|A0A2W5YYV0_9BACT S-adenosylmethionine:tRN A ribosyltransferase-isomerase OS=Candidatus Dormibacte r sp. RRmetagenome_bin12 OX=2599630 GN=queA PE=3 SV=1
MPTDMFDYVLPAGRIAQTPVEPRDASRLLHAEPGGGLSDHVFTDLPDLLRPGDLLVANDTRVRAARLRGRGADGGKEEVLLLTRLDRDRFTALVRPGRRLHDGARVSVGDALSVTIAGPAPGHPGARVVRLDGDGDLEALIAQLGEAPLPPYIRTPLEDAQRYQTVYAAGAPASAAAPTAGLHFTSRVHEALAQRGVGWTALQLDVGLGTFAPITVSDARTHRMHAERCMLPAATAATITAARAGGGRVIAVGTTVVRTLESFVDGVGALHPGTVSTELFITPGHRFGAVDGLLTNFHQPRSSLLVLLAAFLGGDAWRSVYEHALARGYRFLSFGDCMLCWRGGAPS

SEQ ID NO: 64777 - protein, 345 aa, Dormibacter sp.
  misc_feature (1)..(345): tr|A0A2W5ZA09|A0A2W5ZA09_9BACT S-adenosylmethionine:tRN A ribosyltransferase-isomerase OS=Candidatus Dormibacte r sp. RRmetagenome_bin12 OX=2599630 GN=DLM65_04360 PE=3 SV=1
MARPHTRFIAREGLEAAVPAEQRGIARDGVRLLVATRADLSHRRFRDLPEVLEAGDLVVVNTSATVPAALRAEREDGQPARVHLSGWLDPAHWIVEVRRADNRGPDRGGAAGSVLRLPGGVALTLERPHPDSASAPTRLWVVSVTPTTEPVPYLGVHGRPIAYGHLADSLPLSAHQTVYADEPGSAEMPSAGRPFTAELLVRLMAAGITVAPLILHAGVSSPEFHEPPAPERYSVPVSTARLVADTRRAGRRVVAVGTTVVRALETVAADGQIRGGEGWTDLVLEPDRPARVVSGLITGLHLPESSHLLLLEAVAGPKMVADAYATAVDAGYLWHEFGDSMLFLP

SEQ ID NO: 64778 - protein, 355 aa, Dormibacteraeota bacterium
  misc_feature (1)..(355): tr|A0A2W5Y815|A0A2W5Y815_9BACT S-adenosylmethionine:tRN A ribosyltransferase-isomerase OS=Candidatus Dormibacte raeota bacterium OX=2052315 GN=DLM66_06945 PE=3 SV=1
MTALAPALLDFELPARLEAATPPEERGRGRDDVRLLVTHRAAGRIEHGRFTDLPDLLSAGDLLVVNRSATIPAALSAEVGGEAALLHLSSPRGDGTWVVELRHRDRDGRNSPWLDAAPETTLILPEGATARLLRPTAQGIDPGQKVRLWLAELDLPSSPTMFLNRYGAPIRYGHVDRDRPLAAHQTVFATEPGSAEMPSAGRPFTCELVTALVARGVAIAPLLLHCGVSSMEAHEPPADERFLVPAATAERVNATRRLGGRVVAVGTTVVRALESAALAPGLVLPADGWTELVIGAHHAMTAVDGLLTGWHEPRASHLAVLEAFVGSELLETSYRAALDRGYLWHEFGDSHLLLP

SEQ ID NO: 64779 - protein, 356 aa, Dormibacteraeota bacterium
  misc_feature (1)..(356): tr|A0A2W6B7T2|A0A2W6B7T2_9BACT S-adenosylmethionine:tRN A ribosyltransferase-isomerase OS=Candidatus Dormibacte raeota bacterium OX=2052315 GN=DLM67_10540 PE=3 SV=1
MTAILSPGTLLDFELPARLEASAPPEVRGSGRGDVRLLVARRTSARIEHRRFEDLPDLLRPGDLLVVNTSATVAAAVAGRVAGAPALLHLSGRVRGDQLVELRRPDPGGRGSSPWLEAEEGAVVELPDGGAAELLRPALPRLGAAGVRLWAARLSLPTFVEAYLGLHGRPIRYGHVDREWPLAAYQTIFSLEAGSAEMPSAARPFTSELVTRLVAGGVGVVPVLLHCGVSSPEAGEPPQSEYYRVPATTAAAVNAARRAGRWIVAVGTTSVRALESAAGAGGELAAAEGWTDLVIGPERGLRTVDALITGWHEPRSSHLGMLEAVGGRSLLEASYQAALENRYLWHEFGDSHLILP

SEQ ID NO: 64780 - protein, 339 aa, Edwardsbacteria bacterium
  misc_feature (1)..(339): tr|A0A1F5RHH4|A0A1F5RHH4_9BACT S-adenosylmethionine:tRN A ribosyltransferase-isomerase OS=Candidatus Edwardsbac teria bacterium GWF2_54_11 OX=1817851 GN=queA PE=3 SV=1
MKLSSFDYNLPPELIAKSPAEKRDASRLMVLHRGDGRIEHRRFSDIVEYLRPSDILVVNNTRVIPARLMGHKKRTGGEVEILLLRQEAESRWNCLVRPGRRLMPGAKVGFGDGMMEAEIIEYRPGGQRLVRFTHQGDFYVTLEKVGQVPLPPYIDRGPHQADKDRYQTIYAKDAGAVAAPTAGLHFTPELMERIKAKGVEVLEILLHVGWGTFKGVEADDIREHKMEAEYYNISQAVAVILKNGKLENRRIVAVGTTTSRALESFGQSGQLSDWTEIFIYPPYEFKLVDSMITNFHLPKSTLIMLVSALAGREKVMRAYQEAIQEKYRFYSYGDAMMIV

SEQ ID NO: 64781 - protein, 339 aa, Edwardsbacteria bacterium; identical to SEQ ID NO: 64780
  misc_feature (1)..(339): tr|A0A3D0J485|A0A3D0J485_9BACT S-adenosylmethionine:tRN A ribosyltransferase-isomerase OS=Candidatus Edwardsbac teria bacterium OX=2053551 GN=queA PE=3 SV=1

SEQ ID NO: 64782 - protein, 342 aa, Eisenbacteria bacterium
  misc_feature (1)..(342): tr|A0A1F5RIL3|A0A1F5RIL3_9BACT S-adenosylmethionine:tRN A ribosyltransferase-isomerase OS=Candidatus Eisenbacte ria bacterium RBG_16_71_46 OX=1817856 GN=queA PE=3 SV=1
MRLEDLDYELPPDRIAQHPAAQRDQARLLVVDRSDGALHDARVAEIGRWLRPGDALALNETRVRPARLRLRRASGGQVELLVVRPDAGGTWRVLARPAKKAPLGERLADAGDALVLEVVEAGDRGERLVRVAAGDLGEALEREGEVPLPPYIHRAPEAADRERYQTVFARVEGAVAAPTAGLHFTPALLAALAAAGVEVVRVLLHVGPGTFRPVTEGDPRRHRMDEEYFEVPDATAAALDAARARGGRVVAVGTTTVRALESACDLHDGALGPGSGWTRKYIVPPYEFRAVDALLTNFHLPRTTLLLLVAAFAGEDLLRRAYAHAIAAGYRFYSYGDAMLVV

SEQ ID NO: 64783 - protein, 347 aa, Eisenbacteria bacterium
  misc_feature (1)..(347): tr|A0A538TI79|A0A538TI79_9BACT S-adenosylmethionine:tRN A ribosyltransferase-isomerase OS=Candidatus Eisenbacte ria bacterium OX=2212470 GN=queA PE=3 SV=1
MKTSDFDYELPPELIAQRPAASRDGSRLLVLDRASGAIRHMAFRDLPGLLLAGDLLVVNDTRVIPARLFGTALADREIEILLLREEPAVAPERIWSALARPARALHPGSQLTFVDPSYAALVVGTGERGMRHISFRPTRPDAPPFEAWLSRIGHVPLPPYIERADEPEDRERYQTIFAREAGSVAAPTAGLHFTGETVASMHARGIGTATVTLHVGAGTFRPVATENPADHVLDPEPYRVPPETAAAIRSNPARIIAVGTTSVRSLESWALENRPDDGGWRETGLFILPPFEFRVVTALITNFHLPRSGLLMLVSAFAGRDHVLAAYREAVRESYRFYSYGDAMLVI

SEQ ID NO: 64784 - protein, 362 aa, Electronema sp.
  misc_feature (1)..(362): tr|A0A521G3E8|A0A521G3E8_9DELT S-adenosylmethionine:tRN A ribosyltransferase-isomerase OS=Candidatus Electronem a sp. GS OX=2005002 GN=queA PE=3 SV=1
MPDNIPEDFRLSSYDYFLPEHLIAQQPADRREQSRLLVLDCTEGQIRHSRFAALGELLRPGDLLVVNNTKVFPARLFGVKDTGGKAELLLLHFPETSSKAGEAAALALVRSSKRPQRGSLIHFAEELQARVEEILPDGKVRITLLYPESANLEQLLEQHGQLPLPPYIRRPEGNSTADSLRYQTEYARHIGSVAAPTAGLHFSHNLLDELKEKGIQQTPVTLHVGYGTFAPVRSSDIREHQIHKEFVRVPVETAEAVNATRAMGGRIWAVGTTTTRTLEFAADETGRITPTEGLCGLYLYPGCRFKAVDNLITNFHLPQSSLLFLVSALVGRTRILAAYAEAVAQGYRFFSYGDAMAIITKP

SEQ ID NO: 64785 - protein, 376 aa, Electrothrix communis
  misc_feature (1)..(376): tr|A0A3S3UGF7|A0A3S3UGF7_9DELT S-adenosylmethionine:tRN A ribosyltransferase-isomerase OS=Candidatus Electrothr ix communis OX=1859133 GN=queA PE=3 SV=1
MSQKYNDMAQDAVQDIYRLSSYDYPLPENQIAQQPAKQRDQSRLLVLDCVNNSRQHTQFETLCELISPGDLLVVNNTKVFPARLFGHKETGGKIEILLLHFPSLVKQEEGVCQATTQALIKSSKRPKPGSVLHFSDTLQARVESLLPDGKAEIRLFYPAHADLEQILEKHGEIPLPPYIKRPDGNTTEDAQRYQTNYARHLGSVAAPTAGLHLSNPLIEKLKDAGIGFAEVTLHVGYGTFAPVRCEDIRDHTLHKELIRVPKETAEAINTTRENGGKIWAVGTTTARTLEFAAGHADKKGRLQSVEDLCGLYMYPGYRFKIVDNLITNFHLPKSSLLFLVAALAGKKRVLEAYGEAVEQGYRFFSYGDAMAIITKS

SEQ ID NO: 64786 - protein, 329 aa, Electrothrix marina
  misc_feature (1)..(329): tr|A0A3S3QN26|A0A3S3QN26_9DELT S-adenosylmethionine:tRN A ribosyltransferase-isomerase (Fragment) OS=Candidatus Electrothrix marina OX=1859130 GN=VT99_10243 PE=3 SV=1
MSEECNDTAEDAAQEIYRLSSYDYPLPEDQIAQQPAKQRDQSRLLVLDCVNNSRHHTQFETLCELISPGDLLVVNNTKVFPARLFGHKETGGKIEMLLLHFPAPVKQENGVCQATTPALIKSSKRPKPGSVLHFSDALQAKVEALLPDGKAEVSLFYPAHADLEQLLEKHGEIPLPPYIRRPEGSTTEDAQRYQTNYARYIGSVAAPTAGLHLSNPLIEKLKDAGIGFAEVTLHVGYGTFAPVRCEDIRDHTLHKELIRVPEETAEAINTTRENGGRIWAVGTTTARTLEFAAEYADKKGRLQPIEDLCGLYMYPGYRFKIVDNLITNF

SEQ ID NO: 64787 - protein, 354 aa, Endobugula sertula
  misc_feature (1)..(354): tr|A0A1D2QNR0|A0A1D2QNR0_9GAMM S-adenosylmethionine:tRN A ribosyltransferase-isomerase OS=Candidatus Endobugula sertula OX=62101 GN=queA PE=3 SV=1
MRRQDFSYSLPDELIAFQPTEKRSGSRLLCLDGHNGSVSHCLFPQLIDQLFAGDVMVFNDTRVIPARVFGRKCSGGKVEILVERILDQHHMLAHVRASKSPKPGTDIVLENGQSLQITGRQDTLFDIQSKTPLLDLLDEMGHMPLPPYIERGDTVEDRSRYQTVYGRHVGAVAAPTAGLHFDDNMIQAIADKGVTIVYVTLHVGAGTFQPVRVDNIDEHVMHSEVISLSATASEIINLAKREGRRVVAVGTTSVRCLESVAQFNGFSEGEVLCAYQGETSIFITPGYPFKVVDALLTNFHLSESTLLMLVSAFAGYQFTMSAYQQAIEEKYRFFSYGDAMFITHNPRAADQGPK

SEQ ID NO: 64788 - protein, 122 aa, Endolissoclinum sp.
  misc_feature (1)..(122): tr|A0A1Z8VQ09|A0A1Z8VQ09_9PROT S-adenosylmethionine:tRN A ribosyltransferase-isomerase OS=Candidatus Endolissoc linum sp. TMED55 OX=1986641 GN=CBC15_01670 PE=3 SV=1
  misc_feature (52)..(52): Xaa can be any naturally occurring amino acid
MHSEWAELTNNAISLIIKTKKNGGRVIALGTTVLRVLETAALNGELRAFSGXTDLFITPGFTFNVVDLLLTNFHQPRSTLIMLVAAFAGTNRILEAYEYAKNNGYRFLSYGDACLIENINKV

SEQ ID NO: 64789 - protein, 344 aa, Endolissoclinum sp.
  misc_feature (1)..(344): tr|A0A1Z9Y1B1|A0A1Z9Y1B1_9PROT S-adenosylmethionine:tRN A ribosyltransferase-isomerase OS=Candidatus Endolissoc linum sp. TMED26 OX=1986636 GN=queA PE=3 SV=1
MKVDLFDYVLPPALIADAPAQPRDSARMLDCTGASLADRGVKDLPAILRPGDLLVFNDTKVLPTRLTGKRGAARVEVTLHKSLGDGQWRAFARPGKRLRLHDEVIFDGGLSARVFGKHESGEVTLDFQCPETELRAALRQIGEMPLPPYIKRAQPQVSDQDDYQTVFARHEGAVAAPTAGLHFTPELLAALAAAGVETAAITLHVGAGTFLPVKTEDTENHEMHYEWGAVTPSTVTRIQRTRAAGGRIISAGTTALRILESAAKDGDLAAFEGETNLFITPGFRFNAVDMLLTNFHLPRSTLMMLVAAFHGRERIMASYAHAIAHAYRFYSYGDCCLLDRRDHV

SEQ ID NO: 64790 - protein, 341 aa, Endomicrobium trichonymphae
  misc_feature (1)..(341): tr|A0A1E5IHV3|A0A1E5IHV3_9BACT S-adenosylmethionine:tRN A ribosyltransferase-isomerase (Fragment) OS=Candidatus Endomicrobium trichonymphae OX=1408204 GN=ATZ36_06625 PE=3 SV=1
MKRLFIKMTCKDDLLSNYDYEIPEELIAQKPVENRQDSRLFVVNRRTQKFYHRKFSDITEYFSTGDCLIINITKVVPSRLLGRKKSGGKVEVLFLDPCQKDEYYKVLIKPFISVGKKAYFENGYECEIMSKTESGETIVRFNKSGILEFLQEHGIMPLPPYIKRKGGLARELSDFDRERYQTIYAKTLGAIATPTAGLHFTENILKTFKEKGINIATLTLHVGWGTFKSITAAELKNHNMLPEKFTIDKTNAEIINLAINNNKRIAAVGTTSVRALESAAGKVGFSKNDKTFIKDCSEETSIFIYPGYKFKIINTLVTNLHLPKSTPLIMASAFSSREIML

SEQ ID NO: 64791 - protein, 273 aa, Endomicrobium trichonymphae
  misc_feature (1)..(273): tr|A0A1E5IL35|A0A1E5IL35_9BACT S-adenosylmethionine:tRN A ribosyltransferase-isomerase OS=Candidatus Endomicrob ium trichonymphae OX=1408204 GN=ATZ36_15470 PE=3 SV=1
MLFLDPCQKNEYYKVLIKPFIGVGKKAYFENGYECEIMSKMESGETVVKFNKSGVLEFLQEHGIMPLPPYIKRKGELAQELSDFDRQRYQTVYAKTLGAVAAPTAGLHFTENILKTFKENGINIATLTLHVGWGTFKSITSAELKNHNMLPEKFTIDKTNAEIINSAINNNKRIVAVGTTSVRALESAVGKVGFSKTGKAFIKDCSEETSIFICPGYKFKIINTLVTNFHLSKSTPLIMASAFSSREIMLKAYKEAVKEKYRFFSYGDSMLIL

SEQ ID NO: 64792 - protein, 351 aa, Enterovibrio luxaltus
  misc_feature (1)..(351): tr|A0A291BAA9|A0A291BAA9_9GAMM S-adenosylmethionine:tRN A ribosyltransferase-isomerase OS=Candidatus Enterovibr io luxaltus OX=1927128 GN=queA PE=3 SV=1
MQVSDFHFDLPDSLIALYPQPERTTSRLLQLNGNTGELSHKRFTDILDLVETGDLMVFNNTRVIPARMFGHKASGGKIEVLVERILDDKIILAHVRSSKSPKSGTILFMGENNAYEAEIIARHDTLFEIQFNGEQVVLDILNQIGHIPLPPYINRLNENADKERYQTVYNEKPGAVAAPTAGLHFDNNMMMALKSKGVDIAFVTLHIGASTFQPVRVDNVDDHLMHAEYTEVPQHVVNAVNAAKVRGNRVIAVGTTSVRSLESAAQHSRSEGTELKPFFNDTTIFIYPGYKWQLVNALITNFHLPKSTLIMLVSSFAGYGNVMNAYQQAIGNNYRFFSYGDAMFVTRQTWL

SEQ ID NO: 64793 - protein, 295 aa, Enterovibrio escacola
  misc_feature (1)..(295): tr|A0A2A5T5Y4|A0A2A5T5Y4_9GAMM S-adenosylmethionine:tRN A ribosyltransferase-isomerase OS=Candidatus Enterovibr io escacola OX=1927127 GN=BTN49_0478 PE=3 SV=1
MVFNNTRVVPARMLGRKASGGKIEVLMERMLDDKSIIAHVRSSKSPKLGGQLFLGENDEYEAEMVARHDALFEIRFTGKQAVLDILNHIGHMPLPPYINRPEENSDKERYQTVYNKILGATAAPTAGLHFDENMLVTLKAKGVKISFITLHIGSGTFQPIRVSKIEDHVMYAEYAEVLQDVVDEVNAAKLRGNRVVAVGTTSVRSLESAAYRAPHGKIKVKPYLSDTKIFIYPGYEWQLVDALITNFHLPESTLIMLVSSFAGYDQVMHAYKQAIENKYQFFSYGDAMFVTRKTP

SEQ ID NO: 64794 - protein, 331 aa, Entotheonella gemina
  misc_feature (1)..(331): tr|W4M4Q3|W4M4Q3_9BACT S-adenosylmethionine:tRNA ribosy ltransferase-isomerase (Fragment) OS=Candidatus Entothe onella gemina OX=1429439 GN=ETSY2_24585 PE=3 SV=1
MNLNDFNFTLPPERIAQTPAVRRDASRLMIVDRQQQRITHDIFANIGQYLRAHDVLVVNDTKVIPARLHGRKAATGGKVEVFLLHDHGGGIWEVLLKPAARVRPGTVIEIGPLQAEVIERSSGAMIRIKFTPSDIYAALEQVGEVPLPPYIQRHGMDDRHGEDRERYQTVYAQHPGAVAAPTAGLHFTPELLADLEHRGIHRATVTLHVGWGTFQPMRSEKITDHRMAKECYRLVADEAARIRQARANGGRVVAVGTTSTRTLETVVQEAGEVRAKTGWSDLFIYPSYRFRIVDALVTNFHLPQSTLFLLVCAFAGRDLMLEAYHCAIAER

SEQ ID NO: 64795 - protein, 320 aa, Entotheonella factor
  misc_feature (1)..(320): tr|W4LMP0|W4LMP0_9BACT S-adenosylmethionine:tRNA ribosy ltransferase-isomerase OS=Candidatus Entotheonella fact or OX=1429438 GN=queA PE=3 SV=1
MIVDRQQQRITHDVFANIGHYLRPNDVLVVNDTKVIPARLHGRKAGTGGKVEVFLLHDHGEGMWDVLLKPAARARPETVIDIGPLQAKVIERLPDAMIRVQFTPSDIYDLLEQVGEVPLPPYIQRHGHQDGVEDHPGKDRERYQTVYAQQPGAVAAPTAGLHFTPELLTHLEQLGIRRATVTLHVGWGTFQPIRSAQVTDHRMAKEYYRLIADEAACIRQAQAHGGRVVAVGTTSTRTLETILQEIGEVGAKAGWSDLFIYPSYRFRIVDALVTNFHLPQSTLFLLVCAFAGRDLMLEAYHCAIAERYRFYSYGDAMLIQ

SEQ ID NO: 64796 - protein, 341 aa, Eremiobacter sp.
  misc_feature (1)..(341): tr|A0A2W5XDU5|A0A2W5XDU5_9BACT S-adenosylmethionine:tRN A ribosyltransferase-isomerase OS=Candidatus Eremiobact er sp. RRmetagenome_bin22 OX=2599629 GN=DLM53_10575 PE= 3 SV=1
MIEVAQTLEFALPPELEAHEPPEARGIARDGVGMLVSGARRGSNAHASFHDLPDFLEPGDVLVVNTSATLPAALEATSRSGQRIGLHVSTRLAAGLTVVEPRNTAVIEGDVLSLAAGGTVRLLSPYKASQRLWIAAFDLPEPLLTFLAHHGSPIQYPYVRAKWPLEVYQTIFALHPGSAEMPSAGRPFTARVVERLVKKGITIVPLLLHCGVASLERDEPPYSEYFDVSETTVAAVEQARSQHRHVVAVGTTAARALESCFDERGRLVASRGWTDHLITPDVGIRSFDALLTGFHETRSSHLAILQALLGRSGVATAYEAALAHGYLWHEFGDVHLIQQNR

SEQ ID NO: 64797 - protein, 350 aa, Eremiobacter sp.
  misc_feature (1)..(350): tr|A0A2W5XCE7|A0A2W5XCE7_9BACT S-adenosylmethionine:tRN A ribosyltransferase-isomerase OS=Candidatus Eremiobact er sp. RRmetagenome_bin22 OX=2599629 GN=queA PE=3 SV=1
MTGRNPFAAETYDYELPQELIAQQPAEQRDASRLFALMACGSRRHLMFSDLPALLRPGDVLVANDTRVLRARFFPKRAGGGAAQVLLLHKSAEPDVWLAMARPGKRVRPGDRLALSADAGIEIVDRAPGGNRLVKFYGIDASEAMRRYGVAPLPPYIRTPPRDADDRYQTVYAASDGSVAAPTAGLHFSEALLAQLTNAGIEWVALTLHVGAGTFRPVKTADVRRHVMHEEYYDISQGAAAAISRAKKEGRRIVAVGTTSLRALEDAAAHGQEGVVSAASGWTSLFVYPGYVFRTVDALITNFHLPRSTLLMLVCALAGTQRVLDAYAEAARLRYRFYSFGDAMYLERAR

SEQ ID NO: 64798 - protein, 349 aa, Eremiobacteraeota bacterium
  misc_feature (1)..(349): tr|A0A2W5YE36|A0A2W5YE36_9BACT S-adenosylmethionine:tRN A ribosyltransferase-isomerase OS=Candidatus Eremiobact eraeota bacterium OX=2052317 GN=queA PE=3 SV=1
MTGRRAGDYDFELPADLIAQDHAHPRDASRLLIMRGSELVDACFADLPEFLQSGDALVLNETRVIPARLVGELASHTKIEILLLHPARLPRYDGRASRWRALVKPARRARMNQEIYFGQVGSARVIGVQENGMREIEFSLEVPFARFLEEWGQVPLPPYIRNDSRQARQDYQTVFARVPGSVAAPTAGLHFTAGLLERLSARGVDILKIVLDVGLGTFRPMRTESLDDHVMHAESYAIPAETAVALHRVKSEGRRVIAVGTTVVRALEGCISECGELKAGPGITNLFITPGFRFRMVDALITNFHLPRSTLLVLVSAFAGGARVVRAYRHAVTRRYRFFSFGDAMLIFP

SEQ ID NO: 64799 - protein, 334 aa, Eremiobacteraeota bacterium
  misc_feature (1)..(334): tr|A0A2W5YS23|A0A2W5YS23_9BACT S-adenosylmethionine:tRN A ribosyltransferase-isomerase OS=Candidatus Eremiobact eraeota bacterium OX=2052317 GN=DLM50_03185 PE=3 SV=1
MLALQFELRSELEATVPPEARGVPRDGVAMLVSDRATNVHRSVLFSDLPELLRAGDLLVVNDSQTLPAALPARFGGVSFSLHLSAHIAGHLWTVEPRTDSALQPATVTLPGEGRAELLAQTDEKHRRLWYARMDLPVSAFEYLQRYGKPIRYSYVRADWPLEMYQTIFARKPGSAEMPSAARPFTLRTLNRLARRNISIVPITLHCGVASAERHEPPAAEWMDISPATAARINAAADGGNRTIAVGTSVVRALESAADRHERVTAFTGWTEHIVDGNYRPLAADGLLTGFHEPCASHLALLEAFCRPTFLRVAYSAAIGARMLWHEFGDVHLIL

SEQ ID NO: 64800 - protein, 355 aa, Erwinia dacicola
  misc_feature (1)..(355): tr|A0A1E7YXY0|A0A1E7YXY0_9GAMM S-adenosylmethionine:tRN A ribosyltransferase-isomerase OS=Candidatus Erwinia da cicola OX=252393 GN=queA PE=3 SV=1
MRVADFTFELPESLIAHYPQAQRSGCRLLSLNGPIGVLSHGVFTDLLHKLNPGDLLVFNNTRVIPARIFGRKTSGGKIEVLIERMLDDTRVLAHVRSSKAPKPSTALLLGDDESVQATMVARHDALFEIEFNDARPVLDILNAIGHMPLAPYIDRQDEDADRELYQTVYSQKPGAVAAPTAGLHFDEPLLEALREKGIETAFVTLHVGAGTFQPVRVDIIKDHIMHAEYAEVPQDVVDAVLACKARGNQVIAVGTTSVRSLESAAQTAQDALIGPFFGDTKIFIYPGYHYQVIDALVTNFHLPESTLIMLVSAFAGYRHTMLAYQQAVAEQYRFFSYGDAMFITRNPEAYAEIPC

SEQ ID NO: 64801 - protein, 650 aa, Falkowbacteria bacterium
  misc_feature (1)..(650): tr|A0A0G0NFD9|A0A0G0NFD9_9BACT Multifunctional fusion p rotein OS=Candidatus Falkowbacteria bacterium GW2011_GW A2_39_24 OX=1618634 GN=ruvB PE=3 SV=1
MNRLVDNSFKEGDLDLTLRPQRLADYVGQEKVKSNLRILIEAAKQRNEPIEHVLLYGAPGLGKTTLAHIIANELGGNIRVTSGPVIEKAGDLAAILTNLAEGDILFIDEIHRLNKNIEEILYPAMEDYMLDIIIGKGPSAKTLRLDLSKFTIIGATTKASLISSPLRDRFGMVYHLDFYEPTDLQQIIQRSAKILSIALDDASANEVARRARRTPRVANRLLKRVRDYCQVKNADLIDLDSCRQALSMLEIDDLGLDSVDRRILELIIDKFNGGPVGLGTMAAATGEDIATLEEVYEPYLMQLGFLDRSPRGRVATDAAYRHLRDTSRLLVLHRDSGVLEHKQFFNVLDYLQSGDVLVLNNSKVIPARLLGQKADTKGKTEVFLSKRQGNQTNEVWECLLKGKNLNTGSIIKLDQDLIATVMTKQGDVWLVEFNKTGADFMTTIEQIGQTPLPPYIRKQLTDKDKETYQTVYAADDQKGSVAAPTAGLHFTPELLQKITDKGVRIEYLTLHVGLGTFLPVKTEYLEDHHMHAEWVEVKKETIQKIQEAKASQKKIVAVGTTTCRSLEAVWQEQDNMNAVKDFSAWVDIFIYPGYKFRVVDSLITNFHLPKSTLLMLVSALAGKDKIDRAYQEAIDQEYRFFSYGDAMFIC

SEQ ID NO: 64802 - protein, 386 aa, Falkowbacteria bacterium
  misc_feature (1)..(386): tr|A0A0G0PVS8|A0A0G0PVS8_9BACT S-adenosylmethionine:tRN A ribosyltransferase-isomerase OS=Candidatus Falkowbact eria bacterium GW2011_GWF2_39_8 OX=1618642 GN=queA PE=3 SV=1
MKLKDFDYNLPQELIAQEPINPRDHSRLLVLDKRTGKIEHRHFFEIGEFLQVGDVLVLNDSKVFPARLIGEKAESGGKAEVFLLKRITSLDPFLPGQQKAPSLINGGRDLWQCLLSGRSCKVGMKIKFSNKLEAVIEKNNLDGTWQVRFNIAEEKFMKLIEKIGQVPLPPYIKRSLKATEQSELKLKDKKTYQTVFANEKKAGSVAAPTAGLHFTEALIKKLKKQGVQFEQVTLHVGLGTFASVKTEKITEHKMHSEWAEVDKGTLIRLLQAKKEGRRIITVGTTATRTLETVWQTVKPYDKRNMIHDFTGWTDIFIYPGYEFKAIDGIITNFHVPKSTLLMLVSALAQNGHKSKKTGLKKVLFAYDEAIKKGYRFFSYGDAMLVK

SEQ ID NO: 64803 - protein, 339 aa, Fermentibacter daniensis
  misc_feature (1)..(339): tr|A0A163VNC1|A0A163VNC1_9BACT S-adenosylmethionine:tRN A ribosyltransferase-isomerase OS=Candidatus Fermentiba cter daniensis OX=1729713 GN=queA PE=3 SV=1
MRREDIWFDLPEGLIAQHPAGERTGSRLLVADRSARTVSDRRFSDLPDLLTPGDLLVFNDTRVTKVRLRGRRRDTSGRAEVLLLERTGDYSWRVMLKPSRRCRAGTVLDFECGLRGEVLEVHGPGRASIAFHAPGDLKDAMDRAGDVPLPPYIRRETVPDDLERYQTVYAAADGAVAAPTAGLHFDEEMLRRLASRGIESAKLTLHVGPGTFEPLRNDDIDSNTLEPERFVIGEECSEAVSRAIDEGRRIVAVGTTTTRVLETAGRGIRPSSGRTSLFIRPPYDFQVAGGLLTNFHLPGSSLLCLVSAFMGLDFMHEAYSRAISGEYRFYSYGDAMLIT

SEQ ID NO: 64804 - protein, 341 aa, Fermentibacteria bacterium
  misc_feature (1)..(341): tr|A0A496U9D9|A0A496U9D9_9BACT S-adenosylmethionine:tRN A ribosyltransferase-isomerase OS=Candidatus Fermentiba cteria bacterium OX=2044591 GN=queA PE=3 SV=1
MLTKSDLMYDLPEELIAQHPPKVRGTCRLMVLNRKDRSFHEEKFSRIREYIKPEDALVLNDTRVIRARLSGKREDTGGTVEFLLLQELSPLVWKTMVRPGRQCRTGNVFHFNHSLKATVVQELGKGRAVVEFSSGGNTSELIEKSGTVPIPPYIKRLPDELDSVRYQTVFAENDGAVAAPTAGLHFTPEMLQSIEDTGTSINRLTLHVGPGTFQPLRRELLAENTMEEERYSISSETLESLRRCRQKGGRIVAAGTTVTRTLESIDISSQTSLSGSTSIFIHPPYRFRNVDVLLTNFHLPGSSLISLVGSFAGLDLIMDAYTKAIESKFMFYSYGDAMLII

SEQ ID NO: 64805 - protein, 161 aa, Fermentibacteria bacterium
  misc_feature (1)..(161): tr|A0A496UJZ8|A0A496UJZ8_9BACT S-adenosylmethionine:tRN A ribosyltransferase-isomerase (Fragment) OS=Candidatus Fermentibacteria bacterium OX=2044591 GN=DRQ25_10135 P E=3 SV=1
FTPDILTSLQSAGVNNVHVTLHVGPGTFQPLRRETLEENHLDPEEYYISAASLSAIRKARRAGGRIVAVGTTTTRVLESIDLESSESLSGETEIFIFPPYRFRNVDALITNFHLPGSSLLCLVAAFMGYEFMMEAYQHAIDESYRFYSYGDAMLIEQESGK

SEQ ID NO: 64806 - protein, 357 aa, Filomicrobium marinum
  misc_feature (1)..(357): tr|A0A0D6JHG6|A0A0D6JHG6_9RHIZ S-adenosylmethionine:tRN A ribosyltransferase-isomerase OS=Candidatus Filomicrob ium marinum OX=1608628 GN=queA PE=3 SV=1
MRTDLFDFELPEDLIALRPLSPRDASRLLVVKPGEPPADRMFCDLPSLLRPGDCLVFNDTRVVPAALLGQRIRGDQVSEVHFNLHARVDERHWRAFARPAKRLADGDRIRFVKSAGETDATPLEATVKAKGEGGEVTLAFDQAGPDLDSAIALVGQMPLPPYIAARRAADDTDRVNYQTIYATREGAVAAPTAGLHFTQELLSALYDKGMCSQFVTLHVGAGTFLPVKVENTEDHRMHAEWGEVSSEVAAALNAVKSNGGRIVAVGTTALRLLESAADDHGIIQTVSGDTDIFITPGYRFKAVDILLTNFHLPKSTLFMLVCALAGTDTMTKAYAHAVAERYRFYSYGDASLLFRAE

SEQ ID NO: 64807 - protein, 355 aa, Firestonebacteria bacterium
  misc_feature (1)..(355): tr|A0A1F5USH5|A0A1F5USH5_9BACT S-adenosylmethionine:tRN A ribosyltransferase-isomerase OS=Candidatus Firestoneb acteria bacterium RIFOXYC2_FULL_39_67 OX=1817861 GN=que A PE=3 SV=1
MKATAYDYNLPKEQIAQLPLELRAACKLMVLRKDAQTIEHSRFDNIKNYLKPGDLLVINNTKVVPAKLLLYRDKALGKIDALLVSKETGGKELWRVILSKRKGMEPGTILLTEKKELTALIKSLIDDEFLIEFTDTTGESLSESIKEIGFAPLPPYIKRKDKNTEKAFKNKDKIDYQTVFARFDGSIAAPTAGMHFTPDLMQELKQFGVEFVEITHHIGKGTFKPIKTDEIENHHMDKEYFEIDADSADRINKAKLAGRRVITVGTSSTRAIETSCIDPKQGLIAPGKAWTGLFITDGYKYKVIDAIITNFHLPKSTNLVMTCVFGGKEYILKAYNEAVAQNYRFYSYGDAMFLS

SEQ ID NO: 64808 - protein, 355 aa, Firestonebacteria bacterium
  misc_feature (1)..(355): tr|A0A1F5UEZ9|A0A1F5UEZ9_9BACT S-adenosylmethionine:tRN A ribosyltransferase-isomerase OS=Candidatus Firestoneb acteria bacterium GWA2_43_8 OX=1817858 GN=queA PE=3 SV= 1
MKVTAYDYNLPKEQIAQLPLELRAACNLMVLRKDAQTIEHSRFDNIKNYLKPGDLLVINNTKVVPAKLLLYRCKTLGKIDALLVSKETGGKELWRVILSKRKGMEPGVTLLTEKKELTAVIKGLIDDEFLIEFVDTTGESLSESIKEIGFAPLPPYIKRKDKSTEKAFKNKDKCDYQTVFARFDGSIAAPTAGMHFTPDLMLELKDFGVEFVEITHHIGKGTFKPIKTDEIENHHMDKEYFEIDADSADKINKAKLAGRRVITVGTSSTRALETACIDPVKGLIAPGKAWTGLFITDGYKYKVIDAIITNFHLPKSTNLVMTCVFGGKEYILKAYNEAVAQNYRFYSYGDAMFLS

SEQ ID NO: 64809 - protein, 345 aa, Fischerbacteria bacterium
  misc_feature (1)..(345): tr|A0A1F5VUX8|A0A1F5VUX8_9BACT S-adenosylmethionine:tRN A ribosyltransferase-isomerase OS=Candidatus Fischerbac teria bacterium RBG_13_37_8 OX=1817863 GN=queA PE=3 SV= 1
MDISEFDYSLDKKLIAQQPLSRREASKMMILNRDTGRITHSFFYDFLSFVSQEYILVLNNTKVFPARLYAHTAEGKEIEVLLVKELTDGVWETMAKPLKKIKKHATLYFDDGIHSCTVTDFTSRNRLIVTISPSNDFWDFIERYGKPPLPPYIKRLSNEYSETDWNRYQTVFAQKTGSIAAPTAGFHFSPEILNALQEKNIHITYITLHVGSATFQPLRVTNITEHTMENEYFEMSVESFNKIKNAKEAGKKILAVGTTSVRTIESVDFTRSITESLKGWTNLFIYPGYEFKMTDAMLTNFHLPKSTLLMLVYAFASKKYMFAAYQEAMQHEYRFYSYGDCMLIL

SEQ ID NO: 64810 - protein, 361 aa, Fokinia solitaria
  misc_feature (1)..(361): tr|A0A2U8BSP6|A0A2U8BSP6_9RICK S-adenosylmethionine:tRN A ribosyltransferase-isomerase OS=Candidatus Fokinia so litaria OX=1802984 GN=queA PE=3 SV=1
MNIATEEFYFHLPQELIARYPVTPRDSSKLLYMNKTGVLQDLSFKDVVKLLKKNDVLVLNDTKVIPSMLKCSTKDSNTRVRIDILKHYHDHDILYCNALVTPRKHCRPNTILQCISNKNTTLELSVEDIQQNIVTLKVHSSKSFHDIMREYGNVPLPPYILKARSAHNIIEKQETDKDNYQTVYAKYDGSIAAPTAGLHFTDTLLAEISKIGVKICYITLHVGLGTFLPINTSLLNEHKMHEETFEVTQETIDILRNAKENHSRIVAVGTTSIRVLEHIALRNISTASIGTTDIFISPGYKFKTVNSIITNFHMSKSTPLVLVCAAAGKEQIFNMYKHAIDGKYRMLSYGDACMIDVVTNE

SEQ ID NO: 64811 - protein, 341 aa, Frackibacter sp.
  misc_feature (1)..(341): tr|A0A1H8B6N3|A0A1H8B6N3_9FIRM S-adenosylmethionine:tRN A ribosyltransferase-isomerase OS=Candidatus Frackibact er sp. WG12 OX=2017977 GN=queA PE=3 SV=1
MKVADFDYHLPEELIAQEPMNPRDESRLMIVDRNSDEIEERVFKEIIDFFESGDTIVLNNTKVIPARLYGFKEETGGKVEFLLLTEVGLDTWEVLVRPGKKVKIGTRVVFGDRDLIAEVKERTEFGGRVVKFEYDGVFAEILDKLGEMPLPPYITKELEEREQYQTVFAKKRGAAAAPTAGLHFTEEVLSKLEEKGVNIVYITLHVGLGTFRPVRAEKVEEHDMHAEYYEVSQETAEIINKTKEEGKRVFAVGTTVTRTLETVGNEGGYVKADKGWTDIFIYPGYEYRVVDALLTNFHLPKSTLIMLVSAFCGQDLVMEAYQKAVEDEYRFYSFGDAMLII

SEQ ID NO: 64812 - protein, 67 aa, Frackibacter sp.
  misc_feature (1)..(67): tr|A0A139CSB9|A0A139CSB9_9FIRM S-adenosylmethionine:tRN A ribosyltransferase-isomerase (Fragment) OS=Candidatus Frackibacter sp. T328-2 OX=1785949 GN=AWU54_797 PE=3 S V=1
GWTDIFIYPGYEYRVVDALLTNFHLPKSTLIMLVSAFCGQDLVMEAYQKAVEDEYRFYSFGDAMLII

SEQ ID NO: 64813 - protein, 384 aa, Fukatsuia symbiotica
  misc_feature (1)..(384): tr|A0A2U8I3G5|A0A2U8I3G5_9GAMM S-adenosylmethionine:tRN A ribosyltransferase-isomerase OS=Candidatus Fukatsuia symbiotica OX=1878942 GN=queA PE=3 SV=1
MRVTDFSFTLPESLIAHSPYSQRSGCRLLSLDGQSGCVTHGIFTDLLQTLQRGDLLVFNNTRVIPARLFGRKASGGKLEILVERVLDDHRVLAHVKTSKAPKPGTALLLGDDQPVDMTAVGTVIPATVLARHDSLFELRFDDQRDVFTLLHTIGHMPLPPYINRPDEAVDRELYQTVYSERPGAVAAPTAGLHFDQPLLDALRAKGIEMAFVTLHVGAGTFQPVRVENVEQHVMHAEYVEVPQAVVDAVLTCKARGKRVIAVGTTSVRSLESAARNAEENAVHNSKNAAIVPFLGDTRIFIYPGYHYRLVDALITNFHLPESTLIMLVSAFAGYKNTMKAYQQAIGEKYRFFSYGDAMFISRNPLAAQEEIKHSILEPIRDRCE

SEQ ID NO: 64814 - protein, 340 aa, Gallionella acididurans
  misc_feature (1)..(340): tr|A0A139BSJ8|A0A139BSJ8_9PROT S-adenosylmethionine:tRN A ribosyltransferase-isomerase OS=Candidatus Gallionell a acididurans OX=1796491 GN=queA PE=3 SV=1
MRTDEFDFVLPDRLIAQHPPEQRGASRLLHVHAGVLGDCRFADLIRLVRPGDVLVLNDTRVIKARMSGSKESGGKVEVLVERVLDAHEVLAQVRASHAPKPASRLLLAGGLTVEVLERAGEFFRLRFPAGEPVLDLLERYGKLPLPPYITHAATDQDERRYQTVFAREAGAVAAPTAGLHFDDAMLQALRDHGVNIVYVTLHVGAGTFQPVRAELIHEHAMHSERYAISQATVDAIARARATGGRVIAGGTTSLRALESAAGTGLLQAGSGETEIFITPGYRFNAVDVLLTNFHLPRSTLLMLVCAFGGMNEMLAAYRHAVEREYRFFSYGDAMLIERKP

SEQ ID NO: 64815 - protein, 348 aa, Gastranaerophilales bacterium
  misc_feature (1)..(348): tr|A0A292RGD6|A0A292RGD6_9BACT S-adenosylmethionine:tRN A ribosyltransferase-isomerase OS=Candidatus Gastranaer ophilales bacterium HUM_9 OX=1916320 GN=queA PE=3 SV=1
MKVSEFDYDLPEELIAQTPSQKRDYSKMLVVNPADNTLEDKHFFDIVDYLDDNCVLILNNTKVIPARLYGYKSTGAKIEIFLLKQKDNKQWEVLIKPSKRVKVGTEITISDKLSATVIKPLEDAGKWLVQLSYEGDIYGVLSEVGNVPLPPYIERKMTSEELKKLDYERYQTVYAKNEGSVAAPTAGLHFTTEILNKLKAKGVQIGYVTLSVGLGTFRPVMCDDVLDHKMDSEEYEISEETAKLINDAKAQGKKIVAVGTTSVRTLESAYKEFGKIQACRSASTLFIYPPYEFKVVDKLITNFHLPKSTLLMLVSALTSKECIFNAYKHAIENKYRFYSYGDCMFINK

SEQ ID NO: 64816 - protein, 347 aa, Gastranaerophilales bacterium
  misc_feature (1)..(347): tr|A0A292S0S5|A0A292S0S5_9BACT S-adenosylmethionine:tRN A ribosyltransferase-isomerase OS=Candidatus Gastranaer ophilales bacterium HUM_17 OX=1916220 GN=queA PE=3 SV=1
MFLSEFDYELPEELIAQRPSDKRENSRMMVLNRDEHKILNKHFYDIVDLLDENHVLILNDTKVIPARLYGYKDTGAKIEVFLLKERENKNWEVLIKPSKRVRVGTVIKISEELSCEVKMPLPDDGKWLVQMIYEGDIFEILHRVGNIPLPPYIERKMSNEELKKLDFERYQTVYAREEGSVAAPTAGLHFTQEILKKLEDKGVQVGYVTLNVGIGTFRPVKCDNILEHHMDSETFEIKQETADLINQAKAEGKKLVAVGTTTVRTLESAYKMFGEIKACKGASELFIYPPYKFGVVDKLITNFHLPKSTLLMLVSALAGKDFVFEAYKKAIEEKYRFYSYGDCMFIN

SEQ ID NO: 64817 - protein, 347 aa, Glassbacteria bacterium
  misc_feature (1)..(347): tr|A0A1F5YL79|A0A1F5YL79_9BACT S-adenosylmethionine:tRN A ribosyltransferase-isomerase OS=Candidatus Glassbacte ria bacterium RIFCSPLOWO2_12_FULL_58_11 OX=1817867 GN=q ueA PE=3 SV=1
MPDSGLRTADFDYELPPELIAQHPAKERDASRLLVLHRASGKIEHRSFSDLPEYLSSTDLLVLNNTRVFPARLTGTLSGGAAFEALLVRRLEGPRWLALVRPGRRLKPGKHLALGEGLELALEDFGAQEGERIISLSAPAGKDPLELVEKLGHVPLPPYIGRPDTAEDRERYQTVYARVSGAVAAPTAGLHFTPELLQKLEQAGIGRLEVTLHVGPGTFRPVTAENISGHRMDAEYYEIAEKTWTRIKEVKAGGGRVLAVGTTAVRALESAAADQPPRLAGWTELFITPGFTFRAADIMLTNFHLPRSTLLMLVSALAGKELIDRAYREAVRERYRFYSYGDAMLIL

SEQ ID NO: 64818 - protein, 357 aa, Glomeribacter gigasporarum
  misc_feature (1)..(357): tr|G2JAM8|G2JAM8_9BURK S-adenosylmethionine:tRNA ribosy ltransferase-isomerase OS=Candidatus Glomeribacter giga sporarum BEG34 OX=1070319 GN=queA PE=3 SV=1
MYTLADFDFDLPPEFIAQTPLAKRSASRLLEVIHASPHQEDDAPPARLVDRQFAELPACLQPGDLLVFNDTKVLKARLFGRKASGGKVEVLIERVLDARTALAQVRASKRPAVGTTLKLADAFDVTVGARVEPFHTLHFPDDCLTLIERYGRLPLPPYIEHDPDATDEMRYQTIFAKHSGAVAAPTAGLHFDDTTFEALEAHGIRRATLTLHVGAGTFQPVRVNNLAEHKMHREWYQLPQSLIDQIAATQAAGRAVIAVGTTSMRALEAAARDADRAQRALTATAAETDIFITPGYRFQIVDRLVTNFHLPKSTLLMLVSAFAGMQAIRFAYRHAIEQRYRFFSYGDAMLLTRKDNE

SEQ ID NO: 64819 - protein, 342 aa, Goldbacteria bacterium
  misc_feature (1)..(342): tr|A0A2N1W3R5|A0A2N1W3R5_9BACT S-adenosylmethionine:tRN A ribosyltransferase-isomerase OS=Candidatus Goldbacter ia bacterium HGW-Goldbacteria-1 OX=2013807 GN=queA PE=3 SV=1
MNKFNLENYDYELPEGLIAQLPSPQRDKSRLIVVDKHTGVLEHRLFEDITNYLKPGDCLVLNDTRVIPARIYGRTKTGAAIELLLLSFKEGQWEAIMGNSRRVKEGDSVILDGNITAVIKQKNGKTVMVDFSAGREEVMKAFQKHGKIPLPPYIKEDDSAFHRERYQTVYASKEGATAAPTAGLHFTPELINRIKKSGVSVEYITLHTGLGTFAPVTETDIREHKIHNEEYEISQAAACAINGVKKSGSRIIAVGTTSLRTLESACSEGKIVSGKGNTSIYIYPGYEFKAVDCLITNFHLPRTTLLALVYAFAGEKNTKNAYKTAIENKYRFFSYGDAMLIK

SEQ ID NO: 64820 - protein, 322 aa, Gottesmanbacteria bacterium
  misc_feature (1)..(322): tr|A0A1F6BDR9|A0A1F6BDR9_9BACT S-adenosylmethionine:tRN A ribosyltransferase-isomerase OS=Candidatus Gottesmanb acteria bacterium RIFOXYB1_FULL_47_11 OX=1798401 GN=que A PE=3 SV=1
MSFNTGDFDYHLPVSHIAQVPIVPREAARLMVVDRKTGTITHTYVAHFPDYLHQGDVLVINNTKVFHARLKSGNKELFLVRTIGGNRWQAIGKKLIPGETIVFAQDFRATILEKHNNGTVVVEFGQGDVIALANKYGEVPVPPYIKTIPKDADYQTAYAKIIGSVAAPTAGFHLTKALLQTIKNRGVEIVEITLHVGLGTFLPIKTASLEAHPMHSEWVEIKPDAAEAIKRAKRVVAVGTTTVRALEGTGGKPYMGDINLFIKPEYKFCVVDGMLTNFHLPKSTLIVLVSAFADRKLILHAYKEAIEHGYRFYSFGDAMFLA

SEQ ID NO: 64821 - protein, 380 aa, Gracilibacteria bacterium
  misc_feature (1)..(380): tr|A0A328EBX7|A0A328EBX7_9BACT S-adenosylmethionine:tRN A ribosyltransferase-isomerase OS=Candidatus Gracilibac teria bacterium GN02-873 OX=1914866 GN=BLM37_03410 PE=3 SV=1
MFSLSDYRFDLPAELIAETAAHPAHAAKLLVVSQKNSQILSEATFWELDQFLDENSVLFFNNSKVLRARIPLRNQTLFRDGEEKTLKDGEIFFLKNRDKNHFEALVRPGKKFRIGTKIFLGNFELTVTENTDSGRILHISGGEIFALLDQFGELPLPPYIEYSSEKEADYQNIFAKKNGSVAAPTAGLHFSEALLYKLKNPREFVTLHIGLGTFKTIDTDDIRAYEIHSETAEIHHEIFGKIFEYKKNHQKIVAVGTTACRTLESLPSLWKNLTDEEKNIFDENVRNFWEKISEKAEKNWITEYIFSEDFIEFSTRAYITPGYDFAVIDELITNFHLPESSLLVLVSAMIGQENLLKIYDHAIREKYRFFSFGDGMYLKK

SEQ ID NO: 64822 - protein, 350 aa, Gracilibacteria bacterium
  misc_feature (1)..(350): tr|A0A2U7P9A4|A0A2U7P9A4_9BACT S-adenosylmethionine:tRN A ribosyltransferase-isomerase OS=Candidatus Gracilibac teria bacterium HOT-871 OX=1540872 GN=queA PE=3 SV=1
MNLSEFDYDLPEELIAQEAIEPRDHSKLLKINPNSKKIEQKLFFEILEDLGKNDVLVLNKTRVINARLKGFIENDKTKICEIFLHKQISDKIWDCLIYPGRKLKPGKKVFFYLENKFILKAEIKDFSDSGRIVEFDKGGIEFLEIIEKIGKIPLPPYIKDNHQESGRYQTVFNEISGSVAAPTAGLHFTEELLEKLEKKGVKIEKVLLHVGLGTFKNVETENILEHKMHSEYIELDEKTAENLNNYKKSGKRIIAVGTTSIRVLESFANNTGTLESGKKDTNIFIYPGYNWKFVDAIITNFHLPKSTLLMLVSSFAGKEFIKDVYNYAIKNKFRFFSFGDAMFIEEKEKI

SEQ ID NO: 64823 - protein, 354 aa, Gullanella endobia
  misc_feature (1)..(354): tr|A0A143WQJ7|A0A143WQJ7_9ENTR S-adenosylmethionine:tRN A ribosyltransferase-isomerase OS=Candidatus Gullanella endobia OX=1070130 GN=queA PE=3 SV=1
MHVTNFSFELPDTLIACYPQEKRSACRLLSLDGPTGAISHKIFTDLLEKLEPGDLVVFNNTLVIPARLFGKKISGGKIEVLIEKILDDKRVLAHVRASKAPKLDTTILLGDNNNIITTVVAYHDSLFELFFNDTRDVITLLNDVGHIPLPKYINRLDNAIDRNLYQTVYGNRYGAVAAPTAGLHFDKPLLAALHDKGIKIAFITLHIGAGTFQPVRVNEIEQHQMHSEYTEVTQEVVDAILACKARGNRVVAVGTTSVRSLESAAVTENNKVIAPFSGNTRIFIYPGYQFRIIDILITNFHLPKSTLIMLVSAFAGYRHTLAAYREAVDKAYRFFSYGDAMFITRNPAASKEKI

SEQ ID NO: 64824 - protein, 357 aa, Hamiltonella defensa
  misc_feature (1)..(357): tr|A0A249DZC5|A0A249DZC5_9ENTR S-adenosylmethionine:tRN A ribosyltransferase-isomerase OS=Candidatus Hamiltonel la defensa (Bemisia tabaci) OX=672795 GN=queA PE=3 SV=1
MRLSDFSFELPESLVAQYPLEKRSDCRLLCLNGETGTMTEGVFTDLLYQLEQGDLLVLNNTRVIPARVFGRKPSGGKLEILVERILSPNRVLAHLKSSKTPKLGAQFLLGDTANIPVTLMARHASLFELRFDVREDLLMLLQSIGHIPLPPYIPRADEPKDHELYQTVYSQHLGAVAAPTAGLHFDKPLLKALKDRGIETAFVTLHVGAGTFQPVKTDNITEHVMHAEYAEVSQEVVDAVLACKARGKRVVAVGTTSVRSLETAAQKTKNSFLTPFSGETSIFIYPGYQYQIVDALITNFHLPKSTLIMLVCAFAGYQNTLRAYQKAIDEKYRFFSYGDAMFITHNPKAAQENRVKK

SEQ ID NO: 64825 - protein, 357 aa, Hamiltonella defensa
  misc_feature (1)..(357): tr|A0A2D3SZQ3|A0A2D3SZQ3_9ENTR S-adenosylmethionine:tRN A ribosyltransferase-isomerase OS=Candidatus Hamiltonel la defensa OX=138072 GN=queA PE=3 SV=1
MRLSDFSFELPESLVAQYPLEKRSDCRLLCLNGETGTMTEGVFTDLLYQLEQGDLLVLNNTRVIPARVFGRKPSGGKLEILVERILSPNRVLVHLKSSKTPKLGAQFLLGDTANIPVTLMARHASLFELRFDVREDALMLLQSIGHIPLPPYIPRADEPKDHELYQTVYGQHLGAVAAPTAGLHFDNPLLNALKARGIETAFVTLHVGAGTFQPVKTDNITEHVMHSEYAEVSQEVVDAVLACKARGKRVVAVGTTSVRSLETAAQKTKNSFLTPFSGETSIFIYPGYQYQIVDALITNFHLPKSTLIMLVCAFAGYQNTLRAYKKAIDEKYRFFSYGDAMFITHNPKAAQENRVKK

SEQ ID NO: 64826 - protein, 338 aa, Harrisonbacteria bacterium
  misc_feature (1)..(338): tr|A0A1G1ZTE8|A0A1G1ZTE8_9BACT S-adenosylmethionine:tRN A ribosyltransferase-isomerase OS=Candidatus Harrisonba cteria bacterium RIFCSPLOWO2_02_FULL_45_10c OX=1798410 GN=queA PE=3 SV=1
MEAYDYQFPQELIAQQPAVPRDSARLLVYNRKTDSAAFNTFKNLSKYLPPKAVLVFNETKVIPARVELQKATGGKVKILYLERIGGLIKVMADRQINIDSRLFLKKKPVFLIEKQTEQFYFLKPLFLIQRLNNFFETNGVAPLPPYIKHSPLGEAQIKREYQAVFAKYLGSIAAPTASLHFTKSLLRTLKQRGFSIEFVTLHVNLGTFAPLTDAQLQNGKLHQEYYEISSRTAERLNRFKKDGRQIVAVGTTVVRTLESASDTAGILKKLSGATDLFIRPGYRFNLVDSLITNFHVPRSSLLMLAAAFSGREELFKLYQKAIQRKFRLFSFGDGMLII

SEQ ID NO: 64827 - protein, 356 aa, Hoaglandella endobia
  misc_feature (1)..(356): tr|A0A143WTM7|A0A143WTM7_9ENTR S-adenosylmethionine:tRN A ribosyltransferase-isomerase OS=Candidatus Hoaglandel la endobia OX=1778263 GN=queA PE=3 SV=1
MRVADFFFKLPNNLIARYPQAERSACRLLSLDGQTGEITHRIFTDLLTILVAGDLLVFNNTRVIPARLFGRKFSGGKIEVLVERVLDDNRVLAHVRTSNTPKAGDTILLGDNQTIDVTMVARYETLFELRFNNTNNVLTLLNESGHIPLPPYIDRPDETMDRELYQTVYGDRPGAVAAPTAGLHFDEPLQAALRAKGIEMAFLTLYVGTGSFQPVRVENIEQHKMHAERAEVPQEVVDAVLACKARGNRVIAVGTTSVRSLESAAAAAGKKILVPFFGDTRIFIYPGYRFHIIDALITNFHLPASTLIMLVAAFAGYRHTLAAYREAVAQGYHFFSYGDAMFITQNNLAAKLGWYA

SEQ ID NO: 64828 - protein, 331 aa, Hydrogenedentes bacterium
  misc_feature (1)..(331): tr|A0A2M6Z649|A0A2M6Z649_9BACT S-adenosylmethionine:tRN A ribosyltransferase-isomerase OS=Candidatus Hydrogened entes bacterium CG07_land_8_20_14_0_80_42_17 OX=1974588 GN=queA PE=3 SV=1
MFDPRYEYILPPDRIAYYPAEKRDESRLMLVDCENNLMSDQGKFKDVKRFFRDGDILVLNNTKVFKARLFGARRSGGKVEALLLEQNSSRVKALLKPMTRLKIGEKIKFGEFEAEFIGKTSDGIGILEFGDKSAAEVLKKCGKIPLPPYIKRPAEKIDEERYQTVIASEGDSAAAPTAGLHFTENLISELNRIGVKIVYVTLDVSYATFAPLREGQTKLHTERYKIPEDTVSALSNLSGEGRIIAVGTTVVRTLESFAMTGIKEGETDIFIRPGFDFKFVSAMITNFHLPSSSLLMLVHAFSGDIIFNAYEKALEWNFRFFSYGDCMMILR

SEQ ID NO: 64829 - protein, 341 aa, Hydrogenedentes bacterium
  misc_feature (1)..(341): tr|A0A2A5E9Q5|A0A2A5E9Q5_9BACT S-adenosylmethionine:tRN A ribosyltransferase-isomerase OS=Candidatus Hydrogened entes bacterium OX=2030809 GN=queA PE=3 SV=1
  misc_feature (18)..(18): Xaa can be any naturally occurring amino acid
  misc_feature (20)..(20): Xaa can be any naturally occurring amino acid
  misc_feature (23)..(23): Xaa can be any naturally occurring amino acid
  misc_feature (103)..(103): Xaa can be any naturally occurring amino acid
MKTDILDYSLPSKCIAQXPXEKXDASRLLVVDRQAGTFKEDEFAHIGQYLNPGDSLVLNDTRVIRARLQGHKPTGGKVEIFLLHEISPGEWEALVRPSARIKXGTIISIGDDSLHAVVNDPLPGGRRSVHFEESNVIARLEEAGEIPLPPYIHREDREPIDAERYQTVYAEHPGAVAAPTAGLHFTPELLDSLEHKGIHRTSLTLHVGYGTFKPVQVDRLEDHTVDPEDFDFPESTADLLNETRTAGHRVVAVGTTSTRVLETQFVDGAFRPGHGITKCYIFPPYPFRAVDTLITNFHLPKSSLLALVCAFGGTELILEAYRHAAKNDFRFYSYGDAMLVL

SEQ ID NO: 64830 - protein, 340 aa, Hydrothermae bacterium
  misc_feature (1)..(340): tr|A0A496U7C2|A0A496U7C2_9BACT S-adenosylmethionine:tRN A ribosyltransferase-isomerase OS=Candidatus Hydrotherm ae bacterium OX=2250085 GN=queA PE=3 SV=1
MLKIDLFDFELPEELIAQYPVPKREMARLLVLHRKTGLIEHRVFKDIILYFKEGDLLVLNKTKVIKARLYGRRDDTGGKLEFLVTKIFEERRFEALAKPGRRAKQGVKIRIGKDILLEIKEITEGKRIVEIKHGPEIYTLLDKYGKVPLPPYIKREPRGEDEEWYQTVFAEIPGSIAAPTAGLHFTQEILTQLKQKGVLIEYILLHVGTGTFKPIKTKDITQHKMDAEYYEIPEKVLENIVKIKQSKGRLIACGTTTVRALESWSYDNTRSKGWTSLFIYPGYSFKVVDGMVTNFHLPKSTPLLMVSALAGRENIMKAYKEAVALKYRFFSYGDAMLIIP

SEQ ID NO: 64831 - protein, 343 aa, Izimaplasma sp.
  misc_feature (1)..(343): tr|A0A2A1ZR63|A0A2A1ZR63_9BACT S-adenosylmethionine:tRN A ribosyltransferase-isomerase OS=Candidatus Izimaplasm a sp. ZiA1 OX=2024899 GN=queA PE=3 SV=1
MNVNDYFYELPEELIAQVPLKTRSDSKLLVLNKLNGEIKHKKFTDIIDYLHKGDVLVVNDTSVIPARLYGVKEETKALIEVLLLSQIEGDVWEALVKKAKKIKVGTIISFGEGVLKAKCTKVLNDGLRHFEMIYKGVFYEVLGSLGEMPLPPYIHEKLEDQNRYQTVYNRVKGSAAAPTAGLHFTKDLLKKIEDKGVILTSVTLHVGLGTFRPVQVEKIEDHEMHSEFYMMSKKTADILNDAKQENRRIIAVGTTSLRTLETIMTEQKTFKEISAFSQIFIYPGYEFKAIDALITNFHLPKSTLLMLVSALSSKEIIFNAYKEAIKNNYRFFSFGDSMFISNE

SEQ ID NO: 64832 - protein, 342 aa, Izimaplasma sp.
  misc_feature (1)..(342): tr|A0A088T2G0|A0A088T2G0_9BACT S-adenosylmethionine:tRN A ribosyltransferase-isomerase OS=Candidatus Izimaplasm a sp. HR1 OX=1541959 GN=queA PE=3 SV=1
MKVEDFNYHLPEELIAQTPLKDRSASRLLVLDKNTGNISHDQFSNILDYLSKDDVLVLNNTSVIPARLYGIKEETNAAIEILLLKQKEEDIWECLVKKAKKIKLGTIISFGEGLIKAKCVKLGEDGIRELKMIYEGVFYEILDVLGEMPLPPYIHEKLENQDRYQTVYNKYKGSAAAPTAGLHFTKDLLKKISDKGVIITYVTLHVGLGTFRPVQVEDVTSHKMHTEYYEMDRETAKILNQAKVDKRKIIAVGTTSLRTLETVLRDYDNFIETSGWSDIFIYPGYKFKAIDELITNFHLPKSTLLMLVSALTSKEMIMNAYSEAIKEKYRFFSFGDSMIIKG

SEQ ID NO: 64833 - protein, 344 aa, Jacksonbacteria bacterium
  misc_feature (1)..(344): tr|A0A351IR34|A0A351IR34_9BACT S-adenosylmethionine:tRN A ribosyltransferase-isomerase OS=Candidatus Jacksonbac teria bacterium OX=2053562 GN=queA PE=3 SV=1
MNTSLFDYHLPKELIAHEPITPRDSARVFVVEGEVRHHDFFYNIGKYVKKGDILVRNVTKVFPARLYATKMTGGKVEILLVRPLDGSRWECLVGGRAKDGMEVRFDCRDVPLARLSETPQGGVSMIWIIDFGQNIDNLGTLIETAGQTPVPPYIHTDMAEQELRDRYQTIYAHKSGSVAAPTAGLHFTDELIDQLKRQGIEFLDIILHVGIGTFLPVKTKNVEDHSMHAEYVDISNEVAQKICSAKYEGRRLIAIGTTTTRALEACADTLLLGKGYTGEVNIFITPGYEFRMIDGLVTNFHLPKSTLLMLVSAFAGRENILSCYQEAIALGYTFYSFGDAMLIS

SEQ ID NO: 64834 - protein, 358 aa, Jettenia caeni
  misc_feature (1)..(358): tr|I3IQM4|I3IQM4_9BACT S-adenosylmethionine:tRNA ribosy ltransferase-isomerase OS=Candidatus Jettenia caeni OX= 247490 GN=queA PE=3 SV=1
MNVIVPKSVEICTKLADFDYDLPKDLIAQQPLENRDDARLLILYRNTGKIEHRKFYEITDYLSDGDLLVLNNTKVIPARIRGNKTSGASIELLFIEELEENQWKVLIKSRAKLREKEEIRIDSKIISVNLLGRSEDGAWYVEFNKDVDIKRIMNKIGEMPLPPYIKRKKDSNALYSLDQERYQTVFAKKAGAIAAPTAGLHFSQNILKNIKTLGTEIEFITLHVGLGTFLPIKTEDIRNHQMHKEYYECSEEVVKKIKKTKEKNNRVIATGSTACRVLETVAVNGKAPQLSGWTSLFIHPPYHFQYVDILLTNFHLPKTTLLLLVSAFAGRENIMNAYEIAKSKGYRFFSYGDCMMII

SEQ ID NO: 64835 - protein, 358 aa, Jettenia ecosi
  misc_feature (1)..(358): tr|A0A533QIR6|A0A533QIR6_9BACT S-adenosylmethionine:tRN A ribosyltransferase-isomerase OS=Candidatus Jettenia e cosi OX=2494326 GN=queA PE=3 SV=1
MNVIVPKSVEICTKLADFDYDLPKDLIAQQPLENRDDARLLILYRNTGKIEHRKFYEITDYLSDGDLLVLNNTKVIPARIRGNKTSGASIELLFIEELEENRWKVLIKSRTRLREKEEIRIDSRVISVNLLERSEDGAWYVEFNKDVDVKRLMNQMGEMPLPPYIKRKKDSNALYSLDQERYQTVFAEKTGAIAAPTAGLHFSQNILKNIKTLGTEIEFITLHVGLGTFLPIKTEDIRDHQMHKEYYECSEEIIQKIKKTKEKNSRVIATGSTSCRALETVAMNGKTPQLSGWTSLFIHPPYHFQYVDILLTNFHLPKTTLLLLVSAFAGRENIMNAYETAKSKGYRFFSYGDCMMII

SEQ ID NO: 64836 - protein, 348 aa, Kapabacteria sp.
  misc_feature (1)..(348): tr|A0A1M3L736|A0A1M3L736_9BACT S-adenosylmethionine:tRN A ribosyltransferase-isomerase OS='Candidatus Kapabacte ria' thiocyanatum OX=1895771 GN=queA PE=3 SV=1
MKLSEFKFTVPKASVAKFPSDPREASKMMVVNRETGEIEDREFKDILSFFDKGDVIVVNETKVFPARLFGKKEKTNAKIEVMLLRELKAQERIWDVLVEPARKVRIGNKIYFDNNRFYCEIIDNTTSRGRTVRFSYDGDLHQVIERIGQMPLPEYIKREPTELDKETYQCVFANPDKVGSIAPPTSGLHFSEKLLKAAEKKGVKVARVTLNIGQGIFETIEVEDLTKHRMYSEYFEISKDAADTINKALKSKKNVYAVGCSVVRALESSVLTSGIVKPNRGWTDKFIHPPYEFKIANRFITNFHLPASPSLLLATAYAGGKDTIFKAYKRAMKSEYRFFAYGDAMLII

SEQ ID NO: 64837 - protein, 424 aa, Kapabacteria sp.
  misc_feature (1)..(424): tr|A0A1M3KYY8|A0A1M3KYY8_9BACT S-adenosylmethionine:tRN A ribosyltransferase-isomerase OS='Candidatus Kapabacte ria' thiocyanatum OX=1895771 GN=queA PE=3 SV=1
MRYAPHSERLHTTGNYIMDLSRYTYDLPEQRIARHPLEERDSSRLLVADVEEGTIRHRVFSDIADLLPEGSMLVVNRTRVIAARLQLFKPTGGRVEVFLVNPVAPSPDPAIVLASREPSDWECLIGGRHVLQDMVLVDRISGDANLRAVVLSKTDGEATVRLQWSTGGTLSAILEEYGSVPLPPYLHRDAEESDKERYQTVFAREEGSVAAPTAGLHFTPRVMDALGEKGVATAAVTLHVGMGTFKPVSAADVRDHVMHRERIGIARTELERIVEHTAHDEAWITVVGTTSLRTLESVYLFGARLVRDGFDTDGLDIGQWDALDTTLTSVSRHDAFDAVLEWMKANDMETCWGTTAVMLLPGAAIRSCDALVTNFHQPGSTLLLLVAALCGEPFWRTIYGTALADGYRFLSYGDSSLIMRRSLR

SEQ ID NO: 64838 - protein, 361 aa, Kentron sp.
  misc_feature (1)..(361): tr|A0A451C6B8|A0A451C6B8_9GAMM S-adenosylmethionine:tRN A ribosyltransferase-isomerase OS=Candidatus Kentron sp . G OX=2126341 GN=queA PE=3 SV=1
MRVSEFDYHLPAELIAQYPSERRTASRLLVLGGNGGPEAATDTFQETEFSAIARFLSPGDLMVFNDTRVIPARLFGKKSTGGKVEILTERVLDERRILAQVRASKPPRPGMSMEIMPPGITDTANGVAGAGLVVRERVGAFFVLETIGNHEVRELLQDFGSVPLPPYIRRSTERFDAERYQTVYAKREGAVAAPTAGLHFDETLLARLRSKGIEFTFVTLHVGAGTFSPVRVDRVETHRMHAEYLEVSEAACAAINRTRRAGGRIVAVGTTSVRALETAWRDGEARPFQGETDIFIYPGYLFHCVDALITNFHLPGSTLLMLVAAFAGRERVLAAYRYAVRGRFRFYSYGDAMAIFRQGRT

SEQ ID NO: 64839 - protein, 362 aa, Kentron sp.
  misc_feature (1)..(362): tr|A0A450UQA5|A0A450UQA5_9GAMM S-adenosylmethionine:tRN A ribosyltransferase-isomerase OS=Candidatus Kentron sp . H OX=2126337 GN=queA PE=3 SV=1
MRVSDFDYHLPTELIAQFPSEERTGSRLLALDADTGELQETRFSAIAGFLSPGDLLVFNDTRVIPARLFGRKATGGKVEILVERVMDERRLLAQVRASKPPRPGMAIEILRPETSPPATAPARGASGPGEATGATLTVRGRAGDFFILESTGDPAIKPLLRAFGAVPLPPYICRSAGTHDEERYQTVYARREGAVAAPTAGLHFDEALLTALRSKGVELAFVTLHVGAGTFSPVRVDRIEGHKMHAEYLEVSAAACERIHRTRRAGGRIVAVGTTSVRVLETAWRAGELRPFQGETDLFIYPGYRFRCVDALITNFHLPGSTLLMLVAAFAGRERVMAAYRYAVRRRFRFYSYGDAMVIFRR

SEQ ID NO: 64840 - protein, 344 aa, Kerfeldbacteria bacterium
  misc_feature (1)..(344): tr|A0A2H0YQA4|A0A2H0YQA4_9BACT S-adenosylmethionine:tRN A ribosyltransferase-isomerase OS=Candidatus Kerfeldbac teria bacterium CG08_land_8_20_14_0_20_43_14 OX=2014246 GN=queA PE=3 SV=1
MNNLEKTLKLYDYKVPKSLIAQKPRLPRDKARLLIYDRKTKQTWFDRFCNLAKYLPKNAILVFNQTKVLPARLELIKPTGGKIKILYIKKTRGLIWALCEKNLFVGEKYNLNKKIYFKLISKENNHYIFKPSFSINKLESILIKYGLAPLPPYIKHSPLTESQRKAQYQTIFAKIPGSIAAPTASLHFTKKLFKRLKERGIKITFVTLHVNLGTFAPLTEKNLQTHQLHSEFFEIDKKTAQALNQARQKHQPIIAVGTTVIRTLESSAIGNKLTKLIGDTRLFIQPGYKFKFVDRLITNFHVPRSSLTILVSTLTGRKELLKLYQRAIAKKLRFFSFGDGMLIL

SEQ ID NO: 64841 - protein, 350 aa, Kerfeldbacteria bacterium
  misc_feature (1)..(350): tr|A0A2M7H4A1|A0A2M7H4A1_9BACT S-adenosylmethionine:tRN A ribosyltransferase-isomerase OS=Candidatus Kerfeldbac teria bacterium CG15_BIG_FIL_POST_REV_8_21_14_020_45_12 OX=2014247 GN=queA PE=3 SV=1
MDLADFAFNLPEELIAQEPVVGGRDQSRLMVLDRKLGSIQDRSFFELTSLLKAGDVLVFNNSRVLPARLRGEKEPTGGKVELLLLHRQDDESEREVWECMIRSRNTKVDQSITFVGDRDLKGRVIDRASGDTWFVEFNQQGQIFRESLRELGEMPIPPYIKAPTLSEPELRERYQTVYAENEGSAAAPTAGLHFTDLLLDELSERGIELVPITLHVGLGTFSPVRVDDISNHKMHSEYAVITEQSAQRINQAKATGRRIVAVGTTTVRTLESFVKDGQVVADKRWTDIFITPGYDFKIVDAMITNFHLPHSTLLMLVSAFAGTEFIQETYRHAIDQQYRFYSFGDAMLIE

SEQ ID NO: 64842 - protein, 354 aa, Kinetoplastibacterium galatii
  misc_feature (1)..(354): tr|M1L8D6|M1L8D6_9PROT S-adenosylmethionine:tRNA ribosy ltransferase-isomerase OS=Candidatus Kinetoplastibacter ium galatii TCC219 OX=1208921 GN=queA PE=3 SV=1
MSELINISNFNYFLPKNLIAQTPELERSNSRLLHIDSKNNTYDLYFSDLTKILEPGDLLIFNDTKVIKARLKAQKYSGGKIEILVERILDPNTAVAQIKSNSTIKIGTKIIISNIVEVCITSRNSDFFILKFSENINDVLEKYGDIPLPPYIKKNNDNSDETRYQTIFAKNPGAIAAPTAGLHFDQRILKELQLCGIKIAFLTLHVGAGTFQPIRTQDINEHIMHTERYDIPLSTIKSIQSARTNGKRIIAVGTTSARALESAALNPYNYSSIYRNIINPVCNETNLFIKPGYKFKIVDALVTNFHLPKSTLLILVSALAGRDRILEAYEHAVKHNYRFFSYGDAMFIECQNDK

SEQ ID NO: 64843 - protein, 353 aa, Kinetoplastibacterium desouzaii
  misc_feature (1)..(353): tr|M1LTP7|M1LTP7_9PROT S-adenosylmethionine:tRNA ribosy ltransferase-isomerase OS=Candidatus Kinetoplastibacter ium desouzaii TCC079E OX=1208919 GN=queA PE=3 SV=1
MYSQKLETKFFDYIIPNDLIAQNPSDKRSSSRLLHIDKNKNIHDLFFYDIKKLIKPGDLLIFNDTKVIKARLQSFKESGGKSEIMLERILESHQAIVQIKSNKPIKNGSKLFVSKDIYVLVKERQNNFFKVSFSEDIYNVLDKYGTIPLPPYIKKNINPNDEFRYQTIYAKELGAVAAPTAGLHFDQEIIDDLKNQGVKTAFLTLHVGAGTFQPIRTNNFEDHVMHAERYMIPQITIDAIKNTRADGKRIIAVGTTSARALESASLIKDNYDNRNRIIHNATQEETNLYIKPGYKFRIIDALITNFHLPKSTLLLLVSALAERKMIQEAYTHAIKEKYRFFSYGDAMFIEPSK

SEQ ID NO: 64844 - protein, 350 aa, Komeilibacteria bacterium
  misc_feature (1)..(350): tr|A0A1G2BXZ3|A0A1G2BXZ3_9BACT S-adenosylmethionine:tRN A ribosyltransferase-isomerase OS=Candidatus Komeilibac teria bacterium RIFOXYC1_FULL_37_11 OX=1798555 GN=queA PE=3 SV=1
MKIDLFDYKLPKELIAQKQIKPRDHSRLLILDRTKQKIAHRHFYDLLDYLTANDVLVINQTKVFPARLYGYKTSGGKVEVLLTIQERNGVWSALIGARHMKVGDYIYFQKGLEAKIIKDLDGKTKQIKFNLAGQRLNKLIDQIGHTPLPPYIKTKDSQAVKKDYQTVYAKFSGSAAAPTAGLHFTSSLLEEIKKKGVKIFKVTLHVGLGTFAPVLVDDILQHKIHQEWASIDQSTAQSLNKLKKSGKNIIAVGTTSARTLEAFTNSRRQLASGSKWVDIYIYPGYRYKFVDDLITNFHLPKSSLLFMVSALASRELVLKAYRKAIQLRYRFFSFGDAMFIRNSSTKTKSK

SEQ ID NO: 64845 - protein, 342 aa, Komeilibacteria bacterium
  misc_feature (1)..(342): tr|A0A2M8DR93|A0A2M8DR93_9BACT S-adenosylmethionine:tRN A ribosyltransferase-isomerase OS=Candidatus Komeilibac teria bacterium CG_4_9_14_0_8_um_filter_36_9 OX=1974473 GN=queA PE=3 SV=1
MRLEEFDYNLPAELIAQTPPEQRDQARFLIYDHGNIKHQKFYDLIDILQSGDVLVLNDSKVFPARLHGARVDTASPVEVFLLRDQGQGIWECLIGHARTKPGLQIEFLQDLQASLVEPQEERWLVRFNQTGDQFMETINQIGSTPIPPYIKTEDSQEIRDEYQTVYANKVGSVAAPTAGFHFTDELLEKLKDKGIQIEYVTLHVGLGTFAPVKVDNIKEHKMHSEYYQVDQDVWQRIKKAKEEKRRVVSVGTTATRVLESVAREEKLQDWTDIFIYPGFEFKMIDSLITNFHLPKSTLLMLVSALLEAKGNPDGIKELMRIYQEAINEQYRFYSFGDAMIII

SEQ ID NO: 64846 - protein, 346 aa, Kryptonium thompsoni
  misc_feature (1)..(346): tr|A0A0P1LYT6|A0A0P1LYT6_9BACT S-adenosylmethionine:tRN A ribosyltransferase-isomerase OS=Candidatus Kryptonium thompsoni OX=1633631 GN=queA PE=3 SV=1
MKLSEFNYQLPKHLIAKYPVEPRDSARLLVVDRKTKTFEDKVFTDIIDYLEEGDSLVVNKTKVFPAKLIGRKEKTGAKIEILLLRELNPEEHLWDVLVEPARKVRIGNKIYFGDNNEVYCEVIDNTTSRGRTLKFHYEGDFFKFVEKYGLVPLPPYIKRQPEEGDKEWYQTVYAEVIGSVAAPTAGLHFTTRLLKRIEKKGVKIVPIVLHIGIGTFRKIEVEDLSKHRMDSEYFEISPESARMINETIDKRKSVVAVGTSVVRALESSVTADGHVKPYKGWTDKFIYPPYDFKIVNKLITNFHMPESTPLILTAAFAGLDLLMQAYKHAIKSGYRFLSYGDAMLIV

SEQ ID NO: 64847 - protein, 352 aa, Kuenenbacteria bacterium
  misc_feature (1)..(352): tr|A0A1F6GR15|A0A1F6GR15_9BACT S-adenosylmethionine:tRN A ribosyltransferase-isomerase OS=Candidatus Kuenenbact eria bacterium RIFCSPHIGHO2_12_FULL_42_14 OX=1798563 GN =queA PE=3 SV=1
MKLTLFDYNLPKNLIAQKQVKPRDHSRLLVVGRKTKKLKHDYFYNLDKYLDENDVLVFNDSRVFPARIKFDGGKGEIFLLREMKNGNWEVMGKKLGKNFKFQILNFKINSKLQAQILKRMPDGNYLIKFNLRGRKFREWLEKYGETPLPPYIKTKDSKIIRNNYQTIYARADGSVAAPTAGFHFTKELMSKLRKKGVAMEFVTLHVGQGTFLPVKTDNIEEHKMHAEFAIIDKETAKRLNDYKKAGRRIIAVGTTSCRVLEAMTSEAGESSKLSEVSKVCLKAREKEVNIFIYPGYNFKFVDGIVTNFHLPKSTLLMLVAALIGREFILEVYRQAIKKKYRFYSFGDGMLIK

SEQ ID NO: 64848 - protein, 352 aa, Kuenenbacteria bacterium
  misc_feature (1)..(352): tr|A0A1F6FZZ5|A0A1F6FZZ5_9BACT S-adenosylmethionine:tRN A ribosyltransferase-isomerase OS=Candidatus Kuenenbact eria bacterium RIFCSPLOWO2_12_FULL_42_13 OX=1798565 GN= queA PE=3 SV=1
MKLTLFDYNLPKNLIAQKQVKPRDHSRLLVVGRKTKKLKHDYFYNLDKYLDENDVLVFNDSRVFPARIKFDGGKGEIFLLREMKNGNWEVMGKKLGKNFKFQILNFKINSKLQAQILKRMPDGNYLIKFNLRGRKFREWLEKYGETPLPPYIKTKDSKIIRNNYQTIYARADGSVAAPTAGFHFTKELMSKLRKKGVAMEFVTLHVGQGTFLPVKTDNIEEHKMHAEFAIIDKETAKRLNDYKKAGRRIIAVGTTSCRVLEAMTSEAGESSKLSEVSKVCLKAREKEVNIFIYPGYNFKFVDGLVTNFHLPKSTLLMLVAALIGREFILEVYRQAIKKKYRFYSFGDGMLIK

SEQ ID NO: 64849 - protein, 348 aa, Lambdaproteobacteria bacterium
  misc_feature (1)..(348): tr|A0A1F6GLS1|A0A1F6GLS1_9PROT S-adenosylmethionine:tRN A ribosyltransferase-isomerase OS=Candidatus Lambdaprot eobacteria bacterium RIFOXYD2_FULL_56_26 OX=1817773 GN= queA PE=3 SV=1
MPLLSEFDYPLPEGAIATAPAEPRDHSRLMRLPPGSGEPLDFYFYDLPNLLQPGSLLVVNDAQVIPARIIGRRASGGAIEALLVRELSPGRWVVKIKKAAKLKPGELLEFGFGRILAQFEGRFEEGDGILSFVSPQTLFDDLEAQGYAPLPPYLLKARGQEEFAPEEDKKSYQTIFAKTKGAVAAPTAGLHMTQPVLEGLQKREIEVVSLNLQVGLGTFEPVRVEEVSEHQMHLERVTIPEATALAFNQAKAQGRKVVALGTTTLRAIESSLQGGELVQGARETGIFIYPPYRFQGVDQLITNFHQPKSTLLMLVCAFAGQERVLKAYKQALDRGYRFFSYGDAMLLG

SEQ ID NO: 64850 - protein, 345 aa, Lambdaproteobacteria bacterium
  misc_feature (1)..(345): tr|A0A1F6GAB9|A0A1F6GAB9_9PROT S-adenosylmethionine:tRN A ribosyltransferase-isomerase OS=Candidatus Lambdaprot eobacteria bacterium RIFOXYD2_FULL_50_16 OX=1817772 GN= queA PE=3 SV=1
MELTDFDFVLPNELIATKPLAERDQSKLMTVPKTGDFLDYQFCDLPHLLEPGSLLVINDAKVLPARLLGQRQTGAQLEALLLEEILPGRWVALVKKAGRLKPGEDIAFAGGAIGARYLGRDAKDRPILEFFNPETLLRDLETYGLAPLPPYIHQARGVEGDREEDLAQYQTQFAKHYGAVAAPTAGLHMTERLLVSLKKQEIELVPVTLMVGPGTFEPVRVTQIKEHQMHAEGFNVPEDSAKKINQAKAQKRPIVALGTTSLRVLEAAAKQGQVEAGGGRTNIFIYPGYQFKMVDRMVTNFHLPKSTLLMLVAALAGRERILAAYQEALKRQYRFYSFGDAMLIG

SEQ ID NO: 64851 - protein, 345 aa, Latescibacteria bacterium
  misc_feature (1)..(345): tr|A0A3D4GZ48|A0A3D4GZ48_9BACT S-adenosylmethionine:tRN A ribosyltransferase-isomerase OS=Candidatus Latescibac teria bacterium OX=2053570 GN=queA PE=3 SV=1
MNLSDYDYDLPDDRIAQYPAEQRDASRLMVLDREDHEIRHQTFRELPGLLSPGDCLVVNETQVSPARLVGNRLGSGGSVELLLIREEGELWEVLARPGRRLKVGAEVEFPGEDLLAKVEGVTPSGRRMVSFHGEAHLLEAVERIGRIPLPPYIKREGEPDDRTRYQTVYARTPGAVAAPTAGLHFTEDLLEAIRSKGVMVAPILLHVGPGTFKPVAVDDPREHEMDSEYYEISEDTADKVNMCRRNGGRVVAVGTTVTRTLESAASHRDGTWVLNAEKGWTSLFIYPPHTFKLTQGLITNFHLPRSTLLMLVSAFAGHEFIMRSYETAKEKDYRFYSYGDAMAIM

SEQ ID NO: 64852 - protein, 344 aa, Latescibacteria bacterium
  misc_feature (1)..(344): tr|A0A3N5X5K5|A0A3N5X5K5_9BACT S-adenosylmethionine:tRN A ribosyltransferase-isomerase OS=Candidatus Latescibac teria bacterium OX=2053570 GN=queA PE=3 SV=1
MRVSDFDFDLPPGLIAQHPLADRAAARMLVIDRAREELRHGAVRHLAEELVPGDLVVVNDSRVFPARLRGTAGEGRPIEALFVRPVEEGERGDWVLLLRPARRVRAGTTLRFEGAGLAGTALRPAEEGEWVARFGGESDVEAALERAGEVPLPPYIRRPATEEDRTRYQTVFARATGSVAAPTAGLHFTDELIGSLESRGIAVRSITLHVGPGTFRPLRGENVENHRMEPEFYRVPEETAIAVRAAREAGGRVVAVGTTVVRALESAAAAGSVGPGAGWTDLFIRPPYRPRAVDALLTNFHLPQSTLFLLVAGFAGRDLAMRAYRTAIDAGYRFYSYGDCTLIV

SEQ ID NO: 64853 - protein, 361 aa, Liberibacter americanus
  misc_feature (1)..(361): tr|U6B4G9|U6B4G9_9RHIZ S-adenosylmethionine:tRNA ribosy ltransferase-isomerase OS=Candidatus Liberibacter ameri canus str. Sao Paulo OX=1261131 GN=queA PE=3 SV=1
MMVKEFDFYLPPSKIALRPVSPRDKARLLVANSDISLRISDHLVRDLPMFLKPNDAIVFNDTKVITAQLRGIRLRHKNDTEVRISCNLHMRVSDNSWRAYIRPAKMVRKGDKIYFFSKDGQSKLDAIIDEKWDQGEILLVFSVSGLELDRNISVVGSIPLPPYIARKRSIDERDYIDYQTTYAKIMGSVAAPTAGLHFTSDLLSEIISIGIETHFITLHVGAATFMPVKVENTDDHLMHSEIGFLDTKTAQALNAVKSRGGRIIAVGTTSLRLLETATTDDGVIIPWSGSTNIFITPGYRFRAVDILISNFHLPKSTLLMLVSAFCGIEETKDIYQHAIANDYRFYSYGDASLLFKNKSMA

SEQ ID NO: 64854 - protein, 363 aa, Liberibacter europaeus
  misc_feature (1)..(363): tr|A0A2T4VY61|A0A2T4VY61_9RHIZ S-adenosylmethionine:tRN A ribosyltransferase-isomerase OS=Candidatus Liberibact er europaeus OX=744859 GN=queA PE=3 SV=1
MMVKEFDFHLPSSRVALRPASPRDSARLMVVRSDLSSPLNISDHFVRDLLMFLNPNDVIVFNDTKVITAQLRGILLRHKNDTETWISCTLHMRVSPNSWFAYVRSIKKVKEGDKIYFFSQDGQFKLEAIITKKCNTGEILLVFSTSGVELDMAIAMVGTIPLPPYISRKRSIDERDYVDYQTTYAKVQGSVAAPTAGLHFTRDLLSKIVASGIKTHFITLHVGAATFMPVRVKDTDDHVMHSELGFIDVKTAQSLNKVKSQGGRIIAVGTTSLRLLETATMEDGTIIPWSGATNIFITPGYRFRAVDILISNFHLPKSTLLMLVSAFCGIEETKKIYQHAIDNSYRFYSYGDASFLFKKDVVS

SEQ ID NO: 64855 - protein, 350 aa, Lindowbacteria bacterium
  misc_feature (1)..(350): tr|A0A1F6LVA6|A0A1F6LVA6_9BACT S-adenosylmethionine:tRN A ribosyltransferase-isomerase OS=Candidatus Lindowbact eria bacterium RIFCSPLOWO2_12_FULL_62_27 OX=1817870 GN= queA PE=3 SV=1
MTEELYHYDLPPGRIAQTPIERRDMARLLVLRRSDGVILHSSIDRLPEWLNPGDCLVMNDTKVARCRVSGVTPVSRAAEFMAVTTLCRTPDVWEMDAMVCPGRRFRPGSQVRIGGAPDAAALVVDVLATTEIGRRLRVSAAEGAGPLDEVIETMAEVPLPPYIHNSSIPSERYQTCFAREAGSVAAPTAGLHFTPELFARLSRAGIGTAFLTLHVGPGTFRPVTRRELDAGRLHPEVYRLPSEAAASVTCARAAGRRVVAVGTTVCRTLEHIAAKFGEVRADAGATDLFIREGFSFRAVDALLTNFHLPRTSLLMLVCALAGRSLVREAYEAAIGGDYRFYSFGDAMLVL

SEQ ID NO: 64856 - protein, 362 aa, Lloydbacteria bacterium
  misc_feature (1)..(362): tr|A0A1G2DRW7|A0A1G2DRW7_9BACT S-adenosylmethionine:tRN A ribosyltransferase-isomerase OS=Candidatus Lloydbacte ria bacterium RIFOXYC12_FULL_46_25 OX=1798670 GN=queA P E=3 SV=1
MSILDDYDYHLPKELIANSPASPRDSSRLFVYDTKTGTVTFDIFRNIGTHLPKPSLLVFNNTKVVPARLWLKKELLPTRGGIRAGGGKIEVLLMMNEYRTGDELIKGVVDRKILPGAKLYFQSGDYLEIMKQEEQFFFFRPSVTIPELFELLTKEGVTPIPPYIKNANIPEQVLREKYQSVLAKHAASVAAPTASLHFTEELLFALEKEHIKKTEITLHVGAGTFAPISEENFTNKKLFTEYLAIGNESAAMINHAKEEGTPIIPVGTTAMRTLESSAIKNGSTFTIEECTKPTNIFIYPPYEFKIADGLITNFHVPRSSLMLLVDALLKHKRAPHDILALYDIAIKERFRFYSFGDSMLIL

SEQ ID NO: 64857 - protein, 354 aa, Lloydbacteria bacterium
  misc_feature (1)..(354): tr|A0A1G2CYB3|A0A1G2CYB3_9BACT S-adenosylmethionine:tRN A ribosyltransferase-isomerase OS=Candidatus Lloydbacte ria bacterium RIFCSPHIGHO2_01_FULL_49_22 OX=1798658 GN= queA PE=3 SV=1
MISLDDYNYHLPEGLIANEPASPRDSARLFVYDTKTDKVHFDVFRNIDQYLPKPSLLVFNDTKVVPARLWLSKETGGKIEVLLMMNEFRPGDISIKGVVDRKILPGAKLFFKSGAHLEVERQEEQFFFFNPSVSKGSLWSLLEKEGVTPIPPYIKGNTMSEHTLREKYQSILAKYPASIAAPTASLHFTDRLLEKMKREHITRTEVTLHVGAGTFAPIDEQNFKSKKLFAEYLDITKESAKKINSAKAAGIPIIPVGTTAMRTLESAAIQHSKVEPWSVEQCSKPTNIFIYPPYEFKIADGLITNFHVPRSSLMLLVDALLKHKRAKRDILALYDIAIREKFRFYSFGDGMLII

SEQ ID NO: 64858 - protein, 348 aa, Macondimonas diazotrophica
  misc_feature (1)..(348): tr|A0A4Z0FAY6|A0A4Z0FAY6_9GAMM S-adenosylmethionine:tRN A ribosyltransferase-isomerase OS=Candidatus Macondimon as diazotrophica OX=2305248 GN=queA PE=3 SV=1
MQAADFDFYLPPEQVAQSPLPDRAAARLLCLEGTSGHWQDRQIRDIPALLLPGDLLVLNDTRVIPARLFGTKSTGGAVELLIERVIDARRAFAHVRASKFPRAGTRIELTGGGALVIGERHDSLVEVAVDGDESLPTLLERVGHTPLPPYIQRPDTAMDRERYQTVFSTHPGAVAAPTAGLHFDQALLDQVVSAGVRLGRLTLHVGAGTFQPVRAEQLAEHQLHAEQVEVSAELCAQIAETRARGGRVVAVGTTVVRALETAAESGELLPYRGETRLFIHPGRNFRFKVVDTLMTNFHLPRSTLLMLVCAFAGREAVLAAYAHAVMSGYRFYSYGDAMWITPAAGVRA

SEQ ID NO: 64859 - protein, 380 aa, Magasanikbacteria bacterium
  misc_feature (1)..(380): tr|A0A2M7VC58|A0A2M7VC58_9BACT S-adenosylmethionine:tRN A ribosyltransferase-isomerase OS=Candidatus Magasanikb acteria bacterium CG_4_10_14_0_2_um_filter_33_14 OX=197 4636 GN=queA PE=3 SV=1
MNTSDFDYNLPKERIAQKPLEPRDSSKLFLVDKKNKKVDHKHFFDIVDYFEKGDLLVWNNSKVFKARLFGRLEASDNDVNKDGIPDRALLNQKEVEIFLVRPMENPGVWKILAKPGKRVKPGMNVRFAPDFFCTVIVKEPEGTILVQFEEDDKEVMAKANKYGHIPVPPYVKDEPDQIEVYQTVYSKEEGSVAAPTAGFHFTDDIIQKLKDKGVEFAEVTLHVGLGTFLPVKSERVEDHTMHSEWVEISEETAEKINKAKSEGRRVVAVGTTTVRTLEGIASLERNKLQDTNKSQITISKFEGDINIFIKPGFEFQIVDAMITNFHLPKSTLLMLVSAFAGDRLAGQSPSEGREFMLECYKEAVSLKYRFYSFGDAMFIY

SEQ ID NO: 64860 - protein, 365 aa, Magasanikbacteria bacterium
  misc_feature (1)..(365): tr|A0A0G0ARD5|A0A0G0ARD5_9BACT S-adenosylmethionine:tRN A ribosyltransferase-isomerase OS=Candidatus Magasanikb acteria bacterium GW2011_GWC2_34_16 OX=1619045 GN=queA PE=3 SV=1
MLTSDFNYNLPKELIAQTPAEKRDESRLLVINRETKEINHRQFFNIIEYLRPGDLLVWNNSKVFKARLKGVLVLDEEVFDLKGKDLTDRILNEPSVEIFLVRPMENFGVWKVLAKPGKKLRLGMKVVFAEDFFAEVITKEEDGTVLVQFQDDDITVRTKANKYGEVPTPPYIKEQGARNKEQLVERYQTVYAKEEGSVAAPTAGFHFTEELIEKLKNKGIEFAEVTLHVGLGTFLPVKVEKVEEHKMHAEWVELTDKNAQLINAAKAEGRRVVVVGTTAVRTLEGIFAKRESLEAFSGDINIFITPGFKFKVVDALITNFHLPESTLIMLVSAFVGDREFTLDCYKKAVEANYRFYSFGDAMFVF

SEQ ID NO: 64861 - protein, 342 aa, Magnetobacterium bavaricum
  misc_feature (1)..(342): tr|A0A0F3GNM9|A0A0F3GNM9_9BACT S-adenosylmethionine:tRN A ribosyltransferase-isomerase OS=Candidatus Magnetobac terium bavaricum OX=29290 GN=queA PE=3 SV=1
MKTDDYTYELPRELIAQEPCRRRQDSRLLVLRRDGGMRHRRFEELIDYLNSGDLLVLNDTKVLPVRLAATDESGRVRDIVIVREVEGDGYQILSRGRYTGRMQISDGFHADVFSGSQAVFYDNGVVLSGSALSDKLWQSGQMPLPPYIERPSSGTDMERYQTVYARAGGSIAAPTAGLHFTDAILQAIRDKGVAIKTITLHVGIGTFRPITSKDLLAHKMDEEHFEIDTHLEEQIRRVKGRGNRVIVVGTTTTRAVEAYMAGWYRMTGRGNGIIKATTDIFITPGFDFKAADALLTNLHMPRSTTLVLACAFAGRQHILDAYREAVARGYRFLSYGDAMLII

SEQ ID NO: 64862 - protein, 306 aa, Magnetobacterium bavaricum
  misc_feature (1)..(306): tr|A0A0F3GN14|A0A0F3GN14_9BACT S-adenosylmethionine:tRN A ribosyltransferase-isomerase OS=Candidatus Magnetobac terium bavaricum OX=29290 GN=MBAV_004460 PE=3 SV=1
MRHGCFEELIDYLNSGDLLVLNDTKVLPVRLTATDESGRVRDIVIVREVEGNGYKILSRGRYSGRIQISDGFHADISCGVRAVFYDNGMVLSGSALGNKLWQSGQMPLPPYIERSSGETDMERYQTVYARAGGSIAAPTAGLHFTEAILQAIRDKGVAIKAITLHVGIGTFRPITSEDLLAHNMDEEHFEIDTHLEEQIRQVKGRGNRVIVVGTTTTRAVEAYMAGWYRMTGGGNGIIKATTDIFITPGFDFKAADALLTNLHMPRSTTLVLACAFAGRQYILDAYREAVARGYRFLSYGDAMLII

SEQ ID NO: 64863 - protein, 278 aa, Magnetoglobus multicellularis
  misc_feature (1)..(278): tr|A0A1V1P0W8|A0A1V1P0W8_9DELT S-adenosylmethionine:tRN A ribosyltransferase-isomerase (Fragment) OS=Candidatus Magnetoglobus multicellularis str. Araruama OX=890399 GN=OMM_10515 PE=3 SV=1
MSFHIKDYDYNLPDERIAQSPADQRDRSRLLVYDRKSRTIKHTYFTNLTNCLNSGDVLVINNTRVIPARLLGKKQTGGKIEVFILDYQKAVIQDGFTQCECMIRSSKPPKTGTRIYFSNKEEAVVLTMPKNGQCIIQFNCDDLLSFLNQVGQTPLPPYIQRVADKKDQDRYQTIYAKNNGAIAAPTAGLHFTPQLIETIKQMGIQMVPITLHVGYGTFMPVRVQDIRKHFMHKEYIEISQDSATKIYQAKQNKQRIVAVGTTSVRALEYVYQRQETFG

SEQ ID NO: 64864 - protein, 359 aa, Magnetomorum sp.
  misc_feature (1)..(359): tr|A0A0M9E9V7|A0A0M9E9V7_9DELT S-adenosylmethionine:tRN A ribosyltransferase-isomerase OS=Candidatus Magnetomor um sp. HK-1 OX=1509431 GN=queA PE=3 SV=1
MVNGLSSVSYHIDNYDYQLPKHLIAQDASMKRDQSRLLVYNRNTKSIEHTVFNKLSDYLQANDLLIVNNTRVIPARLLGKKETGGKIEVFVLDYIRAIQEAEKTGKIQCSCMIKSSKAPRIGSTLYFSSDDQAVVITDPINGRCEIQFLCKSDFLTFLEANGQTPLPPYIQRQAQISDKERYQTIYAKKNGAVAAPTAGLHFTEKLFEKLQKKNINIASITLHVGYGTFMPVRVSDIRKHTMHSEYIEISTHTADLIQKAKKDGQRIIAVGTTSVRTLEYIFKEKGKIEAFSGYCDLFIYPGYSFQVVDSIITNFHLPKSTLMMMISAFAQREQILKVYQNAIDNSYRFFSYGDAMMIV

SEQ ID NO: 64865 - protein, 332 aa, Magnetoovum chiemensis
  misc_feature (1)..(332): tr|A0A0F2J5L8|A0A0F2J5L8_9BACT S-adenosylmethionine:tRN A ribosyltransferase-isomerase OS=Candidatus Magnetoovu m chiemensis OX=1609970 GN=queA PE=3 SV=1
MFSFDIPDSLIAQKPRSERDKSRLLVLYRDGSIEHRQFDKIADYLKAGDALVLNDTKVIPVRLKCAKQNGDTIEILLTKKLQKNNYEIMSKGSFSGTAALENGINAQIKQGSEVTFDYTGDIEDTLEEIGMTPLPPYIKREADKEDAHKYQTVYARAKGSIAAPTAGLHFTEALINKIKNKGVNILTITLHIGIGTFKPIRVYNIEEHKMDQEFFEIDSAALEKIQKTKNLGSRVFLVGTSTTRALEAYIKGKFMKWENSNGKIRGFADLFIRPGYDFKAADCIITNFHQPNSTPLLLACAKAGTEKLINAYKEAIAVKYRFYSYGDAMLIL

SEQ ID NO: 64866 - protein, 349 aa, Magnetoovum chiemensis
  misc_feature (1)..(349): tr|A0A0F2IW05|A0A0F2IW05_9BACT S-adenosylmethionine:tRN A ribosyltransferase-isomerase OS=Candidatus Magnetoovu m chiemensis OX=1609970 GN=queA PE=3 SV=1
MKTSDFNFNLPDHLLAEHPSENRDEAKLMVLDRKTQTIEHKLFKDVIDYFNEDDLFIFNNTKVFPARLYGNKEKTGAKIEVFLLRELDREARVWDVLVDPARKIRIGNKLFFTEDESLVAEVIDNTTSRGRTLRFLFDGSYEEFRAKLTELGETPLPKYIKRDVEPEDAERYQTIYAEIEGAVAAPTAGLHFSKHLMKRMEIKGINFANVTLHVGLGTFNPIEVEDLSKHKMECEQAIITQDNADIINKAIEENRRVCAVGTTTMRAIETSVSTNRRLSAYEGWTNKFIYPPYDFGIANAMITNFHTPKSTLIMMIAAFAGRDFVMQAYEEAIKNDYKFYSYGDAMLIL

SEQ ID NO: 64867 - protein, 352 aa, Margulisbacteria bacterium
  misc_feature (1)..(352): tr|A0A1F6QNH7|A0A1F6QNH7_9BACT S-adenosylmethionine:tRN A ribosyltransferase-isomerase OS=Candidatus Margulisba cteria bacterium GWE2_39_32 OX=1817872 GN=queA PE=3 SV= 1
MHDENFQLSSYEYQLEERYIAQSPAQKRDNSRLMVLDKQHNTINHGLFHDLVHYLNPGDVLVRNNTSVFPARIFGRKETGAKIEFLLLSEKGQDIWEVICRPAKRLKLGDIVFFSNSLAAEIIGFCEEGKRLVKFRYQGDFWEIIDAIGNVPLPPYINLQSTRLSPCELKERYQTVFASKRGSSAAPTAGLHFTEKLLGEIAKKGITVVDVTLHVGLGTFLPVKAEVITDHIMHEEYYEITSSAIQAINQAKASGHRVIAVGTTSVRVLETIADEMITGEITPLSGKTSIFIYPGYQFKVVDGIVTNFHLPGSSLLLLVSAFYNRKSILNAYTIAKAENYRFFSFGDAMFIS

SEQ ID NO: 64868 - protein, 352 aa, Margulisbacteria bacterium; identical to SEQ ID NO: 64867
  misc_feature (1)..(352): tr|A0A2W4ICC0|A0A2W4ICC0_9BACT S-adenosylmethionine:tRN A ribosyltransferase-isomerase OS=Candidatus Margulisba cteria bacterium OX=2053573 GN=queA PE=3 SV=1

SEQ ID NO: 64869 - protein, 338 aa, Marinamargulisbacteria bacterium
  misc_feature (1)..(338): tr|A0A328R4N0|A0A328R4N0_9BACT S-adenosylmethionine:tRN A ribosyltransferase-isomerase OS=Candidatus Marinamarg ulisbacteria bacterium SCGC AG-343-D04 OX=2184343 GN=qu eA PE=3 SV=1
MYTEEFNFDLPETLIAHSPAKNREDSKLMVLDRKSQSIEHCRFSDISHFLPKNSALVLNNTKVFNARLRAKKESGASIELFLLEEVSPSVWKCLAKPAKRLQSGTLLHIADNFSAKVIEKGEFIILEFSFSGSFYDLLELHGEPPLPPYIDASDPKQFADRYQTVFAKHVGSVAAPTAGLHFTPEILSSLSSQGMDINYITLHVGYGTFNPVKADLVKDHRMHSEQFNISMETSDHLSSHKKRGGLIGAVGTTSARTLESAWDGNGFISGQHSSDIFIYPGYRFKTLDFMVTNLHLPKSSLLMLVSAFAGTSFIKKAYAEAIEHKYRFYSFGDAMLIL

SEQ ID NO: 64870 - protein, 347 aa, Marinamargulisbacteria bacterium
  misc_feature (1)..(347): tr|A0A328RTT0|A0A328RTT0_9BACT S-adenosylmethionine:tRN A ribosyltransferase-isomerase OS=Candidatus Marinamarg ulisbacteria bacterium SCGC AAA071-K20 OX=2184347 GN=qu eA PE=3 SV=1
MNLSDYNYSLPEDLIAKTPLSKRDQSQLMVLDQGGDSIKHHVFSDILTVLGPNDVLILNNTKVIKARLYAHKKTGGKIELLLERPLENNQYTALVKPAKRVRVGDRLILGPDAELEVTSKDGGMVTIQFHSKESVWDVLERYGFMPIPPYIKTGKETPESFTHNYQTVFADKPGAVAAPTAGLHFTPLLLDQLKQKGVQIETITLHVGYGTFMPIKTESIKDHKMHSERYHVSKDTAERLNKVKSSKRFVAVGTTAVRALESATKNDVIQAGSFETDIFITPGYTFTCVDALITNFHLPQSSLLLLVSAFTSRDFILNAYELAIKHRYRFFSFGDAMFILPKTRNCK

SEQ ID NO: 64871 - protein, 352 aa, Marinimicrobia bacterium
  misc_feature (1)..(352): tr|A0A3M7KF97|A0A3M7KF97_9BACT S-adenosylmethionine:tRN A ribosyltransferase-isomerase OS=Candidatus Marinimicr obia bacterium PRS2 OX=2483458 GN=queA PE=3 SV=1
MFFGSVEKPPRLSEFELEVPEKLIAKDPLKKRDECKLMVLNRAEQTIEHRQFKDVVDYFNKGDVLVMNNTRVYPARLYAIKDKSDARVEVFLLRELADDLWEAMVKPARKVRIGNKLWFSKKISCDVIDNTVSGGRVLRFESDAKSLYPFIEKVGHSPLPPYIDRESIPSDKIYYQTVYASERGSVAAPTAGIHFTKAILNKMEKKGVKLAYVTLHIGLGTFRPIMVEDLTRHQMDSEYFHVPPETAEIINKAKSHKKLVGVVGTSTARTLETVVVSGFQITARRGWTDKFIYPPYEFKMCDKFITNLHQPKSTLMMLTAAFAKKDFILKAYKEAIKNKYRFYSYGDSMIII

SEQ ID NO: 64872 - protein, 343 aa, Marinimicrobia bacterium
  misc_feature (1)..(343): tr|A0A4Y8IA85|A0A4Y8IA85_9BACT S-adenosylmethionine:tRN A ribosyltransferase-isomerase OS=Candidatus Marinimicr obia bacterium MT.SAG.3 OX=2552982 GN=queA PE=3 SV=1
MRLVEFQYNLPERFIAQKPLKRRDASKLMVLHKDTGKIEHRKFTNIVDYLDKDDTLVINETKVFPARVQAIKEKTNAKVELFLLRELESNMWEVLVKPARKVRIGNKLKITRDVSCDVIDNTISGGRVVRFSCNGDDVYKIIDKVGAAPLPPYIKRKATATDKKRYQTVYARHTGAVAAPTAGLHFTKPLLEKIKKKGVNVVPIVLNVGLGTFKPVQVEDLSRHRMDSEYFEIPISAADIVNKTMEDGKKIMGVGTTSARAMESVFITENRINPGMGWTDKFIFPPYDFKVINKLITNFHMPGSTLLMLVSAFATRDMIFHAYEVAKRHKYRFYSYGDAMLIL

SEQ ID NO: 64873 - protein, 346 aa, Melainabacteria bacterium
  misc_feature (1)..(346): tr|A0A1F6R9B1|A0A1F6R9B1_9BACT S-adenosylmethionine:tRN A ribosyltransferase-isomerase OS=Candidatus Melainabac teria bacterium RIFOXYA2_FULL_32_9 OX=1801611 GN=queA P E=3 SV=1
MHISEFDYNLPKELIAQFPSEKRDYSNLMVLDRSSKTIEHKKFFSIADYLSENDVLVMNNTRVIPARLIGKKSTGANIEIFLLEKKTENIWEVLIKPAKRVKSGTIVEFSEELSAEIIDKSDNDKWVVELKYNGDLNEILNKVGNIPLPPYIMRTLSDSEIRKLDYQRYQTVYAQTPGSVAAPTAGLHFTEDLLGQIRQKGVQVCYVTLNVGLGTFKPVRAEDIRDHKMDKETYEISQETANIINNAKKEGKNIVAVGTTTVRTLETVYKLHSQITQSSGSSDIFIYPGYKFNVVNKLITNFHLPKSTLLMLVSAFTDKGYIYEAYKEAIKKKYRFYSYGDCMFIL

SEQ ID NO: 64874 - protein, 346 aa, Melainabacteria bacterium
  misc_feature (1)..(346): tr|A0A327J380|A0A327J380_9BACT S-adenosylmethionine:tRN A ribosyltransferase-isomerase OS=Candidatus Melainabac teria bacterium OX=2052166 GN=queA PE=3 SV=1
MLVSEFDYNLPEELIAQTPSEKRENSRMMVLDKHAQTIEHKHFYDIVDYLDNNCILVLNNTKVIPARLYAHKETGALIEIFLLKEHDNKQWEALIKPAKRVKEGMTLKVADCLSVKMLERLEEGKWLVELIYDGILYEVLDKVGNIPLPPYIERKMTDDERQSLDYERYQTVYAQNEGSVAAPTAGLHFTKEILEKLKAKGVEIAYVTLTVGLGTFRPVKCDEVTDHKMDSEEFEISQETADAINNAKAKGKKLVAVGTTSVRTLETAYQQFGEIKACKSASRLFIYPPYEFKVVDNLITNFHLPKSTLLMLVSALEGKEFIFRAYEEAIKNKYRFYSYGDCMLLK

SEQ ID NO: 64875 - protein, 187 aa, Methylomirabilis lanthanidiphila
  misc_feature (1)..(187): tr|A0A564ZMJ6|A0A564ZMJ6_9BACT S-adenosylmethionine:tRN A ribosyltransferase-isomerase (Fragment) OS=Candidatus Methylomirabilis lanthanidiphila OX=2211376 GN=MELA_02 959 PE=3 SV=1
MSIPLRTADFDYTLLPDLIAQAPVPERDRSRLLVLDRRTGALRHRIFRDLPNYLVPGDLLVVNEAKVLPARLVGQSERQHRVEVLLLGEVEADSSARHADASHWEALLKPSRQVRAGDRLSLAEGTIIAEVIEKRGEGRHLLKLVHDGRLIDLLWRFGQMPVPPYIKRQGLGSRVQGKKEKNPETHP

SEQ ID NO: 64876 - protein, 379 aa, Methylomirabilis oxyfera
  misc_feature (1)..(379): tr|D5MIU7|D5MIU7_9BACT S-adenosylmethionine:tRNA ribosy ltransferase-isomerase OS=Candidatus Methylomirabilis o xyfera OX=671143 GN=queA PE=3 SV=1
MSISLRTVDFDYTLPPELIAQAPVPERDRSRLLVLDRNTGALHDRIFRDLPEYLVPGDLLVINEAKVIPARLFGRSERRHQIEVLLLYEVEVDPDMGPAGTDRWEALIKPSRQVRIGDRLALADDTITAEVIEKRGEGRHLLKLVYDGRLADLLWRFGRMPVPPYIKRQGIGYRVEGLEQGFPSPLDPGPYLLDPNTLDRERYQTVYAKHEGAVAAPTAGLHFTPDLIETLTRQGIAVTPITLFVGPGTFRPVRMKEVAQHRMEPERYIIPEQTALAVKAARREGRRVIAVGTTTVRTLEHATVMGEIRAGVGLTDLFIYPGYRFTSIDAIITNFHLPCSTLFMLVSAFAGRETMLAAYREAIARCYRFYSYGDAMLIV

SEQ ID NO: 64877 - protein, 341 aa, Methylopumilus rimovensis
  misc_feature (1)..(341): tr|A0A5B8DJ58|A0A5B8DJ58_9PROT S-adenosylmethionine:tRN A ribosyltransferase-isomerase OS=Candidatus Methylopum ilus rimovensis OX=2588535 GN=queA PE=3 SV=1
MLLEEFDFDLPQHLIAQAPLQKRDASRLLVLNKNTKSFSDKNFTEFVDLLNINDLLIFNDTRVIKARLFGKKITGGKVEIMIERILDEHHALAHLKTSKKIFDATIFEINKDVSVKVLRKEKDLFYIEFISDESIYDILEKYGHIPLPSYIERNADKSDENRYQTIYAKESGAVAAPTAGLHFTDKIFKNLNDKKIRYTFLTLHVGAGTFQPVRDNDIDHHQMHSESFNVPDKTIQMIHEAKSKNGRIIAIGTTVLRALESKFSEETIQSGFKETSIFIKPGYKFKIVDALLTNFHLPKSTLFILVSAFSGTDTMKKLYQHAIKNEYRFYSYGDASFIERS

SEQ ID NO: 64878 - protein, 341 aa, Methylopumilus universalis
  misc_feature (1)..(341): tr|A0A5B8CX53|A0A5B8CX53_9PROT S-adenosylmethionine:tRN A ribosyltransferase-isomerase OS=Candidatus Methylopum ilus universalis OX=2588536 GN=queA PE=3 SV=1
MLIEDFNFELPQHLIAQTPLQKRDSSRLLVLNKNTKSFSDKKFTDFVDLLNPNDLLIFNDTRVIKARLFGKKITGGKVEIMIERILDDHHALAHLKTSKKIVDDNIFEINKDVSVKVIKKENDLFYIEFNSNLSSYDILEKYGHIPLPPYIERDADISDEKRYQTIYAKESGAVAAPTAGLHFTDEIFKALDDKKIKYTFLTLHVGAGTFQPVRDNDVNNHQMHSESFNVPDKTIHMINDAKSKNGRIIAIGTTVLRALESLFSEETIQSGFKETSIFIKPGYTFKIVDALLTNFHLPKSTLFILVSAFSGSDTMKRLYQHAIKNEYRFFSYGDATFIERS

SEQ ID NO: 64879 - protein, 347 aa, Methyloumidiphilus alinensis
  misc_feature (1)..(347): tr|A0A2W4R051|A0A2W4R051_9GAMM S-adenosylmethionine:tRN A ribosyltransferase-isomerase OS=Candidatus Methyloumi diphilus alinensis OX=2202197 GN=queA PE=3 SV=1
MKKSDFYYDLPQRLIAQAPLPERSSSRLLKLEGDTGALQDMMFADLPSLLRPGDLLVFNDTRVIPARLYGHKSSGGKIEILIERIVGNRHALAHVRASKSPTAGTELLIDGGHRLFVTGREDDLFRLESPKLDIAEILNTVGHIPLPPYIEHTDGAEDRERYQTVYARHSGAVAAPTAGLHFDEAMLARLEAMGVDKVYLTLHVGSGTFQPLRVENLDEHRMHAEFCEVGELAVEKINETKAKGGRVVAVGTTVVRTLESASLSGELRPFRGDTQLFIRPGFQFQCVDAMLTNFHLPESTLLTLVCSFAGFEQTMAAYRHAVKQEYRFFSYGDAMFVTPKLRCTTKT

SEQ ID NO: 64880 - protein, 353 aa, Microgenomates bacterium
  misc_feature (1)..(353): tr|A0A3A4ZNM3|A0A3A4ZNM3_9BACT S-adenosylmethionine:tRN A ribosyltransferase-isomerase OS=Candidatus Microgenom ates bacterium OX=2093373 GN=queA PE=3 SV=1
MEISKFDYTLPKNLIANAPASPRDSSRLMTINRKTKSIYNKHFYDLIDMFSDSDCLVLNDTKVYPARLFGKRKTGGQVEVLLVNNLHKNVWEILGRNVPSVNQEFNIDKICAKVLEKTENKTVIEFANITNGFDKFLEKHGHTPIPPYIHTKFSEAQLRKKYQTKYARETGSIAAPTAGLHFTNRITKGLLKRHVQIEYVTLHVGLGTFLPVKSNTLEEHSMHSESFSVTRDTVERLNIAKKSGKRIIAVGTTTIRVLESLANNNSELRTNNLSSDTDIFIYPPYKFEFVDALITNFHLPKSTLLALVAAFVSHPNTNDKFVNFNNSLIGKAYKKAIKNNYRFYSFGDAMIIE

SEQ ID NO: 64881 - protein, 357 aa, Microgenomates bacterium
  misc_feature (1)..(357): tr|A0A3A0BB00|A0A3A0BB00_9BACT S-adenosylmethionine:tRN A ribosyltransferase-isomerase OS=Candidatus Microgenom ates bacterium OX=2093373 GN=queA PE=3 SV=1
MQLSDFHYELPGELIAQSPAIPRDHSRLMLINRQTAAVSHHFFYDLPKLLPPNYHLIANNTKVFPARLKGFKETGGKVEVLLLKKQSDSQFETIVSPGLKVGQKIVFSESLSAEVIETDDRIRLVKFSQSDPLLTEEISRLGTMPTPPYIKKMLENNNDYQTIYAKYGFSAAAPTAGLHFTSALLAEVSTKYGWSELTLDVGLGTFLPVKVDDVKTHHMHKEAYRLDLPTADRLKTIDHKTQKLCVVGTTTLRALESNAALTDSRIDGFTDIRIVPGSFETDIFIYPPYHFRHADALITNFHLPESTLLMLVSAFCSAPQTTTPFTTFKDSLLGHAYNEAVKEKYRFFSFGDAMLII

SEQ ID NO: 64882 - protein, 362 aa, Micropelagos thuwalensis
  misc_feature (1)..(362): tr|U2XX45|U2XX45_9PROT S-adenosylmethionine:tRNA ribosy ltransferase-isomerase OS=Candidatus Micropelagos thuwa lensis OX=1397666 GN=ilvD2 PE=3 SV=1
MQVEAFDFDLPDELIALRPASPRDAAKLLHVAPNGHLTDRIIRNLPSYFSKGDALVVNDTRVIPAKLSGTRLSDAAIDAEQNLGAKIELNLIERQGASAWKCLLKPAKKVKQGDVIRFEDTAGITYQATVLEKEQGEALIDFNLSLNKMDELLGLIGSMPLPPYIAGKRQPDDKDNQDYQTLFAEHDGAVAAPTAGLHFTPDLQAKLEVIGVEICRVTLHVGAGTFLPVKVENTANHKMHAEWGEVKPEIAERLNRSKQDGHKICCVGTTSLRLLESAARDDGRIMPFAKATDIFIKPGYRFRAADMLLTNFHLPKSTLFMLVSAFSGLNTMKKAYNHAVQNNYRFYSYGDACLLELADKVN

SEQ ID NO: 64883 - protein, 364 aa, Microthrix parvicella
  misc_feature (1)..(364): tr|R4Z701|R4Z701_9ACTN S-adenosylmethionine:tRNA ribosy ltransferase-isomerase OS=Candidatus Microthrix parvice lla RN1 OX=1229780 GN=queA PE=3 SV=1
MQLGDFDYPLPDDRIAQVPVDPRDAARLMIDAGAGIPPEDSTVSRLADVVGPGDVVVINTTRVRPARLSMRRSTGGATEVLLLTPIDGSTRWEALVRPSRKVAPGELLMPASASRSPDEFSILVGEDRGAGRREVTLLSDDGPLGGGAELDRALERFGVMPLPPYLDDRERDPSRYQTVFADRPGSAAAPTAGLHLTTEVLSAVRRAGAEVVEVELEVGLGTFRPMTADRVEDHVMHAERYRITPEAWDTIRAAAESTGHGSVLAVGTTTLRALESAARSGELSGTTELFLHRGAEFLVVDRLMTNFHLPRSSLLVLIDAFIGPRWRGLYEAAMERGYRFLSFGDAQLLDRRLPDRGPTVGGDR

SEQ ID NO: 64884 - protein, 364 aa, Microthrix parvicella
  misc_feature (1)..(364): tr|A0A359A6G5|A0A359A6G5_9ACTN S-adenosylmethionine:tRN A ribosyltransferase-isomerase OS=Candidatus Microthrix parvicella OX=41950 GN=queA PE=3 SV=1
MQLGDFDYPLPDDRIAQVPVEPRDAARLMIDAGAGIPPEDSTVSRLADVVGPGDVVVINTTRVRPARLSMRRSTGGATEVLLLTPIDGSTRWEALVRPSRKVAPGELLMPASASRSPDEFSILVGEDRGAGRREVTLLSDDGPLGGGAELDRALERFGVMPLPPYLDDRERDPSRYQTVFADRPGSAAAPTAGLHLTTEVLSAVRRAGAEVVEVELEVGLGTFRPMTADRVEDHVMHAERYRITPEAWDTIRAAAESTGHGSVLAVGTTTLRALESAARSGELSGTTELFLHRGAEFLVVDRLMTNFHLPRSSLLVLIDAFIGPRWRGLYEAAMERGYRFLSFGDAQLLDRRLPDRGPTVGGDR

SEQ ID NO: 64885 - protein, 364 aa, Moanabacter tarae
  misc_feature (1)..(364): tr|A0A2Z4AIK5|A0A2Z4AIK5_9BACT S-adenosylmethionine:tRN A ribosyltransferase-isomerase OS=Candidatus Moanabacte r tarae OX=2200854 GN=queA PE=3 SV=1
MNTRLFDYEIPESSIAQFPTLNRGDAKLLVVDRKTQEITTNRFHDFPYLVPKGSALFRNNARVLQGRIRGNRPSGGKVECLLLRPGRDRDNWWCLLRPGRKLGPGRTFEKRGSFHAQVLEKKPSGEFLVKFNLKDGGDVPSMAEKEGEVPLPHYIRRDQQYKKAVEDRERYQTVYSDPEKTVAAAAPTAGLHFTEFILEELYRKKIQSFDLTLHIGLGTFHPINTDTIEDYSIHREAYEIPPDTLQALKKQRIGPRIAIGTTTVRALEDLSFKTQHKSIGPTSKLGSDSISAEASLLIYPPFEFQLCQALLTNFHLPRSTLMCLVAAFLTPGSTDGISWLKEIYHEALAMNYRFYSYGDAMLIL

SEQ ID NO: 64886 - protein, 343 aa, Moduliflexus flocculans
  misc_feature (1)..(343): tr|A0A081BLT8|A0A081BLT8_9BACT S-adenosylmethionine:tRN A ribosyltransferase-isomerase OS=Candidatus Moduliflex us flocculans OX=1499966 GN=queA PE=3 SV=1
MLVSDFDYLLPPELIAQHPAETREQSRLMVIRRTTGEITHTTFANIVGLLEPSDVLVLNNTKVIPARLLGQKQHTGGRVEIFLLRQLRETLWEALIGGKTAPGMTIVFSNGTLRCRIVHKNQDGSGTVEFEPQPELKEKIYAAGSVPLPPYIKRDDGVLSADHSRYQTVYAAQEGAVAAPTAGLHFSEPLLAQIRQKGIDVIPVTLHVGIGTFRPVKVERVEDHQIHAEWYDISTESAEKIAKALAQRRRIITVGTTSTRLLEAVYAKYGRIQAGSGWADIFIYPGFRFQVTQALITNFHLPKSSLLMLVSAFGGMDLIRKAYQEAIAQRYRFYSYGDAMCIF

SEQ ID NO: 64887 - protein, 350 aa, Moranbacteria bacterium
  misc_feature (1)..(350): tr|A0A2J0LW05|A0A2J0LW05_9BACT S-adenosylmethionine:tRN A ribosyltransferase-isomerase OS=Candidatus Moranbacte ria bacterium CG_4_8_14_3_um_filter_41_13 OX=1974659 GN =COZ86_02500 PE=3 SV=1
MEMMDMEKYDYTLPKGLIRKEGIEPRDSARLFIYDTKTDTVTFDIFRHIAKYLSPQSLMILNDTRVLPARLWLTKETGGKIEVFVLANEIEDEEYIPVLVDRKTNVGQKLTFPSGDYFEVVGQKENMFFVRVVSHAGESLQTLLHKYGQTPLPHYLEGAKTKEDVLRKRYQTVFAKEGASVAAPTASLHFTDTVFASLAKKNIGIDFVTLDVGLGTFASLTSDNFRTKKLHTEFITLAPGTREHINIAKQAGHPIIAVGTTALRTIESLAKNHQIVFQKDRTDIFIYPPYEFQIADILITNFHLPKTSLMFLVDAFLQDKKAKKNIVELYNRAIENHFSFYSFGDSMLIL

SEQ ID NO: 64888 - protein, 349 aa, Moranbacteria bacterium
  misc_feature (1)..(349): tr|A0A5C7KNG2|A0A5C7KNG2_9BACT S-adenosylmethionine:tRN A ribosyltransferase-isomerase OS=Candidatus Moranbacte ria bacterium OX=2045217 GN=queA PE=3 SV=1
MKIVDLEQYNYNLPPECIRKTPLEPRDSARLFVYDTATDTITFDTFRNLAQYLPEQSLMVLNDTRVWPARLWLKKPTGGKIEVLVLVNEWDGKGLIPALVDRKVIVGDTLFFPDGSTLVAREQQEQKFFFQLESTRPLQTLLQEFGTTPIPHYLEGEENGDEFKLRERYQTVFASAGASVAAPTASLHFTDQVFEHLQRKHIETTRITLNVGLGTFAPLREENFQTGKLHGEWVTIPQKTAQALERAKTCKQAIIAVGTTTTRTLETLAKRDVLKALTTEAHLFIYPPYCFQMVDILITNFHLPKTSLMLLVDAFLQSKNAKKGVMELYHEAIRARFSFYSFGDSMLIL

SEQ ID NO: 64889 - protein, 212 aa, Muproteobacteria bacterium
  misc_feature (1)..(212): tr|A0A1F6UMF8|A0A1F6UMF8_9PROT S-adenosylmethionine:tRN A ribosyltransferase-isomerase (Fragment) OS=Candidatus Muproteobacteria bacterium RBG_19FT_COMBO_61_10 OX=181 7761 GN=A2V58_05500 PE=3 SV=1
EILERIGHTPLPPYITRADEPGDRERYQTIFARVPGAVAAPTAGLHFDAAMLARLDAMGVERAFVTLHVGAGTFQPVRVEDISGHRLHAELLTVGEAAAARVNAAKGAGRRVIAVGTTVVRALETAATDGRVGPYAGATDIFIYPGYRFRIVDALLTNFHLPESSLLMLVCAFGGTEHVLDAYRHAVEQKFRFYSYGDAMFVLPQFQAASSK

SEQ ID NO: 64890 - protein, 360 aa, Muproteobacteria bacterium
  misc_feature (1)..(360): tr|A0A1F6U4T2|A0A1F6U4T2_9PROT S-adenosylmethionine:tRN A ribosyltransferase-isomerase OS=Candidatus Muproteoba cteria bacterium RIFCSPLOWO2_01_FULL_60_18 OX=1817768 G N=queA PE=3 SV=1
MRKSDFNYSLPPELVAQYPASPRTASRLLHLDGANSVIQDLRFTDLPALLRAGDLLVFNDTRVIPARLFGRKDSGGHIEVLIERLRDAHRVLAQVRASKPPKPGQKLKLEGGVTAVVQSRDGEFYELAFDADMPVLDILERAGHVPLPPYIGRQDEIADRERYQTVYARRRGAVAAPTAGLHFDAAMLGRLQDMGVDSAFVTLHVGAGTFQPVRVDDIREHRMHAEYLRVTPEVCGKINAAKKEGRRVVAVGTTVVRALETAAKSRDHLKTSLSPEARGVIEMGSGRVKPFEGETDIFIYPGYRFQIVDALLTNFHLPESTLLMLVCAFGGTENVLNAYRHAVKSKYRFYSYGDAMFVGR

SEQ ID NO: 64891 - protein, 163 aa, Nealsonbacteria bacterium
  misc_feature (1)..(163): tr|A0A2G9YXS7|A0A2G9YXS7_9BACT S-adenosylmethionine:tRN A ribosyltransferase-isomerase (Fragment) OS=Candidatus Nealsonbacteria bacterium CG23_combo_of_CG06-09_8_20_1 4_all_38_19 OX=1974721 GN=COX36_00390 PE=3 SV=1
MKSTNQYNYYLPPELIAKQPATPRDSSRLFIYDTKTDEIVFDKFNNLDKYLPKKSFLVMNDTKVLPARVEMKKATGGKVRVLFLVNEIMSSSQYQVLSIEQNTIRIFVDRKVDVGDKLFFDSQYFVTVIGQGEHIFTVQFDFSIGELFRILEKKGTMPIPLYI

SEQ ID NO: 64892 - protein, 344 aa, Nitrosoglobus terrae
  misc_feature (1)..(344): tr|A0A1Q2SMM8|A0A1Q2SMM8_9GAMM S-adenosylmethionine:tRN A ribosyltransferase-isomerase OS=Candidatus Nitrosoglo bus terrae OX=1630141 GN=queA PE=3 SV=1
MQLSDFYYDLPKNLIADYPPKQRGGSRLLFLDPDSGLLIDQQFSNLSTLLSEKDLLILNDTKVIPARLLGVKTSGGKVEVLIERILNQHLALAHVRPGKTAQAGHRLVLEQSVEVIIGKCILDLVELHFLDPRPLPQILDEVGRIPLPPYIRREMSTLDSERYQTIYASRPGAIAAPTAGLHFNEFLLKQLQAKGVQIGYITLHVGTGTFQPVRVEHIHQHRMHSEYIEISEQVCAQIQATKQQGGRVIAVGTTTVRALESASVSGLLSPYQGETEIFIFPGYRFHTIDALITNFHLPKSTLLMLVCAFAGREKILAAYQHAVKKGYRFFSYGDAMFITSAKTA

SEQ ID NO: 64893 - protein, 339 aa, Nitrospira nitrificans
  misc_feature (1)..(339): tr|A0A0S4LMT2|A0A0S4LMT2_9BACT S-adenosylmethionine:tRN A ribosyltransferase-isomerase OS=Candidatus Nitrospira nitrificans OX=1742973 GN=queA PE=3 SV=1
MHLSEFDFPFDPSLIALQPVSPRDRARLLVVDRATERLTHRHIADLPLILKPGDLLVVNDTKVMAARVPGIKKPIGTPVEILFVRELSEGRWEIMVKGSFRIGQVIEFDQQSRATIVKRDATGTEVIVESPAPVTRLLQERGVMPLPPYIKRTPIHEDRRWYQTVFAKHEGAIAAPTAGLHFTEDLFQRLNVSGIKIAAVTLHVGPGTFKPVTTERIEDHQMGAEAFTISEGTARAIQKTKQAGGRVVAVGTTVVRTLETVAKEKREIVPMSGESRLFITPGFQFKVVDAVMTNFHLPRTTLLMLVSAFAGIEPMRKAYEEVVKERYRFYSYGDAMLIL

SEQ ID NO: 64894 - protein, 339 aa, Nitrospira nitrosa
  misc_feature (1)..(339): tr|A0A0S4L456|A0A0S4L456_9BACT S-adenosylmethionine:tRN A ribosyltransferase-isomerase OS=Candidatus Nitrospira nitrosa OX=1742972 GN=queA PE=3 SV=1
MQLSEFDFPFDPSLVASQPVIPRDQARLLFLDRTTQQRRHHHVADLPTLLNPGDLLVVNDTKVLAARVPGIKRPTGTPVEVLFVRDLGGNRWDIMVKGSFRVGQVIEFDQQSRATIVKRDATGTEVLVESLMPVTRLLEERGMMPLPPYIKRAPTQEDGNWYQTLFAKHGGAIAAPTAGLHFTEELFRRLREAGINMATVTLHVGPGTFKPVTTEKIEDHQMGAEIFHVGEETAQAITETKRTGGRVVAIGTTVARTLETVMKENGKMMLLSGESRLFITPGFEFKIVDALMTNFHLPKTTLLMLVSAFAGIEPVRNAYEEAVNERYRFYSYGDVMLIL

SEQ ID NO: 64895 - protein, 341 aa, Nitrotoga sp.
  misc_feature (1)..(341): tr|A0A3E1D9W7|A0A3E1D9W7_9PROT S-adenosylmethionine:tRN A ribosyltransferase-isomerase OS=Candidatus Nitrotoga sp. SPKER OX=2184312 GN=queA PE=3 SV=1
MLTDQFNFVLPEHLIAQHPPERRDASRLLCIRGEAREDLVFADLPSLVREHDLLVLNDARVLKARLFGVKESGGKIEVLIERILDEHHALAQVRASHAPKPGSRLLLAGHLPVTVLGREREFFNLRFDSTENVSELLEQYGQLPLPPYITHAANAEDEERYQTVYASQPGSVAAPTAGLHFDDAMLATLRAQGTQLAYLTLHVGAGTYQPVRVDDVRDHVMHSERYAIPQATVNAILQARARGGRIIAVGTTSLRALESAAQLGQLRAGEGETSIFITPGYQFNVVDVLLTNFHLPKSTLLMLVCAFGGMEAMLAAYRHAVERQYRFFSYGDAMLIERQHV

SEQ ID NO: 64896 - protein, 341 aa, Nitrotoga sp.
  misc_feature (1)..(341): tr|A0A3E1D8H3|A0A3E1D8H3_9PROT S-adenosylmethionine:tRN A ribosyltransferase-isomerase OS=Candidatus Nitrotoga sp. MKT OX=2184311 GN=queA PE=3 SV=1
MFTDEFNFALPEHLIAQYPPERRNASRLLCVRGEIREDSMFVQLPSLVREHDLLVFNDARVLKARLFGVKESGGKIEVLIERILDEHHALAQIRASHAPKPGSRLLLAGHLPVTVLGREREFFCLRFDSIENISLLLEQYGQLPLPPYITHVANAEDEERYQTVYACQPGSVAAPTAGLHFDDVMLAALRAQGTQLAYLTLHVGAGTFQPVRVDNVRDHVMHSERYVIPQATVDAILQARARGGRIIAVGTTSLRALESAAQQDRLRAGEGETSIFITPGYRFKVVDALLTNFHLPKSTLLMLVCAFGGMDAMLAAYSHAVERQYRFFSYGDAMLIEQKHV

SEQ ID NO: 64897 - protein, 382 aa, Nomurabacteria bacterium
  misc_feature (1)..(382): tr|A0A0G0TN25|A0A0G0TN25_9BACT S-adenosylmethionine:tRN A ribosyltransferase-isomerase OS=Candidatus Nomurabact eria bacterium GW2011_GWA2_40_9 OX=1618734 GN=queA PE=3 SV=1
MVARFVYVLVNLTAGEYQSAFYLSIFMEYRMMYFIMPTPTSFFDYELPNGLIAQHSVEPRDQSCLMMVDRKTGQRQHKVFYEILNEFHGGDVLVMNNTKVFRARLQTVVHGRGIELFLLRPREDGVWDALVKPGKHVNVGDIVELGEMQGEVVSKTDVVRIRFNQSQTQIVHYANIHGEIPIPPYVEEIPVELDQYQTVYAKETGSVAAPTAGFHFTKELLEKIQQKGIQIQYVTLHVGLGTFRPMKSEIIEEHQMHSEFVTITSQTANAINKAKEEGRRIIAVGTTTVRTLEGVAAYTAENKNLDSLLPPEGFSGDINIFITPGFHFRVIDALITNFHLPKSTLLVLVSAFAGREQILAAYEEAVRQKYRFFSFGDAMFIS

SEQ ID NO: 64898 - protein, 353 aa, Nomurabacteria bacterium
  misc_feature (1)..(353): tr|A0A0G0BDX0|A0A0G0BDX0_9BACT S-adenosylmethionine:tRN A ribosyltransferase-isomerase OS=Candidatus Nomurabact eria bacterium GW2011_GWF1_31_48 OX=1618767 GN=queA PE= 3 SV=1
MNIEDFNFDLPESLVGQKAIEPRDSCRLLVLDKDKGGVSHHVFSDLKNILDENCVLVLNDTKVFPARLFGKKETGGQAELLLLKQTGQSTFSAIGKGLPKKGSLLTFGRELTGTVEEKHEDGEVEINFNYSGPELLEKIDQLGSTPLPPYVHSKEKEPLLREQYQTVYARERGSSAAPTAGLHFTDKLLADLMNRGVMIEKVTLHVGLGTFRPVTTEQIRDKVLHSESFFLSQETAQRLNLAKKAGKKIIAVGTTACRLLETLSNEQGMISPGAGETNIFIQPGYKFKFVDGLITNFHLPKTSLLMLVSALVSAPNSPTAFKNFSDSPIGKAYREAIKKEYKFFSFGDAMLIL

SEQ ID NO: 64899 - protein, 330 aa, Omnitrophica bacterium
  misc_feature (1)..(330): tr|A0A3A4JPT2|A0A3A4JPT2_9BACT S-adenosylmethionine:tRN A ribosyltransferase-isomerase OS=Candidatus Omnitrophi ca bacterium OX=2035772 GN=queA PE=3 SV=1
MRLTDFDYHLPKELIAQYPLKDRKACRLLVLDRNKGTVTHGMFKDFTRFFSPGDALVLNDTKVLSCRLIGKRATGGKVELLLLRERQEGVFEALIKPGRLKAGETILLNGGGLSCEIISRNQVRFIVDSVDQIYRAGVMPLPPYIKRIPEELDAAYYQTVYAKNEGAIAAPTAGLHFTEDLLEEVTACGIKKTFLTLHINAATFKPVKAADVITHQMEREYYHINKEAIRLIEGARKSHSRIIAVGTTSCRAMEAYAASGEEQGYTDLFIYPGYTFRYVDTLLTNFHLPCTTLFILVCAFAGSSLVRKAYKEAVARKYRFYSYGDAMLIL

SEQ ID NO: 64900 - protein, 349 aa, Omnitrophica bacterium
  misc_feature (1)..(349): tr|A0A3B9ZEV4|A0A3B9ZEV4_9BACT S-adenosylmethionine:tRN A ribosyltransferase-isomerase OS=Candidatus Omnitrophi ca bacterium OX=2035772 GN=queA PE=3 SV=1
MKLSDFDYSLPKELIAQYPLKKRDSCRLMVIDRKSNAVSHRIFSDFAEYVGPHDIVVVNNTKVVPVRFLGVKKDTLGKVDVLLSERLSPRSFRALIKPNLKTGQEVLFNAPAGLGVNGILKARVIDEKVIEFNKNISSKIVEAIGVMPLPPYIKRQPQKLDILSYQTVYAKKPGAIASPTAGLHFTKTILERIRKKKVRIDSVTLHVGLGTFKPVKCENIQEHVMEKEAFHISKKTLQAIAQAKKNGKRIFAVGTTTTRVLETAAELAAKSPSSIVHRPSSQGYTNLFIYPGYQFKMVDALVTNFHLPKTTLFILVCAFAGRDLIMKAYNEAIKEKYRFYSYGDAMLIV

SEQ ID NO: 64901 - protein, 336 aa, Omnitrophus magneticus
  misc_feature (1)..(336): tr|A0A0F0CJJ0|A0A0F0CJJ0_9BACT S-adenosylmethionine:tRN A ribosyltransferase-isomerase OS=Candidatus Omnitrophu s magneticus OX=1609969 GN=queA PE=3 SV=1
MKLHDFYYEFPKELIAQAPLKTRDNARLLVLDRKKNEISEIIFKDLAQYFSAGDCLVLNDTKVLPVRLYGHRKTGGRVEIFLLDMPGKKCKALVNPSARIKDGEKITLESGINAVILERTNIGRFLEFDAPIEEVLKTGHVPLPPYIERVDNAFDKESYQTVYAARDGATAAPTAGLHFSGELLEKIKNKGVHIVYVTLHTSYGTFAPVKSENIEEHKMHFEYYEMKEETARIINNVKKTGGKIFGVGTTSCRVLETSAGQDGFVKQGSGETNLFIYPGYEFKTVDSLITNFHLPSSTLLMLVSALAGRDFIMTAYKRAIDLRFRFFSYGDAMLIL

SEQ ID NO: 64902 - protein, 351 aa, Ornithobacterium hominis
  misc_feature (1)..(351): tr|A0A383TYI2|A0A383TYI2_9FLAO S-adenosylmethionine:tRN A ribosyltransferase-isomerase OS=Candidatus Ornithobac terium hominis OX=2497989 GN=queA PE=3 SV=1
MKMKTSDFDFKLPEKLLAERPATYRDEARLMVLDRKTQSIEHKEFKDLINYFDEEDLLIMNNTKVFPARLFGNKEKTGAKIEVFLLRELDPKAKLWDVLVDPARKIRIGNKLFFGDDGELVAEVVDNTTSRGRTLRFLFDGDYKEYRAKLAELGTTPLPKYIKREADEEDEERYQTIYAKEEGAVAAPTAGLHFSKHLLKRLEIKGVNFAEVTLHVGLGTFSPVQVEDLTKHKMESERAHISAETVEKVNRALEEKSKICAIGTTSMRAIESAVSANGKLNEFSGWTNKYIHPPYDFSIANAMVTNFHTPRSTLLMMISAFGGHDLVMKAYKEAVEKEYKFFSYGDAMLIL

SEQ ID NO: 64903 - protein, 340 aa, Ozemobacter sibiricus
  misc_feature (1)..(340): tr|A0A367ZQH3|A0A367ZQH3_9BACT S-adenosylmethionine:tRN A ribosyltransferase-isomerase OS=Candidatus Ozemobacte r sibiricus OX=2268124 GN=queA PE=3 SV=1
MKTALFDFDLPPDLIAQVPAPERPASRLLVLDRATGTVSHRRFADLAELIPPGDLLVVNRSRVIPARLFTVPEPGQAAAEIVFVEDLGAGRCLAMVRPGRRFRSGRVHALPGGGRVRVEAVRDDGLRVLQIEGETDSVAVFRRYGEMPLPPYITSRESDPDRYQTVFAREEGSVAAPTAGLHFDAALLDRLRNRGVHIGEILLHVGLGTFKPIETDEIEDHHMHAERYCVEPGLADTFARVRAAGGKIWACGTTSVRTLESAIQSDGTLATGWRETSCFLRPGHVFRAVDHLITNFHLPRSTLLVLVAAFAGLDQILAAYREAVAARYRFFSFGDAMVIL

SEQ ID NO: 64904 - protein, 365 aa, Pacebacteria bacterium
  misc_feature (1)..(365): tr|A0A2H0SYY6|A0A2H0SYY6_9BACT S-adenosylmethionine:tRN A ribosyltransferase-isomerase OS=Candidatus Pacebacter ia bacterium CG10_big_fil_rev_8_21_14_0_10_40_26 OX=197 4767 GN=queA PE=3 SV=1
MKLTLNDFDYYLPPERIAKYPAEPRDSSRLLVVDRTTGEIKDDYFYNLGVYLNPGDVIVRNNTKVIPARIVGKKDTGGKLELLLVKKISHTATVETWECLSKPGLKVDQKGIFSDVLQATCTGICEDAYTRTVEFNMAGPEFIAELTRIGITPLPPYIAEAHTDENVFREQYQTIYAKFDGSAAAPTAGLHFTKKLDENLKKHGIHIVEVTLHVGLGTFLPVKTENITEHHMHSEWFELPAETAAAVQKAKDNGNRVIAVGTTSNRVLESCSSLNSEGEFTITPQIADTDIYIYPPYKFVCVDTLITNFHLPKSTLLMLVSAFVSQPNSDELFTKFCESLIGRAYTYAIKNEYRFYSFGDGMIIL

SEQ ID NO: 64905 - protein, 357 aa, Pacebacteria bacterium
  misc_feature (1)..(357): tr|A0A3D4GG72|A0A3D4GG72_9BACT S-adenosylmethionine:tRN A ribosyltransferase-isomerase OS=Candidatus Pacebacter ia bacterium OX=2053589 GN=queA PE=3 SV=1
MLTLSDFDYVLPQDRIAQTPAHPRDHSRLMVVNRKHETIDTTNHFYDLPSLLTKNDVLVVNNSKTLPMRTYGTRQSGGKTEVLFVKRLELHSEKEVWEVMTSPGLKPGQEVHFQNTQMHIVCTEDLGYTRKVDVVDYEGSVIEVLHKIGELPTPHYIRKHLDHPEEYQTIYAKPEGSSATPTAGLHFTQSIFDELSKKGIPIIELTLHVGLGTFLPVKTEDIQKHHMHSEWFTLSKKNAEQLNQYKAEGCRIVAVGTTTTRILETCAIVRHDKKDVLTPQTGETSLYLYPPYTFKCVDALITNFHLPKSTLLMLVSAFSEQGKIFHTFKESLIGKAYQQAIKENFRFFSFGDAMVIE

SEQ ID NO: 64906 - protein, 355 aa, Pantoea carbekii
  misc_feature (1)..(355): tr|U3U3M1|U3U3M1_9GAMM S-adenosylmethionine:tRNA ribosy ltransferase-isomerase OS=Candidatus Pantoea carbekii O X=1235990 GN=queA PE=3 SV=1
MHVCHFNFQLPKYLIAQYPKTKRSSCRLLSLDGNSGTLMHGIFTDILDKINPGDLLIFNNTRVIPARIYGRKISGGKIEILVERILDDRRILAHVRTSTKTLKPGAILLMGEKNNVIGTILSYYNALFEIIFESDFTVLDILNSIGHIPLPPYINRPDETIDYELYQTVYSTRLGAVAAPTAGLHFDQPLIDALKKKGVEIAFVTLHIGAGTFKKLKITNITEHIMHTEYVEVSQETVNAVIACKTRGNKVIAIGTTSVRSLESAATNCKDTLIAPFIGHTQIFIYPSYQYKVIDTLITNFHLPQSTLIMLVSAFAGYQNTMRAYRTAIIERYRFFSYGDAMYITHNPQAPDEHF

SEQ ID NO: 64907 - protein, 348 aa, Paraburkholderia kirkii
  misc_feature (1)..(348): tr|G4M2N3|G4M2N3_9BURK S-adenosylmethionine:tRNA ribosy ltransferase-isomerase OS=Candidatus Paraburkholderia k irkii UZHbot1 OX=1055526 GN=queA PE=3 SV=1
MFTLSDFDFNLPPELIAQSALTERSASRLLEVDNRRSPATLTDRRFSELPDLLEPGDLLVFNDTKVLKARFFGQKASGGRVEVLVERLTGATTALAQIRASQSPVQGRTIRLADAFDVTVGERVEPFYTLHFPADCLTLIEQYGRLPLPPYIEHDADAYDETRYQTVYAANPGAVAAPTAGLHFDDTLFAELEQRGIERATLTLHVGAGTFQPVRVENIAEHKMHSEWYDLPQSLVDRVMAVKARGNRVIAVGTTSMRALEAAARDAAQAGRTLAGSQAETDIFITPGYEFRIVDRLVTNFHLPKSTLLMLVSAFAGMESIRDAYRHAIKQRYRFFSYGDAMLLTRQK

SEQ ID NO: 64908 - protein, 348 aa, Paraburkholderia kirkii
  misc_feature (1)..(348): tr|A0A0L0LYK5|A0A0L0LYK5_9BURK S-adenosylmethionine:tRN A ribosyltransferase-isomerase OS=Candidatus Paraburkho lderia kirkii OX=198822 GN=queA PE=3 SV=1
MFTLSDFDFNLPPELIAQSALAERSASRLLEVDNRTSPATLVDRRFSELPNLVEPGDLLVFNDTKVLKARFFGQKASGGRVEVLVERLTGATTALAQIRASKSPAPGSAIRLAEAFDVTVGERVEPFYTLHFPAECLTLIEQFGRLPLPPYIEHDADAYDETHYQTVYAANPGAVAAPTAGLHFDDALFAALEARGVERATLTLHVGAGTFQPVRVENIAEHRMHSEWYDLPQSLVDRIAVVKAHGNRVIAVGTTSMRALEAAARDAAQAGRPLAATQAETDIFITPGYDFRVVDRLVTNFHLPKSTLLMLVSAFAGMDAIREAYRHAIEEKYRFFSYGDAMLLTRQR

SEQ ID NO: 64909 - protein, 358 aa, Parcubacteria bacterium
  misc_feature (1)..(358): tr|A0A1W9QLQ8|A0A1W9QLQ8_9BACT S-adenosylmethionine:tRN A ribosyltransferase-isomerase OS=Candidatus Parcubacte ria bacterium 4484_255 OX=1970769 GN=queA PE=3 SV=1
MLSLKKFDYKLPINLIAQKPIRPRDHSRLMILNREKKSITHDYFYNINKYIEPNSILVANNSKVIPARLNGEKPTKGKVEILLLKQLENDCWEIILKGKGKTNLKISFNKKLFGVLKKQLSDQTWLMKFSALQEDLLKALKKAGETPTPPYIKRISNLREYQTIYAQHPGSSAAPTAGFHFTKKIIRKLKKAGIDMHFITLHVGLGTFQPVRTENIENHQMHSEWGEIKKPIVQLLNKAKKEQKKIIAVGTTSCRVLEAFSSSNGKLYSGGKWIDLFIYPHDQCGVGASSHDQCGVGASSGYKFKFIDGLITNFHLPKSTLLMLVSAFAGREFIFQAYKEAIKKKYRFYSFGDAMLII

SEQ ID NO: 64910 - protein, 348 aa, Parcubacteria bacterium
  misc_feature (1)..(348): tr|A0A2N5ZTM0|A0A2N5ZTM0_9BACT S-adenosylmethionine:tRN A ribosyltransferase-isomerase OS=Candidatus Parcubacte ria bacterium OX=2053309 GN=queA PE=3 SV=1
MKVSDFNFDLPENLIATSPISPRDHSRMLVLDKENGEISHKRFYDILDYFEKGDLLVLNNSKVFPARLLGKVKESERKIEVFLLHPQTKYRWQCLIGGKKIKEGLTIKITDYFEVLVREENGDGTWLVELPMEGKGLMGFLEMNAKIPLPPYIEKQRKLDNKKYNTEKDKKDYQTVFAEADKQGSVAAPTAGLHFTPELLEKIKNKGVNIEYITLHVGMGTFAPVKVDDIESHKMHAEWVEISSKTVKKIRETQNNKNKIIAVGTTSARSLEALGNSDALSAWVDIFIYPGYQFKNVDSIVTNFHLPKSTLIMLVSAMAGKEEVKRAYKEAIEKKYRFYSYGDAMFIK

SEQ ID NO: 64911 - protein, 354 aa, Peregrinibacteria bacterium
  misc_feature (1)..(354): tr|A0A0F9ZBG9|A0A0F9ZBG9_9BACT S-adenosylmethionine:tRN A ribosyltransferase-isomerase OS=Candidatus Peregrinib acteria bacterium GW2011_GWC2_33_13 OX=1619061 GN=queA PE=3 SV=1
MQLSDFDYFLPKELIASKPAYPRDQSRLMFVDRKKGIIKHYNFHDLPDLLNKNSVLAFNNSKVINARLFGVIEGMRNVEILLTKCLDKDKNIWEILAKGAKYLKNGSVIYFNNHKPILDKLYAIVLNQNSDGSRVIQFTDIKYQKLWMLLPFYGVLPLPPYIKNFHGSEKKYQTIYAKNQGSIAAPTAGLHFTKRIFQNLKSKGISMEYLTLHVGLGTFMEVRTENIKDHIMHEEMFEINKKTAKALNKAKSDAKKIVSIGTTTLRSLESSTFIENGKTVLSPTLSPKSTNIFIYPGYKFKFVDQLVTNFHLPKSTLLMLVSAFAGKDLIFEAYSKAIENKYRFFSFGDAMVII

SEQ ID NO: 64912 - protein, 379 aa, Peregrinibacteria bacterium
  misc_feature (1)..(379): tr|A0A2H0Y2I8|A0A2H0Y2I8_9BACT S-adenosylmethionine:tRN A ribosyltransferase-isomerase OS=Candidatus Peregrinib acteria bacterium CG08_land_8_20_14_0_20_41_10 OX=19747 83 GN=queA PE=3 SV=1
MLLSDFDYHLPPELIAQNPLSPRDHCRLMLLKRPTESIEHKYFYNLVNLLTARDVLVLNESKVIKARLFGKLNSSTTEKSSEVFLLKQLSPFVWECLARPGHKFKTGTEIDFYNSDNQHPSSLKGKVAQVLTRGMREISFNLTGKAFEQELQKIGQIPLPPYIKNFQGQNEDYQTVYATKKGSVAAPTAGMHFTEELLNKLKNKGVQIEKVILHIGLDTFQPLQVEQIETHQMHAEDFELEEQTAERLNLAKQAGKRIIAVGTTTVRVLETCAIEAKGKGQRAYGKGQIVKGGGEKQKNVPLAPNHLLSAQTGSTSLFIYPSYQFKFVDALLTNFHLPKSSLLLMVSTFAGREFILRAYQEAIQQKYRFYSFGDAMLIE

SEQ ID NO: 64913 - protein, 360 aa, Peribacteria bacterium
  misc_feature (1)..(360): tr|A0A1F7BKW7|A0A1F7BKW7_9BACT S-adenosylmethionine:tRN A ribosyltransferase-isomerase OS=Candidatus Peribacter ia bacterium RIFCSPHIGHO2_01_FULL_55_13 OX=1801917 GN=q ueA PE=3 SV=1
MASYSYELPSELIATTPAHPRDSARLLIYNRKNDRVDLDTFHNIGTYLRKNAVLILNDTKVFPARMILKKSTGGKIEALYLSQQNDHITVLATGKLRPEEILQWEDGHAFTVIKRNGKEAILQPNFPLSTFLSLLEAHGHIPLPPYIEKSPLSESDRRREYQTVFARDSGSIAAPTAGLHFTQELLDVLRSQGISIEYVTLHVHLGTFAPLEEDQWEKKKLHTERYHITADTAERLNAAKKEGRPIVAVGTTTVRTLESACDQNSPVGAWHAKPLRMPLKRSHAYLLSLQKLSGSTSLFLTESSPLHFVDHVITNFHLPGTSLLMLVAAFTGREKLMELYQKAVDEKMRFYSFGDGMLIV

SEQ ID NO: 64914 - protein, 359 aa, Phaeomarinobacter ectocarpi
  misc_feature (1)..(359): tr|X5MPA3|X5MPA3_9RHIZ S-adenosylmethionine:tRNA ribosy ltransferase-isomerase OS=Candidatus Phaeomarinobacter ectocarpi OX=1458461 GN=queA PE=3 SV=1
MTDSLDAYDFTLPEELIALRPAQPRDAARLLVVNATKPGAIADAGVRELADFLKSGDVLVANDTRVIHARLRGIRRRGEAEAHIELLLHKPMPDPGHWQAFARPAKRLKPGETVECAEGLKAHIVSRDGGEVVVRLDATGQTLDEAIAIAGEMPLPPYIEGKRKADAQDEEDYQTVFAQADGSVAAPTAGLHFTDRVLKSLTDKGVSQETVTLHVGAGTFLPVKSDTLAAHKMHSEWGEVTAETAQRLNEARQAGGRIVAVGTTSMRLLESAVDEDGVFHPFQAETDIFIKPGHHFHAVDVLMTNFHLPRSTLFVLVSAFAGVATMRQAYQHAIDTGYRFYSYGDSSLLFPHSQDNAAP

SEQ ID NO: 64915 - protein, 352 aa, Photodesmus katoptron
  misc_feature (1)..(352): tr|S3E184|S3E184_9GAMM S-adenosylmethionine:tRNA ribosy ltransferase-isomerase OS=Candidatus Photodesmus katopt ron Akat1 OX=1236703 GN=queA PE=3 SV=1
MRVSDFYFELPNDLIAQYPKRKRTASRLLQLNGNTGSLRDSSFTALLDLVRQGDLMVFNNTRVMPARMFGRKKTGGKLEVLIERILNRSTVLAHVYCSKLPKISSTLFLGKNDEYEVEVIDCHSALFKLCFNNGESVLNVLNHIGHVPLPPYISRLDTAIDKERYQTVYNLKLGAVAAPTAGLHFDEVFLEKIKKKGIKFAYVTLHIGSGTFYPVKVDKINEHKMHSEYVEVKKITIDAIRSAKARGGRIIAIGTTSARSLESVAQNALKKNTDLMPFCGDTKIFIFPGYKYQLVDCLVTNFHLPKSTLIMLVSALSGYNHVMSAYQYAVKNRYRFFSYGDSMFATRKTCID

SEQ ID NO: 64916 - protein, 339 aa, Phycorickettsia trachydisci
  misc_feature (1)..(339): tr|A0A2P1P8M5|A0A2P1P8M5_9RICK S-adenosylmethionine:tRN A ribosyltransferase-isomerase OS=Candidatus Phycoricke ttsia trachydisci OX=2115978 GN=queA PE=3 SV=1
MKNDPLKVSDLDFPLDTKQIALNPLEKRDESRLLVIKGQNLKEIVFKDIVDLFHPGDVLVLNNSKVIKSRIIVSLEGKNIELFLHKQIEENRWQAFAKPAKKLSIGQVFSLGDNKIRVAEKLESGEVILELNLVLSSLEFFDQFGKIPLPPYIKRPSEKSDEEQYQTIFAANSGSVAAPTAGLHFTQEVLDKIKAKGAQVVYITLHVGAGTFLPIKSENVDDHEMHYENYEISQETAQIINDAKRVVAVGTTTLRTLESSCEDGKVIAQKSSTNLFIKPGFKFHVVDLLITNFHLPKSTLLLLVWAFGGRNNMEKAYDYAVKNNFRLFSYGDTSLIYHV

SEQ ID NO: 64917 - protein, 354 aa, Phycosocius bacilliformis
  misc_feature (1)..(354): tr|A0A2P2E7P5|A0A2P2E7P5_9PROT S-adenosylmethionine:tRN A ribosyltransferase-isomerase OS=Candidatus Phycosociu s bacilliformis OX=1445552 GN=queA PE=3 SV=1
MLLSEFDFDLPEELIALRPAVPRDSARLLVSQPGQMIEDSVVSALPGFLRAGDVLIFNDTRTIAASLKATRAPRGPIGGPVQIDLNLHQRVDEASWKAFARPAKRVAIGDVLDLAQDLRAEVIDLGEGGEVTLRFSVAGDALAQAIGRVGAMPLPPYIARKRDIDDQDAEDYQTVYARAEGSVATPTAGLHFTPDLLAALDAAGIERHWVTLHVGAGTFLPVKVDKIEDHVMHSEYYEVSQQTAQAIARAKAEGRRVIAVGTTSLRTLETIGQSDGRIKAGSGDTAIFITPGYRFKVVDGLMTNFHLPKSTLLMLVGALIGMEGLRSVYRHAIESRYRFYSYGDASLLWKADPF

SEQ ID NO: 64918 - protein, 350 aa, Poribacteria bacterium
  misc_feature (1)..(350): tr|A0A2D5VF92|A0A2D5VF92_9BACT S-adenosylmethionine:tRN A ribosyltransferase-isomerase OS=Candidatus Poribacter ia bacterium OX=2026781 GN=queA PE=3 SV=1
MDLQLDSYDYYLPDDQIAQYPLENRAQSRLLVLDRQTRQYHHTTFSQIGQFLPTDSLLVTNNTKVIPARLIGYKAHTGGKVEVFLVRQKANRLWEVLMKPGRRIRPKTQIVFGSSPCGESALLAARVVAKTATGSYIVRFEFEGDFYQCLNQVGQTPLPPYIKRPPATGDIDRYQCVYAHKAGAVAAPTAGLHFTPDLLARLQQDGIEIATLTLHVGLGTFQPVKVDNILNHQMHAEHFEFSEHTARQINRAKQSDRKIVSVGTTSVRVLETVVCNGQLYPQSGDTEIFIYPGFQFQIVDALITNFHLPKSTLLMLVSALADRTLIMDAYRQAIAEKYRFYSYGDAMLIL

SEQ ID NO: 64919 - protein, 341 aa, Poribacteria bacterium
  misc_feature (1)..(341): tr|A0A2E4DSR0|A0A2E4DSR0_9BACT S-adenosylmethionine:tRN A ribosyltransferase-isomerase OS=Candidatus Poribacter ia bacterium OX=2026781 GN=queA PE=3 SV=1
MRLTDFDYNLPKQLIAQDPLEQRDRSRLLVVNRETEKIHHTEFSQVADFLPSPSLLVLNNTKVIPARLIAKKITGGKIEVFLLRQRGKKTWEALIKPGKRVKRGTLLEFADCELTARILTRTDAGNYMVRFRYNGDFNQILEQVGQIPLPPYIKRSPNLEDIDRYQCVYASASGAVAAPTAGLHFTPELIDQLKGRDIEISSLTLHVGLGTFQPIKTSNITKHKMHAEYFEISSRTADQINNARKQGRKIVAVGTTTVRAIESAVVDGQIRPQKGDTDIFIYPNYVFKSVDALITNFHLPKSTLLMLVSALATPELIFSAYQNAIDQEYRFYSYGDAMLIR

SEQ ID NO: 64920 - protein, 370 aa, Promineofilum breve
  misc_feature (1)..(370): tr|A0A160T1R2|A0A160T1R2_9CHLR S-adenosylmethionine:tRN A ribosyltransferase-isomerase OS=Candidatus Promineofi lum breve OX=1806508 GN=queA PE=3 SV=2
MKVSEFDYDLPPALIAQQPMEPRDASRLLVLDGATGSIDHRRFRDLGDYLRPGDVIVANDTRVIPARLFGRKPTGGQVEILLLERLDGTTWRALVGGRRVGVGLVITLLDHADEPASVTATVIAEGAESLRELRFSAPVETWIDALGYAPLPPYIHAPLADAERYQTIYARPPGSAAAPTAGLHFTPELLLQLRERGILFETVTLHVGLDTFKPVSVAEVAEHNIHTEWARLSAEAARRINEAHLAGGRIIAVGTTTARVLETAALRSAGIGGSLRTISARDATGETSNICPWKPVAAFEGPTDLFIYPGYRFRAVGMLITNFHLPRSSLLMLVAAFAGRETMLAAYRAAVAEGYRFYSFGDAMLIRPNG

SEQ ID NO: 64921 - protein, 359 aa, Propionivibrio aalborgensis
  misc_feature (1)..(359): tr|A0A1A8XHR9|A0A1A8XHR9_9RHOO S-adenosylmethionine:tRN A ribosyltransferase-isomerase OS=Candidatus Propionivi brio aalborgensis OX=1860101 GN=queA PE=3 SV=1
MLTLDDFDFSLPPELIAQHPTPERSASRLLHMAGDAQHDRQFAELPQLVEPGDLLVFNDTKVIRARLLGQKESGGRIEVMIERIVDRDRAVAQIRASKSPKSGSRIVLENAIVLTVTGRTGEQSEFFALELVGDGDLFELVEQYGHLPLPPYITHAAGPEDETRYQTLFARHAGAVAAPTAGLHFDHATLAQLGERGAELAWLTLHVGAGTFQPVRVNNLAEHHMHTERFEIPQATVDAIARTRARGGRVIAVGTTSLRALEAAAQNGKQGGELQAGAAETDIFITPGYRFRVVDRLITNFHLPKSTLLMLVSAFAGTDIIRAAYRHAIAERYRFFSYGDAMLLEKLDENSHENANNAI

SEQ ID NO: 64922 - protein, 365 aa, Puniceispirillum sp.
  misc_feature (1)..(365): tr|A0A2D4UMQ4|A0A2D4UMQ4_9PROT S-adenosylmethionine:tRN A ribosyltransferase-isomerase OS=Candidatus Puniceispi rillum sp. OX=2026719 GN=queA PE=3 SV=1
  misc_feature (157)..(157): Xaa can be any naturally occurring amino acid
  misc_feature (164)..(164): Xaa can be any naturally occurring amino acid
  misc_feature (170)..(170): Xaa can be any naturally occurring amino acid
  misc_feature (204)..(204): Xaa can be any naturally occurring amino acid
MKLDAFDYSLPAEKIATKPVSPRESARLLDLSRGDITDRHIGDMPVLLRADDVLIVNNTQVIPARLEGWRGQAKISVTLHKRESDHIWRVFAKPAKKCRIDDVIIFADDFAATVLGRGEGGDVEVSFINPVNEACLTRLELDACLDRYGSMPLPPYXARPDGAXPADRQXYQTMFARHRGAVAAPTAGLHFTDNLAKAISATGXRILPVTLHVGAGTFLPVTANDIKDHKMHSEWGQISAETATAITEARAKGGRVIAVGTTSLRILEACYQQHGAVIKFAGETDIFITPGYEFGVIDALLTNFHLPKSTLLMLVSAFAGMQKIAMAYRHAIANDYRFFSYGDACFMTRNPSPDIIASIAAIADQ

SEQ ID NO: 64923 - protein, 360 aa, Puniceispirillum sp.
  misc_feature (1)..(360): tr|A0A3R7UFF4|A0A3R7UFF4_9PROT S-adenosylmethionine:tRN A ribosyltransferase-isomerase OS=Candidatus Puniceispi rillum sp. TMED213 OX=1986634 GN=queA PE=3 SV=1
  misc_feature (164)..(164): Xaa can be any naturally occurring amino acid
  misc_feature (272)..(272): Xaa can be any naturally occurring amino acid
MSDLPNLLSDFDYLLPEELIAQTPARPRETARLLIAAADGISDHIIADLPKLLRPGDLLVVNDTAVIPAALIGRRGKGKVRINLHRRLKEDSWLAFAKPARKCLPGTEISFADGFSAVVTQKADGGEVTLQFNQFGAALDSCFEQHGQMPLPPYIRRPDGADEXDRDDYQTLFATHAGAVAAPTAGLHFTDELRQKLISAGINFTAVTLHVGAGTFLPVKTEDIHEHKMHTEWGTVSVDTVKAIQQTKATGGRVIAVGTTSLRILEAAFVHXGRLAPFTGETDIFITPGYQFGVIDMLLTNFHLPKSTLLMLVSAFSGYDFIKMVYQHAIVSGYRFFSYGDACLLSCQNRHPLLVKKEPS

SEQ ID NO: 64924 - protein, 338 aa, Raymondbacteria bacterium
  misc_feature (1)..(338): tr|A0A1F7FCL9|A0A1F7FCL9_9BACT S-adenosylmethionine:tRN A ribosyltransferase-isomerase OS=Candidatus Raymondbac teria bacterium RIFOXYD12_FULL_49_13 OX=1817890 GN=queA PE=3 SV=1
MSLADYDYALPEDRIAQRPAVERDHARLIICDRGAIVHAAFPDIVDLLNSADCLVLNRTKVIPARLMGRRATGGKTEVFLLQQTDANEWITIGRPGRNLRTGARLFFDHDITAEVLDDSLAEGKRLMRFSASREELFSIGAVPLPPYIRRDADALDRERYQTVFAQTEGSSAAPTAGLHFTEALLNRIRAKGVSLAYVTLHVGLGTFRPITVERVEEHAMEKEAYAIDKEACDTINRTMRQGGRVVAVGTTVAKTLETAALACFPLAPAAGASDLFIRPGFTFRVVNALVTNFHMPRSTLLLLVAAFAGKENLFSLYTEALKRQYRFLSYGDATLFIA

SEQ ID NO: 64925 - protein, 413 aa, Regiella insecticola
  misc_feature (1)..(413): tr|G2GWK9|G2GWK9_9ENTR S-adenosylmethionine:tRNA ribosy ltransferase-isomerase OS=Candidatus Regiella insectico la 5.15 OX=1005043 GN=queA PE=3 SV=1
MRVDDFSFKLPGSLIAHYPHPQRSGCRLLSLDGQTGRITHGVFTDVLDKLQAGDLLVFNDTRVIPARLFGKKASGGKLEILVERLLDDHRVLAHVKASKALKPGTQLQLGDDKSEHTAIQATVLARLDNLFELRFDDQRDVLTILRAIGHIPLPPYIDRPDEKSDRELYQTVYSQRPGAVAAPTAGLHFDQPLLDALRKKGIEMAFVTLHVGAGTFQPIRVENIEEHSMHAEYAEVPQTVVEAVLACKARGKRVIAVGTTSVRSLESAAMQRAEKNENIPFAFEAAALLAEDIRPNHVVDLRSSGRTPWPPSGNFKDCGYNPGSKALITPFFGDTQIFIYPGYHYQIVDGLITNFHLPKSTLIMLVAAFAGYKNTMAAYQLAIEKEYRFFSYGDAMFISRNPLAAQEKINTGR

SEQ ID NO: 64926 - protein, 413 aa, Regiella insecticola
  misc_feature (1)..(413): tr|E0WS93|E0WS93_9ENTR S-adenosylmethionine:tRNA ribosy ltransferase-isomerase OS=Candidatus Regiella insectico la LSR1 OX=663321 GN=queA PE=3 SV=1
MRVDDFSFELPGSLIAHYPHTQRSGCRLLSLDGQNGNITHGVFTDVLDKLQAGDLLVFNDTRVIPARLFGKKASGGKLEILVERLLDKHRVLAHIKASKAPKPGTQLQLGDDKSEHTAIQATVLARLDNLFELRFDDQRDVLTILRAIGHIPLPPYIDSPDEKSDRELYQTVYSQRPGAVAAPTAGLHFDQPLLDALRKKGIEMAFVTLHVGAGTFQPIRVKNIEEHSMHAEYAEVPQTVVEAVLACKARGKRVIAVGTTSVRSLESAAMQRAEKNENIPFAFEAAALLAADIRPNHVVDLRSSGRTPWPPSGNFKDCGYNPGSNALIMPFFGDTRIFIYPGYHYQIVDGLITNFHLPKSTLIMLVAAFAGYKNTMAAYQLAIEKEYRFFSYGDAMFISRNPLAAQEKINTGR

SEQ ID NO: 64927 - protein, 356 aa, Rhodobacter lobularis
  misc_feature (1)..(356): tr|A0A0J9GWE7|A0A0J9GWE7_9RHOB S-adenosylmethionine:tRN A ribosyltransferase-isomerase OS=Candidatus Rhodobacte r lobularis OX=1675527 GN=queA PE=3 SV=1
MKLSEFDFDLPEDLIATRPARPRSSARLLVAGPSALQDSRVSALPQFLLPGDRLVLNNTKVLPARLTGARHRDSAQGAVSARIEATLIEPTAGGHWRALLKPLKKVRDGEIIDFGADLHAKLLRRMDGIAELSFNLTGAAFDAALAKAGAMPLPPYIAAKRAADEADRHDYQTVWAEKTGAVAAPTASLHFDDALLAEIAARGVSFTHVTLHVGAGTFLPVKSDDVTDHKMHAEWGEISEAAAQEINETRAQGGRIIPVGTTALRLIETAARSNGTVRPWMGDTDIFIRPGYQFNAADALMTNFHLPKSTLLMLVSALMGRERMLAIYAHAIAERYRFFSYGDASLLLPGALKRHG

SEQ ID NO: 64928 - protein, 342 aa, Rickettsiella isopodorum
  misc_feature (1)..(342): tr|A0A1J8NNQ6|A0A1J8NNQ6_9COXI S-adenosylmethionine:tRN A ribosyltransferase-isomerase OS=Candidatus Rickettsie lla isopodorum OX=1225476 GN=queA PE=3 SV=1
MQYKLEDFFYELPEKLIARYPSTQRTDSRLLCLNKKTGAIQHKKFKDSLKLINSGDLLILNNTQVIPARLFANKTTGGKVEILIERILDKRRFLAQLKSSKPLKLGTKLILENGVRLEISARAENIFELIFLVEVPSILELLNKIGHIPLPPYMQRADELFDWERYQTVFASTPGAIAAPTAGLHFDEDLLAQLNAKGVNIVYITLHVGSGTFQPIRSIRFEDHQMHNEPVTVSEAVCEKITLTKQNNKRVIAVGTTVVRSIETAALNGQIKSFLGDTRLFIYPGFQFRCIDALITNFHLPQSTLLMLVCAFAGYESVMPAYQEAIKQNYRFFSYGDAMWIS

SEQ ID NO: 64929 - protein, 338 aa, Rickettsiella viridis
  misc_feature (1)..(338): tr|A0A2Z5UWB9|A0A2Z5UWB9_9COXI S-adenosylmethionine:tRN A ribosyltransferase-isomerase OS=Candidatus Rickettsie lla viridis OX=676208 GN=queA PE=3 SV=1
MADFFYDLPPELIAAYPTQQRTDSRLMCLNKQTKTVEHKKFKDILTLINPGDLLVLNDTKVIPARLFAHKPTGGKVEILIERILDEERILAHLKSSKSLKIGTQLHLENEIRLEITNRTENLFELQLLDKVDSILALLNAIGHMPLPPYLQRQDENFDKERYQTIFAQTPGAVAAPTAGLHFDEELLTQLRNKGVNIAFITLHVGSGTFQPIRTEKLEDHLMHSETVTVSAEVCQKIAETKRQGKRVIAVGTTTVRSLETVASKGFVAPFQGETKLFIYPGFSFHCVDALITNFHLPTSTLLMLVCAFAGYQSVMHAYQQAINHQYRFFSYGDALWVG

SEQ ID NO: 64930 - protein, 336 aa, Riflebacteria bacterium
  misc_feature (1)..(336): tr|A0A2N1TZZ3|A0A2N1TZZ3_9BACT S-adenosylmethionine:tRN A ribosyltransferase-isomerase OS=Candidatus Riflebacte ria bacterium HGW-Riflebacteria-1 OX=2013829 GN=queA PE =3 SV=1
MKTELFDFNLPERLIAQTPAERRSGSRLLIYDRKLDRVEHRQFSDIVEYFAPGDLLILNSSKVIPARIFTADTGYEILFVKQLANNCFEAMVRPGRRFKPGKRHQLPGGRVVEVVDVLASGLRVLQAVDGLDVLPVFREFGEMPLPPYITSRASSPDRYQTVYSSLEGSIAAPTAGLHFDDQVFAALAKKQVAVAEVVLHVGLGTFKPIESDSISEHRMHEEIFYVSEKTAELFKQTRQAGHRVWACGTTSVRTLESAIDSNGELKVGWQATDCFITPGYKFRAIDCFITNFHLPRSTLIVLVASFCGREKVLELYEEAIAKEYRFYSFGDSMLLL

SEQ ID NO: 64931 - protein, 341 aa, Riflebacteria bacterium
  misc_feature (1)..(341): tr|A0A2N1UAC0|A0A2N1UAC0_9BACT S-adenosylmethionine:tRN A ribosyltransferase-isomerase OS=Candidatus Riflebacte ria bacterium HGW-Riflebacteria-2 OX=2013830 GN=queA PE =3 SV=1
MKTDLFDFVLPGHLIAQTPAARRSASRLLVYDRGKDRVEHRQFTDIVEYFAPGDLLILNSSRVIPARIFTVAGQHGGAGYEILFVRQLENHSFEAMVRPGRKFRPGRQHQLPGGRSVDVVAVLDSGLRVLRATDGEDILPVFREFGEMPLPPYITSRESTPDRYQTVYSSIEGSIAAPTAGLHFDDQVFAALAEKQVKVAEVILHVGLGTFKPIEADSIAEHRMHEEVFYVSEQTADLFRQTRQSGGRIWACGTTSVRTLESAMNAAGELTTGWQSTDCFITPGYQFRAVDRFITNFHLPRSTLIVLVAAFCGREKVLELYQEAIAKEYRFYSFGDSMLLL

SEQ ID NO: 64932 - protein, 400 aa, Roizmanbacteria bacterium
  misc_feature (1)..(400): tr|A0A2M8DBL2|A0A2M8DBL2_9BACT S-adenosylmethionine:tRN A ribosyltransferase-isomerase OS=Candidatus Roizmanbac teria bacterium CG_4_9_14_0_8_um_filter_34_12 OX=197484 0 GN=CO083_05210 PE=3 SV=1
MKSINQFDYYLPPESIAKQPAVPRDYSRLFVYDTKTNEIVFDKFYNLDKYLPKKSFLVMNDTKVLPARVEMKKATGGKVRVLFLVNEIMSSSQYQVLSIEQNTIRIFVDRKVDVGDKLFFNSQYFVTVTAQEEHIFTVQFDFSIGELFRILEKKGTMPIPLYIKNSPLSRNDLLHKYQTIFARVPVGTRLIGRSAAAPTASLHFTNRLLSKLEKKRINKTFITLHVGMGTFASVTDVNIRQKKLHEEYFEINNETLQLINLMKQERKKLVAVGTTVVRTLESAEISLRQGRGQLESVMKRGHSGEEQSDDSRIKLRRFWTSQNGKDTFISKTDLFIQSGFKFQYVDSLITNFHLPGSSLMMLVEAFLQHKQAKHHLVNLYQIAIKEKFRFYSFGDGMLIR

SEQ ID NO: 64933 - protein, 41 aa, Roizmanbacteria bacterium
  misc_feature (1)..(41): tr|A0A2M7BR45|A0A2M7BR45_9BACT S-adenosylmethionine:tRN A ribosyltransferase-isomerase (Fragment) OS=Candidatus Roizmanbacteria bacterium CG03_land_8_20_14_0_80_39_12 OX=1974847 GN=COS52_05170 PE=3 SV=1
VINHLITNFHLPGSSLMVLVDAFAIKNELRFYSFGDAMLII

SEQ ID NO: 64934 - protein, 345 aa, Rokubacteria bacterium
  misc_feature (1)..(345): tr|A0A0T6A946|A0A0T6A946_9BACT S-adenosylmethionine:tRN A ribosyltransferase-isomerase OS=Candidatus Rokubacter ia bacterium CSP1-6 OX=1640509 GN=queA PE=3 SV=1
MDVALFDYPLPPERIAQYPAEQRDAARLLVCDRAAGRWEDRAFAELPDLLRPGDVLVVNDSRVIPARLLGRLEPEGRPVELLFLKALDPLRWEALARPAKRCRPGAVVVFGDGEVRVRVAAVAGEGRRIVELQGGGSVREVLERYGVPPLPPYITRHQKPGQEDWERYQTVYAARDGSVAAPTAGLHFTPALLDRLRARGIAVETLTLHVGPGTFRPIRSPRVEAHRMEAEEVEISAAAADAINGAKGKGRRIVAVGTTTCRALESAADEQGRVRPMSGPTGLFIYPGHRFKVIDALLTNFHLPRSSLLLLVCAFAGREFVLDAYRHAVEAGYRFYSYGDAMLIQ

SEQ ID NO: 64935 - protein, 344 aa, Rokubacteria bacterium
  misc_feature (1)..(344): tr|A0A1Q7IJB2|A0A1Q7IJB2_9BACT S-adenosylmethionine:tRN A ribosyltransferase-isomerase OS=Candidatus Rokubacter ia bacterium 13_1_40CM_4_67_11 OX=1805361 GN=queA PE=3 SV=1
MDLHDFEYELPPEAIAQAPALERDAARLLLIDRARGALEDHVVRELPELLRPGDCVVVNDSRVIPARVLALDASGHRVELLFAEPQRDGRWRALVRPGRRCRAGAGLVVPGAMEARLRIVAAEPDGPRIVERMDGTIDDLLASHGMLPLPPYIARHAQPTADDRERYQTVYARSPGSVAAPTAGLHFTPSLLDRLRARSIEVHALTLHVGPATFRPIKSERVEDHVLAAERVAIPASVADAVNSARNEGRRVVAVGTTTTRALESAPGADGRVRAHDGAAEAYITPGYRFRVVDALVTNFHLPRSSLLVLVCALAGRELILKAYQHALRAGYRFYSYGDATLIV

SEQ ID NO: 64936 - protein, 356 aa, Ryanbacteria bacterium
  misc_feature (1)..(356): tr|A0A1G2GX40|A0A1G2GX40_9BACT S-adenosylmethionine:tRN A ribosyltransferase-isomerase OS=Candidatus Ryanbacter ia bacterium RIFCSPLOWO2_01_FULL_48_26 OX=1802126 GN=qu eA PE=3 SV=1
MKRSAFGKLLQRYDYKLPPDCIAALPATPRDSAKLMVYDRRSGCTTDTTFRDLPKFIPKGALLVFNNTKVVPARLTLAKPTGGAVRVLFIDLAGKRLRVLADRSINTGTILSFNNRPIFRAYGREGNYLVLTSARRLNLKNFLERHGEAPLPPYIKNSPLTKKEQRRQYQAVFAKTPGSIAAPTASLHFTPELLRVLSSGRGSASGGKKSGIETAFITLHVGLGTFAPLTPENLKTKSLHGEKYSIGKTTARIINQAVREKRPIIAVGTTALRTLESSVDVRGVIKKLNGKTSLFIREGYRFRIADGLITNFHVPRSSLLMLVSAFAGRKNVLKLYRRAIKKGYRFFSFGDGMLVL

SEQ ID NO: 64937 - protein, 356 aa, Ryanbacteria bacterium
  misc_feature (1)..(356): tr|A0A1G2G767|A0A1G2G767_9BACT S-adenosylmethionine:tRN A ribosyltransferase-isomerase OS=Candidatus Ryanbacter ia bacterium RIFCSPHIGHO2_01_FULL_48_27 OX=1802115 GN=q ueA PE=3 SV=1
MPSSLERVLKQYDYMLPERLVAKCPVTPRDAARMLVYQRATDTIRWDTFLHLPKYLPKGAVLVFNKTKVFPARLKLKKETGGTVKILYVKHDARYLYALCDKPLRNGMKLSLGGVVRFAVRAKKEAVYTLVPHMPVSKVMELFLRYGETPIPPYIKNSPLSESRLRKEYQTVFASALGSVAAPTASLHFTKRLLSRIKKSGCDIAFVTLHVNLGTFAPITQIALRTGRLHEEYYEIDARTKTLLESAKRAGRPIIAVGTTVVRTLESAADKKGVLQRPSGFTDLFIREKYQFRFVDGIITNFHVPKSSLLILVAAFAGQKNILDLYQTAIKKKFRFFSFGDGMLILGSKIPNPKAK

SEQ ID NO: 64938 - protein, 347 aa, Saccharibacteria bacterium
  misc_feature (1)..(347): tr|A0A431HJQ2|A0A431HJQ2_9BACT S-adenosylmethionine:tRN A ribosyltransferase-isomerase OS=Candidatus Sacchariba cteria bacterium OX=2026720 GN=queA PE=3 SV=1
MQLSDYDYDLPESAIAIHPPKERGSSRLLVLDKQTGSIVDDVYKNLSQQLQSGDVLVLNNTKVLPARLLAKTETDEERELLLLEKHGQGSDHHTSLVMYRRKIRPGQQLHIGGSTVAVEEVFQNGTAKISSEHDLWQLAEEQGEVPLPPYMHRREEADDRERYQTVFARERGSVAAPTASLNMTPALLETIRSKGVEVVELTLHVGLGTFMPIRVDDVTKHKMHQEYFEVPVVTAQAIARAKQSGRRVIAVGTTVTRTLEYAAADIMAVAEIDRAQPIHGEADIFIYPGYEFKVVDGLLTNYHAPKSTVLMMAAAFADWEHLKAAYEHALAENYAFLSYGDSMLIIE

SEQ ID NO: 64939 - protein, 344 aa, Saccharibacteria bacterium
  misc_feature (1)..(344): tr|A0A4P5ULQ4|A0A4P5ULQ4_9BACT S-adenosylmethionine:tRN A ribosyltransferase-isomerase OS=Candidatus Sacchariba cteria bacterium OX=2026720 GN=queA PE=3 SV=1
MYAMKLSDYNYKLPKERIAQHPPQKRGDAKLLVLDKSTGEVKDKKYADLLSYLNPGDIVVLNNTKVIKARLEAVGADGKKYEILLTEKHGQAEDKYHHKAMYRGKLKEGMDLAIDKYNVRVLGVYEDGTALLESTADFMEIAESLGHVPLPPYMKREDTKEDVERYQTEFAKSEGSVAAPTASLNFTDKLIDKLKARGVEVCYLTLHVGLGTFLPIRTDNIKEHKMHSEWFSIPGSTVKKINKAKNSGNKVLAVGTTVARTLEYASEHILSGKENIEGESDIFIYPGYQFKVVDMLLTNFHAPKSTVLMLAGAFAGWDNLLIAYEKAIKNEYNFLSYGDSMLIR

SEQ ID NO: 64940 - protein, 350 aa, Saccharicenans subterraneum
  misc_feature (1)..(350): tr|A0A3E2BML6|A0A3E2BML6_9BACT S-adenosylmethionine:tRN A ribosyltransferase-isomerase OS=Candidatus Saccharice nans subterraneum OX=2508984 GN=queA PE=3 SV=1
MTEKILLKDYDYELPPELIAQQPLPGRDDSRMMVLNRSLKTIEHRRFKEIANFFEPGEVLVLNNSRVIPARAWAVKRDGDGKSIEFLFIKEKKPGTWEVLCRPAKKVKEGDSLVFDSNLEARVTGRGPLGHRLLEFNTTEVLARLKEIGVAPLPPYIKRKKGDPRFKKIDAERYQTVYATRDGSIAAPTAGLHFTENILDELKQKGVDIQYVTLNVGLATFQPVRVEKITDHRMLEESFYISPETAGAINLARKEGRRITAVGTTVVRTLESAWTENGLQAGEHTTRLFIYPGYHFKVVERMLTNFHLPRSTLLMLVCAFAGYDLVMAAYREAVRERYRFFSYGDCMLIV

SEQ ID NO: 64941 - protein, 351 aa, Saccharimonas aalborgensis
  misc_feature (1)..(351): tr|R4PJV6|R4PJV6_9BACT S-adenosylmethionine:tRNA ribosy ltransferase-isomerase OS=Candidatus Saccharimonas aalb orgensis OX=1332188 GN=queA PE=3 SV=1
MSLVLHWYVMQLADFHYDIPEKLIATTPPTVRGDARLLVLDRQSGTVSDRHYPDIVDYLGLGDVLIINDTKVIKARLITTKQTGGTRELVLVEKHGRSDDWHTHKVIYRRKLAVGDKLSVGADTLTVEELLDGGMAIIKSERDLLQIAEEHGSVPLPPYMRRDATPADIERYQTIFAREQGSVAAPTASLNMTEETLSRLRDKGIVVVYATLHVGLGTFLPIRVEDVTDHHMHKEYFEIPAVTVSAIRDAKAKGKRVVALGTTVTRTLEYAHEAILAGPPRDLSGEADIFMYPGYSFKIIDGLITNFHMPDSTVLMLTAAFAGWDKLKPAYEHAIDKSYRFFSYGDSMLIL

SEQ ID NO: 64942 - protein, 180 aa, Scalindua brodae
  misc_feature (1)..(180): tr|A0A0B0EMH3|A0A0B0EMH3_9BACT S-adenosylmethionine:tRN A ribosyltransferase-isomerase OS=Candidatus Scalindua brodae OX=237368 GN=SCABRO_00366 PE=3 SV=1
MNAIKQFMQKKVGAIAAPTAGLHFTTNLLREISCKGIKIVYITLHVGLGTFKPIHKEDFRQHTIHKEFYNISEETVSTINKAKSLGKKIIATGTSTCRVLETIAKNHTTEKSSGWTKLFIYPPYKFKLTDSLITNFHLQRSTLILLASAFAGRENIATSYEEAISLNYRFYSYGDCMLIL

SEQ ID NO: 64943 - protein, 351 aa, Scalindua sp.
  misc_feature (1)..(351): tr|A0A523CJX2|A0A523CJX2_9BACT S-adenosylmethionine:tRN A ribosyltransferase-isomerase OS=Candidatus Scalindua sp. AMX11 OX=2555784 GN=queA PE=3 SV=1
MKQNISTISDYDYPLPEQLIAQCPLSKREKSRLLVLHRDDGRIEHKRFFEIIEYLHKGDVLVLNDTKVFPAKIVGSKRTGGRVEALLIKKVKDTVWEMLLKTNRKLKENDSIYFLDNSVVGNVLCKNKSGSWYVEFKNGEDFTNTVMSVGSMPLPPYIKRSQDNKQLAAIDETRYQTVYAKNVGAIAAPTAGLHFSEELLGKIREKEITIASVTLHVGLGTFQTIKEEDYTKHTMHEEYYHIPQQTIDVILKAKSLGKKIFATGTSACRVLETVARNDSVQECSGWTDLFIYPPYNFKITDSLITNFHLQRTSLLLLVSAFAGKETIRNAYESAIERGYRFYSYGDCMLIT

SEQ ID NO: 64944 - protein, 363 aa, Schekmanbacteria bacterium
  misc_feature (1)..(363): tr|A0A1F7SFC7|A0A1F7SFC7_9BACT S-adenosylmethionine:tRN A ribosyltransferase-isomerase OS=Candidatus Schekmanba cteria bacterium RIFCSPLOWO2_12_FULL_38_15 OX=1817883 G N=queA PE=3 SV=1
MQLSDFDYSLHEELIAQYPLGKRDSSKLMVFDRNTGSLIHTNFFKIANFLMNTDVLVINDTKVFPARLRGVKENTGGRIEILLLKNWKNGKAEENIWEVLINTNKGIKKGATLCFGNGELKGIIRESDGNGKGILEFETRNDIFEILDRIGEPPLPPYIKRKLLVNSEQYLPNTVHYSLFTDRERYQTVYARERGAVAAPTAGLHFSDELLKRIKKTGVEIINITLHVGLGTFKPVRVSNIKEHIMDSESYVIASDNAEKLNKARRDKRRIIAVGTTTARTLESEIEKYGKFTEGEKETSLFIYPGFKFKAIDSLITNFHLPKSTLLMLVSAFCGLENIMDCYRKAIEMEYRFYSYGDAMFII

SEQ ID NO: 64945 - protein, 342 aa, Schekmanbacteria bacterium
  misc_feature (1)..(342): tr|A0A1F7RQM9|A0A1F7RQM9_9BACT S-adenosylmethionine:tRN A ribosyltransferase-isomerase OS=Candidatus Schekmanba cteria bacterium RBG_13_48_7 OX=1817878 GN=queA PE=3 SV =1
MRLHDFDYDLPGHLIAQTPSINREDSRLMVLFREEEKIIHSQFKYLSEFVNQNEIIVLNESKVIPARLFGHKQKTGARIEILISRPLDEKAGIYKVLAKPMKRISCGTHIEFATGFEMEVLEKNNEFCTIKFNNPEKFEWFLNRYGKTPLPPYITKRNPDDKDRYQTIFARIPGSVAAPTAGLHFTVQLFNELENKNITIAKVILHVGPGTFMPLREEKIENQSLEEEEYSLPEETANKINNTRQAGNALIAVGTTTTRVLESCADIHGKVEGNAGLTSAFIYPGYKFRVVDKIITNFHLPRSSLLLLVCAFAGKDFILNAYKAAISMGYRFYSYGDAMLIR

SEQ ID NO: 64946 - protein, 342 aa, Schmidhempelia bombi
  misc_feature (1)..(342): tr|A0A484GCR8|A0A484GCR8_9GAMM S-adenosylmethionine:tRN A ribosyltransferase-isomerase OS=Candidatus Schmidhemp elia bombi str. Bimp OX=1387197 GN=queA PE=3 SV=1
MQLSDFAFELPDELIARYPTKMRSQCRLLSLDGATGALDSGVFTDIVQKLNPGDLLVFNNTRVIPARLYGQKITGGKVEILVERILDNHRVLAHVKASKAPKVGTELVLGETGQVQVTMLARHDALFELQFPSDVLSILDKIGHMPLPPYIDRPDEDQDRELYQTVYNKVPGAVAAPTAGLHFDDTLIQTLKEKGIEIAFVTLHVGAGTFQPVRVADIYQHVMHAEYAQVPQDVVEAVQRCKARGNRVVAVGTTSVRALESAALATGQIAPFFADTRIFIYPGFQFNVIDALITNFHLPESTLIMLVSAFAGYDNVMHAYHQAIEQRYRFFSYGDAMWVTKK

SEQ ID NO: 64947 - protein, 337 aa, Shapirobacteria bacterium
  misc_feature (1)..(337): tr|A0A0G0I533|A0A0G0I533_9BACT S-adenosylmethionine:tRN A ribosyltransferase-isomerase OS=Candidatus Shapirobac teria bacterium GW2011_GWE1_38_10 OX=1618488 GN=queA PE =3 SV=1
MIKIEDYDYQLPSELIAQEALKNRDECRLLVVDRENNDTKEGVFKDIASDLGEDDVLVLNESRVFPARLIGKKDSGGKVELLLLRKTREKEWEAICRPGLKKGKRLDFGELKGEVTENWEEAIEIRFEFEGDFWKILEKIGKTPIPPYIQNDRENEIRKDYQTVYANSYGSAAAPTAGLHFTNELLEKLLKKGVQIEKVNLDVGLGTFKPVSEKNLERGKLHSEHFELRAEVADRLNLAKKQGKRIIAVGTTSVRVLEAMSDEKGNLRGGSGETDIFIYPPYKFKFVDSLLTNFHLPKSSLLMLVSALMGEAWREVYKEAVEKRYRFFSFGDAMWIR

SEQ ID NO: 64948 - protein, 350 aa, Shapirobacteria bacterium
  misc_feature (1)..(350): tr|A0A0G0N044|A0A0G0N044_9BACT S-adenosylmethionine:tRN A ribosyltransferase-isomerase OS=Candidatus Shapirobac teria bacterium GW2011_GWE2_38_30 OX=1618490 GN=queA PE =3 SV=1
MLNPTDFDYHLPKNQIANQPLNNRDQSRLLFVDRSSQKLSDHHFFEIENYLGKNDVLVLNQTKVFPARIFGQKSTGGHFEILLAHQISQDTLEALSRPRLKSGLLLNFSSLLSAQIIDSNPDTGLITLKFNQFGTEFYQSLNQLGHTPIPPYIKNSQSEKILRQNYQTIYAKNTGSSAAPTAGLHFTKELLKKLSDRGVQIEYVTLHVGLGTFQPLRLENLKSKTLHTESYFIDPDTINRLNNAKKSGKKITAVGTTTTRCLESFAINPTATSTQLFIYPPYKFKFVDSLITNFHLPQSSLLMLVYAFCSHPNTPQKFSIFSDSLIGQAYLYAVQNDYRFFSFGDAMWII

SEQ ID NO: 64949 - protein, 347 aa, Stoquefichus sp.
  misc_feature (1)..(347): tr|A0A139TDE5|A0A139TDE5_9FIRM S-adenosylmethionine:tRN A ribosyltransferase-isomerase OS=Candidatus Stoquefich us sp. KLE1796 OX=1574263 GN=queA PE=3 SV=1
MKGRFNMKLSEFDYHLPEELIAQTPLQKRDTSRLMVLDRKNQTIEDKHFYDILDYLHEGDILVRNNTKVIPARLYGTKEETNGHVEVLLLKDLGNDVWECLVGNARIVKMDTIITFGDGSLKAKCVHIGEEGIRHFQMIYDGIFYEILDKLGTMPLPPYIKEKLEDQNRYQTVYAKIEGSAAAPTAGLHFTDEILEKVKAKGVKILDVTLHVGLGTFRPVKVDDVLEHHMHSEFYMIDEDVAKQLNEAKANGQRIISVGTTSTRTLEANFKKYGEFKATQESTDIFIYPGYQFEAIDALITNFHLPKSTLVMLVSAFASKDFIMKAYHHAVEEKYRFFSFGDAMFIQ

SEQ ID NO: 64950 - protein, 410 aa, Sulcia muelleri
  misc_feature (1)..(410): tr|A0A346E0R1|A0A346E0R1_9FLAO S-adenosylmethionine:tRN A ribosyltransferase-isomerase OS=Candidatus Sulcia mue lleri OX=336810 GN=C9I73_007 PE=3 SV=1
MKKRICHKRKNLFGRKGKGNQVNQNKINKINKINKKAFKKKKDSYNISKYILINFKNSDFNFKVPKKLIPNKPRLSKNRTRLMVLNRMNMTIQHKYMNDFNSYFITGDTLVLNNTKMYKYILYGKKEKNGSDLQVYLLREINPNEKSWEVLVQPARKIRIGNRLFFLDENNEKLIAVVHDNTISKGRIIKFTCDLPNQIFKNKIKNLGKIQSGLIKYGLYTSFKKPFIDFSNLQTIYAKKEGSTSPHFPGLHISKYILKKLEFYGINISYVTLHLGHDTYDKIIVEDIQKHKMKEEYFKITHKACNFINYSINSQQKVCAIGTSTLRALESSVSPSNTLIPNKKWTNKFIYPYYKFHIANSLLTNFHQPKSTVMPLLAAFVGYDFLKYAYDLAIKKKYQFYNFGDAMLIL

SEQ ID NO: 64951 - protein, 352 aa, Sulfopaludibacter sp.
  misc_feature (1)..(352): tr|A0A2U3KS04|A0A2U3KS04_9BACT S-adenosylmethionine:tRN A ribosyltransferase-isomerase OS=Candidatus Sulfopalud ibacter sp. SbA4 OX=2043165 GN=queA PE=3 SV=1
MELAAFDYHLPGELIAQQPLEERAASRMLVVYRDEHRWEDRHFRELPAFLRSGDCLVLNDSRVFPARLYGHREGVRSLPIGKNNPKRREYLSGEVEVFLLRAVSADGRDWEALVRPGRKMRVGERLRFAEALVGEIVDRGEFGERTIRFTGAADLLNTFEKIGHIPLPPYIKRPDEATDRERYQTVFARAKGSVAAPTAGLHFTAEILDQCRAAGAGVACVTLHVGLGTFQPLHSEQVEQARLHSERYHISAEAVASIRAASRIVAVGTTSVRTIESAWQSGQLAGETDIFIYPGFPFRAIGAMLTNFHLPRTSLLLLVCAFAGTDLALAAYRHAVEQKYRFYSYGDCMLVL

SEQ ID NO: 64952 - protein, 49 aa, Sulfopaludibacter sp.
  misc_feature (1)..(49): tr|A0A2N9N0Z7|A0A2N9N0Z7_9BACT S-adenosylmethionine:tRN A ribosyltransferase-isomerase OS=Candidatus Sulfopalud ibacter sp. SbA3 OX=2043164 GN=SBA3_4290004 PE=3 SV=1
MLTNFHLPKTSLLLLVSAFAGRELTLEAYRHAVEARYRFYFYGDCMLII

SEQ ID NO: 64953 - protein, 383 aa, Sulfotelmatobacter kueseliae
  misc_feature (1)..(383): tr|A0A2U3KR29|A0A2U3KR29_9BACT S-adenosylmethionine:tRN A ribosyltransferase-isomerase OS=Candidatus Sulfotelma tobacter kueseliae OX=2042962 GN=queA PE=3 SV=1
MLVSDFHYGLPEELIAQEPLADRAGSRLLRLEAGTGRFEDRQFREFPELLRPDDLVVFNNTRVFPARLYGRRGGLKAQTVSQRNPAARDFLQGRIEVLLTRQLREEPNEWECLVRPGRKIGVGEHLFFGEQDELPAEVIGRGGFGERRIRFETPSSFARPGGRGRPSPHEPIPADEFFARVEKIGHVPLPPYIARPDSAADRERYQTVYARERGSVAAPTAGLHFTAEILERIKQRGIETAEVTLHVGLGTFQPVRVERVEEHRLHPEAYSISAEEAEKIGRAKSEGRRVVAVGTTTVRTLEYAAQQGVGEVRAGTGEANLFIYPGYEFQVVGALLTNFHLPQSTLLMLVCALGGRENVLRAYQHAVEQRYRFYSYGDCMLVE

SEQ ID NO: 64954 - protein, 393 aa, Sulfotelmatomonas gaucii
  misc_feature (1)..(393): tr|A0A2N9LKB3|A0A2N9LKB3_9BACT S-adenosylmethionine:tRN A ribosyltransferase-isomerase OS=Candidatus Sulfotelma tomonas gaucii OX=2043161 GN=queA PE=3 SV=1
MSGPSGDSPQSGRSERRADPQADLRVSDFDYELPEELIAQQPTAERGTSRLLVMDRKSGAWEDDVFPGFASRLRPRDLLVLNDSRVIPARLYARRTLRREREKPTGRIEVMLLEPAGERQWRALVRPGRKVAIGERLVFPAAGGDIVLEAEVMERGQYGERLLEFAPVDDFYAAIERIGHMPLPPYIHRRDAEADRERYQTVFAHERGSVAAPTAGLHFTEAMIEALQAKGVEIARVTLHVGLGTFAPLRVERVDEVRLHRERYSISAAAADALNRAVAEGRRIVAVGTTVVRTLEAAALAARGEELRTHSGATEIFIAPGFEFRLVSALLTNFHLPQSSLLMLVSAFAGREHVLAAYRHAVEERYRFYSYGDCMFIAGAVLSDHFQLLDSLA

SEQ ID NO: 64955 - protein, 342 aa, Sulfuricurvum sp.
  misc_feature (1)..(342): tr|K7SZD8|K7SZD8_9HELI S-adenosylmethionine:tRNA ribosy ltransferase-isomerase OS=Candidatus Sulfuricurvum sp. RIFRC-1 OX=1249480 GN=queA PE=3 SV=1
MTNLDPLLTSSYHYELPEELIATHPIHPRDHARLLVYDRADQSITHARFDALDNFLPRECGIIFNDTKVIKARLYGHKESGGAIELLINRPHDAYAINVYIKGRVRSDTRLIFDGDLSARVIKLYEDGSRDVNFYLRKTLIRFEELLPILEQVGHIPLPPYLGREDNSEDEREYQSVFAHYEGAVAAPTASLHFSDELFEAVCSHHPHAFVTLHVGSGTFKPVEAEVITDHPMHSEYFDISASALELIHSNIPLLSIGTTSTRTVEYHARTAEHHGEANLFLHPHNPPKRINHLLTNFHLPQSTLLMLVASFVGLEETHRIYHEAIDQKYRFFSYGDAMLIL

SEQ ID NO: 64956 - protein, 358 aa, Sumerlaea chitinovorans
  misc_feature (1)..(358): tr|A0A2Z4Y5D5|A0A2Z4Y5D5_9BACT S-adenosylmethionine:tRN A ribosyltransferase-isomerase OS=Candidatus Sumerlaea chitinovorans OX=2250252 GN=queA PE=3 SV=1
MRTDLFDYHLPKELIAATPAEKRDASRLLVLHRDSQTLEHAVFARLGNYLTSGDLLVINDSRVIRARLHGKRMATGGHVELLLVERHSPASNAGKDTWLVLCRPARKLKPGEMVYFANKRLTARILHYAGEGERIVEFDCPNVLEWLDQIGEVPLPPYIVQRRRELFGPRHEVLPEDVERYQTVYAREPGSVAAPTAGLHFTTELMESLKQQGVRFARVTLHVGPGTFKPVEAEEIEQHRMHVEHYSIPNETVTAIEETRRMGKRVVAVGTTVVRTLEAAADEEGRVQSGDGATDLMIVPGYRFRVIDALITNFHLPRSTLLMLVAAFAGREFVLRAYEEAVAQRYRFYSYGDAMLIL

SEQ ID NO: 64957 - protein, 371 aa, Sumerlaeota bacterium
  misc_feature (1)..(371): tr|A0A353GHX2|A0A353GHX2_9BACT S-adenosylmethionine:tRN A ribosyltransferase-isomerase OS=Candidatus Sumerlaeot a bacterium OX=2107588 GN=queA PE=3 SV=1
MDTVALSFELPEELIARHPAARREDARLMLVEPGATEFPERTFSGFPDLLRDDDLIVFNNTRVFPARLLGWRMPDLGKVEALLLHPESPEQNLWWAMVRPGRKIKMGDRLVFSTNRLEAEVVSYGDPGGGERLLKFTCDGDWWEMLEAVGHTPLPPYILRARKQLEAAGDPQTSWHNVPDLPEDRERYQTVFAGSAPESVAAPTAGLHFSTDVMERIAARGIEQVFVNLRIGAGTFQPIKTERVEDHPIHAEYYQLTAEAAAAIQRAKDQGRRVVAVGTTVVRALESAAQEGLPLDARSGWTRLFIRPGFDFKLVDALLTNFHLPMSTLLLLVYAFAGTETVQAAYAEAIRRKFGFFSYGDCMFMPTRTDH

SEQ ID NO: 64958 - protein, 103 aa, Sungbacteria bacterium
  misc_feature (1)..(103): tr|A0A1G2LCN9|A0A1G2LCN9_9BACT S-adenosylmethionine:tRN A ribosyltransferase-isomerase OS=Candidatus Sungbacter ia bacterium RIFCSPLOWO2_01_FULL_59_16 OX=1802280 GN=A3 B37_02390 PE=3 SV=1
MRPINTDFRPIIAVGTTVVRALESAANARGYLTRRQGSTELFIRPGYRFRVVSDVITNFHIPESCLTMLVATFVGHERLLRLYRRAIHERFRLFSFGDGMIVT

SEQ ID NO: 64959 - protein, 360 aa, Symbiobacter mobilis
  misc_feature (1)..(360): tr|U5NB44|U5NB44_9BURK S-adenosylmethionine:tRNA ribosy ltransferase-isomerase OS=Candidatus Symbiobacter mobil is CR OX=946483 GN=queA PE=3 SV=1
MPPLTLEDVDFDLPADRIAQYPAAQRSQSRLLDASGSTMVDRVFDELPTLLREGDLLVCNDTRVLRARLYGHKPTGGQIELLVERVLGGQEVAAHLRCRRKPQPGAQFSLVSAHHPLEPLHATMLGRWPDEHGPLFRLALHDEADSDPYAILERHGHVPLPPYIARPDAAPDDTRYQSVFARSPGAIAAPTASLHFDEALLQRLDDRGIERAFLTLHVGAGTFQPVQCTDVSQHRMHSEWYEVPAATREAVAACRRRNGRVVAVGTTCVRALESWAHTGQPQGETRLFILPGFDFRTVDLLVTNFHLPHSTLLMLVAAFAGLDRIRVAYRHAIDNRYRFFSYGDAMLLARMSSTTLPTLP

SEQ ID NO: 64960 - protein, 368 aa, Synechococcus spongiarum
  misc_feature (1)..(368): tr|A0A1T1D710|A0A1T1D710_9SYNE S-adenosylmethionine:tRN A ribosyltransferase-isomerase OS=Candidatus Synechococ cus spongiarum LMB bulk15N OX=1943583 GN=queA PE=3 SV=1
MNQDNHLSNYDYALPEEAIAQAPAEPRHSARLLCVEPDAGWKDATMAQWPALLRAGDLLILNDTRVLKARLKARRASGGLVELLVLEPHRDDTWLGLVKPGQRVRPGEWLQIQPPPGQLPVAVQVLGRHGDGGARLLRFATPELEAMEQFLNTYGELPLPPYIRAACQDEQRYQTTYARRPGAVAAPTAGLHLSRELLQRLNVAGVASATVTLHVGLGTFQPLQTEDLGQVRLHGERVEISPATVSAVQRTQAQGGRVLAVGTTSCRALEGVAALHGGQLQPYSGTVELCIRPGFRFQVMDGLLTNFHLPRSSLLLLVSALVGRQRLLTLYQEALTRDYRFYSFGDAMWIPPEAVLGSARPQGFSPPP

SEQ ID NO: 64961 - protein, 368 aa, Synechococcus spongiarum; identical to SEQ ID NO: 64960
  misc_feature (1)..(368): tr|A0A0G8AU76|A0A0G8AU76_9SYNE S-adenosylmethionine:tRN A ribosyltransferase-isomerase OS=Candidatus Synechococ cus spongiarum 15L OX=1608419 GN=queA PE=3 SV=1

SEQ ID NO: 64962 - protein, 340 aa, Syntrophonatronum acetioxidans
  misc_feature (1)..(340): tr|A0A424YHB0|A0A424YHB0_9FIRM S-adenosylmethionine:tRN A ribosyltransferase-isomerase OS=Candidatus Syntrophon atronum acetioxidans OX=1795816 GN=queA PE=3 SV=1
MELSEFDYYLPPELIAQEPVPERSGSRLLVAKRDKGIIEHTWFQEIIEYLVPGDTLVLNDTRVIPARLFGVRKDTGGKVEIILLKRRQENRWEVLVKPGKRARPGIEIVFGDGKLTARVEDYTEEGGRVLSFHYQGVFEEVLSELGEMPLPPYIKKKLEEPERYQTVYAREEGSAAAPTAGLHFTPELLKKIKEKGVELIYLTLHVGLATFRPVKVDRIEEHKMHEEYYQVSPSAAHALNKALAAGSRIIAVGTTSCRVLETIRREEGFIPGKGWTDIFIYPGYQFKAVDGLLTNFHLPRSTLIMLVCAFGGKDLVMKAYQEAMERRYRFYSFGDAMLIL

SEQ ID NO: 64963 - protein, 344 aa, Syntrophosphaera thermopropionivorans
  misc_feature (1)..(344): tr|A0A4R5JPA8|A0A4R5JPA8_9BACT S-adenosylmethionine:tRN A ribosyltransferase-isomerase OS=Candidatus Syntrophos phaera thermopropionivorans OX=2593015 GN=queA PE=3 SV= 1
MVDLLDLNSYDYYLPQELIAQYPLKDRSSSRLMHIDRKTGTISHLYFRDLVDLLAPGEVLVINNSKVIPARLFGYKDNGTKIEILLLNHLDGSKWKCMVHPGKRLKREQVLRFSPQLEGWVSLPDEDGLRVIEFNNPDTYWNEIERIGHIPLPPYIKREDKAEDRQTYQTVYAEEAGSVAAPTAGFHFTEEMLSQLKEKGIKIVNIILHIGMGTFVPIKTQRIDQHKMHSEFCTIPEETANVINKAKLEGRRVIAVGSTSIRTLESFWNNGTLMSGSKWTDIFIYPGKNIQVADALITNFHLPKSTLLMMVSAFAGYELTRKAYEIAVQEHYRFFSYGDAMYIS

SEQ ID NO: 64964 - protein, 353 aa, Tachikawaea gelatinosa
  misc_feature (1)..(353): tr|A0A090AJW2|A0A090AJW2_9ENTR S-adenosylmethionine:tRN A ribosyltransferase-isomerase OS=Candidatus Tachikawae a gelatinosa OX=1410383 GN=queA PE=3 SV=1
MHISKFFFDLPTKLIARFPQKKRSSCRLLILNKISGKITHTKFYDIVNKINEGDLLIFNDTKVIPARIYGHKNTGGKIEILVERILDNKNILVHIYSKRPLSLGSKIFLQKRKNSTQYIEAIIIKIIKNEAIISFSKNNFNTLDILYEVGHIPLPPYIKRIDEKIDYEYYQTIYGKNIGSIAAHTAGLHFDQELLKKIKKKNIETAFITLHIGIGTFKSIRKTNIKYHTMHDEYLNISQETINAILSCKARGNKIIAVGTSTVRALESIAINNNQNFVPYSGKTNIFIYPGWKYRVIDALITNFHLPKSTLIILVSAFVGRQLLMRTYQEAIKKKYLFFSYGDAMFISNDPHI

SEQ ID NO: 64965 - protein, 353 aa, Taylorbacteria bacterium
  misc_feature (1)..(353): tr|A0A1G2MDS4|A0A1G2MDS4_9BACT S-adenosylmethionine:tRN A ribosyltransferase-isomerase OS=Candidatus Taylorbact eria bacterium RIFCSPHIGHO2_02_FULL_43_32b OX=1802306 G N=queA PE=3 SV=1
MSTEDNKYSYELPEELIAKKPAEPRDSARLFIFDTKSGRIDFDIFSNLNKYLPEHSLLVFNNTKVVPARINLYKKTGGKVEILFLVNEWGGGDTSFKVMADRRLEIGDELSIGEKFRKDFLVEKQESHFFWLRPNFEANKIFEILEEFGMTPIPKYIKGTDISEKELREKYQSIFAKNPSSVAAPTASLHFTSGLLAKLSNAGFDRTFVTLNVGLGTFAPLTDENFKKESLHSESFMIKDDAVESIRDAKSNRNPVVAVGTTVARTLESAASHIFEMNCPISGSTNIFIHPPFNFKVVDCLVTNFHLPNSSLMMMVEAFLENKKSPLHLVELYKKAIKERFRFYSFGDGMLIK

SEQ ID NO: 64966 - protein, 139 aa, Taylorbacteria bacterium
  misc_feature (1)..(139): tr|A0A1G2PBD5|A0A1G2PBD5_9BACT S-adenosylmethionine:tRN A ribosyltransferase-isomerase OS=Candidatus Taylorbact eria bacterium RIFCSPLOWO2_12_FULL_47_20 OX=1802335 GN= A3G59_03405 PE=3 SV=1
MAFGLAAKECPGDFGVFVCSYLLRESSVIITSEQKAGTPVIAVGTTVTRTLESVARDILSGPEGTDIRGSTELFIRPPFDFKIIDGLITNFHHRGTSLLYLVDSFLRHKKSKRSVVSLYEEAVRERMRFFSFGDVMLIV

SEQ ID NO: 64967 - protein, 345 aa, Tectomicrobia bacterium
  misc_feature (1)..(345): tr|A0A1F7T177|A0A1F7T177_9BACT S-adenosylmethionine:tRN A ribosyltransferase-isomerase OS=Candidatus Tectomicro bia bacterium RIFCSPLOWO2_12_FULL_69_37 OX=1802343 GN=q ueA PE=3 SV=1
MRPEDFDYALPPEAIARYPAPEREGARLLVLPKKDGPPAHRAIRDLPRFLRPGDLLVLNDTRVMPWRLMGKRASGGKVEVLLIEREGGGVFRALVSANRPLPEGERILLLDGREAVLGPQGRERRLAFAEPGGLEAWIGERGETPIPPYLGRPAEPLDRERYQTVYARVPGAAAAPTAGLHLSEGLLAELEAAGVERAALTLHVGPGTFRPVKAARVEDHEIEEEACCLPAGTARRIGETRERGGRVVAVGTTVVRTLEWAAMEAEREGGGALLREGAGRAALFIRPGHRFRIVDALLTNFHLPRSTLLMLVCAFAGRERVLAAYEAAREAGYRFYSYGDAMLIA

SEQ ID NO: 64968 - protein, 345 aa, Tectomicrobia bacterium
  misc_feature (1)..(345): tr|A0A1F7T6A6|A0A1F7T6A6_9BACT S-adenosylmethionine:tRN A ribosyltransferase-isomerase OS=Candidatus Tectomicro bia bacterium RIFCSPLOWO2_02_FULL_70_19 OX=1802342 GN=q ueA PE=3 SV=1
MRPEDFDYALPPEAIARYPAPEREGARLLVLPKKDGPPAHRAIRDLPRFLRPGDLLVLNDTRVMPWRLMGKRASGGKVEVLLIEREGGGVFRALVSANRPLPEGERILLPDGREAVLGPQGRERRLAFAEPGGLEAWIGERGETPIPPYLGRPAEPLDRERYQTVYARVPGAAAAPTAGLHLSEGLLAELEAAGVERAALTLHVGPGTFRPVKAARVEDHEIEEEACCLPAGTARRIGETRERGGRVVAVGTTVVRTLEWAAMEAEREGGGALLREGAGRAALFIRPGHRFRIVDALLTNFHLPRSTLLMLVCAFAGRERVLAAYEAAREAGYRFYSYGDAMLIA

SEQ ID NO: 64969 - protein, 348 aa, Tenderia electrophaga
  misc_feature (1)..(348): tr|A0A0S2TBS3|A0A0S2TBS3_9GAMM S-adenosylmethionine:tRN A ribosyltransferase-isomerase OS=Candidatus Tenderia e lectrophaga OX=1748243 GN=queA PE=3 SV=1
MQRSDFHYDLPPRLIAQHPLAERGASRLLVLDGMTGALADRRFADIVEYLQPGDVLVFNDTRVIPARLFGNKESGGRVEVLVERILDAHRVLAHVRASKAPQPGTRLLLEDTVEAEVTGRRDDLFELCFLDQRPVSEILEAVGHMPLPPYIERADEADDQRRYQTVYARRPGAVAAPTAGLHFDEVLLEQLRARGIETVFVTLHVGAGTFQPVRVDDLAEHKMHAEYVEVSAAAAAAIKRARAAGGRVVAVGTTAVRSLEAAAHSGVLQAFSGETRLFITPGYQFKAVDLLITNFHLPESTLLMLVSALGGYAQVMAAYAHAVDQEYRFFSYGDAMLVMPAPQALAGQ

SEQ ID NO: 64970 - protein, 344 aa, Terasakiella magnetica
  misc_feature (1)..(344): tr|A0A1C3RLM8|A0A1C3RLM8_9RHIZ S-adenosylmethionine:tRN A ribosyltransferase-isomerase OS=Candidatus Terasakiel la magnetica OX=1867952 GN=queA PE=3 SV=1
MKVDDFDFDLPRELIAQRPVSPRDASKLLRIDADLSDHIFAELPDHLKEGDLLVFNNTRVIPARLKGKRGEANVEVTLHKHEGAGTWIAFAKGAKKLKPGQTIIFDADFSADVLDKDGGEVTLKFNRAGAALMEALEAHGGMPLPPYIKREGLADERDKSDYQTVFAKEEGAVAAPTAGLHFTPDLLQKLKDKGVKFAYVTLHVGAGTFLPVKVDDVADHKMHAEFGVVDQATSDMINDTHAAGHRVVAVGTTSLRLLESAAPEKGRMAAFEGDTDIFITPGYEFKIVDMLTTNFHLPRSTLFMLVSAFAGFERMKKAYSYAIEHGYRFYSYGDGSLLSRHDQI

SEQ ID NO: 64971 - protein, 354 aa, Termititenax aidoneus
  misc_feature (1)..(354): tr|A0A388TD32|A0A388TD32_9BACT S-adenosylmethionine:tRN A ribosyltransferase-isomerase OS=Candidatus Termititen ax aidoneus OX=2218524 GN=queA PE=3 SV=1
MTGEFSAELYKYELPPELIAQTPAARREDSRLLILRRKNNSLEHKYFRDIVDYLEPQDLLVFNDTKVLPARLLGRKETGARCEVFLLKQLDAARWEALVKPGRRLTSGSVVRFGADFSAVILEKLSDGRRRVEFSFAGDFWEKLRCYGQTPLPPYIKTVTERSRSDRLALAERYQTVYAKTPGAAAAPTAGLHFSPELLDKIEAKGTAKTFVTLHVGTGTFQPLQTADIREHRMHAEEYFFPEQAMQAVRECRARGGRVIAVGTTSARVLETAAEQILRGEKISAPQGSTSLYIYPEYQFKIVDALITNFHLPGSTLLLLVSALAGREKILAAYQEAIRQRYRFFSFGDAMLIL

SEQ ID NO: 64972 - protein, 349 aa, Termititenax persephonae
  misc_feature (1)..(349): tr|A0A388TJ29|A0A388TJ29_9BACT S-adenosylmethionine:tRN A ribosyltransferase-isomerase OS=Candidatus Termititen ax persephonae OX=2218525 GN=queA PE=3 SV=1
MSGEFSADLYDYHLPPELIAQRPAARREDSRLMVLSRQGDALEHKYFRDLPGYLTPADLLIFNDTKVLPARLSGQKDSGARCELLLLKRLGEKQWEALVKPGRRLPAGSTVHFGAELSATVLEILPAGRRRVELCYPGDFWAVLDRHGQTPLPPYINQKPTKELAERYQTVYAREPGAAAAPTAGLHFSTDLLAKIKAKGVATAFVTLHVGLGTFRPLQTGDIREHKMHAEEYSLPAETVRAIAECRARAGRVVAVGTTAARVLETWAQEAANDANDYAPRHGQTAIYIYPGYRFKAVDALITNFHLPRSTLLLLVSALAGRAPLLQAYQEAVRQKYRFFSFGDAMLIK

SEQ ID NO: 64973 - protein, 346 aa, Thermochlorobacter aerophilum
  misc_feature (1)..(346): tr|A0A395LVS0|A0A395LVS0_9BACT S-adenosylmethionine:tRN A ribosyltransferase-isomerase OS=Candidatus Thermochlo robacter aerophilum OX=1868324 GN=queA PE=3 SV=1
MRLSEFRYPLTKSAIATVPKEPRDKCRLMVLDRRKKTITDAKFTDIVDYLQKGDVLVVNDTKVFPAKLYGHKEKTSAKIEVFLLRELNKQAGLWDVLVEPARKVRVGNKIYFPEDLVAEVVDNTTSRGRTIRFLNPEVDIFQVVERIGQMPIPPYIKREPDEKDKERYQTVYARVPGAVVAPASGLHFTIELLNKIKRKGVEILSLTLHSGLGTFRPVEVEDISKHKMESEYYNLPYSTAQRINEVKTERSGRVVAVGTSVLRVIEANATVEGRIKFGEGWTDKFIYPPYDFKVVDMLITNFQQPETTPLMAVSAFAGHEFLMKAYRQALKTGYRFLAYGDAMLIY

SEQ ID NO: 64974 - protein, 425 aa, Thermochlorobacter aerophilum
  misc_feature (1)..(425): tr|A0A395M1C8|A0A395M1C8_9BACT S-adenosylmethionine:tRN A ribosyltransferase-isomerase OS=Candidatus Thermochlo robacter aerophilum OX=1868324 GN=queA PE=3 SV=1
MVPEIPEIAIDDYTYDLPEERIASMPLVERDQSKLMVVDAKTGAISHHRFYNLPELLPPQTLLIRNNSKVIAARLSLRKQSGGRVEVLCAQPLEPSNELPSALLARGSTKWKCLLHGRNLKPLMSLSASVVYNASPLLLKATLLEKGAESTVCFEWQPKELTFLEVLEAVGKVPLPPYLNREPDEQDKIRYQTVYAKNEGSVAAPTAGLHFTQAIYERLQQKGVDVQELTLHVGIGTFKPVHERDARKHDMHAEQIHVPKQTLLSLYQHLVRQEPVVAVGTTSLRVLESLYWFGAKLSRQQMPVWRAKTMNLEQWEAYSLSQESAISPVQSLETVLNWLDKHGLESVNGSTQLMIVPGYDYKVCDGLITNFHQPRSTLILLVAAFLGGDLWKKVYHEALQNDYRFLSYGDASLLWRRSALPSKSA

SEQ ID NO: 64975 - protein, 346 aa, Thermochlorobacteriaceae bacterium
  misc_feature (1)..(346): tr|A0A081SHF5|A0A081SHF5_9BACT S-adenosylmethionine:tRN A ribosyltransferase-isomerase OS=Candidatus Thermochlo robacteriaceae bacterium GBChlB OX=1519464 GN=queA PE=3 SV=1
MRLSEFRYTLPKTAIATVPKEPRDKCKLMVLDRRQKTIQDAKFPDITNYLKKGDVLVINDTKVFPARLYGHKEKTSAKIEVFLLRELNKQVGLWDVLVEPARKVRVGNKIYFPDDLVAEVVDNTTSRGRTIRFLNSDIDIFQAVERIGLMPIPPYIKREADDKDKSRYQTVYARVPGAVAAPAAGLHFTTELLTKIKRMGVEIISLTLHAGLSTFRPVEVEDISKHKMDSEYLNLPYSTAQRINEVKGARSGKIYAVGTTVCRALEANATVDGRIKFGEGWTDKFIFPPYDFKVVDGLITNFHQPESTLMMVASAFAGHEFLIKAYKQALKSGYRFLAYGDAMLII

SEQ ID NO: 64976 - protein, 424 aa, Thermochlorobacteriaceae bacterium
  misc_feature (1)..(424): tr|A0A081SDI7|A0A081SDI7_9BACT S-adenosylmethionine:tRN A ribosyltransferase-isomerase OS=Candidatus Thermochlo robacteriaceae bacterium GBChlB OX=1519464 GN=queA PE=3 SV=1
MTQAHFFSNISLSDYDYDLPAECIAKFPLAERDQSKLLVADALTGRLEHRRFFELPDLLPSKALLICNNTKVISARLHLQKQSGGKVEILCIESAEASPDNAFGLMETDGAVWKCLIGGRVREGMELSKAGLFNGKPIFLSAKILPKTNGETQVRFQWSPQCLPFVAVLETLGQVPLPPYLKRDADESDKVRYQTVYAKQGGSVAAPTAGLHFTDAVFDRLREKSIDIAELTLHVGLGTFKPIESADVADHAMHGERIAVPKDTLNKLLAQLERRKDGGGKMIAVGTTSVRTLETLYWFGVRLAKKDGDARNSNHIMLSQWDSYRLSDGGTLPDASESLKTLVEWAEQRGLSTISGETQLFIAPGYQYALCDGIITNFHQPHSTLILLVATFLGKSLWKKVYDEALQNGYRFLSYGDASLLRRW

SEQ ID NO: 64977 - protein, 356 aa, Thermofonsia Clade
  misc_feature (1)..(356): tr|A0A2M8NTK2|A0A2M8NTK2_9CHLR S-adenosylmethionine:tRN A ribosyltransferase-isomerase OS=Candidatus Thermofons ia Clade 2 bacterium OX=2364211 GN=queA PE=3 SV=1
MRLSDFDYDLPDHFIAQTPLEPRDSSKLMVINRADKTIQHRIFREITDYLNPGDVLVMNNTRVIPARIAGFRADTGGKLEVLLLRQLDETTWRVLIGGKQAKIGMIIGFPKTDITAEVLEATEDEAERVIRFSQPVNDLLVEIGDTPLPPYIHTRLDDAERYQTVYSRHDGSAAAPTAGLHFTPELLLKLRDKGVIFAYCTLHVGLDTFQPVKVDNIVDHKIHAEEAMLTAENAEIINKAKLAGGRIIAVGTTTTRTLETAGILSAGGDPSNPAALGDVCPWKPVVAFRADTQLYIYPSYKWRVVDAMITNFHLPKSSLLMMISAFAGRELVFEAYETAKRENYRFFSFGDAMLIL

SEQ ID NO: 64978 - protein, 344 aa, Thermofonsia Clade
  misc_feature (1)..(344): tr|A0A2M8QEP7|A0A2M8QEP7_9CHLR S-adenosylmethionine:tRN A ribosyltransferase-isomerase OS=Candidatus Thermofons ia Clade 3 bacterium OX=2364212 GN=queA PE=3 SV=1
MHISELDYELPPELIAQHPVEPRDASRLLVCDRATQTHQHRHFYDLPEFLRPGDLLVANDTSVINARLHGRKPTGGQVEVLLLRKLDDVTWEALVGGRNVRQITFPAGEDGQQLSAEVVARSGEAAFVVRFSAPIEPHLDALGETPLPPYIREQLRDPARYQTVYARVAGSAAAPTAGLHFTPQLLERIQAMGVQIAFVTLHVGLDTFKPIEEETVEAHKIHTEWCELPPATAEAINDTRARGRRIIAVGTTSARVLESGSQTLAQASHSRLVQPFSGFTSLYITPGYKWKVVDALITNFHLPRSTLLAMIGAFMGMDFMRRTYARAIRERYRFYSFGDAMLIL

SEQ ID NO: 64979 - protein, 346 aa, Thermokryptus mobilis
  misc_feature (1)..(346): tr|A0A0S4MY64|A0A0S4MY64_9BACT S-adenosylmethionine:tRN A ribosyltransferase-isomerase OS=Candidatus Thermokryp tus mobilis OX=1643428 GN=queA PE=3 SV=1
MKLSDFSYQLPKNLIAKYPAEPRDSARLLVLDRKSRKIEDKVFTDIVNYLDPGDSLVINVSKVFPARLIGRKEKTGAKIEILLLRELNPEEHLWDVLVDPARKVRIGNKIYFGENDEVYCEVIDNTTSRGRTIKFHYEGDFFRFVEKYGQVPLPPYIKRPPQEEDKEWYQTVYASVVGSVAAPTAGLHFTTRLLKRIEKKGVKIVPIILHIGIGTFRKVEVEDLSKHRMDSEYFEISPESAKLINETIDKKKSVVAVGTSTVRALESSVTADAHVKPYKGWTDKFIYPPYEFKIVDKLITNFHMPESTPLILTAAFAGLDLLMEAYRHAIKNGYRFLSYGDAMLII

SEQ ID NO: 64980 - protein, 345 aa, Thiodiazotropha endoloripes
  misc_feature (1)..(345): tr|A0A1E2UQR5|A0A1E2UQR5_9GAMM S-adenosylmethionine:tRN A ribosyltransferase-isomerase OS=Candidatus Thiodiazot ropha endoloripes OX=1818881 GN=queA PE=3 SV=1
MRLSDFDYFLPDELIAQYPPEERGSSRLLVLPPNQSSPEDRQFSELPGLLSAGDLLIFNDTRVMKARLHGKKETGGRVEVLIERVTEPRRALAQVRASKSPKINSKILLDDDARVEVIGREGEFFQLRALDRDFHALMDQQGHMPLPPYITRQDEGVDESRYQTVYAEKRGAVAAPTAGLHFSNEMLAELAEKGVNQATVTLHVGAGTFQPVRVDDLDQHVMHREYAEVDRAVCDLITKTKQQDGRVIAVGTTSVRSLESAAQTGVLQPFHGDTRLFIRPGFQFNVVDAMITNFHLPQSTLMMLVSAFSGYERLMGAYRHAVEQRYRFFSYGDAMFLTPGESSSA

SEQ ID NO: 64981 - protein, 342 aa, Thiodictyon syntrophicum
  misc_feature (1)..(342): tr|A0A2K8UF22|A0A2K8UF22_9GAMM S-adenosylmethionine:tRN A ribosyltransferase-isomerase OS=Candidatus Thiodictyo n syntrophicum OX=1166950 GN=queA PE=3 SV=1
MKRSDFHFDLPPGLIAQRPLAQRSASRLLALDGDGTTPRDLLFTDLPEQLRPGDLLVFNNTRVMRARLFGHKDSGGAVEVLIERLLGPAQAQAQVRASKSPRPGSLILLGGGGRLEVLGRDADLFLLRALDQPFPLLMQTQGHVPLPPYIERPDEDADAERYQTVYGSRTGAVAAPTAGLHFDQPLLERLAALGIARAEVTLHVGAGTFQPVRVEDLDQHRMHAEWLDVDPRVCAQVAATRAAGGRVVAVGTTSVRSLESAAAHGELEPFQGDSRIFIRPGYRFQVVDAMITNFHLPESTLLMLVCAFAGMEPIRAAYRHAIAGRYRFFSYGDAMFLTRRDQ

SEQ ID NO: 64982 - protein, 344 aa, Thioglobus sp.
  misc_feature (1)..(344): tr|A0A520MKZ2|A0A520MKZ2_9GAMM S-adenosylmethionine:tRN A ribosyltransferase-isomerase OS=Candidatus Thioglobus sp. OX=2026721 GN=queA PE=3 SV=1
MYFASDFDYSLPESLIAQEPPANRGDSRLLIVPPADGALIDAGFEDLGSRLRQGDLLVVNDTKVLPARLFGHKAETGGKFELMLERILSSSRALVQLKTSKTPPAGTRLKTENGSDLEIIGRENTFFIIECLSGESFVALLEREGVVPIPPYIKRDVVETDTDRYQTVYASDSGAVAAPTAGLHFSARHLDALQAKGVELARVTLHVGAGTFQPLKSESLNDHMMHSEFFNVGSEVVDAVRRTRCRGGRVVAVGTTVVRSLEAAAWQGDLKETNEQTHLFIQPGFRFRVIDMLITNFHLPRSTLLVLVSAFAGMERIRQTYQHAIANQYRFFSYGDAMLLEARQ

SEQ ID NO: 64983 - protein, 347 aa, Thioglobus sp.
  misc_feature (1)..(347): tr|A0A432TLE2|A0A432TLE2_9GAMM S-adenosylmethionine:tRN A ribosyltransferase-isomerase OS=Candidatus Thioglobus sp. OX=2026721 GN=queA PE=3 SV=1
MKLTDFDFELPKSLIAQNPPKNRTDSRLLVPFMPSFGVQSTIIDSVFHQIESFIKPGDLLVMNNTRVIPARLFGHKDSGGKVEIMIERLLNNRQVLAMVKASRAPQIESFITLENGDKAQVVSKEDGFYTLDFLTDSLLDLLDNVGHIPLPPYIERSDEQADLERYQTVFAKHEGAVAAPTAGLHFDDELLSSLKDKGISHCFVTLHVGAGTFQPVKVDEITDHKMHSEYFEIDQTTVDQINQTKKNGGRVIAVGTTAVRSIESAAKSGKLKAVQEETDIFIYPGYEFKVVDMMITNFHLPKSSLLMLVSAFIGRERMMEIYQHAIKEKYRFFSYGDAMLLTREKTS

SEQ ID NO: 64984 - protein, 227 aa, Thiomargarita nelsonii
  misc_feature (1)..(227): tr|A0A176RSS1|A0A176RSS1_9GAMM S-adenosylmethionine:tRN A ribosyltransferase-isomerase (Fragment) OS=Candidatus Thiomargarita nelsonii OX=1003181 GN=THIOM_005595 PE=3 SV=1
MIAQHPLKSRTDSRLLHITPKSGQFQDRHFVDFPSLLVPGDLLVFNNTRVIPARLFGHKASGGKIEILVERVLDDKRVLAQVRASRSPQIGARLYLDNDVNLIVLRRVENFFELQFERPVYEILQAIGHIPLPPYIERADTAIDSRRYQTVYAQQIGAVAAPTAGLHFDEAMLERIDAMGVESAFVTLHVGAGTFASIRVDDIRQHTMHSERLQVSAEVCEQVKATR

SEQ ID NO: 64985 - protein, 343 aa, Thiomargarita nelsonii
  misc_feature (1)..(343): tr|A0A0A6RWC6|A0A0A6RWC6_9GAMM S-adenosylmethionine:tRN A ribosyltransferase-isomerase OS=Candidatus Thiomargar ita nelsonii OX=1003181 GN=queA PE=3 SV=1
MQRTDFSFNLPSDLIAQHPLKSRTDSRLLHIMRGEFEDRHFVDFPSLLAPGDLLVFNNTRVIPARLFGHKASGGQIEILVERVLDDKRVLAQVRASRSPKNGARLYLDNDVNLIVLRRVENFFELQFERPVYEILQAIGHIPLPPYIERADTAIDSRRYQTVYAQEIGAVAAPTAGLHFDEAMLERIEAMGVESAFVTLHVGAGTFASVRVDDIRQHSMHSERLQVSAEVCEQVKATRARGGRVIAVGTTSVRALETASAEGVIKPYEGETRLFITPGYRFVSVDALLTNFHLPESTLLMLVCAFAGQSLVLAAYRHAVAQQYRFFSYGDAMFINQTPTSHTH

SEQ ID NO: 64986 - protein, 319 aa, Tokpelaia sp.
  misc_feature (1)..(319): tr|A0A367ZYH2|A0A367ZYH2_9RHIZ S-adenosylmethionine:tRN A ribosyltransferase-isomerase OS=Candidatus Tokpelaia sp. JSC189 OX=2079010 GN=queA PE=3 SV=1
MADLPALLQPGDALVFNDTRVIPARLEGEYHHDGVVVRIGATLHMRTALDGWKAFVRPAKRLQRGGTIIFSGHGIELVAAVAEKGDAGEILLIFDKSGMALDAAIKLVGRMPLPPYIAARRAEDAQDRIDYQTVYAREEGAVAAPTAGLHFTIDLLKKLAEHGIEEHFITLHVGAGTFLPVRVDDTENHKMHAEIGHIDAETAERLMAVKAQGGQIIAVGTTTLRLLESATSEIGQLGAWSGATDIFITPGYQFRFVDRLITNFHLPRSTLFMLVSAFSGLETMKAAYKHAIENDYRFYSYGDASLLDRFSESRNLALR

SEQ ID NO: 64987 - protein, 357 aa, Tokpelaia hoelldoblerii
  misc_feature (1)..(357): tr|A0A1U9JUK1|A0A1U9JUK1_9RHIZ S-adenosylmethionine:tRN A ribosyltransferase-isomerase OS=Candidatus Tokpelaia hoelldoblerii OX=1902579 GN=queA PE=3 SV=1
MNVDLFDFDLPEENIALRPAVPREAARLLHVTPPRGFDDFSVGDLLSLLRPGDALVFNDTKVIPARLEGERYRDGAVAHIGVTLHMRVAADRWKAFVRPARRLRQGEKIVFARHDTVLTAEVAEKGEAGEMLLVFDRSGTALDSAVAVLGHMPLPPYIAARRAEDARDASDYQTVYAREEGAVAAPTAGLHFTESLLEAIKQHGVEEHFVTLHVGAGTFLPVKVADTDSHKMHAEIGHIDAETARRLMAVKARGGRIVAVGTTALRLLESAANEQGELKAWSGATDIFMTPGYQFRFVDRLITNFHLPRSTLFMLVSAFSGLETMRAAYAHAIKNGYRFYSYGDTSLLERADNKSVK

SEQ ID NO: 64988 - protein, 340 aa, Uhrbacteria bacterium
  misc_feature (1)..(340): tr|A0A3A0FEX1|A0A3A0FEX1_9BACT S-adenosylmethionine:tRN A ribosyltransferase-isomerase OS=Candidatus Uhrbacteri a bacterium OX=2053634 GN=queA PE=3 SV=1
MKTELFDYPLPKDRIAQKPIRPRDHSRLMILDRMTGDIWHRHFFDIIEYLKPGDLLVLNITKVFKARLLGSTDSGPVELFLLHPDNSRVWLALGKPGKKLPSGSRITFADGMTCRIHAKRNNGTLEVDFDAMPKEVIAWANERGHIPVPPYIGTEPEMLDEYQTVYAESVGSVAAPTAGFHFTPELIGRLKHAGIDVAAVTLHVGMGTFRPMRTETLKEHHMHEEWVSVPRTTAEKIRETKERGGRVIAVGTTTVRALESGMQEGFTSLFITPGYSFKIVDGLITNFHLPKSTLLVLVSAFLGEQHATTDWGRTTLLRAYATAIREGYRFYSFGDAMLIL

SEQ ID NO: 64989 - protein, 354 aa, Uhrbacteria bacterium
  misc_feature (1)..(354): tr|A0A1F7TMF7|A0A1F7TMF7_9BACT S-adenosylmethionine:tRN A ribosyltransferase-isomerase OS=Candidatus Uhrbacteri a bacterium RIFCSPHIGHO2_01_FULL_63_20 OX=1802385 GN=qu eA PE=3 SV=1
MPTPVSLYDYALPAERIAQSPVEPRDSSRLLALDRKTGKTEHKVFRDIVDELKAGDLLVMNDSKVFKARLRGKRFKKEYEVFLLRPVPHEFVMEGASLWHALVRPGKLVHVGNDIEISGLKPKVVEKKPDGSVVLAFPIPESEVFAFCDQFGEVPVPPYVEKAPEDASKYQTVYAKETGSVAAPTAGFHFTPEIIEKLKGKGVEFQFVTLHVGLGTFRPVKAETLEEHVMHSEYVTISSETAQAINKAKAEGRRVIAVGTTTVRALEGVASTQPPAPSPQLPTNGYSGDVNMFITPGFDFKVIDALITNFHLPKSTLLVLVSAFAGREHVLAAYKEAIEKEYRFYSFGDAMFIR

SEQ ID NO: 64990 - protein, 419 aa, Uzinura diaspidicola
  misc_feature (1)..(419): tr|L7VFV6|L7VFV6_9FLAO S-adenosylmethionine:tRNA ribosy ltransferase-isomerase OS=Candidatus Uzinura diaspidico la str. ASNER OX=1133592 GN=queA PE=3 SV=1
MNCFEQIEIKTSDLNFKIPSKLIVEYPSKERDESRLMVIHRKTGKIEHKLFKDLINYFDKEDVIILNNTKVFPAILYGYKEQTKAKIKVFLLRVLDKKNKILDVLVEPARKIRIGNKIFFRKKTHKYNYNLVAEVIDNTTSRGRILRFLSDLSYEEFQKQLYAIGKTPLPKYIKREVDKKDMERYQTIYAKEEGSIVAPAAGLHFSKHLLKKLEIKGISLAEITLHIGLSAFSSIEVEDLSKHKMDSEKANIKNNICKIINTAIDKKKRICAVGNSVMRTLETTVSVSKHLNPFDGWTNKFIYPPYNFSIANSLISNLHMPKSTSFIMVAAFMGYDLTIKAYQNAVKENTGFIPMEMLCLYYKMMNAIEYKTLHQYKIYEEICSSIYDRNEIKVIPKCYSLYNETKRKTNTSNINISYC

SEQ ID NO: 64991 - protein, 343 aa, Vecturithrix granuli
  misc_feature (1)..(343): tr|A0A081C123|A0A081C123_9BACT S-adenosylmethionine:tRN A ribosyltransferase-isomerase OS=Candidatus Vecturithr ix granuli OX=1499967 GN=queA PE=3 SV=1
MQVADFDYTLPSELIAQYPTEVRDRSRLMVVERTSGKITHTIFSRILEWLTPSDTLVVNDTRVIPARLYGRKLPSGGKVEVFLLRQREEAIWEVLIGGKVRPGTLVEFGDGELTCTIQEKGSAGKGVVVFEKQADLKETLYRLGQVPLPPYIHRAEGVLPGDHLRYQTVYARHEGAVAAPTAGLHFSEQLLDAIREKGIEIVTVTLHVGIGTFQPVKVEHVEEHQIMPEWYELSEQAAERLTQTITHNRRIVCVGTTSTRLIESVYAQHGALAAGNGWADIFIYPGFRFRVTNALITNFHLPKSSLLMLVSAFGGMELMRKAYQEAIDQRYRFYSYGDAMLIL

SEQ ID NO: 64992 - protein, 373 aa, Wallbacteria bacterium
  misc_feature (1)..(373): tr|A0A352M1L4|A0A352M1L4_9BACT S-adenosylmethionine:tRN A ribosyltransferase-isomerase OS=Candidatus Wallbacter ia bacterium OX=2053640 GN=queA PE=3 SV=1
MKNENATNKYDITRYDFVLDDSKIAVKPYLKRDEARLLVFDRAKCAMSSKNFGDIIDYFNSGDMLILNETKVFKARLYGTKNESGARVELLLLKRTGENRFSALVKPSRRIKTGVRLAIDGGLLEAEAVGRADADGAWVFEFEKKELKNRDIFELVDMCGHVPLPPYIIKNKPVKTARGQAYEDDQIDREGYQTVYAKEHGSVAAPTAGFHFTPELLEKLASKGVLIEKIILHVGLGTFKLVEKDDIRDHTMHKEVIKIDKEAYARIIGFIRNKNEKKLFCCGTTSVRTIESIDRVALDAPGGSYCAETDLFIYDGYNFKNADAIITNFHLPRSTLLMMVSAFMGNDKMKMAYDYAINNDFMFYSYGDAMLII

SEQ ID NO: 64993 - protein, 373 aa, Wallbacteria bacterium; identical to SEQ ID NO: 64992
  misc_feature (1)..(373): tr|A0A1F7WP82|A0A1F7WP82_9BACT S-adenosylmethionine:tRN A ribosyltransferase-isomerase OS=Candidatus Wallbacter ia bacterium GWC2_49_35 OX=1817813 GN=queA PE=3 SV=1

SEQ ID NO: 64994 - protein, 351 aa, Wirthbacteria bacterium
  misc_feature (1)..(351): tr|A0A1J5IZH6|A0A1J5IZH6_9BACT S-adenosylmethionine:tRN A ribosyltransferase-isomerase OS=Candidatus Wirthbacte ria bacterium CG2_30_54_11 OX=1817892 GN=queA PE=3 SV=1
MRVDEFDYDLPRELIAQTPAEPRDAARLLVFDRSTGSISHMVFRDLISCLPQGSVLVFNQTKVEPRRLYGEKARTFGKVEVLLLDCLAEDRWECKMSPGMDRGGVIIFTPAHGQKGGASSLEGHVIEVTPEGNRIIEFSRPVREVWGEYGVLPIPPYIKGYHGDEQRYQTVYARAEGSVAAPTAGLHFTEELISQVKRSGHEVEFVTLHVSRDTAFPIMKEETVDQVRVHSENVIVTPEVSHRLNEAKRQGRRIIAVGTTSVRTLEGISRRTGSQALLPEEGYSGAVDLFIHPGFEFGFVDSMITNFHFPRSTLFMLICAFGGRQEMQKVYREAVEERYRFFTFGDAMLIL

SEQ ID NO: 64995 - protein, 363 aa, Woesebacteria bacterium
  misc_feature (1)..(363): tr|A0A1F8DHF9|A0A1F8DHF9_9BACT S-adenosylmethionine:tRN A ribosyltransferase-isomerase OS=Candidatus Woesebacte ria bacterium RIFOXYD1_FULL_41_28 OX=1802550 GN=queA PE =3 SV=1
MKASLFDYSLPKDLIANSQASPRDHSRLMIIDRKTGKINHRKFYDIESFLKPDDVLVLNKTKVFPARIYAQKVILQQGLGHSAGGKVELLFLEEIRPGIWSTLSHPGVKPNTNIVLGKHLLNVVGHEGITAIIDTHLGKIKMLELLRKYGHTPLPPYINSGETEQELRKEYQTVYAKSTGSVAAPTAGFHFTNSLLKKIKSKGVRIEYVTLHVGLGTFAPIKSENIEDHPIHVEHFELEKGTAERLNQARKAGKRIISVGTTTVRVLETCVKKKTGIYQLVPQKGSTNIFIYPPYKFKFTDALITNFHLPKSTLIALVSSFVSYPNTGHKFESFKSSIVGKAYQEAIKENYRFYSFGDSSLII

SEQ ID NO: 64996 - protein, 381 aa, Woesebacteria bacterium
  misc_feature (1)..(381): tr|A0A0G1LFP6|A0A0G1LFP6_9BACT S-adenosylmethionine:tRN A ribosyltransferase-isomerase OS=Candidatus Woesebacte ria bacterium GW2011_GWA2_44_33 OX=1618564 GN=queA PE=3 SV=1
MRGSIWDNSIMNLSDFHFELPEELIGQQAIEPRDSCRLLVVNRSNQSLTHHIFRDLIDLLDDRCVLVLNDTKVFPARLFGTKETGGKIEILLLKQTSTDTFECLVRGKTKDDQKINFDVSFFGTLHHVVISTDLPASKAGVEKSHSITFNLSGLDLIAKINELGKTPLPPYIHSDSKEAELREQYQTVYAREKGSAAAPTAGLHFTPEILNRLQNKGVQIEKLTLHVGLGTFKPVTEEQVATKTLHAESFTLSQDVAKRLNIAKKSGKRIIAVGTTSCRVLETLSDESGNLSGGAGETNIFIQPGYRFKFIDGMITNFHLPSTSLLMLVSALVSFPNSPASPAGGPIHFTNFYDSLMDQAYAEAIKNKYKFFSFGDAMLIV

SEQ ID NO: 64997 - protein, 343 aa, Wolfebacteria bacterium
  misc_feature (1)..(343): tr|A0A1F8DWY9|A0A1F8DWY9_9BACT S-adenosylmethionine:tRN A ribosyltransferase-isomerase OS=Candidatus Wolfebacte ria bacterium RIFOXYB1_FULL_54_12 OX=1802559 GN=queA PE =3 SV=1
MNLTQLLTQYDYALPEARIAQKPASPRDSSKLLTYDRTLGTISETTFAHIGDHLPKNAVLVFNQTKVIPARLRVIKPTGGAARILYVQAVDGLMQAMSDRKLTVGTDVSIANGLFLTVVRQEEKYYFLRPSFPLNKLDIVLHKHGITPIPPYIKESPLKESELRKKYQTVFAKHAGSVAAPTASLHFTNRLLTKLQKQGIDIRFVTLHVNIGTFAPLTQEHIDTGALHTESYEIDKATAAFLNKAKHQGRPIIGVGTTVVRTLESATQQGELKKLSGETNIFIQEGYHFKFIDGMVTNFHVPQSSLLMLVAALIGKEKLFELYRLAIKKRYRFFSFGDGMLIR

SEQ ID NO: 64998 - protein, 345 aa, Wolfebacteria bacterium
  misc_feature (1)..(345): tr|A0A0G1HBE8|A0A0G1HBE8_9BACT S-adenosylmethionine:tRN A ribosyltransferase-isomerase OS=Candidatus Wolfebacte ria bacterium GW2011_GWE2_44_13 OX=1619017 GN=queA PE=3 SV=1
MKQLLEQTIQAYDYAFPETLIAQNPASPRDSAKLLIYDRKNDEVAESTFAHIGEYLPKNAVLVFNQTKVFPARLKVTKPTGGEARILYIATEGDCIRVMSDRKLIVGTNVLIAKDLFLTVVSHDEKQYLLKPSFPIQQLAAVLERHGITPIPPYIKKTPLTESALRKRYQTVFAKHSGSVAAPTASLHFTDRLLKKLQRSGIDIRFVTLHVNIGTFAPLTQEHLDTGALHIEQYEIDKETAAFLNNAKKEGRPIIGVGTTVVRTLESATKKGELKNLSDNTSIFIQEGYRFTFIDGMITNFHVPQSSLLMLVAALIGKDKLFELYRLAIKHKFRFFSFGDGMLIR

SEQ ID NO: 64999 - protein, 353 aa, Woykebacteria bacterium
  misc_feature (1)..(353): tr|A0A1G1WST0|A0A1G1WST0_9BACT S-adenosylmethionine:tRN A ribosyltransferase-isomerase OS=Candidatus Woykebacte ria bacterium RIFCSPLOWO2_01_FULL_43_14 OX=1802605 GN=q ueA PE=3 SV=1
MKIEDFDYDLPKNLIAHHPAEPRDSSGLMVVERVSHLIKHRKFSDLPDLLTQNDVLVFNQSKVIPARLIGKKPTGGKVEILLLRELNEAEWECISKPGLKIGQQINLDLGLDAKVLSKKTNGLITLAFHPKGVKLIKLIEQIGLTPLPPYINPSQGEKELREIYQTVYANTPGSSAAPTAGLHFTKKLLERLSKKGVQMEFVTLHVGLGTFRPVVQEQLDSKKLHSEWYQIDKEVSDRLNKAKSEGKRIIAVGTTTTRVLESSSDAKGKLAPSVGETNIFIYPPYKYRFVDSLITNFHIPKSSLLMLVSAYVSKPNTNADFEDFHSCLIGKAYKEAVKKKYRFYSFGDAMLIV

SEQ ID NO: 65000 - protein, 353 aa, Woykebacteria bacterium; identical to SEQ ID NO: 64999
  misc_feature (1)..(353): tr|A0A1G1WQQ4|A0A1G1WQQ4_9BACT S-adenosylmethionine:tRN A ribosyltransferase-isomerase OS=Candidatus Woykebacte ria bacterium RIFCSPHIGHO2_02_FULL_43_16b OX=1802601 GN =queA PE=3 SV=1

SEQ ID NO: 65001 - protein, 346 aa, Candidimonas bauzanensis
  misc_feature (1)..(346): tr|A0A1M5YTD8|A0A1M5YTD8_9BURK S-adenosylmethionine:tRN A ribosyltransferase-isomerase OS=Candidimonas bauzanen sis OX=658167 GN=queA PE=3 SV=1
MNPSLELSQFNYELPQELIAQSPAAQRVESRLLHLDRRGSLHDRQFVDLPSLLRPKDLLVFNNTRVIKARLLGRKASGGKVEVLVERVTGASTALAHVKASKSPKAGGKLILAGAFAATVLGREGELFELEFPGRVLDLLEQYGATPLPPYIEHAAGQDDDERYQTVYAREPGAVAAPTAGLHFDQAMLEQLAGLGIAQAFVTLHVGAGTFQPVRAQRLSEHVMHAERYSVPPETIELLRATRAAGGRVVAVGTTSVRALESAALQASAAGAPGPIEGDTRLFITPGYQFSWVDALLTNFHLPQSTLLMLVSALAGMEPIQRAYAHAVQSRYRFFSYGDAMFIESP

SEQ ID NO: 65002 - protein, 363 aa, Candidimonas nitroreducens
  misc_feature (1)..(363): tr|A0A225MLC4|A0A225MLC4_9BURK S-adenosylmethionine:tRN A ribosyltransferase-isomerase OS=Candidimonas nitrored ucens OX=683354 GN=queA PE=3 SV=1
MNPKLELSQFDYELPSELIAQAPAAERSGSRLLHLDAGSRLHDLRFTDLPGLLRAGDLLVFNDTRVIKARLRGSKDSGGRVEVLVERITAPTLALAHVRASKSPKAGSALRLEDAFSARVLGRQGELFELEFPERVLDLLERHGSTPLPPYITHAAGREDEERYQTVYAREPGAVAAPTAGLHFDQPMLERLAAQGVQRAFVTLHVGAGTFQPVRVQDLSAHVMHSERYVVPPETLDLMRATRKAGGRIVAVGTTSVRALESAAAQDPDAPGPVEGDTRLFITPGYKYRAIDALITNFHLPQSTLLMLVSALAGMEPIRRAYAHAVAERYRFFSYGDAMFIESPRETSGPARGAAVRPEDPRP

SEQ ID NO: 65003 - protein, 433 aa, Candidimonas sp.
  misc_feature (1)..(433): tr|A0A522QGG8|A0A522QGG8_9BURK S-adenosylmethionine:tRN A ribosyltransferase-isomerase OS=Candidimonas sp. OX=1 912597 GN=queA PE=3 SV=1
MVDTPSPWKGIPWQFSRYRPGIQRFATFFHKIEQDVRADANETRQDQRASAYTKQALQVRHFRRGSPLPLKLHPPLKIPLLQTCHAAVDSPLSLSQFDYHLPTELIAQAPPDRRTDSRLLHLDPRGALHDRRFTELPGLLRPNDLLVFNDTRVIKARLRGHKETGGKVEVLIERITGPRTALAHIRSSKSPRAGARLTLAEAFQANVTGRQGELFELEFPQRVLDLLERHGTTPLPPYITHQADARDEERYQTVYARKPGAVAAPTAGLHFDELLLEEIGRRGIGSVFITLHVGAGTFQPVRTDRIDQHVMHSEHYVVPVDTLARLAATRAAGGRIVAVGTTSVRALESVAANADNAAPAEGDTRLFITPGYRFKRVDALITNFHLPQSTLLMLVSALAGMEPIRRAYAHAVAARYRFFSYGDAMLIESPTPP

SEQ ID NO: 65004 - protein, 350 aa, Candidimonas sp.
  misc_feature (1)..(350): tr|A0A522P9V9|A0A522P9V9_9BURK S-adenosylmethionine:tRN A ribosyltransferase-isomerase OS=Candidimonas sp. OX=1 912597 GN=queA PE=3 SV=1
MNHKLVLSQFDYELPPELIAQSPAAERTGSRLLHLDAAGALHDRQFTQLPELLKPNDLLVFNDTRVIKARLRGHKESGGKVEVLIESITEPRVALAHVRASKTPRPGSVLTMAQAFNINVLGRQGELFELEFPERVLDLLDRYGSTPLPPYITHAAQQQDEERYQTVYAREPGAVAAPTAGLHFDNAMLARLAAQGIGESFVTLHVGAGTFQPVRVEHLDEHVMHSEHYSVSAQTLQQIRATRAAGGRIIAVGTTSVRALESVAQHCGLEASIDDHPVQGDTRLFITPGYRFQVIDALITNFHLPQSTLLMLISALAGMDPIRRAYAHAIQSRYRFFSYGDAMFIETPQP

SEQ ID NO: 65005 - protein, 349 aa, Capnocytophaga canimorsus
  misc_feature (1)..(349): tr|F9YQ84|F9YQ84_CAPCC S-adenosylmethionine:tRNA ribosy ltransferase-isomerase OS=Capnocytophaga canimorsus (st rain 5) OX=860228 GN=queA PE=3 SV=1
MKLSNFNFDLPKELLAEYPSENRDEARLMVIHRKTGEIEHKLFKDLIDYFDDGDVFVLNNTKVFPARLYGNKEKTKAKIEVFLLRELNAEQRLWDVLVDPARKIRIGNKLYFGKDESLVAEVIDNTTSRGRTLRFLYDGSYEEFRNKLTELGQTPLPKYISRAVEPEDEERYQTIYAKHEGAVAAPTAGLHFSKHLMKRLEIKGIDFAEVTLHVGLGTFNPVEVEDLSKHKMDSEEVLIPESATKIINKAKVGRKRVCAVGTTVMRALESSVSSEKTVNPFVGWTNKFIFPPYDFSVADAMVTNFHTPKSTLLMMVSAFAGHDLIMKAYKEAVKEKYKFYSYGDAMLIL

SEQ ID NO: 65006 - protein, 349 aa, Capnocytophaga canimorsus; identical to SEQ ID NO: 65005
  misc_feature (1)..(349): tr|A0A0B7HLW9|A0A0B7HLW9_9FLAO S-adenosylmethionine:tRN A ribosyltransferase-isomerase OS=Capnocytophaga canimo rsus OX=28188 GN=queA PE=3 SV=1

SEQ ID NO: 65007 - protein, 364 aa, Capnocytophaga canis
  misc_feature (1)..(364): tr|A0A0B7I414|A0A0B7I414_9FLAO S-adenosylmethionine:tRN A ribosyltransferase-isomerase OS=Capnocytophaga canis OX=1848903 GN=queA PE=3 SV=1
MQTFYEKIYGFIHHTMKLSNFNFELPKELLAEYPSENRDEARLMVVHRKTGLIEHKLFKDVIDYFDDGDVFVLNNTKVFPARLYGNKEKTKAKIEVFLLRELNADQRLWDVLVDPARKIRIGNKLYFGKDDSLVAEVIDNTTSRGRTLRFLYDGSYEEFRNKLTELGQTPLPKYISRAVEPEDEERYQTIYAKHEGAVAAPTAGLHFSKHLMKRLEIKGINFAEVTLHVGLGTFSPVEVEDLSKHKMDSEEMFILEDQTEIINKAKRGKNKVCAVGTTVMRALESSVSSENTVNPYVGWTNKFIFPPHDFSIADAMITNFHTPKSTLLMMISAFAGHDLIMKAYKEAVQEKYKFYSYGDAMLIL

SEQ ID NO: 65008 - protein, 349 aa, Capnocytophaga canis
  misc_feature (1)..(349): tr|A0A0B7ISS9|A0A0B7ISS9_9FLAO S-adenosylmethionine:tRN A ribosyltransferase-isomerase OS=Capnocytophaga canis OX=1848903 GN=queA PE=3 SV=1
MKLSNFNFELPKELLAEYPSENRDEARLMVVHRKTGLIEHKLFKDVIDYFDDGDVFVLNNTKVFPARLYGNKEKTKAKIEVFLLRELNADQRLWDVLVDPARKIRIGNKLYFGKDDSLVAEVIDNTTSRGRTLRFLYDGSYEEFRNKLTELGQTPLPKYISRAVEPEDEERYQTIYAKHEGAVAAPTAGLHFSKHLMKRLEIKGINFAEVTLHVGLGTFSPVEVEDLSKHKMDSEEMFILEDQTEIINKAKRGKNKVCAVGTTVMRALESSVSSENTVNPYVGWTNKFIFPPHDFSIADAMITNFHTPKSTLLMMISAFAGHDLIMKAYKEAVQEKYKFYSYGDAMLIL

SEQ ID NO: 65009 - protein, 349 aa, Capnocytophaga cynodegmi
  misc_feature (1)..(349): tr|A0A250EBX1|A0A250EBX1_9FLAO S-adenosylmethionine:tRN A ribosyltransferase-isomerase OS=Capnocytophaga cynode gmi OX=28189 GN=queA PE=3 SV=1
MKLSNFNFELPKELLAEYPSENRDEARLMVLHRKTGEIEHRLFKDVIDYFDDQDVFVLNNTKVFPARLYGNKEKTKAKIEVFLLRELNAEQRLWDVLVDPARKIRIGNKLYFGKDDSLVAEVIDNTTSRGRTLRFLYDGSYEEFRDKLTELGQTPLPKYISRAVEPEDEERYQTIYAKHEGAVAAPTAGLHFSKHLMKRLEIKGINFAEVTLHVGLGTFSPVEVEDLSKHKMDSEEVFIPEDQTKIINKAKLNKKRVCAVGTTVMRALESSVSSENTVNPYIGWTNKFIFPPYDFSVANAMITNFHTPKSTLLMMVSAFGGHDLVMRAYKEAVAEKYKFYSYGDAMLIL

SEQ ID NO: 65010 - protein, 349 aa, Capnocytophaga cynodegmi
  misc_feature (1)..(349): tr|A0A0B7HIG4|A0A0B7HIG4_9FLAO S-adenosylmethionine:tRN A ribosyltransferase-isomerase OS=Capnocytophaga cynode gmi OX=28189 GN=queA PE=3 SV=1
MKLSNFNFELPKELLAEYPSENRDEARLMVLHRKTGEIEHKLFKDVIDYFDDQDVFVLNNTKVFPARLYGNKEKTKAKIEVFLLRELNAEQRLWDVLVDPARKIRIGNKLYFGKDDSLVAEVIDNTTSRGRTLRFLYDGSYEEFRDKLTELGQTPLPKYISRAVEPEDEERYQTIYAKHEGAVAAPTAGLHFSKHLMKRLEIKGINFAEVTLHVGLGTFSPVEVEDLSKHKMDSEEVFIPEDQTKIINKAKLNKKRVCAVGTTVMRALESSVSSENTVNPYIGWTNKFIFPPYDFSVANAMITNFHTPKSTLLMMVSAFGGHDLVMRAYKEAVAEKYKFYSYGDAMLIL

SEQ ID NO: 65011 - protein, 349 aa, Capnocytophaga gingivalis
  misc_feature (1)..(349): tr|C2M7D2|C2M7D2_CAPGI S-adenosylmethionine:tRNA ribosy ltransferase-isomerase OS=Capnocytophaga gingivalis OX= 553178 GN=queA PE=3 SV=1
MKLSSFNFNLPKELLAEYPSENRDEARLMVVHRKTGEIEHRLFKDVIEYFDDGDVFVLNNTKVFPARLYGHKEKTNAKIEVFLLRELNKEQRLWDVLVDPARKIRIGNKLFFDPEEELVAEVIDNTTSRGRTLRFLFDGSYEGFRNKLLELGHTPLPKYISRPVEPEDEERYQTIYAKYEGAVAAPTAGLHFSKQLMKRLEIKGINFAELTLHIGLGTFNPVEVEDLSKHKMDSEEIIIPQEACQVVNKAKEAGKRVCAVGTTVMRAMESSVSSHNTLNPFIGWTNKFIFPPYDFGVANAMITNFHTPKSTLLMMVSAFAGHELIMDAYEEAVKEKYKFFSYGDAMLII

SEQ ID NO: 65012 - protein, 349 aa, Capnocytophaga gingivalis; identical to SEQ ID NO: 65011
  misc_feature (1)..(349): tr|A0A250FUU4|A0A250FUU4_9FLAO S-adenosylmethionine:tRN A ribosyltransferase-isomerase OS=Capnocytophaga gingiv alis OX=1017 GN=queA PE=3 SV=1

SEQ ID NO: 65013 - protein, 173 aa, Capnocytophaga granulosa
  misc_feature (1)..(173): tr|A0A381HA58|A0A381HA58_9FLAO S-adenosylmethionine:tRN A ribosyltransferase-isomerase OS=Capnocytophaga granul osa OX=45242 GN=queA_2 PE=3 SV=1
MQVRGAVAAPTAGLHFSKQLMKRLEIKGISFAELTLHVGLGTFNPVEVEDLSKHKMDSEEIIIPQEACDKVNKAKEAGKRVCAVGTTVMRAMESSVSSHNTLNPFVGWTNKFIFPPYDFGVANAMITNFHTPKSTLLMMVSAFAGHELIMDAYEEAVKEKYKFFSYGDAMLII

SEQ ID NO: 65014 - protein, 349 aa, Capnocytophaga granulosa
  misc_feature (1)..(349): tr|A0A381DRJ3|A0A381DRJ3_9FLAO S-adenosylmethionine:tRN A ribosyltransferase-isomerase OS=Capnocytophaga granul osa OX=45242 GN=queA_1 PE=3 SV=1
MKLSSFNFNLPKELLAEYPSENRDEARLMVVDRKIGTIEHKLFKDVIDYFDDGDVFVLNNTKVFPARLYGHKEKTNAKIEVFLLRELNKEQRLWDVLVDPARKIRIGNKLFFDKEEELVAEVIDNTTSRGRTLRFLFDGSYEGFRNKLLELGHTPLPKYITRPVEPEDEERYQTIYAKYEGAVAAPTAGLHFSKQLMKRLEIKGISFAELTLHVGLGTFNPVEVEDLSKHKMDSEEIIIPQEACDKVNKAKEAGKRVCAVGTTVMRAMESSVSSHNTLNPFVGWTNKFIFPPYDFGVANAMITNFHTPKSTLLMMVSAFAGHELIMDAYEEAVKEKYKFFSYGDAMLII

SEQ ID NO: 65015 - protein, 349 aa, Capnocytophaga haemolytica
  misc_feature (1)..(349): tr|A0A0X8JBW6|A0A0X8JBW6_9FLAO S-adenosylmethionine:tRN A ribosyltransferase-isomerase OS=Capnocytophaga haemol ytica OX=45243 GN=queA PE=3 SV=1
MKLSNFNFDLPKELLAEYPSENRDEARLMVLHRKTGEIEHKLFKDVINYFDDGDVFVINNTKVFPARLFGNKEKTKARIEVFLLRELSAEQRLWDVLVDPARKIRIGNKLYFGKDARLVAEVIDNTTSRGRTLRFLYDGTYEEFRQYLKELGQTPLPKYISRPVEPEDEERYQTIYAKYEGAVAAPTAGLHFSKHLMKRLEIKGISFAEITLHVGLGTFSPVEVEDLSKHKMDSEEIIIPEDQTLIINKAKESGKRVCAVGTTVMRALESSVAPNGNVNPYNGWTNKFIFPPYDFSVANAMITNFHTPKSTLLMMVSAFGGHELVMRAYHEAVAEKYKFYSYGDAMLIL

SEQ ID NO: 65016 - protein, 349 aa, Capnocytophaga leadbetteri
  misc_feature (1)..(349): tr|A0A250FCN5|A0A250FCN5_9FLAO S-adenosylmethionine:tRN A ribosyltransferase-isomerase OS=Capnocytophaga leadbe tteri OX=327575 GN=queA PE=3 SV=1
MKLSNFNFDLPKELLAEYPSENRDEARLMVIHRKTGKIEHKLFKDVIDYFDDGDVFVLNNTKVFPARLYGNKEKTKAKIEVFLLRELSAEQRLWDVLVDPARKIRIGNKLYFGENGDLVAEVIDNTTSRGRTLRFLYDGTYEEFRQRLVELGQTPLPKYISRPVEPEDEERYQTIYAKHEGAVAAPTAGLHFSKHLMKRLEIKGISFAEVTLHVGLGTFNPVEVEDLSKHKMDSEEIHIPVDQANIINAAKEKKKRVCAVGTTVMRVLESSVSADGLVNPFDGWTNKFIFPPYDFSVANAMITNFHTPKSTLLMMVSAFAGHDLIMRAYKEAVEQKYKFYSYGDAMLIL

SEQ ID NO: 65017 - protein, 349 aa, Capnocytophaga ochracea
  misc_feature (1)..(349): tr|E4MRQ6|E4MRQ6_CAPOC S-adenosylmethionine:tRNA ribosy ltransferase-isomerase OS=Capnocytophaga ochracea F0287 OX=873517 GN=queA PE=3 SV=1
MKLSNFNFELPKELLAEYPSENRDEARLMVIHRKTGEIEHRLFKDVIDYFDDGDVFVLNNTKVFPARLYGNKEKTKAKIEVFLLRELSAEQRLWDVLVDPARKIRIGNKLYFGKNAELVAEVIDNTTSRGRTLRFLYDGTYEEFRQHLTELGQTPLPKYISRPVEPEDEERYQTIYAKYEGAVAAPTAGLHFSKHLMKRLEIKGITFAEVTLHVGLGTFNPVEVEDLSKHKMDSEEIHIPESQTKIINVAKVNKKRVCAVGTTVMRVLESSVSSDGFLNPFDGWTNKFIFPPYDFSIANAMITNFHTPKSTLLMMVSAFAGHDLIMRAYKEAVEQKYKFYSYGDAMLIL

SEQ ID NO: 65018 - protein, 349 aa, Capnocytophaga ochracea
  misc_feature (1)..(349): tr|A0A2X2SWD4|A0A2X2SWD4_CAPOC S-adenosylmethionine:tRN A ribosyltransferase-isomerase OS=Capnocytophaga ochrac ea OX=1018 GN=queA PE=3 SV=1
MKLSNFNFELPKELLAEYPSENRDEARLMVIHRKTGEIEHRLFKDVIDYFDDGDVFVLNNTKVFPARLYGNKEKTKAKIEVFLLRELSAEQRLWDVLVDPARKIRIGNKLYFGKNAELVAEVIDNTTSRGRTLRFLYDGTYEEFRQHLTELGQTPLPKYISRPVEPEDEERYQTIYAKYEGAVAAPTAGLHFSKHLMKRLEIKGITFAEVTLHVGLGTFNPVEVEDLSKHKMDSEEIHIPESQTKIINAAKVNKKRVCAVGTTVMRVLESSVSSDGFLNPFDGWTNKFIFPPYDFSIANAMITNFHTPKSTLLMMVSAFAGHDLIMRAYKEAVEQKYKFYSYGDAMLIL

SEQ ID NO: 65019 - protein, 355 aa, Capnocytophaga sp.
  misc_feature (1)..(355): tr|J5VL12|J5VL12_9FLAO S-adenosylmethionine:tRNA ribosy ltransferase-isomerase OS=Capnocytophaga sp. CM59 OX=93 6370 GN=queA PE=3 SV=1
MPLIQTMKLSSFNFNLPKELLAEYPSENRDEARLMVVDRKIGTIEHKLFKDVIDYFDDGDVFVLNNTKVFPARLYGHKEKTNAKIEVFLLRELNKEQRLWDVLVDPARKIRIGNKLFFDKEEELVAEVIDNTTSRGRTLRFLFDGSYEGFRNKLLELGHTPLPKYITRPVEPEDEERYQTIYAKYEGAVAAPTAGLHFSKQLMKRLEIKGISFAELTLHVGLGTFNPVEVEDLSKHKMDSEEIIIPQEACDKVNKAKEAGKRVCAVGTTVMRAMESSVSSHNTLNPFVGWTNKFIFPPYDFGVANAMITNFHTPKSTLLMMVSAFAGHELIMDAYEEAVKEKYKFFSYGDAMLII

SEQ ID NO: 65020 - protein, 349 aa, Capnocytophaga sp.
  misc_feature (1)..(349): tr|U2AMY4|U2AMY4_9FLAO S-adenosylmethionine:tRNA ribosy ltransferase-isomerase OS=Capnocytophaga sp. oral taxon 863 str. F0517 OX=1227266 GN=queA PE=3 SV=1
MKLSSFNFNLPKELLAEYPSENRDEARLMVVNRKTGTIEHKLFKDVIDYFDDGDVFVLNNTKVFPARLYGHKEKTNAKIEVFLLRELNKEQRLWDVLVDPARKIRIGNKLFFDKEEQLVAEVIDNTTSRGRTLRFLFDGSYEGFREKLLELGHTPLPKYITRPVEPEDEERYQTIYAKHEGAVAAPTAGLHFSKQLMKRLEIKGISFAELTLHVGLGTFNPVEVEDLSKHKMDSEEIIIPQEACNTVNKAKEGGHRVCAVGTTVMRAMESSVSSHNTLNPFIGWTNKFIFPPYDFGVANAMITNFHTPKSTLLMMVSAFAGHELIMDAYEEAVKEKYKFFSYGDAMLII

SEQ ID NO: 65021 - protein, 349 aa, Capnocytophaga sputigena
  misc_feature (1)..(349): tr|A0A250FD38|A0A250FD38_CAPSP S-adenosylmethionine:tRN A ribosyltransferase-isomerase OS=Capnocytophaga sputig ena OX=1019 GN=queA PE=3 SV=1
MKLSNFNFDLPKELLAEYPSENRDEARLMVVHRKTGEIEHKLFKDVIDYFDDGDVFVLNNTKVFPARLYGNKEKTKAKIEVFLLRELSAEQRLWDVLVDPARKIRIGNKLYFGKNAELVAEVIDNTTSRGRTLRFLYDGTYEEFRQHLTELGQTPLPKYISRPVEPEDEERYQTIYAKHEGAVAAPTAGLHFSKHLMKRLEIKGITFAEVTLHVGLGTFNPVEVEDLSKHKMDSEEIHIPESQTKIINTAKENKKRVCAVGTTVMRVLESSVSSDCFVNPFDGWTNKFIFPPYDFSVANAMITNFHTPKSTLLMMVSAFAGHDLIMRAYKEAVEQKYKFYSYGDAMLIL

SEQ ID NO: 65022 - protein, 349 aa, Capnocytophaga sputigena
  misc_feature (1)..(349): tr|A0A2A3N2W1|A0A2A3N2W1_CAPSP S-adenosylmethionine:tRN A ribosyltransferase-isomerase OS=Capnocytophaga sputig ena OX=1019 GN=queA PE=3 SV=1
MKLSNFNFDLPKELLAEYPSENRDEARLMVVHRKTGEIEHKLFKDVIDYFDDGDVFVLNNTKVFPARLYGNKEKTKAKIEVFLLRELSAEQRLWDVLVDPARKIRIGNKLYFGKNAELVAEVIDNTTSRGRTLRFLYDGTYEEFRQHLTELGQTPLPKYISRPVEPEDEERYQTIYAKHEGAVAAPTAGLHFSKHLMKRLEIKGITFAEVTLHVGLGTFNPVEVEDLSKHKMDSEEIHIPESQTKIINTAKENKKRVCAVGTTVMRVLESSVSSDGFVNPFDGWTNKFIFPPYDFSVANAMITNFHTPKSTLLMMVSAFAGHDLIMRAYKEAVEQKYKFYSYGDAMLIL

SEQ ID NO: 65023 - protein, 349 aa, Capnocytophaga stomatis
  misc_feature (1)..(349): tr|A0A250FWC2|A0A250FWC2_9FLAO S-adenosylmethionine:tRN A ribosyltransferase-isomerase OS=Capnocytophaga stomat is OX=1848904 GN=queA PE=3 SV=1
MKLSNFNFDLPKELLAEYPSENRDEARLMVLHRKTGEIEHRLFKDVIDYFDDQDVFVLNNTKVFPARLYGNKEKTKAKIEVFLLRELNAEQRLWDVLVDPARKIRIGNKLYFGKDDSLVAEVIDNTTSRGRTLRFLYDGSYEEFRNKLTELGQTPLPKYISRAVEPEDEERYQTIYAKHEGAVAAPTAGLHFSKHLMKRLEIKGINFAEVTLHVGLGTFSPVEVEDLSKHKMDSEEVFIPEDQTKIINKAKLNKKKVCAVGTTVMRALESSVSSENTVNPYIGWTNKFIFPPYDFSVANAMITNFHTPKSTLLMMVSAFGGHDLVMRAYKEAVAEKYKFYSYGDAMLIL

SEQ ID NO: 65024 - protein, 348 aa, Caproiciproducens galactitolivorans
  misc_feature (1)..(348): tr|A0A4Z0Y109|A0A4Z0Y109_9FIRM S-adenosylmethionine:tRN A ribosyltransferase-isomerase OS=Caproiciproducens gal actitolivorans OX=642589 GN=queA PE=3 SV=1
MELDLQNLQTKDFYYDLPKELIAQTPLEPRDSSRLLTLNRKTGEISHKHFYDIIDCLNPGDCLVLNDSRVLPARLYGVKEDTGAKVEFLLLTHREGDVWEVLCGPGKRAKPGTRFSFGDDLLKAEVLEIIEDGNRLARFIYDGNFYEILDKIGQMPLPHYITKPLENNERYQTVYSKEIGSAAAPTAGLHFTPELLERVKQKGVKVAFVTLHVGLGTFRPVTAERVVDHKMHSEHYYLPKETADCINATKKNGGRVIAVGTTSCRTLETVGTKEGCIKESSGWTDIFIYPGYQYKVLDGLITNFHLPESTLIMLVSAFAGYDHIMNAYKVAVQEKYRFFSFGDAMFIY

SEQ ID NO: 65025 - protein, 341 aa, Caproiciproducens sp.
  misc_feature (1)..(341): tr|A0A410Q7L6|A0A410Q7L6_9FIRM S-adenosylmethionine:tRN A ribosyltransferase-isomerase OS=Caproiciproducens sp. NJN-50 OX=2507162 GN=queA PE=3 SV=1
MKTKDFYYDLPEDLIAQSPAEPRDSSRLLTLNRKTGEVEHRHFYDIIDYLNPGDCLVLNDSRVLPARLLGVKDETGAKVEFLLLNHREGDVWEVLTGPGRRAKIGSKFTFGDGLLRAEVLDIIEDGNRLARFTCEGNFYEILDKIGQMPLPHYIKEELRDNERYQTVYSKEIGSAAAPTAGLHFTPELLQKIKDKGIDLAFVTLHVGLGTFRPVTAQKVTEHKMHSEHYYLSAQTAKQINRAKRNGGRVIAVGTTSCRTLEAVGTKEGCIRESAGWTDIFIYPGYRFKVLDGLITNFHLPESTLIMLVSALAGYDHIMNAYRVAVKEKYRFFSFGDAMLIY

SEQ ID NO: 65026 - protein, 355 aa, Capsulimonas corticalis
  misc_feature (1)..(355): tr|A0A402D786|A0A402D786_9BACT S-adenosylmethionine:tRN A ribosyltransferase-isomerase OS=Capsulimonas cortical is OX=2219043 GN=queA PE=3 SV=1
MNPAITTDLDEPLRLSDFDYTLPPERIAQSPLPERDSSRLLVLDRKTGAIQHRVFTDLLEYFRPGDVLVINDTRVTAQRLFGARLGKPGERVEAFLTHRVADGLWRGLVRPGKKLQPGVVVEFGDGLSAEILDRTDERGGRLMRFSTADGGNVEAAIEAHGAAPLPPYITRVLPPEERGRYQTVYADEGGSAAAPTAGLHFTQDLLGRVREHGVEIAHVTLHVGLGTFRPIESEHIADHTMHAERIHLSPEAAETINGAAGRVIAVGTTSARTLESAAVGPGRVEAVDKETSLYCTPGYQFQIVDALITNFHMPRSTLLVLVSALAGREKIFAAYQEALAREYRFLSFGDAMFIQ

SEQ ID NO: 65027 - protein, 341 aa, Carboxydocella sporoproducens
  misc_feature (1)..(341): tr|A0A1T4PHN2|A0A1T4PHN2_9FIRM S-adenosylmethionine:tRN A ribosyltransferase-isomerase OS=Carboxydocella sporop roducens DSM 16521 OX=1121270 GN=queA PE=3 SV=1
MRVSDFDFFLPEELIAQQPVEPRDHSRLLVLFRQEKRLEHRYFYQLPEYLRAGDVLVVNETRVIPARLFGEKKGTGARIEVVLLHRIDKDRWEVLLKPGKRARPGTWLQFGDGLLEAEVEDVTPAGGRILRFVYRGVWEELLDRLGEMPLPPYIREKLPDRERYQTVYAREEGSAAAPTAGLHFTPRLLAELQERGIEIVKVLLHVGLGTFRPVKVEKIEEHQMHAEYYRLSAEAAQVLNRAKAEGRRVIAVGTTSTRVLETAAVAPGQVQAGEGWTDIFIYPGYQFKMIDGLITNFHLPKSTLLMLVAALVGRERILAAYEEAVRERYRFFSFGDAMLII

SEQ ID NO: 65028 - protein, 341 aa, Carboxydocella thermautotrophica; identical to SEQ ID NO: 65027
  misc_feature (1)..(341): tr|A0A2R4N3A8|A0A2R4N3A8_9FIRM S-adenosylmethionine:tRN A ribosyltransferase-isomerase OS=Carboxydocella therma utotrophica OX=178899 GN=queA PE=3 SV=1

SEQ ID NO: 65029 - protein, 338 aa, Carboxydothermus hydrogenoformans
  misc_feature (1)..(338): sp|Q3ABY6|QUEA_CARHZ S-adenosylmethionine:tRNA ribosylt ransferase-isomerase OS=Carboxydothermus hydrogenoforma ns (strain ATCC BAA-161 / DSM 6008 / Z-2901) OX=246194 GN=queA PE=3 SV=1
MKLKDFDYYLPEELIAQTPLEKRDESRLLVLKRQTGEITHDVFKNLKKYLVPGDLLVVNKTRVIPARLFGVREQGGEVEILLVKRMNFREWEVLVKPGRRARVGTRLIFAPGVLEGEIVAQTEVGRIIKFSFQGVFEEILNQLGQTPLPPYIKEKLKDPERYQTIYAKEPGSAAAPTAGLHFTRELISELKDYGVEFAEVLLHVGLGTFKPVKTENILEHKMHEEYYEIENEAAEKVNKAKREGRRVIAVGTTVVRVLESVADKGQVAPAKGYTDLFIYPGFNFQIIDGLITNFHLPKSTLLMLVSAFAGREKVLNAYEIAVRLRYRFFSFGDAMLII

SEQ ID NO: 65030 - protein, 339 aa, Carboxydothermus islandicus
  misc_feature (1)..(339): tr|A0A1L8D1S0|A0A1L8D1S0_9THEO S-adenosylmethionine:tRN A ribosyltransferase-isomerase OS=Carboxydothermus isla ndicus OX=661089 GN=queA PE=3 SV=1
MMKLEDFDYNLPEELIAQTPLEKRDESRLLVLNRQTGEITHDIFKNLKRYLVPGDLLVVNKTRVIPARLYGVREQGGEVEILLLKRLSLTEWEVLVKPGRRARVGTRLIFAPGVLEGEIVAQTEVGRIIKFSFQGIFEEILNQLGQTPLPPYIKEKLKDPERYQTIYAKEPGSAAAPTAGLHFTWELISELNNYGVEFTEVLLHVGLGTFKPVKTENIFEHKMHEEYYEIENEAAEKINKAKREGRRVIAVGTTVVRVLESVADRGQVAPAKGYTDLFIYPGFNFQIIDGLITNFHLPKSTLLMLVSAFAGREKVLNAYETAVSLRYRFFSFGDAMLII

SEQ ID NO: 65031 - protein, 338 aa, Carboxydothermus pertinax
  misc_feature (1)..(338): tr|A0A1L8CXV7|A0A1L8CXV7_9THEO S-adenosylmethionine:tRN A ribosyltransferase-isomerase OS=Carboxydothermus pert inax OX=870242 GN=queA PE=3 SV=1
MELKDFDYYLPEELIAQTPLAQRDESRLMVLRRQTGEIEHDVFKNIKRYLRPGDLLVLNKTRVIPARLFGVREQGGEVEILLIKRLGITEWEVLVRPGRRARVGTRLIFAPNILEGEIIAQTEVGRIIKFSFQGVFEDVLNKLGETPLPPYIKEKLSDPERYQTVYAKEPGSAAAPTAGLHFTKELMADLKDHGVEITEVLLHVGLGTFKPVKTENILEHKMHEEYYEVEQEAANKINKAKDEGRRIIAVGTTVVRVLESVAKDGQVIPSKGYTDIFIYPGFQFQIIDGLITNFHLPKSTLIMLVSAFAGREKVLKAYETAVNLRYRFFSFGDAMLIL

SEQ ID NO: 65032 - protein, 404 aa, Carboxylicivirga sp.
  misc_feature (1)..(404): tr|A0A553GLP3|A0A553GLP3_9BACT S-adenosylmethionine:tRN A ribosyltransferase-isomerase OS=Carboxylicivirga sp. M1479 OX=2594476 GN=FNN09_12660 PE=3 SV=1
MIKPTISISDFTYDLPNERIAKYPLANRDESKLLIYKNECIEETSFPSIIDAIPSKAMLAFNNTKVIRARLKFKKVTGAEIEIFCLEPLSPAEVQMAFDSREQTTWKCIVGNARKWKDGELSKDLMINGEEVCIKLTKGERLHDAYSINFSWDNSNFSFAELIEEIGLTPIPPYLNRETEDIDKDRYQTVYSQHQGSVAAPTAGLHFTDNILNTLQTKGHPLLNVTLHVGAGTFKPVKSEEIADHDMHIEHFVIEKDALKRLIAHQDELIAVGTTSVRTLESLYWYGVRILSNESIANGIEQWDPYNLKGSYSKEEAFRALLDFMEEKKLSHLAGKTAIIIVPGYSFKVINGLVTNFHQPQSTLLLLISAIVGDNWKKIYQYAYDNDFRFLSYGDSSLLMIDKK

SEQ ID NO: 65033 - protein, 349 aa, Carboxylicivirga sp.
  misc_feature (1)..(349): tr|A0A553GQG2|A0A553GQG2_9BACT S-adenosylmethionine:tRN A ribosyltransferase-isomerase OS=Carboxylicivirga sp. M1479 OX=2594476 GN=queA PE=3 SV=1
MKLSKFKYNLPEELIALHPAENRDESRLMVLNRQTKEIEHKIFKDMINYFDDEDVMVFNNTKVFPARLYGNKEKTGAEIEVFLLRELNREQRLWDVLVDPARKIRIGNKLYFGDDDNLVAEVIDNTTSRGRTLRFLYDGSYEEFKETLYGMGETPIPSMIGRKVVPEDRERYQTIYAKHEGAVAAPTAGMHFSRELMKRLEIKGVDFSEITLHVGLGNFRQVDVEDLTKHKMDSEQIFITEEATKIINAGKDKKKRVCAVGTTVMRTLESSVSTYGHVKPFEGWTNKFIFPPYEFQVANAMITNFHLPLSTLMMMAAGFGGYDFIMEAYEVAVKEKYRFGTYGDAMLII

SEQ ID NO: 65034 - protein, 366 aa, Cardinium endosymbiont
  misc_feature (1)..(366): tr|X5J7Z6|X5J7Z6_9BACT S-adenosylmethionine:tRNA ribosy ltransferase-isomerase OS=Cardinium endosymbiont cBtQ1 of Bemisia tabaci OX=1354314 GN=queA PE=3 SV=1
MPKAAYKRNITFLNYIHTMKLSNFKFDLPAHSIAQYPIEAKEDARLMVVHKSSGKIEHKTFKDLPAYFSEGDTLVVNDSKVLPCKLYGYKEKTNAQVEVLLLRKLNDEHGLWDTIVEPARKIRIGNKIYFGNGELVAEIIDNTTSRGRTLKLLFERTEEEFYALINQIGHMPLPPQIGRSSKPEDREYYQTIFSQNIGSIVLPAAGLHFTPYLLKYLALQNISVVPVTLHIGLGELSTIDMEDLTKVRASSERFTITPETATVVNHSLQHQKKVCAVGTSVLRAMESSVSVACQIKPASDWTNKFILPSYSFKVCNALLTTFHLSSSISLVSVAAFGGEELILDAYAEAIKEAYRFFLYGDSMLII

SEQ ID NO: 65035 - protein, 348 aa, Cardinium endosymbiont
  misc_feature (1)..(348): tr|A0A556QXA7|A0A556QXA7_9BACT S-adenosylmethionine:tRN A ribosyltransferase-isomerase OS=Cardinium endosymbion t of Dermatophagoides farinae OX=2597823 GN=queA PE=3 S V=1
MKLSNFKFELPAHSIAQYPIEVKEDARLMVVHKDSGKIEHKTFKDLPTYFSEGDTLVVNDSKVLPCKLYGCKEKTNAQVEVLLLRKLNDEHGLWDTIVEPARKIRIGNKIYFGNGELVAEIIDNTTSRGRTLKLLFDRTEEEFYALINEIGHMPLPHQIGRPSKPEDREYYQTIFAQNVGSIVLPAAGLHFTPYLLKYLALQNISVVPITLHIGLGELSTIDMEDLTKVRASSERFMITQETTKVVNQSLHHQKKVCAVGTSVLRAMESSVSVSCQLKEASDWTNKFILPSCPFKVCNALLTTFHLPSSISLVSVAAFGGEELILTAYAEAIKEGYRFFLYGDSMLII

SEQ ID NO: 65036 - protein, 345 aa, Cardiobacterium hominis
  misc_feature (1)..(345): tr|C8NB88|C8NB88_CARH6 S-adenosylmethionine:tRNA ribosy ltransferase-isomerase OS=Cardiobacterium hominis (stra in ATCC 15826 / DSM 8339 / NCTC 10426 / 6573) OX=638300 GN=queA PE=3 SV=1
MWRKSDFMYELPDELIARFPLAERSAARLLLARAVSVDEVALADRMVRDLPDLLEPDDLLVFNNTRVLPARLFGQKESGGRVEILLERLKSAHEANAYVRASKSPKVGGVIRIGSAELRVTGRHEALFALYSETPWAELLAAQGEMPIPPYLERAALESDKQRYQTVFAKHSGAVAAPTAGLHFDEALLAAIRLRGVKMAEVTLHVGAGTFQPVRHENLAEHIMHEEWLQVGQDVVDAVAACRARGGRVVAIGTTSLRALESAAEGGELAPFSGDTNLFITPGYRFRVVDALLTNFHLPESTLLMLVSAFAGYANIRAAYQHAIAARYRFFSYGDAMFLPTRLDV

SEQ ID NO: 65037 - protein, 360 aa, Cardiobacterium hominis
  misc_feature (1)..(360): tr|A0A1C3H3W1|A0A1C3H3W1_9GAMM S-adenosylmethionine:tRN A ribosyltransferase-isomerase OS=Cardiobacterium homin is OX=2718 GN=queA PE=3 SV=1
MVARVFGVLVEGSGVMWRKSDFMYELPDELIARFPLAERSAARLLLARAVSVDEVALADRMVRDLPDLLEPDDLLVFNNTRVLPARLFGQKESGGRVEILLERLKSAHEANAYVRASKSPKVGGVIRIGNAEVQVTGRHEALFALSSETPWAELLAAQGEMPIPPYLERAALESDKQRYQTVFAKHSGAVAAPTAGLHFDEALLAAIRARGVATAEVTLHVGAGTFQPVRHENLAEHVMHEEWLAVGQEVVDAVAACRARGGRVVAIGTTSLRALESAAAGGELAPFSGDTNLFITPGYRFRVVDALLTNFHLPESTLLMLVSAFAGYANIRAAYQHAIAARYRFFSYGDAMFLPTRLDV

SEQ ID NO: 65038 - protein, 346 aa, Cardiobacterium valvarum
  misc_feature (1)..(346): tr|A0A381E3E7|A0A381E3E7_9GAMM S-adenosylmethionine:tRN A ribosyltransferase-isomerase OS=Cardiobacterium valva rum OX=194702 GN=queA PE=3 SV=1
MTYHKSDFHYDLPDERIARYPLPERSAARMLVARVMDADTVELGDRQVRDLPDYLDPADLLVFNNTRVLPARLYGHKASGGKIEILIERLKSPHEASAYIRASKSPQTGSTLHIGNATLRVGDRDDALFTLYSDGAPWQELLAAHGEMPIPPYLERRAQDSDSERYQTVYAKHSGAVAAPTAGLHFDDALLAAIAARGVQRAEITLHVGAGTFQPVRHENLAEHIMHEEWLTVGEDVVDAVAACRARGGRVIAVGTTALRALESAAAGGNLAPYTGDTRLFITPGYRFRVVDALFTNFHLPESTLLMLVSAFAGYDNIRRAYQHAIAHDYRFYSYGDAMFLPKRLY

SEQ ID NO: 65039 - protein, 371 aa, Cardiobacterium valvarum
  misc_feature (1)..(371): tr|G9ZFQ0|G9ZFQ0_9GAMM S-adenosylmethionine:tRNA ribosy ltransferase-isomerase OS=Cardiobacterium valvarum F043 2 OX=797473 GN=queA PE=3 SV=1
MAHLRRRCQNSRPAQQYRLSPSSIVMTYHKSDFHYDLPDERIARYPLPERSAARMLVARVLDADTVELGDRQVRDLPDYLDPADLLVFNNTRVLPARLYGHKTSGGKIEILIERLKSPHEASAYIRASKSPQAGSTLHVGDATLRVGDRDDALFTLYSDGAPWQELLATHGEMPIPPYLERRAQDSDSERYQTVYAKHSGAVAAPTAGLHFDEALLAAIAARGVQRTEITLHVGAGTFQPVRHENLAEHIMHEEWLTVGEDVVDAVAACRARGGRVIAVGTTALRALESAAAGGSLAPYTGDTRLFITPGYRFRVVDALFTNFHLPESTLLMLVSAFAGYDNIRRAYQHAIAHDYRFYSYGDAMFLPKRLD

SEQ ID NO: 65040 - protein, 343 aa, Carnobacterium alterfunditum
  misc_feature (1)..(343): tr|A0A1N6G9D8|A0A1N6G9D8_9LACT S-adenosylmethionine:tRN A ribosyltransferase-isomerase OS=Carnobacterium alterf unditum OX=28230 GN=queA PE=3 SV=1
MLTTKDFDFNLPEELIAQTPLANRSSSKLLILDKEMGKVEDKYFTDILDELNKGDALVMNDTRVLPARLHGIKPETGAHIELLLLKNTKNDQWETLVKPAKKATVGTVISFGDGRLTATVTEELNHGGRIVDFSYEGIFLEVLESLGEMPLPPYIKERLEDGERYQTVYAKENGSAAAPTAGLHFTEELLEQIKLKGVQLVFLTLHVGLGTFRPVSVDSLEDHEMHSEFYRLTEESAAILTAVRNNGGRIVAVGTTSIRTLETIGTKFNGEIKADSGWTSIFISPGYTFKVVDAFSTNFHLPKSTLVMLISAFAGRENVLSAYQHAIDKRYRFFSFGDAMFIK

SEQ ID NO: 65041 - protein, 343 aa, Carnobacterium divergens
  misc_feature (1)..(343): tr|A0A0R2HYQ3|A0A0R2HYQ3_CARDV S-adenosylmethionine:tRN A ribosyltransferase-isomerase OS=Carnobacterium diverg ens DSM 20623 OX=1449336 GN=queA PE=3 SV=1
MLSTKDFDFDLPEELIAQTPLSDRSSSRLLVLDSKTGEVSDKHFTDILDELHAGDALVMNDTRVLPARLYGTKPETGGHLEVLLLKNTVNDQWETLVKPAKRAKVGTEISFGDGRLKATVVEELEHGGRIVDFSYEGIFLEVLESLGEMPLPPYIKERLEDNERYQTVYAKENGSAAAPTAGLHFTEDLLAKIKAKGVELVFLTLHVGLGTFRPVSVDSIEDHDMHSEFYRLTEAAAAKLNQVKAEGGRIVAVGTTSIRTLETIGTKFDGEIKADSGWTSIFISPGYQFKVVDAFSTNFHLPKSTLVMLVSAFAGRENVLAAYHHAVEERYRFFSFGDAMFVK

SEQ ID NO: 65042 - protein, 343 aa, Carnobacterium divergens
  misc_feature (1)..(343): tr|A0A5F0MCZ5|A0A5F0MCZ5_CARDV S-adenosylmethionine:tRN A ribosyltransferase-isomerase OS=Carnobacterium diverg ens OX=2748 GN=queA PE=3 SV=1
MLSTKDFDFDLPEELIAQTPLSDRSSSRLLVLDSKTGEVSDKHFTDILDELHAGDALVMNDTRVLPARLYGTKPETGGHLEVLLLKNTVNDQWETLVKPAKRAKVGTEISFGDGRLKATVVEELEHGGRIVDFSYKGIFLEVLESLGEMPLPPYIKERLEDNERYQTVYAKENGSAAAPTAGLHFTEDLLAKIKAKGVELVFLTLHVGLGTFRPVSVDSIEDHDMHSEFYRLTEAAAAKLNQVKAEGGRIVAVGTTSIRTLETIGTKFDGEIKADSGWTSIFISPGYQFKVVDAFSTNFHLPKSTLVMLVSAFAGRENVLAAYHHAVEERYRFFSFGDAMFVK

SEQ ID NO: 65043 - protein, 343 aa, Carnobacterium iners
  misc_feature (1)..(343): tr|A0A1X7NS29|A0A1X7NS29_9LACT S-adenosylmethionine:tRN A ribosyltransferase-isomerase OS=Carnobacterium iners OX=1073423 GN=queA PE=3 SV=1
MLSTNDFDFELPEELIAQTPLEDRSGSKLLLLNKQNGEIKDEYFPAILNELESGDALVMNDTRVLPARLHGVKPETGGHLEVLLLKNTAGDQWETLVKPAKRARTGTKISFGDGRLEAVIKEELDHGGRIIEFYYEGVFLEVLESLGEMPLPPYIKERLEDNERYQTVYAKENGSAAAPTAGLHFTQELLEEIKAKGVKLVFLTLHVGLGTFRPVSVDSIEDHEMHSEFYRLSDEAANQLNEVKTAGGKIIAVGTTSIRTLETIGTKFDGEIKADSGWTSIFISPGYDFKLIDAFLTNFHLPKSTLVMLVSAFAGREKVLGAYEHAVKEKYRFFSFGDAMFVK

SEQ ID NO: 65044 - protein, 345 aa, Carnobacterium inhibens
  misc_feature (1)..(345): tr|U5S7Q7|U5S7Q7_9LACT S-adenosylmethionine:tRNA ribosy ltransferase-isomerase OS=Carnobacterium inhibens subsp . gilichinskyi OX=1266845 GN=queA PE=3 SV=1
MNMLTTKDFDFDLPEELIAQTPLENRSSSKLLILDKETGKVEDKHFTDILDELHEGDALVMNDTRVLPARLYGIKPATGAHLEILLLKNTEKDQWETLVKPAKKARVGDVISFGDGRLTATVIEELNHGGRIIDFSYDGIFLEVLESLGEMPLPPYIKERLEDSERYQTVYAKENGSAAAPTAGLHFTQELLEQIKAKGVQLVFLTLHVGLGTFRPVSVDSIEDHEMHSEFYRLTEESAAELTTVRKNGGRIVAVGTTSIRTLETIGTKFNGELKADSGWTDIFISPGYTFKVVDAFSTNFHLPKSTLVMLVSAFAGRENVLAAYQHAVDERYRFFSFGDAMFVK

SEQ ID NO: 65045 - protein, 343 aa, Carnobacterium maltaromaticum
  misc_feature (1)..(343): tr|A0A0R2ICU1|A0A0R2ICU1_CARML S-adenosylmethionine:tRN A ribosyltransferase-isomerase OS=Carnobacterium maltar omaticum DSM 20342 OX=1449341 GN=queA PE=3 SV=1
MLTTKDFDFDLPEELIAQTPLEDRSASKLLVLDRETGAIKDKHFTDILDELSEGDALVMNDTRVLPARLYGTKPETGGHLEVLLLKNTTGDQWETLVKPAKRAKVGTEIEFGDGRLKAVVLEELEHGGRIIEFSYTGIFLEVLESLGEMPLPPYIKERLEDSERYQTVYAKENGSAAAPTAGLHFTEDLLEKIKAKGVEIVFLTLHVGLGTFRPVSVDSIEDHEMHAEFYRLSEESAETLRKVKANGGRIVAVGTTSIRTLETIGTKFNGEIEADSGWTSIFITPGYQFKVVDAFSTNFHLPQSTLVMLISAFAGREKILAAYQHAIDEQYRFFSFGDAMFIK

SEQ ID NO: 65046 - protein, 343 aa, Carnobacterium maltaromaticum; identical to SEQ ID NO: 65045
  misc_feature (1)..(343): tr|K8E4V0|K8E4V0_CARML S-adenosylmethionine:tRNA ribosy ltransferase-isomerase OS=Carnobacterium maltaromaticum LMA28 OX=1234679 GN=queA PE=3 SV=2

SEQ ID NO: 65047 - protein, 343 aa, Carnobacterium sp.
  misc_feature (1)..(343): tr|A8U9M7|A8U9M7_9LACT S-adenosylmethionine:tRNA ribosy ltransferase-isomerase OS=Carnobacterium sp. AT7 OX=333 990 GN=queA PE=3 SV=1
MLTTKDFDFDLPEELIAQTPLENRSSSKLLILDKETGKVEDKHFTDILDELHEGDALVMNDTRVLPARLHGIKTETGAHIEILLLKNTENDRWETLVKPAKKATVGNVISFGDGRLTATVKEELTHGGRIIDFSYEGIFLEVLESLGEMPLPPYIKERLEDSERYQTVYAKENGSAAAPTAGLHFTQELLEQIKAKGVQLVFLTLHVGLGTFRPVSVDSIEDHEMHSEFYRLTEESAAALTAVQKNGGKIVAVGTTSIRTLETIGTKFNGELKADSGWTDIFISPGYKFKVVDAFSTNFHLPKSTLVMLVSAFAGREHVLAAYQHAVDEKYRFFSFGDAMFVK

SEQ ID NO: 65048 - protein, 374 aa, Carnobacterium sp.
  misc_feature (1)..(374): tr|A0A5C1LNN2|A0A5C1LNN2_9LACT S-adenosylmethionine:tRN A ribosyltransferase-isomerase OS=Carnobacterium sp. PL 26RED25 OX=2592352 GN=queA PE=3 SV=1
MTLTTNDFDFDLPEELIAQVPIQDRLASRLLKLDAQTGNFQDGYFPDVASELEAGDVLVLNNTRVLPARLHGIRPDTGGHIEVLLLNNTEGDKWETLVKPARRIRVGTEIVFGDGQLVAVITEVLDHGGRIVEFKYNGIFLEVLEALGEMPLPPYIKKKLDNPDRYQTVYAKENGSAAAPTAGLHFTEEFMNALKDRGVEIAYLTLHVGLGTFRPVSVDDIDAHKMHSEFYRLDQENAAKIRRAQEGGHKVIAVGTTSIRTLETIGTKFKGQVQADSGWTDIFIAPGYQFSVVEGFITNFHLPKSTLIMLVSAFAGRDHVLAAYQHAVEEKYRFFSFGDAMFLRGPQYADPAITAEDIEAAKQRNSQFFTNEDK

SEQ ID NO: 65049 - protein, 343 aa, Carnobacterium viridans
  misc_feature (1)..(343): tr|A0A1H1BBW4|A0A1H1BBW4_9LACT S-adenosylmethionine:tRN A ribosyltransferase-isomerase OS=Carnobacterium virida ns OX=174587 GN=queA PE=3 SV=1
MLTTKDFDFDLPEELIAQTPLENRSSSKLLILDKETGEVDDKHFTDILEELNEGDALVMNDTRVLPARLHGVKPSTGAHLEILLLKNTEKDQWETLVKPAKKAIVGDVISFGDGRLTATVMEELTHGGRIIDFSYNGIFLEVLESLGEMPLPPYIKERLEDSERYQTVYAKENGSAAAPTAGLHFTEELLEQIKSKGVKLVFLTLHVGLGTFRPVSVDSIEDHEMHSEFYRLTEESAAELTAVRNNGGRIIAVGTTSIRTLETIGTKFNGEIKADSGWTDIFISPGYTFKVVDAFSTNFHLPKSTLVMLVSAFAGREHVLAAYQHAVDERYRFFSFGDAMFVK

SEQ ID NO: 65050 - protein, 345 aa, Caryophanon latum
  misc_feature (1)..(345): tr|A0A1C0Z5M6|A0A1C0Z5M6_9BACL S-adenosylmethionine:tRN A ribosyltransferase-isomerase OS=Caryophanon latum OX= 33977 GN=queA PE=3 SV=1
MKVEDFDFHLPEELIAQTPLLDRTASRLMVVDKTTNSVAHEQFPHILEELQQGDCLVLNDTRVLPARLMGTKQPTGANIELLLLKQNEQDVWETLAKPAKRVKIGTVVSFGDGLLQAECIGELDHGGRIFKFMYDGIFYEILDQLGEMPLPPYIREKLDDQDRYQTVFAKERGSAAAPTAGLHFTEEILDAVRAKGVSIAFVTLHVGLGTFRPVSVEDIDSHDMHSEFYSVSEETANIINETKARGGKVISVGTTSTRTLETVASRHDGKIVAEQGWTAIFIYPGYEWKCVDGLLTNFHLPKSTLVMLVSSLANRELILDAYAQAVEEKYRFFSFGDAMFIRPVR

SEQ ID NO: 65051 - protein, 345 aa, Caryophanon tenue
  misc_feature (1)..(345): tr|A0A1C0YN00|A0A1C0YN00_9BACL S-adenosylmethionine:tRN A ribosyltransferase-isomerase OS=Caryophanon tenue OX= 33978 GN=queA PE=3 SV=1
MKVEDFDFHLPEELIAQTPLLDRTASRLMVVDKQVGEVEHHHFPQILNEIQAGDCLVLNDTRVLPARLMGTKEPTGANIELLLLKQNEEDVWETLAKPAKRVKIGTVVSFGDGLLQAECIGELDHGGRIFKFIYDGIFYEILDQLGEMPLPPYIREKLDDQDRYQTVFAKERGSAAAPTAGLHFTEEILAAIRAKGVEIVFITLHVGLGTFRPVSVDDIDNHDMHSEFYSVTEEAAAIINRTKANGGKVISVGTTSTRTLETVASRHNGQIVAEQGWTSIFIYPGYEWKCVDGLLTNFHLPKSTLVMLVSSLANRDLILDAYAKAVDEKYRFFSFGDAMFIRPVR

SEQ ID NO: 65052 - protein, 358 aa, Castellaniella defragrans
  misc_feature (1)..(358): tr|W8X5W9|W8X5W9_CASDE S-adenosylmethionine:tRNA ribosy ltransferase-isomerase OS=Castellaniella defragrans 65P hen OX=1437824 GN=queA PE=3 SV=1
MTDSLDIAQFDYELPPELIAQHPAARRDASRLLRLDGAGGLHDLQFTDLPGLLRAGDLLVFNDTRVIKARLRGRKDSGGQVEVLIERITEPRRALAHVRASKSPRPGTRLALADGAFEAEVLGRRDELFELAFPAPVLELLERHGSVPLPPYITHGAGSEDEARYQTVYAAKPGAVAAPTAGLHFDQAMLDRLDAMGVERAFVTLHVGAGTFQPVRVARISEHVMHAERYVVPADTLRRIRETRARGGRVIAVGTTSVRSLEAAAHDGDGEHACEGDTRLFITPGYRFAHVDALITNFHLPQSTLLMLVSALAGLEPIRRAYAHAVRSRYRFFSYGDAMFIEAAQDLAPADQPQAPTP

SEQ ID NO: 65053 - protein, 348 aa, Castellaniella sp.
  misc_feature (1)..(348): tr|A0A522TZ08|A0A522TZ08_9BURK S-adenosylmethionine:tRN A ribosyltransferase-isomerase OS=Castellaniella sp. OX =1955812 GN=queA PE=3 SV=1
MDISQFDYELPPELIAQHPAERRDASRLLHLDAAGGLHDLHFTDLPGLLRAGDLLVFNNTRVIKARLRGRKETGGQVEVLVERILAPTRALVHLRSSKSPHAGTRLLLADGAIQAEVLGRQGELFELSFPSPLLNLLEQYGDVPLPPYITHAPAAEDESRYQTVYAEKPGAVAAPTAGLHFDQAMLDRLKTQDIGEAFVTLHVGAGTFQPVRVTNISEHVMHSERYVVPESVFAQIHETRARGGRVIAVGTTSVRSLEAAAHEGDGVHTCEGDTRLFITPGYTFQNVDALITNFHLPQSTLLMLVSALAGMEPIRRAYAHAVQSRYRFFSYGDAMFIEAAKAASSPTS

SEQ ID NO: 65054 - protein, 339 aa, Catabacter hongkongensis
  misc_feature (1)..(339): tr|A0A0M2NK37|A0A0M2NK37_9FIRM S-adenosylmethionine:tRN A ribosyltransferase-isomerase OS=Catabacter hongkongen sis OX=270498 GN=queA PE=3 SV=1
MKTSDFDYELPEELIAQTPVSPRDHSRLLVYDRQTKETFDRHFYDVTDYLKKGDVLVVNETKVIPARLYGKKRGTETDFEFLLLKRLQLDIWEVIMRPGKKLKPGGFVDFGDDLCAELLCKKEDGVCEVRFHYDGVFEELLDRYGNMPLPPYITEKLEEKERYQTVYAKEDGSAAAPTAGLHFTPELMRKIEEMGVTIVKILLHVGLGTFRPMKEDTVEEHIMHSEYYSVSEQAARMINDAKKEGRRVIAVGTTSVRTLESAACGGRVQAGSADTDIFIYPGYDYQIVDALITNFHLPKSTLIMLVSAFCGREETLRIYRRAVEERYRFFSFGDAMLII

SEQ ID NO: 65055 - protein, 349 aa, Catalinimonas alkaloidigena
  misc_feature (1)..(349): tr|A0A1G9D9J6|A0A1G9D9J6_9BACT S-adenosylmethionine:tRN A ribosyltransferase-isomerase OS=Catalinimonas alkaloi digena OX=1075417 GN=queA PE=3 SV=1
MKLSQFKFDLPPELIAQHPTDNRDESRLMVVHRDTGKIEHRIFKDVLDYFDEGDVFVVNDTQVFPARLYGRKEKTGAKIEVFLLRELNASAHLWDVLVDPARKIRVGNKLYFGDGELVAEVIDNTTSRGRTIRFLYDGDEKDFHKMIDTLGETPLLKEYINRDVTKNDRERYQTIFAKNKGAVAAPTAGMHFTPQLIKRLAIKGIDIVPITLHIGLGTFREVDVEDLTKHKTDSENFVVTDQTADMVNTALDEKRRICAIGTTSMRALESSVSANNRLKANQGWTDRFIFPPYDFKIANALVTNFQLPQSTLLMLACAFGGYDLIMNAYEVAIKERYRFFSYGDAMLIV

SEQ ID NO: 65056 - protein, 403 aa, Catalinimonas alkaloidigena
  misc_feature (1)..(403): tr|A0A1G9F1P1|A0A1G9F1P1_9BACT S-adenosylmethionine:tRN A ribosyltransferase-isomerase OS=Catalinimonas alkaloi digena OX=1075417 GN=queA PE=3 SV=1
MGIPPLVLSDYQYELPDERIARFPLTPRDASKLLVYRQGTLTHHTFRDLDALLPAQTLLVFNDTKVIPARLFFHRTTGAQIEVFLLHPQEPSPVMSEAMQQTDTCTWQAMVGNRKRWKAGEVLEKTWETPQGTITLRAEQAGADRVTFHWTPATLTFAEVLTASGEMPLPPYLKRSVTEQDRTQYQTVYSKQEGAVAAPTAGLHFTPEVLARLQTRGIALDFLTLHVSAGTFQPIKTELVTEHAMHREQVELSRQNLLHLQQHLGHIVAVGTTSMRTLESLYWFGVKLLHDPQSTFSIDQQLAYSIPATQQPSAAEALRAVEAYLDRTRQEILRGETGIYIHPGYDFKLCRGLITNYHQPGSTLILLVAAFVGADWRRIYDEALQHDYRFLSFGDSSLLLPNG

SEQ ID NO: 65057 - protein, 348 aa, Catellicoccus marimammalium
  misc_feature (1)..(348): tr|K8ZN71|K8ZN71_9ENTE S-adenosylmethionine:tRNA ribosy ltransferase-isomerase OS=Catellicoccus marimammalium M 35/04/3 OX=1234409 GN=queA PE=3 SV=1
MTLTTEDFDFYLPDELIAQTPLENRDQSRMLVLDPNTGAVEDKHFYDIIDELNPGDALVMNDTRVLPARLHGVKTETGGHLEVLLLHNTEGNVWETLVKPARRAKVGTKIDFGDGLLQATVVEELEHGGRMIEFSYDGVFLEILEQLGEMPLPPYIKERLEEQDRYQTVYAKENGSAAAPTAGLHYTPELMQKIEEKGVKIVYVTLHVGLGTFRPVSVDQLEDHEMHSEFYRLTPEAAQTLNEVRDAGGKIVAVGTTSIRTLETIGTKFNGEIKPDSGWTNIFIYPGYEFKVVDAFNTNFHLPKSTLVMLVSAFAGRENVLHAYQHAVEEGYRFFSFGDAMFVRPKKK

SEQ ID NO: 65058 - protein, 350 aa, Catenibacterium mitsuokai
  misc_feature (1)..(350): tr|E2NVU6|E2NVU6_CATMR S-adenosylmethionine:tRNA ribosy ltransferase-isomerase OS=Catenibacterium mitsuokai (st rain DSM 15897 / JCM 10609 / CIP 106738 / RCA14-39) OX= 451640 GN=queA PE=3 SV=1
MFMKGRFSFMDIELFDYNLPEELIAQTPLKKRDTSRLMVLDKETGNVEHKHFYDILDYLKPGDVLVRNNTKVIPARLYGLKEETGGHVEVLLLKDLHDDLWECLVGNAKIVKLGTVITFGDGRLKAQCTEIREEGIRIFKMIYDGIFYEILDQLGIMPLPPYIKEKLNDPDRYQTVYAKVEGSAAAPTAGLHFTEELLQKVREKGVEILDVTLHVGLGTFRPVKVENVLEHHMHSEYYEISEEVAEKLNQAKKEGRRIIAVGTTSCRTLEANHSKYGCFKAAHENTNIFIYPGYTFTGIDALITNFHLPKSTLVMLVSALAGREHILNAYKIAVNEKYRFFSFGDAMFIH

SEQ ID NO: 65059 - protein, 341 aa, Catenibacterium sp.
  misc_feature (1)..(341): tr|A0A373I5H4|A0A373I5H4_9FIRM S-adenosylmethionine:tRN A ribosyltransferase-isomerase OS=Catenibacterium sp. A M22-15 OX=2292991 GN=queA PE=3 SV=1
MDIELFDYDLPEELIAQTPLKKRDTSRLMVLDKETGDVEHKHFYDILDYLKPGDVLVRNNTKVIPARLYGLKEETGGHVEVLLLEDLHDDLWECLVGNAKIVKLGTVITFGDGRLKAQCTEIREEGIRIFKMIYDGIFYEILDQLGIMPLPPYIKEKLNDPDRYQTVYAKVEGSAAAPTAGLHFTEELLQKVREKGVEILDVTLHVGLGTFRPVKVENVLEHHMHSEYYEISEEVAEKLNQAQKEGRRIIAVGTTSCRTLEANHSKYGCFKAAHENTNIFIYPGYTFTGIDALITNFHLPKSTLVMLVSALAGREHILNAYKIAVNEKYRFFSFGDAMFIH

SEQ ID NO: 65060 - protein, 348 aa, Catenibacterium sp.
  misc_feature (1)..(348): tr|R7GR38|R7GR38_9FIRM S-adenosylmethionine:tRNA ribosy ltransferase-isomerase OS=Catenibacterium sp. CAG:290 O X=1262767 GN=queA PE=3 SV=1
MKGRFSFMDIELFDYDLPEELIAQTPLKKRDTSRLMVLDKETGNVEHKHFYDILDYLKPGDVLVRNNTKVIPARLYGLKEETGGHVEVLLLKDLHDDLWECLVGNAKIVKLGTVITFGDGRLKAQCTEIREEGIRIFKMIYDGIFYEILDQLGIMPLPPYIKEKLNDPDRYQTVYAKVEGSAAAPTAGLHFTEELLQKVREKGVEILDVTLHVGLGTFRPVKVENVLEHHMHSEYYEISEEVAEKLNQAKKEGRRIIAVGTTSCRTLEANHSKYGCFKATHENTNIFIYPGYTFTGIDALITNFHLPKSTLVMLVSALAGREHILNAYKIAVNEKYRFFSFGDAMFIH

SEQ ID NO: 65061 - protein, 347 aa, Catenovulum agarivorans
  misc_feature (1)..(347): tr|W7QTA5|W7QTA5_9ALTE S-adenosylmethionine:tRNA ribosy ltransferase-isomerase OS=Catenovulum agarivorans DS-2 OX=1328313 GN=queA PE=3 SV=1
MRVSDFSFDLPDELIARYPAEKRSQSRLLVVDGDSGEIEHKVFNQMVDLVTDKDLIIFNNTKVIPARLLGQKVSGGKIEVLVERMLEGNQILAHVRANKALKPGTEVVLEQHIRAKMLERQDDLFVLQVLNEEPILSLLEQYGHMPLPPYIDRADEQTDKDRYQTVYGEVPGAVAAPTAGLHFDEALLAKIADKGVQVEYVTLHVGAGTFQSIRVDNVKDHQMHAEYIDVPQHVVDAVFACKQRGGRVIAVGTTSVRSLESAAQFANDALLAPYQGDTSIFIYPGYEFQVVDAMFTNFHLPESTLIMLVSAFAGQQHIKQAYKVAVEEKYRFFSYGDSMFLTKQTQK

SEQ ID NO: 65062 - protein, 354 aa, Catenovulum maritimum
  misc_feature (1)..(354): tr|A0A0J8JQM2|A0A0J8JQM2_9ALTE S-adenosylmethionine:tRN A ribosyltransferase-isomerase OS=Catenovulum maritimum OX=1513271 GN=queA PE=3 SV=1
MRVSDFYFDLPDELIARFPAENRSESRLLSVDGNTGDLSHLVFNQMLDLVNENDLLIFNNTKVIPARLLGQKVTGGKIEVLVERILSDSQVLAHVRSNKALKPGAELILEDKIQLKMVERQNDLFILDVLNETPVLELLEAYGHMPLPPYIDRADTLSDKERYQTVYGQVPGAVAAPTAGLHFDNDLIEKIKAKGVNTAEVTLHVGAGTFQSIRVDDIKDHQMHSEQIFVDQAVVDKIKSCKAKGGRVIAVGTTSVRSLESAAKFAQENGLDDLIAAHQGDTNIFIYPGYKFKVVDAMFTNFHLPESTLIMLVSAFAGKENIHNAYQEAIKQKYRFFSYGDSMFLTKQTPSEQA

SEQ ID NO: 65063 - protein, 347 aa, Catenovulum sp.
  misc_feature (1)..(347): tr|A0A2S0VL64|A0A2S0VL64_9ALTE S-adenosylmethionine:tRN A ribosyltransferase-isomerase OS=Catenovulum sp. CCB-Q B4 OX=2172099 GN=queA PE=3 SV=1
MLVSDFHFDLPDELIARYPAPNRTDSRLLTLDGNSGEIQHKQFVDMLDLVSEKDLLIFNNTKVIPARLLGQKITGGKIEVLVERVLDEHNLLAHVRANKALKPGNQVVLEGVIQAEMMGREGDLFQLKILNEENVFDLLEQHGHMPLPPYIDRADENEDKNRYQTVYGTEKGAVAAPTAGLHFDESLLAKLKDKGVRCEFVTLHVGAGTFQSIRVDNVKEHTMHSEYAIVPQNVVDAIKQTKANGGRVIAVGTTSVRSLESAAQAAGDELISTFQDDTQIFIYPGYQFKVVDAMFTNFHLPESTLIMLVSAFAGKENILKAYNQAIAEKYRFFSYGDSMFLQRQTEK

SEQ ID NO: 65064 - protein, 385 aa, Catenulispora acidiphila
  misc_feature (1)..(385): tr|C7Q6M3|C7Q6M3_CATAD S-adenosylmethionine:tRNA ribosy ltransferase-isomerase OS=Catenulispora acidiphila (str ain DSM 44928 / NRRL B-24433 / NBRC 102108 / JCM 14897) OX=479433 GN=Caci_5199 PE=3 SV=1
MSIVLHEPSVVNAAVPSEESAIPPGPLGTGFRVSSDLLARKPAEARGLDRDGVRLLVARGRGADDPEVAHYVFSDLPDVLEPGDLLVVNNSGTLPAALDAVDPDSGTRVVLHVSTGTPQDPDAWIVELRRPMADGSTRPFALGPDSQDPDSPATPGLRLRVTGGATVTLLRPYTRRLWVARLDLGMSVADYLTRHGRAIRYDYVDRDWPITAYQTVFAAIPGSAEMPSAARPFSTDVVARLVAKGVYIAPITLHTGVASPEAHEKPYAEWYSVPEATAELVNHVRARGGRVIAIGTTAVRALESVADEEGTVHPGQGWTELIITPQRGVRAVDGLLTGFHEPEASHLLMLTAIAGPRLIRASYDAALAARYLWHEFGDVNLLLRR

SEQ ID NO: 65065 - protein, 341 aa, Catonella morbi
  misc_feature (1)..(341): tr|V2Y943|V2Y943_9FIRM S-adenosylmethionine:tRNA ribosy ltransferase-isomerase OS=Catonella morbi ATCC 51271 OX =592026 GN=queA PE=3 SV=1
MKTSDFFYELPEELIAQDPLEDRTASRLLVLDRKTDKLEHKIFSDVIDYLNPGDCLVINNTRVIPARLIGEKEGTGGKVEILLLKRRENDIWESLVKPGKKLRPGARVTFGDGRLKAEILEIAEEGNRLVKFYYEGIFEEILDSLGEMPLPPYITHKLEDKEMYQTVYAKFDGSAAAPTAGLHFTNELLEKIRHKGVRIASITLHVGLGTFRPVKVEDVNNHHMHTEWYEVNKEAADIINETKKNGGRVICVGTTSCRTIESVADENGLMSAKTGETDIFIYPGYKFKVMDGLITNFHLPESTLVMLVSAFAGKERVLSAYETAVKEIYRFFSFGDAMILI

SEQ ID NO: 65066 - protein, 370 aa, Caulobacter flavus
  misc_feature (1)..(370): tr|A0A2N5D374|A0A2N5D374_9CAUL S-adenosylmethionine:tRN A ribosyltransferase-isomerase OS=Caulobacter flavus OX =1679497 GN=queA PE=3 SV=1
MRLSDFDFDLPDDSIALRPAEPRDSARFLVVRPGQALEDRIVRDLPDFLRPGDALVFNDTRVIPARLSGLREGRTTGGADGTPVAVEATLHRRIAPNRWSAFMRPGKRLKVGDRVAFAAISSTPCEAERLDATVVEKHEGGEVVLAFDLSGPDLDIGIARHGMMPLPPYIAAKRAEDDRDRADYQTVYAREDGSVAAPTAGLHFTPDLLEALKAKGVSLHFVTLHVGAGTFLPVKTDEVSEHKMHAEFGEVSEETADALNAVHAAGGRIVCVGTTSLRLIESATGEDGVVRPFADETAIFITPGYRFRAVDVLMTNFHLPKSTLFMLVSAFAGRAKMREAYEHAISTGYRFYSYGDGSLLFRADPETETV

SEQ ID NO: 65067 - protein, 362 aa, Caulobacter henricii
  misc_feature (1)..(362): tr|A0A0N7JHF7|A0A0N7JHF7_9CAUL S-adenosylmethionine:tRN A ribosyltransferase-isomerase OS=Caulobacter henricii OX=69395 GN=queA PE=3 SV=1
MRLSDFDFVLPEDNIALRPAEPRDSARLLVVRPGEDIADQIVRELPDILRPGDALVFNDTRVIPARLAGLRDARTTGGGDGAPVPVEATLHQRIAPDRWKAFMRPGKRLKVGDHVAFGSDEHRLDATVLEKHEGGEVLLAFDLTGPELDVGIARHGEMPLPPYIAAKRAEDDRDRADYQTVYAREDGSVAAPTAGLHFTPDLLERLRARGVSLHFVTLHVGAGTFLPVKTDEVSEHRMHAEYGEVTAAIADALNAVRAAGGRIVCVGTTSLRLLESATGEDRVIRPFADETAIFITPGYRFRAADVLMTNFHLPKSTLFMLVSAFAGQTTMRAAYERAIATGYRFYSYGDSSLLFPADPAET

SEQ ID NO: 65068 - protein, 363 aa, Caulobacter mirabilis
  misc_feature (1)..(363): tr|A0A2D2B455|A0A2D2B455_9CAUL S-adenosylmethionine:tRN A ribosyltransferase-isomerase OS=Caulobacter mirabilis OX=69666 GN=queA PE=3 SV=1
MRLSDFDFDLSEDLIALRPATPRESAKLLAVRPGAPLEDLTVGDLPSLLRAGDALVFNDTRVIPARLDGLREGRSEGGGDGSPVAVEATLHKRLAPSRWSAFMRPGKRLKVGDRVRFGASEDRACDLTHLDATVAEKGEGGEVVLAFDLSGPDLDIAINTRGHMPLPPYIAAKRGEDEQDRTDYQTVYAREDGSVAAPTAGLHFTPELLQALADKGVSQHFVTLHVGAGTFLPVKVDDVAEHRMHPEYGEVSAEVADALNGVRANGGRIVCVGTTSLRLLESATGEDGVVRAWADETAIFITPGYRFRAADLLMTNFHLPKSTLFMLVSAFAGQAKMREAYAHAIATEYRFYSYGDSSLLFRA

SEQ ID NO: 65069 - protein, 368 aa, Caulobacter radicis
  misc_feature (1)..(368): tr|A0A2T9K526|A0A2T9K526_9CAUL S-adenosylmethionine:tRN A ribosyltransferase-isomerase OS=Caulobacter radicis O X=2172650 GN=queA PE=3 SV=1
MRLSDFDFHLPDDSIALRPAEPRDSARFLVVRPGQDLEDRIVRELPDFLRPGDALVFNDTRVIPARLSGLREGRTTGGGDGAPVAVEATLHRRIAPDRWSAFMRPGKRLKAGDRVAFAAEGSVACEAERLDATVVEKHEGGEVVLAFDLSGPDLDIGIARHGMMPLPPYIAAKRAEDDRDRADYQTVYAREDGSVAAPTAGLHFTPDLLEALKAKGVSLHFVTLHVGAGTFLPVKTDEVSEHKMHAEFGEVSAQTADALNAVHAAGGRIVCVGTTSLRLIESATGEDGVVRPFADETAIFITPGYRFRAVDVLMTNFHLPKSTLFMLVSAFAGRATMRAAYEHAISTGYRFYSYGDGSLLFRADTETV

SEQ ID NO: 65070 - protein, 368 aa, Caulobacter radicis
  misc_feature (1)..(368): tr|A0A2T9JFK5|A0A2T9JFK5_9CAUL S-adenosylmethionine:tRN A ribosyltransferase-isomerase OS=Caulobacter radicis O X=2172650 GN=queA PE=3 SV=1
MRLSDFDFDLPDDSIALRPAEPRDSARFLVVRPGQALDDRIVRDLPDFLSPGDALVFNDTRVIPARLSGLREGRTTGGADGTPVAVEATLHRRMAPDRWSAFMRPGKRLKAGDRVAFAAQGSVACEAERLDATVVEKHEGGEVVLAFDLSGPDLDIGIARHGMMPLPPYIAAKRAEDDRDRADYQTVYAREDGSVAAPTAGLHFTPDLLEALKAKGVSLHFVTLHVGAGTFLPVKTDEVSEHKMHAEFGEVSAQTADALNAVHVAGGRIVCVGTTSLRLIESATGEDGVVRPFADETAIFITPGYRFRAVDVLMTNFHLPKSTLFMLVSAFAGRKTMRGAYEHAISTGYRFYSYGDGSLLFRAETETV

SEQ ID NO: 65071 - protein, 373 aa, Caulobacter rhizosphaerae
  misc_feature (1)..(373): tr|A0A561MWF1|A0A561MWF1_9CAUL S-adenosylmethionine:tRN A ribosyltransferase-isomerase OS=Caulobacter rhizospha erae OX=2010972 GN=queA PE=3 SV=1
MRLSDFDFLLPDEAIALRPAEPRDSARLLVVKPGEGLEDRVVRDLPDFLRPGDALVFNDTRVIPARLMGRRAARETGGGDGSSVAVEATLHRRVAPDRWVAFMRPGKRLKEGDRIAFGHDSDRACMAGLLDATVVAKHEGGEIELAFDFAGVDLDLAVAAHGEMPLPPYIAAKRAEDERDRADYQTVYAREDGSVAAPTAGLHFTPDLLQRLKARGVSLHFVTLHVGAGTFLPVKTEVIAEHRMHAEFGEVPAAVADALNAARAAGGRIVCVGTTSLRLLESATGEDGVIRPFADETAIFITPGYRFRAADVLMTNFHLPKSTLFMLVSAFAGRATMKAAYEHAIATGYRFYSYGDGSLLFRAPTHENGPEQA

SEQ ID NO: 65072 - protein, 368 aa, Caulobacter segnis
  misc_feature (1)..(368): tr|D5VKP4|D5VKP4_CAUST S-adenosylmethionine:tRNA ribosy ltransferase-isomerase OS=Caulobacter segnis (strain AT CC 21756 / DSM 7131 / JCM 7823 / NBRC 15250 / LMG 17158 / TK0059) OX=509190 GN=queA PE=3 SV=1
MHLSDFDFDLPEDRIALRPAEPRDAARLLVVRPGQPLADHVVRELPDFLQPGDAMVFNDTRVIPARLSGLREGRTTGGADGTPVAVEATLHRRLTPDRWSAFMRPGKRLKVGDRVAFGGRDDRACALDRLDATVAEKHEGGEVVLAFDLSGPDLDVGIARHGDMPLPPYIAAKRGEDERDRADYQTVYAREDGSVAAPTAGLHFTPSLLEALKAKGVSTHFVTLHVGAGTFLPVKTDDVSEHKMHAEYGQVTREVADALNAARAAGGRIICVGTTSLRLLESATGEDGVVKPFADETAIFITPGYRFRAADILMTNFHLPKSTLFMLVSAFAGRETMRAAYEHAISTGYRFYSYGDGSLLFRAEPESR

SEQ ID NO: 65073 - protein, 368 aa, Caulobacter segnis
  misc_feature (1)..(368): tr|A0A2W5UX85|A0A2W5UX85_9CAUL S-adenosylmethionine:tRN A ribosyltransferase-isomerase OS=Caulobacter segnis OX =88688 GN=queA PE=3 SV=1
MRLSDFDFDLPEDRIALRPAEPRDAARLLVVSPGQGLADHVVRDLPDFLRPGDAMVFNDTRVIPARLSGLREGRTTGGADGTPVAVEATLHRRVAPDRWSAFMRPGKRLKVGDRVAFGARDDCACEADRLDATVAEKHEGGEVVLTFDLSGPDLDLGVARHGDMPLPPYIAAKRGEDERDRADYQTVYAREDGSVAAPTAGLHFTPDLLDALKAKGVSTHFVTLHVGAGTFLPVKTDDVSEHKMHAEYGQVTREVADALNAARAAGGRIVCVGTTSLRLLESATGEDGVVAPFADETAIFITPGYRFRAADVLMTNFHLPKSTLFMLVSAFAGRETMRAAYEHAISTGYRFYSYGDGSLLFRAEPESR

SEQ ID NO: 65074 - protein, 373 aa, Caulobacter sp.
  misc_feature (1)..(373): sp|B0T8H5|QUEA_CAUSK S-adenosylmethionine:tRNA ribosylt ransferase-isomerase OS=Caulobacter sp. (strain K31) OX =366602 GN=queA PE=3 SV=1
MRLSDFDFHLPDAAIALRPAEPRDSARLLVVRPGEGLEDRIVRDLPDFLRPGDALVFNDTRVIPARLMGRRAGRETGGGDGSPVAVEATLHRRIAPDRWVAFMRPGKRLKEGDRIAFGHDQDRACQAGMLDATVIAKHEGGEIELAFDFAGVDLDLAVAAHGEMPLPPYIAAKRAEDDRDRADYQTVYAREDGSVAAPTAGLHFTSDLLERLKAGGVSLHFVTLHVGAGTFLPVKTDVVADHKMHAEFGEVPAAVADALNAARAAGGRIVCVGTTSLRLLESATGEDRIIKPFADETAIFITPGYRFRAADVLMTNFHLPKSTLFMLVSAFAGQATMKAAYEHAIAAGYRFYSYGDGSLLFRAATDENGSEQS

SEQ ID NO: 65075 - protein, 372 aa, Caulobacter sp.
  misc_feature (1)..(372): tr|A0A4R3H8Q0|A0A4R3H8Q0_9CAUL S-adenosylmethionine:tRN A ribosyltransferase-isomerase OS=Caulobacter sp. BK020 OX=2512117 GN=queA PE=3 SV=1
MRLSDFDFHLPDEAIALRPAEPRDSARLLVVRPGAQGAGGLEDRIVRELPDFLRPGDALVFNDTRVIPARLMGLRAGRETGGGDGSPVAVEATLHRRVAPDRWIAFMRPGKRLKVGDRIAFGHDADRAGLAGLLDATVAAKHEGGEIELAFDFAGVDLDLAVAAHGEMPLPPYIAAKRAEDDRDRADYQTVYAREDGSVAAPTAGLHFTPDLMERLKARGVSLHFVTLHVGAGTFLPVKTDVIAEHRMHAEFGEVPAAVADALNAVRAAGGRVVCVGTTSLRLLESATGQDGVIKPFADETAIFITPGYRFRAADVLMTNFHLPKSTLFMLVSAFAGQATMKAAYAHAIATGYRFYSYGDGSLLFRADPEQA

SEQ ID NO: 65076 - protein, 366 aa, Caulobacter vibrioides
  misc_feature (1)..(366): sp|Q9A7Y2|QUEA_CAUVC S-adenosylmethionine:tRNA ribosylt ransferase-isomerase OS=Caulobacter vibrioides (strain ATCC 19089 / CB15) OX=190650 GN=queA PE=3 SV=1
MRLSDFDFDLPEDRIALRPAEPRDSARFLVVRPGQAVADHIVSDLPDFLRPGDALVFNDTRVIPARLSGLREGRTTGGADGTPVAVEATLHRRLAPDRWSAFMRPGKRLKVGDRVAFGGHEGRVGDLGRLDAVIAEKHDGGEVVLAFDLSGPDLDVGIAQHGDMPLPPYIAAKRGEDERDRADYQTVYAREDGSVAAPTAGLHFTPQLLERLKAKGVSLHFVTLHVGAGTFLPVKTDEVSEHRMHAEYGQVTQEIADALNAARAAGGRIVCVGTTSLRLLESATGEDGIVRPFADETAIFITPGYRFRTADVLMTNFHLPKSTLFMLVSAFAGTEAMRAAYEHAIATGYRFYSYGDSSLLFKDETC

SEQ ID NO: 65077 - protein, 364 aa, Caulobacter vibrioides
  misc_feature (1)..(364): tr|A0A290MHY3|A0A290MHY3_CAUVI S-adenosylmethionine:tRN A ribosyltransferase-isomerase OS=Caulobacter vibrioide s OX=155892 GN=queA PE=3 SV=1
MRLSDFDFDLPEDRIALRPAEPRHAARFLVVRAGQPLADHVVSDLPDFLRPGDALVFNDTRVIPARLAGLREGRSTGGANGTPVAVEATLHRRLAPDRWSAFMRPGKRLKVGDRVAFGAREDRDLDRLDAVIAEKHEGGEVVLAFDLSGPELDIGIAQHGDMPLPPYIAAKRGEDERDRADYQTVYAREDGSVAAPTAGLHFTPELLERLKAKGVSLHFVTLHVGAGTFLPVKTNDVSEHKMHAEYGQVTQEIADALNAVRAAGGRIVCVGTTSLRLLESATGEDGVVRPFADETAIFITPGYRFRAADVLMTNFHLPKSTLFMLVCAFAGTATMREAYAYAIETGYRFYSYGDSSLLFKDETR

SEQ ID NO: 65078 - protein, 368 aa, Caulobacter zeae
  misc_feature (1)..(368): tr|A0A2N5DQK2|A0A2N5DQK2_9CAUL S-adenosylmethionine:tRN A ribosyltransferase-isomerase OS=Caulobacter zeae OX=2 055137 GN=queA PE=3 SV=1
MRLSDFDFHLPDDNIALRPAEPRDSARFLVVRPGQDLEDHIVRELPDFLRAGDALVFNDTRVIPARLSGLREGRTTGGADGTPVAVEATLHRRIAPDRWSAFMRPGKRLKAGDRVAFAAEGSVACEAERLDATVVEKHEGGEVVLAFDLSGPDLDIGIARHGMMPLPPYIAAKRAEDDRDRADYQTVYAREDGSVAAPTAGLHFTPDLLEALKAKDVSLHFVTLHVGAGTFLPVKTDEVSEHKMHAEFGEVSQETADALNAVHAAGGRIVCVGTTSLRLIESATGEDGVVRPFADETAIFITPGYRFRAVDVLMTNFHLPKSTLFMLVSAFAGRKTMRAAYEHAISTGYRFYSYGDGSLLFRAETETV

SEQ ID NO: 65079 - protein, 214 aa, Caulobacteraceae bacterium
  misc_feature (1)..(214): tr|A0A4Q3TV91|A0A4Q3TV91_9CAUL S-adenosylmethionine:tRN A ribosyltransferase-isomerase (Fragment) OS=Caulobacte raceae bacterium OX=1978230 GN=queA PE=3 SV=1
GAALDAAIGAVGVMPLPPYIAAKRPQDDRDRSDYQTVYAREEGSVAAPTAGLHFTPDLLQRLADHGVGLHTVTLHVGAGTFLPVKVDDVADHRMHPEYGEVSAGTAQALNAVRRSGGRIVCVGTTSLRLLESAADEDGAIQAFAAETSIFITPGYRFKTADMLMTNFHLPKSTLFMLVSAFAGQERMRRAYGHAIADGYRFYSYGDACLLFRAP

SEQ ID NO: 65080 - protein, 357 aa, Caulobacteraceae bacterium
  misc_feature (1)..(357): tr|A0A4Q3STV2|A0A4Q3STV2_9CAUL S-adenosylmethionine:tRN A ribosyltransferase-isomerase OS=Caulobacteraceae bact erium OX=1978230 GN=queA PE=3 SV=1
MQLADFDFELPEDRIALRPVSPRDAARLLLVRPGEPLADLTVADLPSQLRAGDVLVLNDTRVIPARLKGRRVREGSDIAVEATLHRRLSPSQWTAFMRPGKKLAPGDRVRFGSMEDRACFLGELDATVVEKGEGGEVTLSFDLSGPDLDASIAERGAMPLPPYIAAKRGEDAQDRADYQTVYADEEGSVAAPTAGLHFTPELLARLTAMGVTLHFVTLHVGAGTFLPVKTENLAEHRMHAEYGEVDTQTADALNAAKAAGGRIVCVGTTSLRLVESATGEDGVVRPFAQETAIFITPGYRFRAADGLMTNFHLPKSTLFMLVSAFAGYETMRGAYAHAIADGYRFYSYGDASLLWRA

SEQ ID NO: 65081 - protein, 347 aa, Caulobacterales bacterium
  misc_feature (1)..(347): tr|A0A258CDM8|A0A258CDM8_9PROT S-adenosylmethionine:tRN A ribosyltransferase-isomerase (Fragment) OS=Caulobacte rales bacterium 32-67-6 OX=1970502 GN=B7Z13_06685 PE=3 SV=1
MKTADFDFDLPDSAIALRPAQPRDAARMLRVIPGQPLADLQVRDLPGELRAGDILVLNDTRVIPARLSGRRTRGESVVAVEATLHKRIAPDRWSAFMRPGKRLAPGDRVSFGESEDRACLLGALDATVVEKGEGGEILLAFDLAGPALDEAIKARGAMPLPPYIAAKRPEDDRDQTDYQTVYAQADGSVAAPTAGLHFTPELLARLTEAGVETCFVTLHVGAGTFLPVKVDDIEGHRMHAEFGEVSPETAERLNKARAAGGRIICVGTTSLRLVESAAGEDGVVRPFADDTAIFITPGYRFRAADGLMTNFHLPHSTLFMLVSAFSGLETMRAAYAHAIETGYRFYS

SEQ ID NO: 65082 - protein, 368 aa, Caulobacterales bacterium
  misc_feature (1)..(368): tr|A0A1F8I518|A0A1F8I518_9PROT S-adenosylmethionine:tRN A ribosyltransferase-isomerase OS=Caulobacterales bacte rium RIFCSPHIGHO2_01_FULL_70_19 OX=1797585 GN=queA PE=3 SV=1
MKTADFDFDLPEDRIALRPAEPRDSARLLVVRPGAGLEDRVVRDLPDFLRPGDALVFNDTRVIPARLSGVRQRPGPEGETLSVVVEATLHHRDAPDVWSAFMKPGKRIKAGDRIRFGAPSSGLLGDAACQLGRLDATVEARGEDGLVLLRFDLSGPFLDEAIRDVGVMPLPPYIAARRPEDERDRTDYQTVFAEHDGSVAAPTAGLHFTPGLLDAIRARGVSTHAVTLHVGAGTFLPVKAEDVAGHRMHSEWGEVSAETAAALNAVRAAGGRIVCVGTTSLRLLESAAGEDGVIHPFHGDTAIFITPGYRFRAADVLMTNFHLPKSTLFMLVSAFSGLETMKAAYAHAVQTGYRFYSYGDGSLLFRAA

SEQ ID NO: 65083 - protein, 357 aa, Caviibacterium pharyngocola
  misc_feature (1)..(357): tr|A0A2M8RT79|A0A2M8RT79_9PAST S-adenosylmethionine:tRN A ribosyltransferase-isomerase OS=Caviibacterium pharyn gocola OX=28159 GN=queA PE=3 SV=1
MRVSDFYFHLPDELIARYPKADRTSSRLLQLNGKNGEISHRTFADVVDLINEGDLLIFNNTRVIPARMFGHKASGGKIEVLVERVLDEHCCLAHIRSSKSPKEGAELVLGEDKLGEGKGVKMIMRARHESLFELELCNKSTALLEVLQQIGHIPLPPYIDRPDEDADKERYQTVYNKVPGAVAAPTAGLHFDNELLAKLKAKGVEFAFVTLHVGAGTFQPVRVENIEDHKMHAEYVEVPQEVVEAILRTKAAGKRVIAVGTTSVRSVESAALFAEENGKTQLLEPYFSDTSIFIYPGKKFRVIDCLITNFHLPESTLIMLVSAFAGFEHTMKAYKSAVENRYRFFSYGDAMFIEKAE

SEQ ID NO: 65084 - protein, 408 aa, Cecembia calidifontis
  misc_feature (1)..(408): tr|A0A4Q7PEE6|A0A4Q7PEE6_9BACT S-adenosylmethionine:tRN A ribosyltransferase-isomerase OS=Cecembia calidifontis OX=1187080 GN=queA PE=3 SV=1
MFKISSIEEIRLSDYEYNLPDERIAKFPLEKRDHSKLLQFSDGRISHHRFFELPELLPTGSLMAFNNTKVIPARLIFQRETGAKVEIFLLKPVAPSTIINEVMIRTDEVSWETMIGNLKKWKDGEELHGQIEIQGQPVVISAKLMDREKKVVSFSWTGENIPFVSIVEASGEVPLPPYLNREATEEDRPRYQTVYSKKEGAVAAPTAGLHFTDEVLENLEKKGVNKEFLTLHVSAGTFQPIKSEKVTDHAMHSEQVVIELSTLERLAAHPEKIIAVGTTSMRTLESLYWYGVRLIKEGDKQFFIPKLYPYEHEGYLLPGRTESFKAVLDLMNKNNLKEITGSTEIFIMPGYDFQVCDALITNFHQPSSTLILLVAAFTDGNWRQIYEEALNQDYRFLSYGDSSLLWRR

SEQ ID NO: 65085 - protein, 349 aa, Cecembia calidifontis
  misc_feature (1)..(349): tr|A0A4Q7P8E7|A0A4Q7P8E7_9BACT S-adenosylmethionine:tRN A ribosyltransferase-isomerase OS=Cecembia calidifontis OX=1187080 GN=queA PE=3 SV=1
MKLSDFKFDLPKKLISLYPTENRDESRLMVVHKKTGEIEHRVFKDIIEYFGDGDVFVMNDTKVFPARLYGNKEKTGAKIEVFLLRELNADLRLWDVLVDPARKIRVGNKLYFGDSDLVAEVIDNTTSRGRTIRFLFDGTDEEFYKTIDSLGETPLLKEYIERKVEPEDRDRYQTIFAKNVGAVAAPTAGLHFTPHLLKRLELKGVEITPITLHVGLGTFRQVDVEDLTKHKMDSENYNIPEKTVELVNQALDNKKRVVAVGTTTLKTIESSVTANGRLKVSSGWTDKFIIPPYDFKIANALITNFHLPESTLLMTAAAFGGYDLIMRAYKEAVKEKYRFFSYGDAMLIL

SEQ ID NO: 65086 - protein, 408 aa, Cecembia lonarensis
  misc_feature (1)..(408): tr|K1LF71|K1LF71_9BACT S-adenosylmethionine:tRNA ribosy ltransferase-isomerase OS=Cecembia lonarensis LW9 OX=12 25176 GN=queA_1 PE=3 SV=1
MLKYPSIEDIRLSDYEYILPEQRIAKFPLEKRDHSKLLHFHSGQISHQHFYELPQLLPSGSLMVFNNTKVIPARLIFQRETGAKIEIFLLKPLAPSTIINEIMIQTQEVTWEVMIGNLKKWKGEEVLQGEVFIQGKPCVISAKLLNRDQKTVSFSWTGEDIPFVSIVEASGEVPLPPYLNREATDEDKPRYQTVYSKKEGAVAAPTAGLHFTDTVLEELANKGIHKEFLTLHVSAGTFQPIKEEKVTEHPMHSEQVVVQMETVKRLAQHMEKVIAVGTTSMRSLESLYWYGVKLLLDQDQQFFIPKLYPYKHELKILPSRSESFQAVEDFMDGKGLKEITGSTEIFIMPGYDFKVCDGLVTNFHQPSSTLILLVAAYTGKDWRKIYQEALKNDYRFLSYGDSSLLWKQ

SEQ ID NO: 65087 - protein, 349 aa, Cecembia lonarensis
  misc_feature (1)..(349): tr|K1LVT1|K1LVT1_9BACT S-adenosylmethionine:tRNA ribosy ltransferase-isomerase OS=Cecembia lonarensis LW9 OX=12 25176 GN=queA_2 PE=3 SV=1
MKLSDFKLDVPKKLISLYPTDNRDESRLMVVHRKTGEIEHRLFKDIIEYFGEGDVFVMNDTKVFPARLYGNKEKTGAKIEVFLLRELNPDLRLWDVLVDPARKIRVGNKLYFGDSDLVAEVIDNTTSRGRTIRFLFDGSDEEFYKTIDTLGETPLLKEFIERKVEPEDRERYQTIFAKNVGAVAAPTAGLHFTPHLLKRLELKGVSVSPITLHVGLGTFRQVDVEDLTKHKMDSENYDIPERTVELVNEALDNKKRVVAVGTTTLKTVESSVTANGRLKLSSGWTDKFIIPPYEFKIANSLITNFHLPESTLLMTAAAFGGYDLIMKAYKEAVKEKYRFFSYGDAMLIL

SEQ ID NO: 65088 - protein, 408 aa, Cecembia rubra
  misc_feature (1)..(408): tr|A0A2P8ECK1|A0A2P8ECK1_9BACT S-adenosylmethionine:tRN A ribosyltransferase-isomerase OS=Cecembia rubra OX=148 5585 GN=queA PE=3 SV=1
MFKISSIEEIRLSDYDYTLPEERIAKFPLEKRDHSKLLQYLNGDVSHHRFFELPDLLPSGSLMVFNNTKVIPARLIFQRDTGAKIEIFLLKPLAPSPVINEVMICTDEVSWETMIGNLKKWKDGEVLQGQIDIQGQSIIISAKLTDRENKVVSFSWTGDNIPFVSIVEASGEVPLPPYLNREATEEDRPRYQTVYSKKEGAVAAPTAGLHFTEEVLDNLENKGVNKEFLTLHVSAGTFQPIKSEKVTDHAMHSEQVVIELSTLERLAAHPEKIIAVGTTSMRTLESLYWYGVKLIRGGDKQFFIPKLYPYEHKAYNLPERTESFKAVLEMMKKSNLKEITGSTEVFIMPGYDFKVCDALVTNFHQPSSTLILLVAAFTEGNWRKIYEEALSNDYRFLSYGDSSLLWKR

SEQ ID NO: 65089 - protein, 349 aa, Cecembia rubra
  misc_feature (1)..(349): tr|A0A2P8E609|A0A2P8E609_9BACT S-adenosylmethionine:tRN A ribosyltransferase-isomerase OS=Cecembia rubra OX=148 5585 GN=queA PE=3 SV=1
MKLSDFKFDFPKKLISLYPTDNRDESRLMVVHRKTGEIEHRTFKDIIEYFGDGDVFVMNDTKVFPARLYGNKEKTGAKIEVFLLRELNADLRLWDVLVDPARKIRVGNKLYFGDSDLVAEVIDNTTSRGRTIRFLFDGTDEEFYKTIDSLGETPILKEYIERKVEPEDRERYQTIFAKNVGAVAAPTAGLHFTPHLLKRLELKGVSISPVTLHVGLGTFRQVDVEDLTKHKMDSENYDIPEKTVELVNEALDNKRRVVAVGTTTLKTIESSVTANGRLKVSNGWTDKFIIPPYDFKIANALITNFHLPESTLLMTAAAFGGYDLIMKAYKEAVKEKYRFFSYGDAMLIL

SEQ ID NO: 65090 - protein, 272 aa, Cedecea davisae
  misc_feature (1)..(272): tr|S3JFX2|S3JFX2_9ENTR S-adenosylmethionine:tRNA ribosy ltransferase-isomerase OS=Cedecea davisae DSM 4568 OX=5 66551 GN=HMPREF0201_00815 PE=3 SV=1
MLDDKRILAHIRASKAPKPGAELLLGDDESVHATMTARHDALFEVEFNDERSVLDILNSIGHMPLPPYIDRPDEESDRELYQTVYSQKPGAVAAPTAGLHFDEPLLEKLRNKGIDMAFVTLHVGAGTFQPVRVDSIEDHIMHSEYAEVPQDVVDAVLACKARGNRVIAVGTTSVRSLESAAQAATNGLIEPFFGDTQIFIYPGYKYNVIDALVTNFHLPESTLIMLVSAFAGYKNTLHAYHEAVKAEYRFFSYGDAMFITCNPQAINERPGE

SEQ ID NO: 65091 - protein, 356 aa, Cedecea lapagei
  misc_feature (1)..(356): tr|A0A3S4IG34|A0A3S4IG34_9ENTR S-adenosylmethionine:tRN A ribosyltransferase-isomerase OS=Cedecea lapagei OX=15 8823 GN=queA PE=3 SV=1
MRVADFSFELPESLIAHYPQAERSSCRLLSLDGPTGALTHGTFTDLLDKLNPGDLLVFNNTRVIPARLFGRKASGGKIEVLVERMLDDKRILAHIRASKAPKPGAELLLGDDESVHATMVARHDALFEVEFNDERAVLDILNNIGHMPLPPYIDRPDEEADRELYQTVYSQKPGAVAAPTAGLHFDEPLLEKLRNKGVDMAFVTLHVGAGTFQPVRVDSIEDHIMHSEYAEVPQDVVDAVLACKARGNRVIAVGTTSVRSLESAAQAAKNDLIEPFFGDTQIFIYPGYQYNVIDALVTNFHLPESTLIMLVSAFAGYKNTLHAYHEAVKAEYRFFSYGDAMFITCNPQAINERPGE

SEQ ID NO: 65092 - protein, 356 aa, Cedecea lapagei
  misc_feature (1)..(356): tr|A0A2N0CM89|A0A2N0CM89_9ENTR S-adenosylmethionine:tRN A ribosyltransferase-isomerase OS=Cedecea lapagei OX=15 8823 GN=queA PE=3 SV=1
MRVADFSFELPESLIAHYPQPERSGCRLLSLDGPTGALTHGTFTDLLDKLNPGDLLVFNNTRVIPARLFGRKASGGKIEVLVERMLDDKRILAHIRASKAPKPGAELLLGDDESINATMTARHGALFEVEFNDERPVLDILNAIGHMPLPPYIDRPDEDADRELYQTVYSEKPGAVAAPTAGLHFDEPLLEKLREKGIEMAFVTLHVGAGTFQPVRVDSIEDHIMHSEYAEVPQEVVDAVLAAKARNNRVIAVGTTSVRSLESAAQAAKTDLIEPFFGDTQIFIYPGYQYKVIDALVTNFHLPESTLIMLVSAFAGYQNTMNAYKAAVEQNYRFFSYGDAMFITYNPQALNERVGD

SEQ ID NO: 65093 - protein, 356 aa, Cedecea neteri
  misc_feature (1)..(356): tr|A0A089RD71|A0A089RD71_9ENTR S-adenosylmethionine:tRN A ribosyltransferase-isomerase OS=Cedecea neteri OX=158 822 GN=queA PE=3 SV=1
MRVADFSFELPESLIAHYPQAERSSCRLLSLDGPTGALTHGTFTDLLDKLNPGDLLVFNNTRVIPARLFGRKASGGKIEVLVERMLDDKRILAHIRASKAPKPGAELLLGDDESVHATMVARHDALFEVEFNDERAVLDILNSIGHMPLPPYIDRPDEEADRELYQTVYSQKPGAVAAPTAGLHFDEPLLEKLRNKGIDMAFVTLHVGAGTFQPVRVDSIEDHIMHSEYAEVPQDVVDAVLACKARGNRVIAVGTTSVRSLESAAQASKNDPIEPFFGDTQIFIYPGYQYKVVDALVTNFHLPESTLIMLVSAFAGYKNTMHAYHEAVKAEYRFFSYGDAMFITCNPQAINERPGE

SEQ ID NO: 65094 - protein, 183 aa, Cedecea neteri
  misc_feature (1)..(183): tr|A0A2X2SYF5|A0A2X2SYF5_9ENTR S-adenosylmethionine:tRN A ribosyltransferase-isomerase OS=Cedecea neteri OX=158 822 GN=queA_1 PE=3 SV=1
MPLPRQRRACHFDEPLLEKLRNKGIDMAFVTLHVGAGTFQPVRVDSIEDHIMHSEYAEVPQDVVDAVLACKARGNRVIAVGTTSVRSLESAAQASKNDLIEPFFGDTQIFIYPGYQYKVIDALVTNFHLPESTLIMLVSAFAGYKNTMHAYHEAVKAEYRFFSYGDAMFITCNPQAINERPGE

SEQ ID NO: 65095 - protein, 356 aa, Cedecea sp.
  misc_feature (1)..(356): tr|A0A1X7J245|A0A1X7J245_9ENTR S-adenosylmethionine:tRN A ribosyltransferase-isomerase OS=Cedecea sp. NFIX57 OX =1566286 GN=queA PE=3 SV=1
MRVADFSFELPESLIAHYPQAERSSCRLLSLDGPTGALTHGTFTDLLDKLNPGDLLVFNNTRVIPARLFGRKASGGKIEVLVERMLDDKRILAHIRASKAPKPGAELLLGDDESVHATMVARHDALFEVEFNDERAVLDILNNIGHMPLPPYIDRPDEEADRELYQTVYSQKPGAVAAPTAGLHFDEPLLEKLRNKGVDMAFVTLHVGAGTFQPVRVDSIEDHIMHSEYAEVPQDVVDAVLACKARGNRVIAVGTTSVRSLESAAQAAKNDLIEPFFGDTQIFIYPGYQYKVIDALVTNFHLPESTLIMLVSAFAGYKNTMHAYHEAVKAEYRFFSYGDAMFITCNPQAINERPGA

SEQ ID NO: 65096 - protein, 362 aa, Celeribacter baekdonensis
  misc_feature (1)..(362): tr|A0A2R4M0A0|A0A2R4M0A0_9RHOB S-adenosylmethionine:tRN A ribosyltransferase-isomerase OS=Celeribacter baekdone nsis OX=875171 GN=queA PE=3 SV=1
MKLSDFDFDLPEALIATRPAKPRSSARLLVATPDTITDGHVTDLLDWLQPGDRLVLNDTKVLPARLTGKRGRDTAQGYQEAKIEVTLLEPQAEAGHGGMVWRALIKPLKKIKEGEEVRFSDDLSATLIAKEDGEAMVAFNLSGADFDKALAEAGSMPLPPYIEAKRKADAQDKEDYQTVWARNMGAVAAPTASLHFDEPLLKALAEKGVEFTYVTLHVGAGTFLPVKVDNVDDHKMHSEWGEVSEGAAIEINTTKQRGGRVIPVGTTALRLIESAAPAPGVIAPFLGETDIFIKPGYPFRVTDALMTNFHLPKSTLLMLVAALMGRERMRAVYEHAVAEGYRFFSYGDASLLLPQKDRGCEV

SEQ ID NO: 65097 - protein, 357 aa, Celeribacter baekdonensis
  misc_feature (1)..(357): tr|K2JQV3|K2JQV3_9RHOB S-adenosylmethionine:tRNA ribosy ltransferase-isomerase OS=Celeribacter baekdonensis B30 OX=1208323 GN=queA PE=3 SV=1
MKLSDFDFDLPEALIATRPAKPRSSARLLVATPDSITDGHVTDLLQWLQPGDRLVLNDTKVLPARLTGKRGRDTAQGYQEAKIEVTLLEPQAEAGHGGMIWRALIKPLKKIKEGEVVRFSDELSATLVAKDDGEAIVAFNLKGEDFDAALAAAGSMPLPPYIEAKRKADAQDKEDYQTVWARNMGAVAAPTASLHFDEPLLQALAQKGVEFTYVTLHVGAGTFLPVKVDNVEDHKMHAEWGEVSEGAAHEINTTKQGGGRVIPVGTTALRLIESAAPAPGVIAPFLGETDIFIKPGYSFRITDALMTNFHLPKSTLLMLVAALMGRERMRAVYEHAVAEGYRFFSYGDASLLLPQSD

SEQ ID NO: 65098 - protein, 353 aa, Celeribacter ethanolicus
  misc_feature (1)..(353): tr|A0A291GB75|A0A291GB75_9RHOB S-adenosylmethionine:tRN A ribosyltransferase-isomerase OS=Celeribacter ethanoli cus OX=1758178 GN=queA PE=3 SV=1
MKLSDFDFELPEGLIATRPAKPRSSARLLVATPTRIVDGHVTDLLEWFRPGDRLVLNDTKVLPARLTGKRGRDTAQGWQEAKIEVTLLEPQATPGQWRTLIKPLKKIREGEEVRFSDDLAARLIAKEDGEAVVEFNLTGEDFDRALNAAGSMPLPPYIEAKRKADQQDKTDYQTVWARNLGAVAAPTASLHFDQPLLKALADKGVEFTYVTLHVGAGTFLPVKVDDVSQHKMHSEWGEVSEGAAIEINTTKQRGGRVIPVGTTALRLIESAAPAPGVIAPFLGETDIFIKPGYEFRVADALMTNFHLPKSTLMMLVSAMMGRERIRQVYDHAIAEGYRFFSYGDASLLLPQEP

SEQ ID NO: 65099 - protein, 357 aa, Celeribacter halophilus
  misc_feature (1)..(357): tr|A0A1I3PSD8|A0A1I3PSD8_9RHOB S-adenosylmethionine:tRN A ribosyltransferase-isomerase OS=Celeribacter halophil us OX=576117 GN=queA PE=3 SV=1
MKLSDFDFDLPEALIATRPAKPRSSARLLVATPTRMVDGYVTDLLEWFQPGDRLVLNDTKVLPARLSGKRGRDTAQGYQEAKIEVTLLEPQAEAGHDRMVWRALIKPLKKIKEGEVVRFSDDLSATLIAKEDGEAVVAFNLTGEDFDKALAEAGSMPLPPYIEAKRKADAQDKEDYQTVWARNMGAVAAPTASLHFDEPLLKALQEKGVEFTYVTLHVGAGTFLPVKVDDVSQHKMHSEWGEVSEGAAREINATKACGGRVIPVGTTALRLIESAAPTKGEIAPFLGETDIFIKPGYAFRMADALMTNFHLPKSTLLMLVSALMGRERMREVYDHAVAESYRFFSYGDASLLLPHEA

SEQ ID NO: 65100 - protein, 353 aa, Celeribacter indicus
  misc_feature (1)..(353): tr|A0A0B5E006|A0A0B5E006_9RHOB S-adenosylmethionine:tRN A ribosyltransferase-isomerase OS=Celeribacter indicus OX=1208324 GN=queA PE=3 SV=1
MKLSDFDFDLPEALIATRPAKPRSSARLLVATPDAIHDGTVTDLTRWFRPGDRLVLNDTKVLPARLTGTRGRDTAEGYREARIEVTLLEPQAEAGQWRVLVKPLKKLREGETVRFSDALSAVLVAKEDGEAVVAFNLAGGDFDRALAEAGSMPLPPYIEAKRKADSQDKVDYQTVWAKTLGAVASPTASLHFDEPLLEALARMGVEFTYVTLHVGAGTFLPVKVDDVSEHRMHSEWGEVTERAAAEINATKAAGGRVIPVGTTALRLIESAAPEPGRIAPFLGETDIFITPGYTFRMTDALMTNFHLPKSTLLMLVSALMGRERMREVYDHAVAEKYRFFSYGDSSLLLPQGA

SEQ ID NO: 65101 - protein, 356 aa, Celeribacter manganoxidans
  misc_feature (1)..(356): tr|A0A291M2I4|A0A291M2I4_9RHOB S-adenosylmethionine:tRN A ribosyltransferase-isomerase OS=Celeribacter manganox idans OX=1411902 GN=queA PE=3 SV=1
MKLSDFDFDLPEDLIATRPARPRSSARLLVADGQVPGGSLRDAVVTDLPSFLRPGDRLILNNTRVIPARLSGLRHRDGAEGATAARIGITLLEPRGDGSWAALAKPAKKVRDGEDIVFAPGFSARVEGRAEGQVHLRFSVTGNDFDAALAQAGAMPLPPYIAAKRPADEADHTDYQTVFARHSGAVAAPTASLHFDQPLLERIAAMGVDFSEVTLHVGAGTFLPVKVDDVTTHRMHAEWGEVGAQAAAEINATRAAGGRIIPVGTTALRLIESAATPEGRMEPWDGETDIFIYPGYEFRIADGLMTNFHLPKSTLMMLVSALMGQARMREVYDHAIAERYRFFSYGDSSLLLPGGV

SEQ ID NO: 65102 - protein, 353 aa, Celeribacter marinus
  misc_feature (1)..(353): tr|A0A0P0A892|A0A0P0A892_9RHOB S-adenosylmethionine:tRN A ribosyltransferase-isomerase OS=Celeribacter marinus OX=1397108 GN=queA PE=3 SV=1
MKLSDFDFDLPEALIATRPAKPRSSARLLVATPDTLTDGVVTDLVDWFNAGDRLVLNDTKVLPARLTGKRGRDTAQGYQEAKIEVTLLEPQAEGGVWRALIKPLKKVKEGEVIRFSDDLSATLTAKEDGAAYVAFNLTGADFDKALNAAGSMPLPPYIEAKRKADAQDNEDYQTVWARKLGAVAAPTASLHFDAALLAALADKGVEITHVTLHVGAGTFLPVKVDNVDDHKMHAEWGEVTPEAAAEIAATKAAGGRVIPVGTTALRLIESAARETGAIAPFLGETDIFITPGFEFAVTDALMTNFHLPKSTLLMLVSALMGAPRMRAVYDHAVAQNYRFFSYGDASLLVPHRA

SEQ ID NO: 65103 - protein, 353 aa, Celeribacter neptunius
  misc_feature (1)..(353): tr|A0A1I3JQV5|A0A1I3JQV5_9RHOB S-adenosylmethionine:tRN A ribosyltransferase-isomerase OS=Celeribacter neptuniu s OX=588602 GN=queA PE=3 SV=1
MKLSDFDFDLPEALIATRPAKPRSSARLLVATPSRIVDGHVTDLLDWFQPGDRLVLNDTKVLPARLTGKRGRDTAQGWQEARIEVTLLEPLSVAGQWRALIKPLKKIREGEEVRFSDDLSAKLIAKEDGEAIVEFNLTGADFDKALAEAGSMPLPPYIEAKRKADAQDKEDYQTVWARNMGAVAAPTASLHFDAPLLKALSEKGVEFTYVTLHVGAGTFLPVKVDNVDEHKMHAEWGEVSEGAAIEINATKQRGGRVIPVGTTALRLIESAAPAAGVIAPFLGETDIFIKPGYEFRIADALMTNFHLPKSTLLMLVSALMGRERMREVYAHAVSEGYRFFSYGDASLLLPGEA

SEQ ID NO: 65104 - protein, 353 aa, Celeribacter persicus
  misc_feature (1)..(353): tr|A0A2T5HSK7|A0A2T5HSK7_9RHOB S-adenosylmethionine:tRN A ribosyltransferase-isomerase OS=Celeribacter persicus OX=1651082 GN=queA PE=3 SV=1
MKLSDFDFDLPEGLIATRPAKPRSSARLLVATPTRIVDRHVTDLLDWFRPGDRLVLNDTRVLPARLTGKRGRDTAQGYQEAKIELTLLEPQSVPGQWKALIKPLKKIREGEEVKFSDDLSATLVAKEEGEALVAFNLTGEDFDRALNAAGSMPLPPYIEAKRKADQQDKADYQTVWAKNLGAVAAPTASLHFDEPLLKALSEKGVEFTYVTLHVGAGTFLPVKVDDVSQHKMHSEWGEVSEGAAIEINTTKQRGGRVIPVGTTALRLIESAAPAPGVIAPFLGETDIFIKPGYEFRIADALMTNFHLPKSTLMMLVSAMMGRERMMQVYDHAVAERYRFFSYGDASLLLPQEP

SEQ ID NO: 65105 - protein, 360 aa, Celerinatantimonas diazotrophica
  misc_feature (1)..(360): tr|A0A4R1JLI9|A0A4R1JLI9_9GAMM S-adenosylmethionine:tRN A ribosyltransferase-isomerase OS=Celerinatantimonas di azotrophica OX=412034 GN=queA PE=3 SV=1
MRVADFSYELPEELIARYPTERRRDCRLLSLDGNSGAVEHLQFPQLVDLVRPGDLLVFNNTRVIPARLFGQKQTGGKIEILIERILDGNRVLAHMRASKSPKVGARLRFADAFDATLLARHDELFELRFDDQHNVLELLDSYGHMPLPPYIDRPDEDSDRERYQTVYSRHPGAVAAPTAGLHFDQELIAELENRGVSTAYVTLHVGAGTFQSIRVDNVEEHHMHSEYAIVSEEVVNKVLQTKANGGRVIAVGTTSVRSLESAAQATHEALIAPYADETDIFIYPGYRFKVIDAMITNFHLPESTLVMLVSAFAGKMNILSAYQQAVEQRYKFFSYGDAMFITRKDTPEQDESIGTVLDEV

SEQ ID NO: 65106 - protein, 349 aa, Cellulophaga algicola
  misc_feature (1)..(349): tr|E6X5U2|E6X5U2_CELAD S-adenosylmethionine:tRNA ribosy ltransferase-isomerase OS=Cellulophaga algicola (strain DSM 14237 / IC166 / ACAM 630) OX=688270 GN=queA PE=3 S V=1
MKLSGFNFELPEELLAEYPAENRDESKLMVIHRETGKIEHKMFKDMINYFDEGDVMVLNNTKVFPARLYGNKEKTGARIEVFLLRELNEEQRLWDVLVDPARKIRIGNKLYFGDDDTLVAEVIDNTTSRGRTLRFLYDGSYTDFRRKLKELGDTPLPKYIKRETEAEDAERYQTIYAKHEGAVAAPTAGLHFSKHLLKRLEIKGIDFAELTLHVGLGTFNPVEVEDLSKHKMDSEELIIDEKTTEIVNNAKKNKKRICAIGTTAMRGLESGVSSQHTLNTFEGWTNKFIFPPYDFSIANCMVTNFHLPKSTLLMMVSAFMGHDLMKKAYKEAILEGYKFYSYGDAMLII

SEQ ID NO: 65107 - protein, 349 aa, Cellulophaga baltica
  misc_feature (1)..(349): tr|A0A0A7KAG3|A0A0A7KAG3_9FLAO S-adenosylmethionine:tRN A ribosyltransferase-isomerase OS=Cellulophaga baltica 18 OX=1348584 GN=queA PE=3 SV=1
MKLSGFNFELPEELLAEYPAENRDESKLMVIHRETGKIEHKMFKDMIDYFDEGDVMVLNNTKVFPARLYGNKEKTGARIEVFLLRELNEEQRLWDVLVDPARKIRIGNKLYFGDDDTLVAEVIDNTTSRGRTLRFLYDGSYTDFRRKLKELGDTPLPKYIKRETEAEDAERYQTIYAKHEGAVAAPTAGLHFSKHLLKRLEIKGVDFAELTLHVGLGTFNPVEVEDLSKHKMDSEELIIDEKTTEIVNSAKKNKKRICAIGTTVMRGLESGVSSQHTLNTFEGWTNKFIFPPYDFSIANCMVTNFHLPKSTLLMMVSAFMGHDLMKKAYKEAILEGYKFYSYGDAMLII

SEQ ID NO: 65108 - protein, 349 aa, Cellulophaga baltica; identical to SEQ ID NO: 65107
  misc_feature (1)..(349): tr|A0A1G7CRN8|A0A1G7CRN8_9FLAO S-adenosylmethionine:tRN A ribosyltransferase-isomerase OS=Cellulophaga baltica OX=76594 GN=queA PE=3 SV=1

SEQ ID NO: 65109 - protein, 349 aa, Cellulophaga fucicola
  misc_feature (1)..(349): tr|A0A1K1P8C3|A0A1K1P8C3_9FLAO S-adenosylmethionine:tRN A ribosyltransferase-isomerase OS=Cellulophaga fucicola OX=76595 GN=queA PE=3 SV=1
MKLSSFNFELPDNLLAEYPSEHRDEAKLMVIHRETGKIEHKMFKDLINYFDEGDVMVLNNTKVFPARLYGNKEKTGARIEVFLLRELNAEQRLWDVLVDPARKIRIGNKLYFGDDETLVAEVIDNTTSRGRTLRFLYDGSYTDFRQKLKDLGETPLPKYIKRDVEESDEDRYQTIYAKHEGAVAAPTAGLHFSKHLLKRLEIKGVDFAELTLHVGLGTFNPVEVEDLSKHKMDSEELIIDEKATEIVNSALDRKRRICAVGTTAMRGLESAVSSNGRLNTHEGWTNKFIFPPYDFSIANSMVTNFHLPKSTLLMMVSAFIGHDLMKKAYKEAILESYKFYSYGDAMLIV

SEQ ID NO: 65110 - protein, 349 aa, Cellulophaga lytica
  misc_feature (1)..(349): tr|F0RDQ5|F0RDQ5_CELLC S-adenosylmethionine:tRNA ribosy ltransferase-isomerase OS=Cellulophaga lytica (strain A TCC 23178 / DSM 7489 / JCM 8516 / NBRC 14961 / NCIMB 14 23 / VKM B-1433 / Cy l20) OX=867900 GN=queA PE=3
MKLSSFNFELPDNLLAEYPSEHRDEAKLMVIHRETGKIEHKMFKDLINYFDEGDVMVLNNTKVFPARLYGNKEKTGARIEVFLLRELNAEQRLWDVLVDPARKIRIGNKLYFGDDETLVAEVIDNTTSRGRTLRFLYDGSYTDFRQKLKDLGETPLPKYIKREVEESDEDRYQTIYAKHEGAVAAPTAGLHFSKHLLKRLEIKGVDFAELTLHVGLGTFNPVEVEDLSKHKMDSEELVIDEKATEVVNAAIDNKRRICAIGTTAMRGLESAVSSNGHLNTYEGWTNKFIFPPYDFSIANSMVTNFHLPKSTLLMMVSAFIGHDLMKKAYKEAILESYKFYSYGDAMLII

SEQ ID NO: 65111 - protein, 349 aa, Cellulophaga sp.; identical to SEQ ID NO: 65110
  misc_feature (1)..(349): tr|A0A559N2Q1|A0A559N2Q1_9FLAO S-adenosylmethionine:tRN A ribosyltransferase-isomerase OS=Cellulophaga sp. RHA_ 52 OX=1250036 GN=queA PE=3 SV=1

SEQ ID NO: 65112 - protein, 349 aa, Cellulophaga tyrosinoxydans
  misc_feature (1)..(349): tr|A0A1W1Y9T2|A0A1W1Y9T2_9FLAO S-adenosylmethionine:tRN A ribosyltransferase-isomerase OS=Cellulophaga tyrosino xydans OX=504486 GN=queA PE=3 SV=1
MKLSGFNFELPEELLAEYPAENRDESRLMVVHRETGKIEHKMFKDLINYFDEGDVMVLNNTKVFPARLYGNKEKTGARIEVFLLRELNEEQRLWDVLVDPARKIRIGNKLYFGDDDTLVAEVIDNTTSRGRTLRFLYDGSYTDFRRKLKELGDTPLPKYIKRDTEPEDAERYQTIYAKHEGAVAAPTAGLHFSKHLLKRLEIKGVDFAELTLHVGLGTFNPVEVEDLSKHKMDSEELIIDEKTTEIVNNAKKNKKRICAVGTTAMRGLESGVSSQQTLNTFEGWTNKFIFPPYDFSIANCMVTNFHLPKSTLLMMVSAFMGHDLMKKAYKEAILEGYKFYSYGDAMLII

SEQ ID NO: 65113 - protein, 340 aa, Cellulosilyticum lentocellum
  misc_feature (1)..(340): tr|F2JLT3|F2JLT3_CELLD S-adenosylmethionine:tRNA ribosy ltransferase-isomerase OS=Cellulosilyticum lentocellum (strain ATCC 49066 / DSM 5427 / NCIMB 11756 / RHM5) OX= 642492 GN=queA PE=3 SV=1
MKTSDFYFHLPEEQIAQVPLKDRTTSRLMVLDQKTGEIEHKHFYDIKAYLKPGDCLVLNDTRVIPARLFGARPSGGKVEFLLLTRKEEKRWEVLVKPGKKAKIGDEIIFGEGLLKAKVEEIIEDGKRIVRFEYEGIFEEVLDALGEMPLPPYIHEKLEDKERYQTVYSKHEGSAAAPTAGLHFTKELLKEIEEMGVKIAYVTLHVGLGTFRPVKVEDVLNHEMHSEYYSIDEENATIINKVKAEGGRVIAVGTTSTRTLESNADEKGLIKAGSGWTNIFIYPGYTFKCVEELITNFHLPESTLIMLVSALAGKEAILNAYNTAVNEGYRFFSFGDAMLIK

SEQ ID NO: 65114 - protein, 340 aa, Cellulosilyticum sp.
  misc_feature (1)..(340): tr|A0A5B9YH11|A0A5B9YH11_9FIRM S-adenosylmethionine:tRN A ribosyltransferase-isomerase OS=Cellulosilyticum sp. WCF-2 OX=2497860 GN=queA PE=3 SV=1
MKTSDFYFHLPEEQIAQVPLKDRTTSRLMVLDQKTGEIEHKHFYDIKGYLKPGDCLVLNDTRVIPARLFGARPSGGKVEFLLLTRKEEKRWEVLVKPGKKAKIGDEIIFGEGLLKAKVEEIIEDGKRIVSFEYEGIFEEVLDALGEMPLPPYIHEKLEDKERYQTVYSKHEGSAAAPTAGLHFTKELLKEIEEMGVKIAYVTLHVGLGTFRPVKVEDVLNHEMHSEYYSIDEENATIINKAKAEGGRVIAVGTTSTRTLESNADEKGLIKAGSGWTNIFIYPGYTFKCVEALITNFHLPESTLIMLVSALAGKEAILNAYNTAVKEGYRFFSFGDAMLIK

SEQ ID NO: 65115 - protein, 364 aa, Cellvibrio japonicus
  misc_feature (1)..(364): tr|B3PDJ6|B3PDJ6_CELJU S-adenosylmethionine:tRNA ribosy ltransferase-isomerase OS=Cellvibrio japonicus (strain Ueda107) OX=498211 GN=queA PE=3 SV=1
MPNLMRRQDFYYELPDHLIARVPASERRGSRLLQLDGATGARVHGQFPDLLDLVNPGDLMVFNNTRVIPARLFGQKATGGAVEILVERVLSDKRVLAHTRASKAPKVDSQVILQDGTSVILRARQDALFEWEFLTDQSALEVMEQIGHMPLPPYIDRADAVEDRERYQTVYGEKQGAVAAPTAGLHFDELMLQQLRDKGVQIAFVTLHVGAGTFQNMRVDNIREHKMHGEIMEVSPEVCELVRATKAAGKRVVAVGTTSVRSLESAAHGYLDPVHKGSIQPYRGETSIFIYPGYTFQVVDALVTNFHLPESTLIMLVSAFAGYSHTMAAYADAVARQYRFFSYGDAMFITRNPAPDQPGQVDPV

SEQ ID NO: 65116 - protein, 360 aa, Cellvibrio mixtus
  misc_feature (1)..(360): tr|A0A266Q4G0|A0A266Q4G0_9GAMM S-adenosylmethionine:tRN A ribosyltransferase-isomerase OS=Cellvibrio mixtus OX= 39650 GN=queA PE=3 SV=1
MRRQDFFYELPDSLIARAPAAERRGSRLLQLDGQRGHLTHGQFPDLLTLVESGDLMVFNNTRVIPARLFGQKTSGGQVEILVERVLDTRRVLAHTRASKAPKVDSQVILQDGTRVQLVARHDALFEWEFLGDDPALVVLERIGHMPLPPYIDREDVAADRERYQTVYSKEQGAVAAPTAGLHFDELMLEQLRAKGVNIAFVTLHVGAGTFQNMRVDNIAEHQMHSEIMDVSPEVCEMVRATKAAGKRVIAVGTTSVRSLESAAQGYADAAQKGEIHPYQGETSIFIYPGYQFQVVDALVTNFHLPESTLIMLVSAFAGYGFTMAAYKEAVAQQYRFFSYGDAMFITRNPVAAQQPVGTSI

SEQ ID NO: 65117 - protein, 360 aa, Cellvibrio sp.
  misc_feature (1)..(360): tr|I3IBR8|I3IBR8_9GAMM S-adenosylmethionine:tRNA ribosy ltransferase-isomerase OS=Cellvibrio sp. BR OX=1134474 GN=queA PE=3 SV=1
MRRQDFFYELPDNLIARTPAAERRGSRLLQLDGTSGQLAHGRFPDLLNLVEPGDLMVFNNTRVIPARLFGQKTSGGQVEILVERVLDNRRVLAHTRASKAPKVASQVILQDGTRVQLVARHDALFEWEFLGDDPALVVLDRIGHMPLPPYIDRDDVAADRERYQTVYSKEQGAVAAPTAGLHFDELMLEQLRAKGVNIAFVTLHVGAGTFQNMRVDNIAEHQMHSEIMDVSPEVCEQVRATKAAGKRVIAVGTTSVRSLESAAQGYADPAQKGAIHPYQGETSIFIYPGYQFQVVDALVTNFHLPESTLIMLVSAFAGYGFTMAAYKEAVAQQYRFFSYGDAMFITRNPAAAQQPVGGSV

SEQ ID NO: 65118 - protein, 364 aa, Cellvibrio sp.
  misc_feature (1)..(364): tr|A0A5J6NYQ8|A0A5J6NYQ8_9GAMM tRNA preQ1(34) S-adenosy lmethionine ribosyltransferase-isomerase QueA OS=Cellvi brio sp. KY-YJ-3 OX=454662 GN=queA PE=4 SV=1
MRRQDFFYELPDNLIARTPAAERRGSRLLQLDGASGQLAHGRFPDLLNLVEAGDLMVFNNTRVIPARLFGQKTSGGQVEILVERVLDNRRVLAHTRASKAPKVDSQVILQDGTRVQLVARHDALFEWEFLGDDPALVVLERIGHMPLPPYIDRDDVAADRERYQTVYSKEQGAVAAPTAGLHFDELMLEQLRAKGVNTAFVTLHVGAGTFQNMRVDNIAEHQMHSEIMDVSPEVCELVRATKAAGKRVIAVGTTSVRSLESATQGYADAAQKGAIHPYQGETSIFIYPGYQFQVVDALVTNFHLPESTLIMLVSAFAGYGFTMAAYKEAVAQQYRFFSYGDAMFITRNPAAAQQPVGQPVGASV

SEQ ID NO: 65119 - protein, 357 aa, Cellvibrionaceae bacterium
  misc_feature (1)..(357): tr|A0A545U891|A0A545U891_9GAMM S-adenosylmethionine:tRN A ribosyltransferase-isomerase OS=Cellvibrionaceae bact erium R142 OX=2591008 GN=queA PE=3 SV=1
MRRQDFYYTLPDELIARAPAAERRGSRLLVLDGPSGQVSHRRFPDILDCLQPGDLMVFNDTRVIPARVFGRKPTGGRVEILIERVLPDNRVLAHTRASKSPRVGTDILLEDGTVLAVVARHEELFELRFPPAKPVLEVLENIGHMPLPPYIDRADEVTDRERYQTVYGHRQGAVAAPTAGLHFDAELLEQLRAAGVQIAFVTLHVGAGTFQPVRVDNIHEHNMHSEIMEVSAAVCEQVRATRAAGKRVIAVGTTSVRCLETAAQSGELQPYQGETNIFIYPSYRYRVVDALVTNFHLPESTLLMLVSAFAGYRHTLEAYRQAVQNRYRFFSYGDAMFITRNSNAGDDMPGRRAGYPG

SEQ ID NO: 65120 - protein, 353 aa, Cellvibrionales bacterium
  misc_feature (1)..(353): tr|A0A1Z8YNW8|A0A1Z8YNW8_9GAMM S-adenosylmethionine:tRN A ribosyltransferase-isomerase OS=Cellvibrionales bacte rium TMED79 OX=1986768 GN=queA PE=3 SV=1
MKTADFHFDLPEYLIAQSPLEERTGSRLLALDGATGSLDHRQFLEIEALLSPNDLLVFNNTRVIPARLYGQKQTGGRVEILIERLRGDGSVLAHVRASKSPKEGTLIFITADQDSDITDFTLRVCGRDGGLFELQAETGTVAKMMRLYGHMPLPPYIERADTPQDRERYQTVYAKHEGAVAAPTAGLHFDEALLSRLSLKGVQTAFVTLHVGAGTFQPVRVENITHHKMHREWIEVGQDCVDAIRACRKRGGRVVAVGTTSVRSLESAAAAGLDSERCPRAFEGDSDIFLYPGCEFGVVDAMVTNFHLPESTLIMLVSAFAGYEETMKAYREAVLKEYRFFSYGDAMFVTHKT

SEQ ID NO: 65121 - protein, 340 aa, Cellvibrionales bacterium
  misc_feature (1)..(340): tr|A0A2E8KGW1|A0A2E8KGW1_9GAMM S-adenosylmethionine:tRN A ribosyltransferase-isomerase OS=Cellvibrionales bacte rium OX=2026722 GN=queA PE=3 SV=1
MNLSDFDYHLPDELIARYPTEQRTASRLLALDKTNGQVLHHQFTDLIDQLQPNDLLVFNNTRVIPARLFGEKASGGKVEVMIERITSGSRGIAQIRASKSAKPDTIIHLEQGLSLRVIDRIDGMFLIESNDEASLSMVLQAVGHMPLPPYIDREDEKLDRERYQTVYSSREGAVAAPTAGLHFDQAMLSKLGEKGVNFTYVTLHVGAGTYQPVREHYIPDHKMHAEYVEVGADVCNDIRMAQAAGGRVIAIGTTAVRSVETASVESGWIEPYYGDTEIFIYPGYQFKTVDAMLTNFHLPQSSLIMLVSAFAGRENTLSAYQQAINEQYRFFSYGDAMFIR

SEQ ID NO: 65122 - protein, 343 aa, Centipeda periodontii
  misc_feature (1)..(343): tr|F5RM74|F5RM74_9FIRM S-adenosylmethionine:tRNA ribosy ltransferase-isomerase OS=Centipeda periodontii DSM 277 8 OX=888060 GN=queA PE=3 SV=1
MDISDFDYDLPEKRIAQIPAEPRDSSRLMVLNPKEHTIEHRHFFQLGDFLKKGDVLIFNDTRVIPARLIGTRSQTGGKVEVFLLRQIDRNQWEALVKPGKKVRIGSIVHFDDELSCEVIDHTDFGGRIVKFIYNGVFEEILDRLGSVPLPPYIHEKLEDRERYQTIYSRVKGSAAAPTAGLHFTEKLMKELRGKEVQFGFITLHVGLGTFRPVHANVIEDHVMHREFYSVPIETAALIHAAKDEGRRVIAVGTTSIRTLEASAARTGTVDAGAGWTDIFIYPGYQFKIVDAVITNFHLPKSTLIMLISAFAGREFTLEAYRMAVEEEYRFFSFGDAMMIESRA

SEQ ID NO: 65123 - protein, 387 aa, Cephaloticoccus capnophilus
  misc_feature (1)..(387): tr|A0A139SRD7|A0A139SRD7_9BACT S-adenosylmethionine:tRN A ribosyltransferase-isomerase OS=Cephaloticoccus capno philus OX=1548208 GN=queA PE=3 SV=1
MPTAPLRTELFDYPVPEELIAQSPSVRRDDSRLLVVDRATHTISHHRFAELPNFLSAGDTLFRNNAAVLPARLRARRIIRSEGGATALGGAIECFLLRPHEAEPQNTSTWHCLLRPSKRLPVGAAFADTNREFSAEVLAKSADGTALVRLKSHRENETVPELARRLGSVPLPPYIHREKTEAPSTTGKDSQRARDLDRYQTVYADAARPVAVAAPTAGLHFTPELLGSLAARGVALADLTLHVGLGTFRPITTETIEAHQIHRERYEIPPHTIDRLHNTRGRRIAIGTTTLRSIEHYLRQTQACAPCPPLRAHLAEADLFIYPPAQFRGVDALLTNFHQPRSTLLCLIAAFLSPGSTDGITWFREIYAEAITRKYRLFSYGDAMLIL

SEQ ID NO: 65124 - protein, 385 aa, Cephaloticoccus primus
  misc_feature (1)..(385): tr|A0A139SRP3|A0A139SRP3_9BACT S-adenosylmethionine:tRN A ribosyltransferase-isomerase OS=Cephaloticoccus primu s OX=1548207 GN=queA PE=3 SV=1
MPTECFDYALPEELIAQTPSARRDGSRLLVVDRTAHTIAHHHFAELPEFLRAGDTLFRNNAAVFPARLRALRPSGGQVECFLLRPHESGENSTLWLCLLKPGKRLPIGATFAHASGAFSAEVVAREPDRTAIVRFRIPSGASVPELARRLGAVPLPPYIRREYACKAYDTAATNEAPMRPNEAAHTEKVEDLARYQTVYADEARPVAVAAPTAGLHFTPELLAQITARGVALADLTLHVGLGTFRPITTDTINAHQIHHERYEIPAPTLEKLRHGTGRRIAVGTTSLRSIEHYLRQKQCTAADTRPETAEHSSEADLFIYPPATFRGVDALLTNFHQPRSTLLCLVAAFLAPGSTDGIAWLHEIYAEAIARRYRFFSYGDAMLIL

SEQ ID NO: 65125 - protein, 340 aa, Cerasibacillus quisquiliarum
  misc_feature (1)..(340): tr|A0A511UZ05|A0A511UZ05_9BACI S-adenosylmethionine:tRN A ribosyltransferase-isomerase OS=Cerasibacillus quisqu iliarum OX=227865 GN=queA PE=3 SV=1
MNANEFDFYLPEELIAQTPLKDRTASRLLILDKETKEIQHRTFPAIKDYLKRGDCLVLNDTEVLPARLYGVKEDTGAKIEVLLLHVIENDTWETLIKPAKKVKLGTVITFGKGLKATCTKILEHGGRQLTFSYEGIFYEILDELGKMPLPPYIKAQLSENERYQTVYAKEKGSAAAPTAGLHFTKDLLDEIKGLGVHITTITLHVGLGTFRPVSAEKVENHRMHSEYYRMSHHTAHTLNQAKENGGRIIAVGTTSTRTLETIMNKYGSFTECSGWTDIFIYPPYNWKAIDGLLTNFHLPKSTLIMLVSALAGREAVLNAYEQAVLERYRFFSFGDAMLII

SEQ ID NO: 65126 - protein, 341 aa, Cerasibacillus sp.
  misc_feature (1)..(341): tr|A0A5C8P3P2|A0A5C8P3P2_9BACI S-adenosylmethionine:tRN A ribosyltransferase-isomerase OS=Cerasibacillus sp. CC -CFT480 OX=2498845 GN=queA PE=3 SV=1
MNVNEFDFNLPEELIAQTPLRERTASRLLVLNKQTRRIEHKYFYNIKKYLKKGDCLVLNDTRVLPARLYGMKEDTGGKIEVLLLHQSENDTWETLVKPARKVKLGTIISFGNGKLKAICTKTEEHGGRELKFIYNGVFYEILDELGEMPLPPYIKEQLPEKERYQTVFAREKGSAAAPTAGLHFTTELLEEIKELGVEIAYITLHVGLGTFRPVSVEDIENHQMHSEFYRMSKTTADTLNRVKANGGKIISVGTTSTRTLETIARDHQAFKETSGWTDIFIYPPYEFKAIDGLITNFHLPKSTLIMLVSALAGKNAVLHAYEQAVQKKYRFFSFGDAMLII

SEQ ID NO: 65127 - protein, 343 aa, Cereibacter changlensis
  misc_feature (1)..(343): tr|A0A2T4JZZ5|A0A2T4JZZ5_9RHOB S-adenosylmethionine:tRN A ribosyltransferase-isomerase OS=Cereibacter changlens is JA139 OX=1188249 GN=queA PE=3 SV=1
MRLSDFDFHLPETLIATRPARPRTSARLLLAEGDAIRDLHVSDLLEIFRPGDRLILNNTKVIPARLTGTRTRGDAVAKVEITLMEPAAEGWRALAKPLRKVQPGEMIRFSEALSATVAEKGETDLRLVFNLVGEDFDAALAEAGAMPLPPYIAAKRKPDAQDETDYQTVFARHAGAVAAPTASLHFDAPLLEALAAKGVQFTEVTLHVGAGTFLPVKVEDVTTHRMHAEWGEVTETAAAEMNATKAAGGRVIPVGTTALRLIESAAATGAVEPWRGTTDIFIYPGYRFRVTDALMTNFHLPKSTLLMLVSALMGQERIERIYRHAVDTEYRFFSYGDASLLIP

SEQ ID NO: 65128 - protein, 343 aa, Cereibacter changlensis; identical to SEQ ID NO: 65127
  misc_feature (1)..(343): tr|A0A2W7RQB1|A0A2W7RQB1_9RHOB S-adenosylmethionine:tRN A ribosyltransferase-isomerase OS=Cereibacter changlens is OX=402884 GN=queA PE=3 SV=1

SEQ ID NO: 65129 - protein, 348 aa, Cesiribacter andamanensis
  misc_feature (1)..(348): tr|M7NJ08|M7NJ08_9BACT S-adenosylmethionine:tRNA ribosy ltransferase-isomerase OS=Cesiribacter andamanensis AMV 16 OX=1279009 GN=queA PE=3 SV=1
MKLSEFKFDLPAGLLALYPAENRDESRLLVLHRNTGQIEHRVFKDVVEYFGEGDVMVTNNTKVFPARLYGNKEKTGAKIEVFLLRELNRDMHLWDVLVDPARKIRVGNKLYFGDGELVAEVIDNTTSRGRTIRFLFDGSNEEFYKMIDSLGETPLPREITRDVEPEDRDRFQTIYAEHTGAVSAPTAGLHFTPHLLKRLDLKGVAISPITLHVGLGTFRPVDVEDLTKHKMDSENFVVPTQTATAVNQALDNKNRVCAIGTTSMRALESSVSASNRLKATEGWTDKFIFPPYEFKICNALITNFHMPESTLLMMACAFGGFDNVMNAYKVAMEEKYRFFTYGDAMLII

SEQ ID NO: 65130 - protein, 341 aa, Cetia pacifica
  misc_feature (1)..(341): tr|A0A3N1YM95|A0A3N1YM95_9PROT S-adenosylmethionine:tRN A ribosyltransferase-isomerase OS=Cetia pacifica OX=142 4653 GN=queA PE=3 SV=1
MSLNKDLLVSSYDYNLPEHLIAKYPVTPRDSAKLLVYDRKKDRVTHTVFRNILDFVGDKRFVFNNTKVIKARIYGKKESGGKIELLLNRPFGDKYLVYIRGKVRVGTKLYFDKGLVAEVVELLEDGSRVVEFKLKTQNEMKNLDFLELVKILEEIGHVPLPPYIKREDEKIDESEYQSVFAKKEGAVAAPTASLHFTDELLKKIEKKAYLTLHVGAGTFKPVEVEDIREHKMHSEFFEIPKTTAEILDSDEEIVAVGTTSTRTIEYYARTKKLSGECDLFLNPLNPPIRVNHLLTNFHLPKSTLIMLVAAFIGREKTLKLYEEAIKNNYRFYSYGDAMLII

SEQ ID NO: 65131 - protein, 343 aa, Cetobacterium ceti
  misc_feature (1)..(343): tr|A0A1T4KYT0|A0A1T4KYT0_9FUSO S-adenosylmethionine:tRN A ribosyltransferase-isomerase OS=Cetobacterium ceti OX =180163 GN=queA PE=3 SV=1
MSTMLSDYDYHLPEELIGQKPREPRDHSKLMVVNKEKEEIEHKHFYDIIDYLNEGDILVRNSTKVIPARLFGHKDTGGVLEILLIKRIDLNTWECLLKPAKKLKVGQKLYIGHNNELIGELIEIKDDGNRVLKFTYEGAFEEVLDKLGKMPLPPYIVESLSEKERYQTVYAIKGESVAAPTAGLHFTKELLEKIEKKGIKIIDVFLEVGLGTFRPVQTENVLDHKMHEEHFEIPEEAAKIINEAKTQGRRVVAVGTTSVRALESSVDENGKLVAQGNDTHIFIYPGYKFKIVDALITNFHLPKSTLLMLVSAFSNREFMLDVYKKAVENEYHFFSFGDAMFIY

SEQ ID NO: 65132 - protein, 343 aa, Cetobacterium somerae
  misc_feature (1)..(343): tr|U7VA50|U7VA50_9FUSO S-adenosylmethionine:tRNA ribosy ltransferase-isomerase OS=Cetobacterium somerae ATCC BA A-474 OX=1319815 GN=queA PE=3 SV=1
MSTKLVDYDYHLPDELIGQKPREPRDHSKLMVVDKENQTLEHKTFFNIIDYLKPGDVLVRNSTKVIPARLFGKKETGGVLEILLIKRVSLDTWECLLKPAKKLKVGQKLEIGENKELVAELLEIKEDGNRVLRFEYEGVFEEVLDKLGKMPLPPYIVEALETKDRYQTVYAIKGESVAAPTAGLHFTKELLEKIKEKGIEILDVFLEVGLGTFRPVQTEDVLDHKMHEEIFEIPLYTVERIKKAKEENRRIIAVGTTTVRALESSVDMDGNLISKTGSTEIFIYPGYKFNVIDALITNFHLPKSTLLMLVSALSNREFMLDVYKEAVKKEYHFFSFGDAMFIY

SEQ ID NO: 65133 - protein, 362 aa, Chamaesiphon minutus
  misc_feature (1)..(362): tr|K9UQR2|K9UQR2_CHAP6 S-adenosylmethionine:tRNA ribosy ltransferase-isomerase OS=Chamaesiphon minutus (strain ATCC 27169 / PCC 6605) OX=1173020 GN=queA PE=3 SV=1
MNTSLDRLLASYDYELPPESIAQTPVVPRDRSRLLVVETGSGYQHRHFHEIGDFLTAGDLLVFNNTRVIPARVYGVKTTGAPVEILLLSEREHNCWLALVKPGRKLKIGTKIVFPARNPESKIPQITADIMDRDEATGGRVLRFDIPDGVPLLSILADFGELPLPPYITASTSTDEQYQTVYAKVPGAVAAPTAGLHFTPELLDRLTQQGISRAEVTLHVGVGTFRPVEAEDITTHQMHHEWLEITSETVDLINAAKAAGGKIYAVGTTAVRVLETAAQTGKLQPYRGDTNMFIYPGYQWQVVDGLITNFHLPGSSLMMLVSAAIGRERLLDLYQIAIADGYRFYSFGDAMLIRPFRSMESI

SEQ ID NO: 65134 - protein, 364 aa, Chamaesiphon polymorphus
  misc_feature (1)..(364): tr|A0A2T1G0F0|A0A2T1G0F0_9CYAN S-adenosylmethionine:tRN A ribosyltransferase-isomerase OS=Chamaesiphon polymorp hus CCALA 037 OX=2107692 GN=queA PE=3 SV=1
MNTSLDRLLTSYDYELPTESIAQTPVVPRDRSRLLVVETGAGYQHRHFHEIGDFLTAGDLLVFNNTRVIPARVYGVKTTGAPVEILLLSEREHNCWLALVKPGRKLKIGTKIVFPARHPESKIPQITAEIMARDEDTGGRLLKFDIPDGVPLLSILADFGELPLPPYITASTSTDEQYQTVYAKIPGAVAAPTAGLHFTPELLDRLTQQGIERAEVTLHVGVGTFRPVEAEDITTHQMHHEWLEISSETVDRINAVKAAGGKIYAVGTTAVRVLETAAQTGKLQPYRGDTNIFIYPGYQWQVVDGLITNFHLPGSSLMMLVSAAIGRERLLDLYQIAIGDGYRFYSFGDAMLIRPFRSNENSGR

SEQ ID NO: 65135 - protein, 358 aa, Chania multitudinisentens
  misc_feature (1)..(358): tr|W0LGB8|W0LGB8_9GAMM S-adenosylmethionine:tRNA ribosy ltransferase-isomerase OS=Chania multitudinisentens RB- 25 OX=1441930 GN=queA PE=3 SV=1
MRVADFSFALPESLIAHYPQPERSACRLLQLDGPSGALRHGVFTDLLDKLETGDLLVFNNTRVIPARLFGRKVSGGKIEVLVERVLDDHRVLAHVRASKAPKPGTELLLGDDENIAATMVARHDTLFELRFNDERDVFTILNAVGHMPLPPYIDRPDEDADRELYQTVYSEKPGAVAAPTAGLHFDEPLLAALRAKGVEMAFVTLHVGAGTFQPVRVETIEEHVMHAEYAEVSQEVVDAVLACKARGKRVVAVGTTSVRSLESAATASQNALIAPFFGDTRIFIYPGYHYQVIDALVTNFHLPESTLIMLVSAFAGYKHTMNAYQQAVAEQYRFFSYGDAMFISRNPQAESESVGNTR

SEQ ID NO: 65136 - protein, 358 aa, Chelativorans sp.
  misc_feature (1)..(358): sp|Q11IH4|QUEA_CHESB S-adenosylmethionine:tRNA ribosylt ransferase-isomerase OS=Chelativorans sp. (strain BNC1) OX=266779 GN=queA PE=3 SV=1
MRVDLFDFDLPEERIALRPASPRDSARMLVVRPGKPLEDCIVRDLPQFLRPGDALVFNDTKVIPARLSGIRRRGETVAQIEATLHMRAGPDRWKAFLKPAKRVAVGERIQFGHDGESCFLGSLDATVAEKGEGGEALLVFDFSGPVLDEAIAAAGHVPLPPYIASKRPDDERDRADYQTIYAREEGAVAAPTAGLHFTPDLFSALDTIGVERHFVTLHVGAGTFLPVKAEDTEAHRMHAEWGEVDGMTADALNAVRARGGCIIAVGTTSLRLLESAAEPSGLLKAWSGETDIFITPGYRFRAIDILMTNFHLPRSTLFMLVSAFSGLETMKSAYSHAIDQGYRFYSYGDSSLLFREDT

SEQ ID NO: 65137 - protein, 362 aa, Chelatococcus asaccharovorans
  misc_feature (1)..(362): tr|A0A2V3U7L1|A0A2V3U7L1_9RHIZ S-adenosylmethionine:tRN A ribosyltransferase-isomerase OS=Chelatococcus asaccha rovorans OX=28210 GN=queA PE=3 SV=1
MRVDLFDFDLPEDRIATRPVKPRDAARLLVVGGPEAALQDRVVRDLPGLLRPGDTLVLNDTRVIPARLVGMRRRGEASARIEAMLHKREATDRWRAFVRPAKRLALGDIIRFGEETEGACLLSGLEATVTEKGDGGEVVLRFALSGPILDESIASLGHMPLPPYIASKRPEDAADRVDYQTVYAAEEGAVAAPTAGLHFTDELITRLSERGIDRQFVTLHVGAGTFLPVKADDTSEHRMHAEWGSVSAETAAALNATRQRGGRIVAVGTTSLRLLESATTPEGEVRPWAGDTAIFITPGYRFRAVDVLMTNFHLPRSTLFMLVSAFAGLGEMQRAYAHAIANGYRFYSYGDASLLFRAEMPR

SEQ ID NO: 65138 - protein, 365 aa, Chelatococcus sambhunathii
  misc_feature (1)..(365): tr|A0A0K6H679|A0A0K6H679_9RHIZ S-adenosylmethionine:tRN A ribosyltransferase-isomerase OS=Chelatococcus sambhun athii OX=363953 GN=queA PE=3 SV=1
MRVDLFDFELPDESIALRPASPRDSARMLVVRPDGERLLADRIVRELPDLLAPGDVLVLNDTRVIPARLAGIRVRGEAVSHVEVTLHKREGADLWRAFARPGKRLKVGDRIRFGEEGENMACLLAALDAEVEEKSDGGEVLLRFAFSGPALDEAIARLGHVPLPPYIASKRPDDAADLRDYQTIYARHDGAVAAPTAGLHFTDELFCALDTRGIARRFVTLHVGAGTFLPVKAEDTRDHRMHAEWGTIDDATAAALNAARAEGRRIVAVGTTALRLLESAVRPDGTFEAWRGDTSIFITPGYRFRAVDVLMTNFHLPRSTLFMLVCAFAGMETMKAAYAHAIAAGYRFYSYGDASLLFRAPEPPA

SEQ ID NO: 65139 - protein, 365 aa, Chelatococcus sp.
  misc_feature (1)..(365): tr|A0A0K2DFS7|A0A0K2DFS7_9RHIZ S-adenosylmethionine:tRN A ribosyltransferase-isomerase OS=Chelatococcus sp. CO- 6 OX=1702325 GN=queA PE=3 SV=1
MRVDLFDFELPDESIALRPASPRDSARMLVVRPDGGRLLEDRIVRELPDLLTPGDVLVLNDTRVIPARLAGIRVRGEAVSHVEVTLHKREGADLWRAFARPGKRLKEGDRIRFGEEGESMACLLAALDAEVEEKSDGGEVLLRFAFSGPALDEAIARLGHMPLPPYIASKRPDDAADLRDYQTIYARHDGAVAAPTAGLHFTDALFSALDTRGIARRFVTLHVGAGTFLPVKAEDTRDHRMHAEWGTIDAATAAALNAARAEGRRIVAVGTTALRLLESAVRPNGTFEAWSGDTAIFITPGYRFRAVDVLMTNFHLPRSTLFMLVCAFAGMETMKAAYAHAIAAGYRFYSYGDAGLLFRAPETPA

SEQ ID NO: 65140 - protein, 361 aa, Chelatococcus sp.
  misc_feature (1)..(361): tr|A0A2W6ZWD7|A0A2W6ZWD7_9RHIZ S-adenosylmethionine:tRN A ribosyltransferase-isomerase OS=Chelatococcus sp. OX= 1953771 GN=queA PE=3 SV=1
MNVDLFDFELPDERIALRPASPRDVARMLVVRPGGEPALEDRIVRDLPSFLREGDALVLNDTRVIPSRLRGRRYRGEDSARVEIMLHKRESEDRWLAFARPAKKLAIGERVVFDAENASNACELARLHAEVLAKGEGGEVELRFSLTGAWLDEAIARFGELPLPPYIAGKRAVDSADTADYQTAYAREDGAVAAPTAGLHFTPELFAALEARGVSRHFVTLHVGAGTFLPVKAEDTDDHRMHAEWGTVSAGTADALNAVKARGGRIVAVGTTSLRLLESATGEDGVVRPFSGDTAIFITPGYRFRAVDLLMTNFHLPRSTLFMLVSAFAGLDPMKRAYAHAIAEGYRFYSYGDSSLLHRAG

SEQ ID NO: 65141 - protein, 362 aa, Chelonobacter oris
  misc_feature (1)..(362): tr|A0A0A3APR8|A0A0A3APR8_9PAST S-adenosylmethionine:tRN A ribosyltransferase-isomerase OS=Chelonobacter oris OX =505317 GN=queA PE=3 SV=1
MQVSDFYFELPDELIARYPKAERTSSRLLCLDGTNGELCHRRFSDVTELVDEGDLLVFNNTRVIPARMFGRKSSGGKLEVLVERVLSEKSCLAHVRASKAPQSGALLILGEDKLGEGNGIQMVMKARHGALFELETADDVPLLDCLQQIGHIPLPPYIDRPDEEMDQERYQTVYNQVPGAVAAPTAGLHFDQALLAKLQQKGVNFAFVTLHVGAGTFQPVRVEKVEDHHMHAEYVEVDEQTVQAILATKAAGKRVIAVGTTSVRSVESAALAAAQTRAANLLAPYFSDTAIFLYPGKPFRVIDALITNFHLPESTLVMLVSAFAGYRNTMQAYQRAVTEKYRFFSYGDAMFITKNPDVKGLD

SEQ ID NO: 65142 - protein, 351 aa, Chishuiella changwenlii
  misc_feature (1)..(351): tr|A0A1M6XM38|A0A1M6XM38_9FLAO S-adenosylmethionine:tRN A ribosyltransferase-isomerase OS=Chishuiella changwenl ii OX=1434701 GN=queA PE=3 SV=1
MKMKTSDFDFNLPEELLAERPSENRDESRLMVVHRDTGEIEHRLFKDVIDYFDEGDVMIRNNTKVFPARLMGNKEKTGAQIEVFLLRELDAETRLWDVLVDPARKIRIGNKLFFDNDDTLVAEVVDNTTSRGRTLRFLFDGSYEEFRAKLKELGETPLPKYITRSVEPEDAERYQTIYAKHEGAVAAPTAGLHFSKHLLKRLEIKGVDFAELTLHIGLGTFQGVEVEDLSKHKMESEQTIIPQESADLVNRAIDEKKKVCAIGTTSMRSIESSVSADGHLNAFDGWTNKFIHPPYDFSVANCMITNFHTPKSTLIMMISAFAGHDLTMKAYHEAVKEGYKFYSYGDAMLIL

SEQ ID NO: 65143 - protein, 338 aa, Chitinimonas sp.
  misc_feature (1)..(338): tr|A0A2G3K4A5|A0A2G3K4A5_9BURK S-adenosylmethionine:tRN A ribosyltransferase-isomerase OS=Chitinimonas sp. BJB3 00 OX=1559339 GN=queA PE=3 SV=1
MQLSDFDYTLPQRLIAQFPPSQRGGSRLLHLPSERGLFDRQFSDLSGLLRAGDLLVLNDTRVIKARMYGQKESGGQVEAMVERVLGQHEVLAMIRASKSPKPGTWLVFAGQWRAQMLGRQGEFFHLRFEKPVLGVLDVAGQLPLPPYIEHVPDGEDAERYQTVFAREPGAVAAPTAGLHFTAAMLDALAQAGIDHARLTLHVGAGTFQPVRVENLAEHRMHHERYQIPAGTLAAIQAARARGGRVVAVGTTSLRALEAACQHGDFAEPEGDTDIFITPGYQFRAVDSLITNFHLPKSTLLMLVSAFMGYDRMRAAYAHAVAAEYRFFSYGDAMLLERR

SEQ ID NO: 65144 - protein, 338 aa, Chitinimonas sp.
  misc_feature (1)..(338): tr|A0A516SH37|A0A516SH37_9MICO S-adenosylmethionine:tRN A ribosyltransferase-isomerase OS=Chitinimonas sp. R3-4 4 OX=2594795 GN=queA PE=3 SV=1
MQLSDFDYALPEHLIAQFPPAVRGGSRLLHLPAQGGTFDRHFADLPDLLRAGDLLVLNDTRVIKARLLGQKASGGQVEALIERVSDEFEALAQVRASKSPKPGSVLIFGGRWRAHMLAREGEFFRLRFEAPVLDVLEAAGALPLPPYIEHRPDASDDERYQTVFSREPGAVAAPTAGLHFTEAMFAALAERGIAHARLTLHVGAGTFQPVRVDNLAEHRMHHERYQIPAETLAAIRATRERGGRVIAVGTTSLRAMEAACQDGDFAAPEGDTDIFITPGYAFRAVDALLTNFHLPKSTLLMLVSAFAGYERIQAAYRHAVEHEYRFFSYGDAMLLERR

SEQ ID NO: 65145 - protein, 337 aa, Chitinimonas taiwanensis
  misc_feature (1)..(337): tr|A0A1K2HH92|A0A1K2HH92_9BURK S-adenosylmethionine:tRN A ribosyltransferase-isomerase OS=Chitinimonas taiwanen sis DSM 18899 OX=1121279 GN=queA PE=3 SV=1
MQLSDFDYHLPEHLIAQFPPAVRGGSRLLHLPAGGGLHDRQFADLPSLLRRGDLLVLNDTRVIKARLFGQKDSGGQVEVMIERVLSEYEALAMVRASKSPKPDSWLQFGEHRAQMLAREGEFFHLRFAAPVLDVLEAAGQLPLPPYIEHRPDGEDAERYQTVFAREPGAVAAPTAGLHFTEAMLATLAEQGIAHARLTLHVGAGTFQPVRVENLAEHRMHHERYRIPPETLAAIAATRAAGGRIVAVGTTSLRALEAACQTGDFAAPEGDTDIFITPGYSFRAVDALITNFHLPKSTLLMLVSALMGYERMQAAYAHAVAAEYRFFSYGDAMLLERR

SEQ ID NO: 65146 - protein, 339 aa, Chitiniphilus sp.
  misc_feature (1)..(339): tr|A0A4U0QCH6|A0A4U0QCH6_9NEIS S-adenosylmethionine:tRN A ribosyltransferase-isomerase OS=Chitiniphilus sp. HX- 2-15 OX=2571148 GN=queA PE=3 SV=1
MQISDFDYFLPEHLIAQFPPAERGASRLMHVAATGAAHGWFRELPGLLRAGDVLVFNDTKVIKARLFGHKASGGAIEVLVERVLDTRNALAHVRASKAPKPGTRLVFDGFEAEMVERQGDLFLLRFLGERSVLERLEEAGRLPLPPYITHTPDDEDARRYQTVYARDPGAVAAPTAGLHFTEALLDEIRALGVQTHFLTLHVGAGTFQPVRVDDIAQHVMHHERYSIPAATIEAIRAAKASGGRVIAVGTTSLRALEAASQEVLLGQPEGDTDIFITPGYRFRVVDRLITNFHLPKSTLLMLVSAFIGLDAMRAAYAEAVAREYRFFSYGDAMLLERAG

SEQ ID NO: 65147 - protein, 338 aa, Chitinivibrio alkaliphilus
  misc_feature (1)..(338): tr|U7D6F1|U7D6F1_9BACT S-adenosylmethionine:tRNA ribosy ltransferase-isomerase OS=Chitinivibrio alkaliphilus AC ht1 OX=1313304 GN=queA PE=3 SV=1
MLKTSDFDYILPSTLIATRPLEDRASARMMVLPRRNKEQIHATFADLPRFLRKGDRLVFNDTRVIPGRVFAHRSTGASVEILFTEPCDSHTWKALVRPGRKMRVGDEVLLGNAQITVQEILPDGLRVLRATQPIKELMDVHGEMPIPPYMERHADEKDKQTYQTVYAKNAGAVAAPTAGLHFTTELLQELTDAGVDSTYITLHVGVGTFRPVSEENPLDHPMHSEYFHISPEAVEEIEETRRAGGRIIAVGTTVVRALEAASQGGSLESGERSTNLMIMPGYTYQIVDGLITNFHLPRSTLLMLVSAFYSREALLSAYEEAIRHSYRFYSYGDGMLLI

SEQ ID NO: 65148 - protein, 349 aa, Chitinophaga arvensicola
  misc_feature (1)..(349): tr|A0A1I0SDB7|A0A1I0SDB7_9BACT S-adenosylmethionine:tRN A ribosyltransferase-isomerase OS=Chitinophaga arvensic ola OX=29529 GN=queA PE=3 SV=1
MKLSQFKFDLPLNLIAQHPTKTRDESRLMVVHRNTGKIEHKVFKDILGYFNDKDVMIVNNTKVFPARLYGRKEKTGAKIEVFLLRELNKQNRLWDVIVDPARKIRVGNKLYFGDDETLVAEVIDNTTSRGRTIRFLFEGNDEEFKQVLDQLGETPLPKYIKRKPEDEDKERYQTVYAKYEGAVAAPTAGLHFSRELIKRLEIKGVKFAEVTLHTGLGTFRPIEVEDLSKHKMDAEYFHIEEHAVKVVNKAKEENRKICAIGTTSVRAVESSVTAQNHLKAAEGWTNTFIHPPYDFAIPNALVTNFHLPKTSLLIMTCAFAGYDLIMEAYQQAIKEKYRFFSYGDAMLIV

SEQ ID NO: 65149 - protein, 349 aa, Chitinophaga barathri
  misc_feature (1)..(349): tr|A0A3N4MH60|A0A3N4MH60_9BACT S-adenosylmethionine:tRN A ribosyltransferase-isomerase OS=Chitinophaga barathri OX=1647451 GN=queA PE=3 SV=1
MKLSQFKFDLPLNLIAQHPSKTRDESRLMIVNRATGKIEHKVFKDILGYFNDKDVMVVNNTKVFPARLYGRKEKTGAKIEVFLLRELNKQNRLWDVIVDPARKIRVGNKLYFGDDESLVAEVIDNTTSRGRTIRFLFEGNDDEFKAVLDSLGETPLPKYIKRKPEEDDKERYQTVYAKYEGAVAAPTAGLHFSRELIKRLEIKGVKFAEVTLHTGLGTFRPIEVEDLSKHKMDAEYFHIDEYAVKIVNKAKEDNRKICAIGTTTVRAVESSVTAQNHLKAAEGWTNTFIHPPYDFSIPNALVTNFHLPKTSLLIMVCAFAGYDLIMEAYQQAIKEKYRFFSYGDAMLII

SEQ ID NO: 65150 - protein, 349 aa, Chitinophaga caeni
  misc_feature (1)..(349): tr|A0A291QTW5|A0A291QTW5_9BACT S-adenosylmethionine:tRN A ribosyltransferase-isomerase OS=Chitinophaga caeni OX =2029983 GN=queA PE=3 SV=1
MKLSQFRFDLPTNLIAQHPSKTRDESRLMVVHRDSGKIEHKLFKDILGYFNDKDVMIVNNTKVFPARLYGRKEKTGAKIEVFLLRELNKTNRLWDVIVDPARKIRVGNKLYFGDDESLVAEVIDNTTSRGRTIRFLFDGSEEEFKQVLESLGETPLPKYIKRKPEDDDKERYQTVYAKYEGAVAAPTAGLHFSRELIKRLEIKGVKFAEVTLHTGLGTFRPIEVEDLSKHKMDAEYFHIEENAVKIVNKAKEENRRVCAIGTTSVRAVESSVTAQNHLKAAEGWTNTFIHPPYDFSIPNSLVTNFHLPKTSLIIMVCAFAGYDLIMEAYQQAIKEKYRFFSYGDAMLIL

SEQ ID NO: 65151 - protein, 349 aa, Chitinophaga costaii
  misc_feature (1)..(349): tr|A0A1C3ZYQ7|A0A1C3ZYQ7_9BACT S-adenosylmethionine:tRN A ribosyltransferase-isomerase OS=Chitinophaga costaii OX=1335309 GN=queA PE=3 SV=1
MKLSQFKFDLPLNLIAQHPSKTRDESRLMVVHRATGKIEHKLFKDVINYFNDKDVMIVNNTKVFPARLYGRKEKTGAKIEVFLLRELNKQNRLWDVIVDPARKIRVGNKLYFGDDETLVAEVIDNTTSRGRTIRFLFEGNDEEFKQVLDSLGETPLPKYIKRKPEEEDKERYQTVYAKYEGAVAAPTAGLHFSRELIKRLEIKGVKFAEVTLHTGLGTFRPIEVEDLSKHKMDAEYFHIDEHAVKVVNKAKEENRKICAIGTTSVRAVESSVTAQNHLKAAEGWTNTFIHPPYDFSIPNALVTNFHLPKTSLLIMVCAFAGYDLVMEAYQQAIKEKYRFFSYGDAMLIL

SEQ ID NO: 65152 - protein, 349 aa, Chitinophaga cymbidii
  misc_feature (1)..(349): tr|A0A512RKA4|A0A512RKA4_9BACT S-adenosylmethionine:tRN A ribosyltransferase-isomerase OS=Chitinophaga cymbidii OX=1096750 GN=queA PE=3 SV=1
MKLSQFKFDLPLNLIAQHPSKTRDESRLMVVNRTTGKIEHKVFKDILGYFNDKDVMIVNNTKVFPARLYGRKEKTGAKIEVFLLRELNKQNRLWDVIVDPARKIRVGNKLYFGDDESLVAEVIDNTTSRGRTIRFLFEGNDEEFKAVLDSLGETPLPKYIKRKPEDEDKERYQTVYAKFEGAVAAPTAGLHFSRELIKRLEIKGVKFAEVTLHTGLGTFRPIEVEDLSKHKMDAEYFHIDEYAVKIVNKAKEDNRKICAIGTTSVRAIESSVTAQNHLKAAEGWTNTFIHPPYDFSIPNALVTNFHLPKTSLLIMVCAFAGYDLIMEAYQQAIKEKYRFFSYGDAMLII

SEQ ID NO: 65153 - protein, 349 aa, Chitinophaga dinghuensis
  misc_feature (1)..(349): tr|A0A327WAZ9|A0A327WAZ9_9BACT S-adenosylmethionine:tRN A ribosyltransferase-isomerase OS=Chitinophaga dinghuen sis OX=1539050 GN=queA PE=3 SV=1
MKLSQFKFDLPLNLIAQHPSKTRDESRLMVVHRATGKIEHKVFKDILGYFNDKDVMIVNNTKVFPARLYGRKEKTGAKIEVFLLRELNKQNRLWDVIVDPARKIRVGNKLYFGDDESLVAEVIDNTTSRGRTIRFLFEGNDDEFKQVLDTLGETPLPKYIKRKPEEEDKERYQTVYAKYEGAVAAPTAGLHFSRELIKRLEIKGVKFAEVTLHTGLGTFRPIEVEDLSKHKMDAEYFHIDEHAVKIVNKAKEENRKICAIGTTSVRAVESSVTAQNHLKAAEGWTNTFIHPPYDFAIPNALVTNFHLPKTSLLIMTCAFAGYDLVMEAYQQAIKEKYRFFSYGDAMLIL

SEQ ID NO: 65154 - protein, 361 aa, Chitinophaga eiseniae
  misc_feature (1)..(361): tr|A0A1T4KH62|A0A1T4KH62_9BACT S-adenosylmethionine:tRN A ribosyltransferase-isomerase OS=Chitinophaga eiseniae OX=634771 GN=queA PE=3 SV=1
MHPLKNSYSYRNMKLSQFKFDLPLNLIAQHPSKTRDESRLMVVNRTTGKIEHKVFKDILGYFNDKDVMIVNNTKVFPARLYGRKEKTGAKIEVFLLRELNKQNRLWDVIVDPARKIRVGNKLYFGDDESLVAEVIDNTTSRGRTIRFLFEGNDEEFKQVLDTLGETPLPKYIKRKPEEEDKERYQTVYAKYEGAVAAPTAGLHFSRELIKRLEIKGVKFAEVTLHTGLGTFRPIEVEDLSKHKMDAEYFHIEEHAVKVVNKAKEENRRICAIGTTSVRAVESSVTAQNHLKAAEGWTNTFIHPPYDFAIPNALVTNFHLPKTSLLIMVCAFAGYDLIMEAYQQAIKEKYRFFSYGDAMLII

SEQ ID NO: 65155 - protein, 349 aa, Chitinophaga filiformis
  misc_feature (1)..(349): tr|A0A1G7X409|A0A1G7X409_CHIFI S-adenosylmethionine:tRN A ribosyltransferase-isomerase OS=Chitinophaga filiform is OX=104663 GN=queA PE=3 SV=1
MKLSQFRFDLPLNLIAQHPSKTRDEARLMVVNRATGKIEHKVFRDIINYFNDKDVMVVNNTKVFPARLYGRKEKTGAKIEVFLLRELNKQNRLWDVIVDPARKIRVGNKLYFGDDESLVAEVIDNTTSRGRTIRFLFEGNDDEFKQVLDTLGETPLPKYIKRKPEDEDKERYQTVYAKYEGAVAAPTAGLHFSRELIKRLEIKGVKFAEVTLHTGLGTFRPIEVEDLSKHKMDAEYFNIDEYAVKIVNKAKEENRKVCAIGTTTVRAVESSVTAQNLLKAAEGWTNTFIHPPYDFAIPNALVTNFHLPKTSLLIMVCAFAGYDLVMEAYQQAIKEKYRFFSYGDAMLII

SEQ ID NO: 65156 - protein, 349 aa, Chitinophaga flava
  misc_feature (1)..(349): tr|A0A365XPP1|A0A365XPP1_9BACT S-adenosylmethionine:tRN A ribosyltransferase-isomerase OS=Chitinophaga flava OX =2259036 GN=queA PE=3 SV=1
MKLSQFKFDLPLNLIAQHPSKTRDESRLMVVNRVTGKIEHKVFKDILGYFNDKDVMIVNNTKVFPARLYGRKEKTGAKIEVFLLRELNKQNRLWDVIVDPARKIRVGNKLYFGDDESLVAEVIDNTTSRGRTIRFLFEGNDDEFKQVLDTLGETPLPKYIKRKPEEEDKERYQTVYAKYEGAVAAPTAGLHFSRELIKRLEIKGVKFAEVTLHTGLGTFRPIEVEDLSKHKMDAEYFLIDEHAVKVVNKAKEENRRICAIGTTSVRAVESSVTAQNLLKAAEGWTNTFIHPPYDFAIPNALVTNFHLPKTSLLIMTCAFAGYDLIMEAYQQAIKEKYRFFSYGDAMLII

SEQ ID NO: 65157 - protein, 349 aa, Chitinophaga ginsengisegetis; identical to SEQ ID NO: 65148
  misc_feature (1)..(349): tr|A0A1T5P2C6|A0A1T5P2C6_9BACT S-adenosylmethionine:tRN A ribosyltransferase-isomerase OS=Chitinophaga ginsengi segetis OX=393003 GN=queA PE=3 SV=1

SEQ ID NO: 65158 - protein, 349 aa, Chitinophaga ginsengisoli; identical to SEQ ID NO: 65155
  misc_feature (1)..(349): tr|A0A2P8FZ43|A0A2P8FZ43_9BACT S-adenosylmethionine:tRN A ribosyltransferase-isomerase OS=Chitinophaga ginsengi soli OX=363837 GN=queA PE=3 SV=1

SEQ ID NO: 65159 - protein, 349 aa, Chitinophaga japonensis
  misc_feature (1)..(349): tr|A0A562T3S7|A0A562T3S7_CHIJA S-adenosylmethionine:tRN A ribosyltransferase-isomerase OS=Chitinophaga japonens is OX=104662 GN=queA PE=3 SV=1
MKLSQFKFDLPLNLIAQHPSKSRDESRLMVVNRATGKIEHKLFRDIISYFNDKDVMVVNNTKVFPARLYGRKEKTGAKIEVFLLRELNKQNRLWDVIVDPARKIRVGNKLYFGDDESLVAEVIDNTTSRGRTIRFLFEGNDDEFKAVLDTLGETPLPKYIKRKPEDEDKERYQTVYAKYEGAVAAPTAGLHFSRELIKRLEIKGIKFAEVTLHTGLGTFRPIEVEDLSKHKMDAEYFHIDEYAVKIVNKAKDENRKICAIGTTTVRAVESSVTAQNHLKAAEGWTNTFIHPPYDFSIPNALVTNFHLPKTSLLIMVCAFAGYDLIMEAYQQAIKEKYRFFSYGDAMLIL

SEQ ID NO: 65160 - protein, 349 aa, Chitinophaga jiangningensis
  misc_feature (1)..(349): tr|A0A1M7FFC6|A0A1M7FFC6_9BACT S-adenosylmethionine:tRN A ribosyltransferase-isomerase OS=Chitinophaga jiangnin gensis OX=1419482 GN=queA PE=3 SV=1
MKLSQFKFDLPLNLIAQHPSKTRDESRLMVVHRATGKIEHKVFKDILGYFNDKDVMVVNNTKVFPARLYGRKEKTGAKIEVFLLRELNKQNRLWDVIVDPARKIRVGNKLYFGDDESLVAEVIDNTTSRGRTIRFLFEGNDEEFKAVLDTLGETPLPKYIKRKPEEEDKERYQTVYAKYEGAVAAPTAGLHFSRELIKRLEIKGVKFAEVTLHTGLGTFRPIEVEDLSKHKMDAEYFHIDEHAVKIVNKAKEENRKICAIGTTSVRAVESSVTAQNHLKAAEGWTNTFIHPPYDFAIPNALVTNFHLPKTSLLIMTCAFAGYDLVMEAYQQAIKEKYRFFSYGDAMLIL

SEQ ID NO: 65161 - protein, 349 aa, Chitinophaga niabensis
  misc_feature (1)..(349): tr|A0A1N6H6U4|A0A1N6H6U4_9BACT S-adenosylmethionine:tRN A ribosyltransferase-isomerase OS=Chitinophaga niabensi s OX=536979 GN=queA PE=3 SV=1
MKLSQFKFDLPLNLIAQHPTKTRDESRLMVVNRATGKIEHKVFKDVLGYFNDKDVMVVNNTKVFPARLYGRKEKTGAKIEVFLLRELNKLNRLWDVIVDPARKIRVGNKLYFGDDESLVAEVIDNTTSRGRTIRFLFEGNDEEFKAVLDSLGETPLPKYIKRKPEDDDKERYQTVYAKYEGAVAAPTAGLHFSRELIKRLEIKGVKFAEVTLHTGLGTFRPIEVEDLSKHKMDAEYFHIDEYAVKIVNKAKEENRKICAIGTTTVRAVESSVTAQNHLKAAEGWTNTFIHPPYDFSIPNALVTNFHLPKTSLLIMVCAFAGYDLVMEAYQQAIKEKYRFFSYGDAMLII

SEQ ID NO: 65162 - protein, 349 aa, Chitinophaga niastensis
  misc_feature (1)..(349): tr|A0A2P8HM46|A0A2P8HM46_9BACT S-adenosylmethionine:tRN A ribosyltransferase-isomerase OS=Chitinophaga niastens is OX=536980 GN=queA PE=3 SV=1
MKLSQFKFDLPLNLIAQHPTKTRDESRLMVVHRNTGKIEHKVFKDILGYFNDKDVMIVNNTKVFPARLYGRKEKTGAKIEVFLLRELNKQNRLWDVIVDPARKIRVGNKLYFGDDESLVAEVIDNTTSRGRTIRFLFEGNDDEFKQILDLLGETPLPKYIKRKPEDEDKERYQTVYAKYEGAVAAPTAGLHFSRELIKRLEIKGVKFAEVTLHTGLGTFRPIEVEDLSKHKMDAEYFHIEDHAVKTVNKAKEENRRICAIGTTSVRAVESSVTAQNLLKAAEGWTNTFIHPPYEFAIPNALVTNFHLPKTSLLIMTCAFAGYDLIMEAYQQAIKEKYRFFSYGDAMLIV

SEQ ID NO: 65163 - protein, 349 aa, Chitinophaga parva
  misc_feature (1)..(349): tr|A0A2T7BEU1|A0A2T7BEU1_9BACT S-adenosylmethionine:tRN A ribosyltransferase-isomerase OS=Chitinophaga parva OX =2169414 GN=queA PE=3 SV=1
MKLSQFKFDLPLNLIAQHPSKTRDESRLMVVHRATGKIEHKLFKDVINYFNDKDVMIVNNTKVFPARLYGRKEKTGAKIEVFLLRELNKQNRLWDVIVDPARKIRVGNKLYFGDDETLVAEVIDNTTSRGRTIRFLFEGNDEEFKQVLDSLGETPLPKYIKRKPEEEDKERYQTVYAKYEGAVAAPTAGLHFSRELIKRLEIKGIKFAEVTLHTGLGTFRPIEVEDLSKHKMDAEYFHIDEHAVKVVNKAKEENRKICAIGTTSVRAVESSVTAQNHLKAAEGWTNTFIHPPYDFSIPNALVTNFHLPKTSLLIMVCAFAGYDLVMEAYQQAIKEKYRFFSYGDAMLIL

SEQ ID NO: 65164 - protein, 349 aa, Chitinophaga pinensis
  misc_feature (1)..(349): tr|A0A561IQV3|A0A561IQV3_9BACT S-adenosylmethionine:tRN A ribosyltransferase-isomerase OS=Chitinophaga pinensis OX=79329 GN=queA PE=3 SV=1
MKLSQFRFDLPLNLIAQHPSKTRDEARLMVVNRATGKIEHKVFKDILNYFNDKDVMMVNNTKVFPARLYGRKEKTGAKIEVFLLRELNKQNRLWDVIVDPARKIRVGNKLYFGDDESLVAEVIDNTTSRGRTIRFLFEGNDDEFKQVLDTLGETPLPKYIKRKPEDEDKERYQTVYAKYEGAVAAPTAGLHFSRELIKRLEIKGIKFAEVTLHTGLGTFRPIEVEDLSKHKMDAEYFNIDEYAVKIVNKAKEENRKVCAIGTTTVRAVESSVTAQNMLKAAEGWTNTFIHPPYDFAIPNALVTNFHLPKTSLLIMVCAFAGYDLVMEAYQQAIKEKYRFFSYGDAMLIL

SEQ ID NO: 65165 - protein, 349 aa, Chitinophaga pinensis
  misc_feature (1)..(349): tr|C7PSY7|C7PSY7_CHIPD S-adenosylmethionine:tRNA ribosy ltransferase-isomerase OS=Chitinophaga pinensis (strain ATCC 43595 / DSM 2588 / NCIB 11800 / UQM 2034) OX=4859 18 GN=queA PE=3 SV=1
MKLSQFRFDLPLNLIAQHPSKTRDEARLMVVNRATGKIEHKVFRDIINYFNDKDVMVVNNTKVFPARLYGRKEKTGAKIEVFLLRELNKQNRLWDVIVDPARKIRVGNKLYFGDDESLVAEVIDNTTSRGRTIRFLFEGDDNEFKQVLDTLGETPLPKYIKRKPEEEDKERYQTVYAKHEGAVAAPTAGLHFSRELIKRLEIKGVKFAEVTLHTGLGTFRPIEVEDLSKHKMDAEYFNIDEYAVKVVNKAKEENRKVCAIGTTTVRAVESSVTAQNLLKAAEGWTNTFIHPPYDFAIPNALVTNFHLPKTSLLIMVCAFAGYDLVMEAYQQAIKEKYRFFSYGDAMLII

SEQ ID NO: 65166 - protein, 349 aa, Chitinophaga polysaccharea
  misc_feature (1)..(349): tr|A0A561P637|A0A561P637_9BACT S-adenosylmethionine:tRN A ribosyltransferase-isomerase OS=Chitinophaga polysacc harea OX=1293035 GN=queA PE=3 SV=1
MKLSQFKFDLPLNLIAQHPTKTRDESRLMVVHRNTGKIEHKVFKDILGYFNDKDVMIVNNTKVFPARLYGRKEKTGAKIEVFLLRELNKQNRLWDVIVDPARKIRVGNKLYFGDDETLVAEVIDNTTSRGRTIRFLFEGNDEEFKQVLDQLGETPLPKYIKRKPEDEDKERYQTVYAKYEGAVAAPTAGLHFSRELIKRLEIKGVKFAEVTLHTGLGTFRPIEVEDLSKHKMDAEYFLIEEHAVKVVNKAKEENRRICAIGTTSVRAVESSVTAQNHLKAAEGWTNTFIHPPYDFAIPNAMVTNFHLPKTSLLIMTCAFAGYDLIMEAYQQAIKEKYRFFSYGDAMLII

SEQ ID NO: 65167 - protein, 349 aa, Chitinophaga rupis
  misc_feature (1)..(349): tr|A0A1H8CRF4|A0A1H8CRF4_9BACT S-adenosylmethionine:tRN A ribosyltransferase-isomerase OS=Chitinophaga rupis OX =573321 GN=queA PE=3 SV=1
MKLSQFKFDLPLNLIAQHPSKSRDESRLMVVNRATGKIEHKVFRDIIGYFNDKDVMVVNNTKVFPARLYGRKEKTGAKIEVFLLRELNKQNRLWDVIVDPARKIRVGNKLYFGDDESLVAEVIDNTTSRGRTIRFLFEGNDDEFKAVLDTLGETPLPKYIKRKPEDEDKERYQTVYAKYEGAVAAPTAGLHFSRELIKRLEIKGVKFAEVTLHTGLGTFRPIEVEDLSKHKMDAEYFHIEEYAVKIVNKAKDENRKICAIGTTTVRAVESSVTAQNHLKAAEGWTNTFIHPPYDFSIPNALVTNFHLPKTSLLIMVCAFAGYDLIMEAYQQAIKEKYRFFSYGDAMLIL

SEQ ID NO: 65168 - protein, 349 aa, Chitinophaga sancti; identical to SEQ ID NO: 65164
  misc_feature (1)..(349): tr|A0A1K1Q863|A0A1K1Q863_9BACT S-adenosylmethionine:tRN A ribosyltransferase-isomerase OS=Chitinophaga sancti O X=1004 GN=queA PE=3 SV=1

SEQ ID NO: 65169 - protein, 349 aa, Chitinophaga skermanii
  misc_feature (1)..(349): tr|A0A327Q9J9|A0A327Q9J9_9BACT S-adenosylmethionine:tRN A ribosyltransferase-isomerase OS=Chitinophaga skermani i OX=331697 GN=queA PE=3 SV=1
MKLSQFKFDLPLNLIAQHPSKTRDEARLMVVHRSTGKIEHKVFKDILGYFNDKDVMVVNNTKVFPARLYGRKEKTGAKIEVFLLRELNKANRLWDVIVDPARKIRVGNKLYFGDDESLVAEVIDNTTSRGRTIRFLFEGSEEEFKQVLDSLGETPLPKYIKRKPEEDDKERYQTVYAKYEGAVAAPTAGLHFSRELIKRLEIKGVKFAEVTLHTGLGTFRPIEVEDLSKHKMDAEYFHIDETAVKIVNKAKEENRKVCAIGTTSVRAVESSVTAQNHLKAAEGWTNTFIHPPYDFAIPNALVTNFHLPKTSLLIMVSAFAGYDLVMEAYQQAIKEKYRFFSYGDAMLIL

SEQ ID NO: 65170 - protein, 349 aa, Chitinophaga sp.
  misc_feature (1)..(349): tr|A0A5B9WUP7|A0A5B9WUP7_9BACT S-adenosylmethionine:tRN A ribosyltransferase-isomerase OS=Chitinophaga sp. XS-3 0 OX=2604421 GN=queA PE=3 SV=1
MKLSQFKFDLPLNLIAQHPSKTRDESRLMVVNRATGKIEHKVFKDILGYFSDKDVMVVNNTKVFPARLYGRKEKTGAKIEVFLLRELNKQNRLWDVIVDPARKIRVGNKLYFGDDESLVAEVIDNTTSRGRTIRFLFEGNDEEFKAVLDSLGETPLPKYIKRKPEDEDKERYQTVYAKFEGAVAAPTAGLHFSRELIKRLEIKGVKFAEVTLHTGLGTFRPIEVEDLSKHKMDAEYFHIDEYAVKIVNKAKEDNRKICAIGTTTVRAVESSVTAQNHLKAAEGWTNTFIHPPYDFSIPNALVTNFHLPKTSLLIMVCAFAGYDLIMEAYQQAIKEKYRFFSYGDAMLII

SEQ ID NO: 65171 - protein, 349 aa, Chitinophaga sp.
  misc_feature (1)..(349): tr|A0A1I0PWH4|A0A1I0PWH4_9BACT S-adenosylmethionine:tRN A ribosyltransferase-isomerase OS=Chitinophaga sp. YR57 3 OX=1881040 GN=queA PE=3 SV=1
MKLSQFRFDLPLNLIAQHPSKTRDEARLMVVNRATGKIEHKVFRDIIGYFNDKDVMVVNNTKVFPARLYGRKEKTGAKIEVFLLRELNKQNRLWDVIVDPARKIRVGNKLYFGDDESLVAEVIDNTTSRGRTIRFLFEGNDEEFKQVLDTLGETPLPKYIKRKPEDEDKERYQTVYAKYEGAVAAPTAGLHFSRELIKRLEIKGVKFAEVTLHTGLGTFRPIEVEDLSKHKMDAEYFNIDEYAVKIVNKAKEDNRKVCAIGTTTVRAVESSVTAQNLLKAAEGWTNTFIHPPYDFSIPNALVTNFHLPKTSLLIMVCAFAGYDLVMEAYQQAIKEKYRFFSYGDAMLII

SEQ ID NO: 65172 - protein, 349 aa, Chitinophaga terrae
  misc_feature (1)..(349): tr|A0A1H4FJH9|A0A1H4FJH9_9BACT S-adenosylmethionine:tRN A ribosyltransferase-isomerase OS=Chitinophaga terrae K im and Jung 2007 OX=408074 GN=queA PE=3 SV=1
MKLSQFKFDLPLNLIAQHPSKTRDESRLMVVNRSTGKIEHKLFKDILGYFNDKDVMIVNNTKVFPARLYGRKEKTGAKIEVFLLRELNKQNRLWDVIVDPARKIRVGNKLYFGDDETLVAEVIDNTTSRGRTIRFLFEGNDDEFKVVLDQLGETPLPKYIKRKPEEEDKERYQTVYAKYEGAVAAPTAGLHFSRELIKRLEIKGVRFAEVTLHTGLGTFRPIEVEDLSKHKMDAEYFHIDEHAVKIVNKAKEENRRICAIGTTSVRAVESSVTAQNHLKAAEGWTNMFIHPPYDFAIPNALVTNFHLPKTSLLIMTCAFAGYDLVMEAYQQAIKEKYRFFSYGDAMLII

SEQ ID NO: 65173 - protein, 450 aa, Chitinophagaceae bacterium
  misc_feature (1)..(450): tr|A0A257HZ92|A0A257HZ92_9BACT S-adenosylmethionine:tRN A ribosyltransferase-isomerase OS=Chitinophagaceae bact erium BSSC1 OX=2015574 GN=CFE25_01580 PE=3 SV=1
MLAEQVKKIQIKDYSYELPDERIAKFPLENRDQSKLLIANQAPTQASHEVNDFHEVLDLETSSTTTQQTYQIDQYLNLANHLPANSFLVFNNTKVVEARILFQKPTGGVIELFCLEPDSIYPDITSAMLQKGTVQWKCLVGGAKKWKEEFLEKTIIDQGQNITLRARRVAQGAEAYLIEFSWSQAQMSFAELLHIAGLIPLPPYLNRVAENSDAERYQTVYAKHDGSVAAPTAGLHFTEGVFASLAAKGITKDFVTLHVGAGTFKPVKADAMEDHEMHAEFIDVSDSFIENLLGRLGDPIVPVGTTSMRTLESLYWLGLKTMANPTINLADLTVHQWDPYEMNSSNVPQKNLDARTISASIALASLLQWMQTQKLSQLITKTQIIIAPGYQFRICSGLITNFHQPQSTLLLLVAALIGDTWKELYNHAMNNEFRFLSYGDGCLIWNAQAI

SEQ ID NO: 65174 - protein, 406 aa, Chitinophagaceae bacterium
  misc_feature (1)..(406): tr|A0A1Z5SK98|A0A1Z5SK98_9BACT S-adenosylmethionine:tRN A ribosyltransferase-isomerase OS=Chitinophagaceae bact erium IBVUCB1 OX=1985173 GN=CAP35_05670 PE=3 SV=1
MSAQHPATLKIEDYTYHLPDERIARYPLTERDASKLLIYQSGLLEESTYRHIADYLPSNTLLVFNQTKVVNARLLFTKDTGGIIEIFCLEPHSQYPEIQTALLQKNKVWWQCMVGGASKWKHGMVLTVAHETPDFTLSATVIEKQQGAFTIEFTWDADITFAEVLHYIGKVPIPPYLHRDAEQGDELRYQTIYAKEEGSVAAPTAGLHFTDAVFKSFEAKNITTSFVTLHVGAGTFKPVKSETMAEHDMHTEWIEVDVAAIQSLLQHDGNIVAVGTTSMRTLESLYWIGAKLLAGMSIAGDVAVTQWEPYELPATATAQQALQAIADYLAANNLQRLITRTQILIAPSYQCRVIKGLITNFHQPQSTLLLLVAAITNGNWQAIYNHALDNDYRFLSYGDGSLIWVD

SEQ ID NO: 65175 - protein, 345 aa, Chlamydiales bacterium
  misc_feature (1)..(345): tr|A0A1M3CRX4|A0A1M3CRX4_9CHLA S-adenosylmethionine:tRN A ribosyltransferase-isomerase OS=Chlamydiales bacteriu m 38-26 OX=1895743 GN=queA PE=3 SV=1
MKNRFALTSYLYDLPEDLIAQYPCHPRDASRLLVVERDTEKIYEMPFKELCHYLEKGDSLVFNDTKVIPSRLIGQRLSGGKAEVFLLKKISSHQWEALVKPGKKMGIGTRVYFGDGFFCEVIDIHANGQRLVQLEYTGSIEEAIEKFGHVPLPYYMRRESLNEVDKERYQTVYAQNPGSVAAPTAGLHFTDEMVSHLVDKGVLIDKITLHIGLGTFLPVKTEDIRHHQMHEEIFEITETTAQNLNARNPSRKQICVGTTTCRALESAASPEGCIQSGKYHTNIFIHPGYKFKYVKNLLTNFHQPGSSLIILVSTFASHELIQNAYQKAVKDRYRFLSYGDAMLIL

SEQ ID NO: 65176 - protein, 347 aa, Chloracidobacterium sp.
  misc_feature (1)..(347): tr|A0A257B7T3|A0A257B7T3_9BACT S-adenosylmethionine:tRN A ribosyltransferase-isomerase OS=Chloracidobacterium s p. CP2_5A OX=2012633 GN=queA PE=3 SV=1
MRLSELHYDLPPQLIAQQPSERRDHARLLLLDRQSGAWRDAYVYDLPKFLHSGDVLALNDTRVFPARLIGQREPGGGAVEVFLVREQAPRRWTALVKPGRRVRVGDRLVFGDGRLRGTIAERTEDGRRTIVFDGAGDFFAVLDEIGRTPLPPYIAREQDSPADRERYQTVYAAAPGSIAAPTAGLHFTPELLTTLAAQGVEIVKLTLHVGYGTFQPVRAEDLAEHRVEPEVYVVPEETARRVTAAKREGRRVIAVGTTSTRTLETVARATEGGVEVVAGQGMTDLTIVPGFTFRVLDGLMTNFHLPQSSLLALVVALAGYAPVMNAYRHAVAAEYRFYSFGDAMLIL

SEQ ID NO: 65177 - protein, 347 aa, Chloracidobacterium thermophilum
  misc_feature (1)..(347): tr|G2LHC0|G2LHC0_CHLTF S-adenosylmethionine:tRNA ribosy ltransferase-isomerase OS=Chloracidobacterium thermophi lum (strain B) OX=981222 GN=queA PE=3 SV=1
MRLSDLHYDLPPERIAQHPCEPRDQARLLVLDRRTGALEDAHVKDLPRWLCAGDVLVLNDTRVFPARLIGRREPTGGLVEVFLVRETAPQTWTALVKPGRRVRVGDRLTFGQDELRGVVTGRLEDGRRTIAFTCEGDFFALLDRIGRTPLPPYIAREADTPSDRERYQTVYAATPGSIAAPTAGLHFTPELLSTLAAQGVEIVKLTLHVGYGTFQPVRTENLAAHRVEPEVYVVPEATAQRVNAAKREGRRVIAVGTTSTRTLETVAQDGVDGNVVRAGQGMTDLTIVPGFRFRVLDGLLTNFHLPQSSLLALVVAFGGYEPVMCAYRHAVAAGYRFYSYGDAMLLI

SEQ ID NO: 65178 - protein, 340 aa, Chlorobaculum limnaeum
  misc_feature (1)..(340): tr|A0A1D8D206|A0A1D8D206_CHLLM S-adenosylmethionine:tRN A ribosyltransferase-isomerase OS=Chlorobaculum limnaeu m OX=274537 GN=queA PE=3 SV=1
MKVNDFDYTLPDERIAAYPPEERGSTRLIVLDRAAQSITHSAYASLHEWLRPGDLLVLNNSKVIRARLVARKPTGARIELMLLEKHEGEQNLALYRGRLRVGDLLLAHGAELTVEALPSDGVARLSCATARLTDLFEAHGSVPIPPYLKRDAEELDRERYQTVFAELPGSVAAPTASLNLTDELLGKVRAKGVEIAHVTLHVGLGTFLPIRAESFEEHVMHREFYTIPEASARKIGATRAAGGRVVAVGTTVTRALEHAAPKLFDGGFSQEVSGEADIFIYPGYTFRIIDALLTNFHAPRSTVLMLTAAFAGTELLQRAYQQALDNGYRFLSYGDSMLVE

SEQ ID NO: 65179 - protein, 346 aa, Chlorobaculum limnaeum
  misc_feature (1)..(346): tr|A0A1D8D745|A0A1D8D745_CHLLM S-adenosylmethionine:tRN A ribosyltransferase-isomerase OS=Chlorobaculum limnaeu m OX=274537 GN=queA PE=3 SV=1
MRLSNFRYTLPKTRIADHPESPRDACKLMVLSRRKKEIDHKVFTDIVSYFKKGDLLVVNNSRVFPAKIFGQKEKTDAKIEVFLLRELNKEAGLWDVLVDPARKVRVGNKIYFEDDVVAEVVDNTTSRGRTIRFLNPDIDVFQMVEKIGHVPLPPYFTRKPKEADRADYQTVYANQTGAVVAPMAGLHFTMPLLQQLQKIGVKILPVTLHPSLSTFNAIEVEDVSKHKMDSEYFNIPYQTAMEVNETKMNKSGRVFVVGTTTCRALEANATVEGKIKFGQGWTDKFIYPPYTFKVTDALITNFQQPETTLMMVVSAFAEHRLLMEAYKTALKNNYRFLAYGDAMLIV

SEQ ID NO: 65180 - protein, 340 aa, Chlorobaculum parvum
  misc_feature (1)..(340): sp|B3QPI5|QUEA_CHLP8 S-adenosylmethionine:tRNA ribosylt ransferase-isomerase OS=Chlorobaculum parvum (strain NC IB 8327) OX=517417 GN=queA PE=3 SV=1
MRVEEFDYTLPEERIATYPPAERGSTRLIVLDRAADSITHSVYASLHERLRPGDLLVLNNSKVIRARLIANKPTGGRIELMLLEKHEGVQNLALYRGRLKVGDRLLAHGAELTVEALPDHGVARLSCDTANLTELFEAHGSVPIPPYLKRDAEEVDRERYQTVFAELPGSVAAPTASLNLTDELLEKIKAKGVDVVHITLHVGLGTFLPIRSETFEEHVMHREFYNIPESSAHKIGEAKARGGRVVAVGTTVTRALEHAAPRLLDSDFSQEVSGEADIFIYPGYEFRIIDALLTNFHAPRSTVLMLTAAFAGKELLRRAYQEALERDYRFLSYGDSMFIS

SEQ ID NO: 65181 - protein, 346 aa, Chlorobaculum parvum
  misc_feature (1)..(346): tr|B3QP84|B3QP84_CHLP8 S-adenosylmethionine:tRNA ribosy ltransferase-isomerase OS=Chlorobaculum parvum (strain NCIB 8327) OX=517417 GN=queA PE=3 SV=1
MRLSNFRYTLPKTRIADHPESPRDACKLMVLNRRKKDIEHKVFTDIVSYFKKGDLLVVNNSRVFPAKIFGQKEKTDAKIEVFLLRELNKEAGLWDVLVDPARKVRVGNKIYFEDDVVAEVVDNTTSRGRTIRFLNPDIDVFKMVEKIGQVPLPPYFTRKPKDSDRTDYQTVYASQTGAVVAPMGGLHFTMPLLEQIQKVGVKILPITLHPSLSTFNAIEVEDVSKHKMDSEYFNIPYQTAMEINETKVNKSGRVFVVGTTTCRALEANATVEGKIKFGQGWTDKFIYPPYNFKVTDALITNFQQPETTLMMVVSAFAEHRLLMDAYKTALKNNYRFLAYGDSMLIV

SEQ ID NO: 65182 - protein, 340 aa, Chlorobaculum sp.
  misc_feature (1)..(340): tr|A0A4Q1DGF7|A0A4Q1DGF7_9CHLB S-adenosylmethionine:tRN A ribosyltransferase-isomerase OS=Chlorobaculum sp. 24C R OX=2508878 GN=queA PE=3 SV=1
MRVEEFDYTLPEERIATWPPAERGSTRLVVLDRAAGTIEHSAYASLHERLRPGDLLVLNNSRVIRARLFARKPTGARIELMLLEKHEGVQNLALYRGRLKPGDRLLAHGAELTVEALPDHGVARLSCETANLAELFEAHGSVPIPPYLKRDAEEVDRERYQTVFAELPGSVAAPTASLNLTDELLEKIKAKGVEIARVTLHVGLGTFLPIRSESFEEHVMHREYYNIPESSARKIGQVKARGGRVVAVGTTVTRALEHAAPKLIDSAFTQELSGEADIFIYPGYTFKIIDALLTNFHAPRSTVLMLTAALAGKELLRRAYQEALESDYRFLSYGDSMFIE

SEQ ID NO: 65183 - protein, 346 aa, Chlorobaculum sp.
  misc_feature (1)..(346): tr|A0A4V1MAA0|A0A4V1MAA0_9CHLB S-adenosylmethionine:tRN A ribosyltransferase-isomerase OS=Chlorobaculum sp. 24C R OX=2508878 GN=queA PE=3 SV=1
MRLSNFRYTLPKTRIADHPESPRDACKLMVLSRRKKEIEHKVFTDIVSYFKKGDLLVVNNSRVFPAKIFGQKEKTDAKIEVFLLRELNKEAGLWDVLVDPARKVRVGNKIYFEDDVVAEVVDNTTSRGRTIRFLNPDIDVFKMVEKIGHVPLPPYFTRKPKEADRTDYQTVYANQTGAVVAPMAGLHFTMPLLQQLQKIGVKILPVTLHPSLSTFNAIEVEDVSKHKMDSEYFNIPYQTAMEVNETKMNKSGRVFVVGTTTCRALEANATVEGKIKFGQGWTDKFIYPPYNFKVTDALITNFQQPETTLMMVVSAFADHRLLMEAYKTGLKNNYRFLAYGDAMLIV

SEQ ID NO: 65184 - protein, 340 aa, Chlorobaculum tepidum
  misc_feature (1)..(340): sp|Q8KEY7|QUEA_CHLTE S-adenosylmethionine:tRNA ribosylt ransferase-isomerase OS=Chlorobaculum tepidum (strain A TCC 49652 / DSM 12025 / NBRC 103806 / TLS) OX=194439 GN =queA PE=3 SV=1
MKVSDFDYALPEERIACYPPAKRGSTRLIVLNRATGSITHSAYASLHEELRPGDLLVLNNSRVIRARLIAHKPTGARIELMLLEKHEEAQNLALYRGRLRIGDRLLAHGVELSVEALPSDGIARLSCATGNLADLFDAHGSVPIPPYLKRDAEELDRERYQTVFAELPGSVAAPTASLNLTDELLDKINAKGVGIAHVTLHVGLGTFLPIRSERFEEHVMHREFYNIPQTAARKIGETKASGGRVVAAGTTVTRALEHAAPKLIESGFTQEVSSEADIFIYPGYEFRIIDALITNFHAPRSTVLMLTAAFAEKELLMRAYHEALDNGYRFLSYGDSMFIS

SEQ ID NO: 65185 - protein, 346 aa, Chlorobaculum tepidum
  misc_feature (1)..(346): tr|Q8KCU4|Q8KCU4_CHLTE S-adenosylmethionine:tRNA ribosy ltransferase-isomerase OS=Chlorobaculum tepidum (strain ATCC 49652 / DSM 12025 / NBRC 103806 / TLS) OX=194439 GN=queA-2 PE=3 SV=1
MRLSNFRYTLPKTRIADHLESPRDACKLMVLNRRKKEIEHKVFTDIVSYFKKGDLLVVNNSRVFPAKIFGQKEKTDAKIEVFLLRELNKEAGLWDVLVDPARKVRVGNKIYFEDDVVAEVVDNTTSRGRTIRFLNPDIDVFQMVEKIGHVPLPPYFTRKPKETDRTDYQTVYASQTGAVVAPMAGLHFTIPLLQQLQKIGVKILPLTLHPSLSTFNAIEVEDVSKHKMDSEYFNIPYQTAMEINETKVNKSGRVFVVGTTTCRALEANATVDGKIKFGQGWTDKFIYPPYNFKVTDALITNFQQPETTLMMVVSAFAEHRLLMEAYKTALKNNYRFLAYGDAMLIV

SEQ ID NO: 65186 - protein, 340 aa, Chlorobaculum thiosulfatiphilum
  misc_feature (1)..(340): tr|A0A5C4S640|A0A5C4S640_CHLTI S-adenosylmethionine:tRN A ribosyltransferase-isomerase OS=Chlorobaculum thiosul fatiphilum OX=115852 GN=queA PE=3 SV=1
MKVSDFDYTLPEERIACYPPEERGSTRLVVLDRATQSITHSAYAALHEWLRPGDLLVLNNSKVIRARLIARKPTGARIELMLLEKHEGEQNLALYRGRLRVGDRLLAHGVELTVEALPSDGVARFGCATARLTELFEAHGSVPIPPYLKRDAEELDRERYQTIFAELPGSVAAPTASLNLTDELLDKVRAKGVEIAHVTLHVGLGTFLPIRSESFEEHIMHREFYNIPEASARKIGKTKATGGRVVAVGTTVTRALEHAAPRLLGSEFTQEVSGEADIFIYPGYTFRIIDALLTNFHAPRSTVLMLTAAFAGTELLKQAYHEALDNGYRFLSYGDSMFIA

SEQ ID NO: 65187 - protein, 346 aa, Chlorobaculum thiosulfatiphilum
  misc_feature (1)..(346): tr|A0A5C4SB47|A0A5C4SB47_CHLTI S-adenosylmethionine:tRN A ribosyltransferase-isomerase OS=Chlorobaculum thiosul fatiphilum OX=115852 GN=queA PE=3 SV=1
MRLSNFRYTLPKTRIADHPESPRDACKLMVLSRRKKEIEHKVFTDIVSYFKKGDLLVVNNSRVFPAKIFGQKEKTDAKIEVFLLRELNKEAGLWDVLVDPARKVRVGNKIYFEDDVVAEVVDNTTSRGRTIRFLNPDIDVFQMVEKIGHVPLPPYFTRKPKEADRTDYQTVYANQTGAVVAPMAGLHFTMPLLQQLQKIGVKILPVTLHPSLSTFNAIEVEDVSKHKMDSEYFNIPYQTAMEVNETKMNKSGRVFVVGTTTCRALEANATVEGKIKFGQGWTDKFIYPPYTFKVTDALITNFQQPETTLMMVVSAFADHRLLMESYKTALKNNYRFLAYGDAMLIV

SEQ ID NO: 65188 - protein, 125 aa, Chlorobi bacterium
  misc_feature (1)..(125): tr|A0A136PH25|A0A136PH25_9BACT S-adenosylmethionine:tRN A ribosyltransferase-isomerase (Fragment) OS=Chlorobi b acterium OLB7 OX=1619898 GN=UZ07_CHB004000346 PE=3 SV=1
GDARGASELSVAQWDPYRLAESDPALPLPDEAFAAVEGWRSSQQMEAVTGRTKILIVPGYRFRACDALVTNFHQPGSTLILLVGAFLGHDLWQQVYQAALREGYRFLSYGDSSLLIQGRCGSVSP

SEQ ID NO: 65189 - protein, 322 aa, Chlorobi bacterium
  misc_feature (1)..(322): tr|A0A4P5UPU1|A0A4P5UPU1_9BACT S-adenosylmethionine:tRN A ribosyltransferase-isomerase OS=Chlorobi bacterium OX =2268192 GN=queA PE=3 SV=1
MMVLNKATGELEDKVFKDIMDYFQKGDCIVLNDTRVFPARVFGKKEKTNAKIEVMLLRELKAQERIWDVLVEPARKVRIGNKIYFDNNKFYCEVVDNTTNRGRTVRFSYDGDLFKVIERIGEMPLPGYIKRDPTEHDKETYQCVFANPEKTASIAPPTAGLHFTQKMLKELDKKGVRIAYVSLNIGQGIFENIEVEDLTKHRMYSEYFEITKDNADTINKSLKSKKNVYAVGCSVARALEASVLTTGSVKPNRGWTDKFIYPPYEFKIANRFITNFHPPATPSILLSAAFAGKDLLFKAYKRAIKGDYRLFAYGDAMLIINE

SEQ ID NO: 65190 - protein, 341 aa, Chlorobium chlorochromatii
  misc_feature (1)..(341): sp|Q3AR26|QUEA_CHLCH S-adenosylmethionine:tRNA ribosylt ransferase-isomerase OS=Chlorobium chlorochromatii (str ain CaD3) OX=340177 GN=queA PE=3 SV=1
MQVADFDYHLPEERIAKYPPLERGSTRLLVLNRQSGALTHSLYAHLDTFLQAGDLLLLNNTRVVPARLFATRATGATIELMLLERHHHREQLVLYRGQLKAGEMLQSHGHTLLVEEVLPQGLARLALADGGDLHQFFTQFGSVPIPPYLKRNAEAVDRERYQTVFAAHSGSVAAPTASLNMTPELLQRLKNNGVEIAHITLHVGLGTFLPIRTESLEEHVMHRESYLLPAESVAALQRVKADGGRVVAVGTTVTRALEHSAPRILQSSAHAEIEGEADIFIYPGYRFQMVDLLLTNFHAPRSTVLMLTAACAGTDNLRAAYSEAVLQGYNFLSYGDSMLIC

SEQ ID NO: 65191 - protein, 346 aa, Chlorobium chlorochromatii
  misc_feature (1)..(346): tr|Q3AS34|Q3AS34_CHLCH S-adenosylmethionine:tRNA ribosy ltransferase-isomerase OS=Chlorobium chlorochromatii (s train CaD3) OX=340177 GN=queA PE=3 SV=1
MRLSNFRYNLPRHKIANELCEPRDNCKLMVLNRRKKEIEHKQFEDIASYLKKGDLLVLNNSKVFPAKIFGQKEKTDAKIEVFLLRVLNKEAGLWDVLVDPARKVRVGNKIYFEEDVVAEVVDNTTSRGRTIRFLNPDINVFELVDRIGTIPLPPYFNRAPRPSDKEHYQTVFASEIGAVVAPMAGLHFTMPQLQAIQKMGVKILPITLHPSLSTFSAIEVEDVSKHKMDSEYFHIPYQTAMEINETKLSKSGRVIAVGTTTCRVLEANATVDGKIKFGKGWTDKFIYPPYQFKVTDCLLTTFQLPETTLMMAVSAFADHRLLMDAYKIALKEDYQFLAYGDMMFIH

SEQ ID NO: 65192 - protein, 346 aa, Chlorobium ferrooxidans
  misc_feature (1)..(346): tr|Q0YQU5|Q0YQU5_9CHLB S-adenosylmethionine:tRNA ribosy ltransferase-isomerase OS=Chlorobium ferrooxidans DSM 1 3031 OX=377431 GN=queA PE=3 SV=1
MRLSNFRYTLPKTKIADQPTEPRDKCRLMVLNRRKKDIDHKMFDDIVSYFKKGDLLILNNSRVFPAKIFGQKEKTDAKIEVFLLRVLNKEAGLWDVLVDPARKVRVGNKIYFEEDVVAEVVDNTTSRGRTIRFLNPEIDVFSLVERIGNIPLPPYFTRPPVESDKENYQTVYASQTGAVVAPMAGLHFTMPLLQKIQKIGVKILPITLHPSLSTFNAIEVEDVSKHKMDSEYFNIPYQTAMEINETKVNKTGRIIAVGTTTCRVLEANATVDGKIKFGRGWTDKFIYPPYQFKVTDALLTNFQQPETTLLMAVSAFAEHRLLMEAYKTALKGDYQFLAYGDAMFIH

SEQ ID NO: 65193 - protein, 347 aa, Chlorobium ferrooxidans
  misc_feature (1)..(347): tr|Q0YRL8|Q0YRL8_9CHLB S-adenosylmethionine:tRNA ribosy ltransferase-isomerase OS=Chlorobium ferrooxidans DSM 1 3031 OX=377431 GN=queA PE=3 SV=1
MRASDFDYDLPEEKIACYPPEERGSTRMLVLDRASGALRHAWYAALDEYLEPGDLLVLNNTKVVRARLHALKQTGAKIELMLLEKHQADQDRVLYRGKLKKGDTLVAYDKELLVSDIVDDGVARIEFRGGSQSGSIRDFFERFGAVPIPPYLKRDAEEVDRERYQTVFAELPGSVAAPTASLNMTPELLENIRLKGVDVVTVTLHVGLGTFLPIRVESLREHVMHREYYSISAETVEKIRKVKAAGGRIVAVGTTVTRALEHAAGRIVRSSCRAGDAPITGEADIFIFPGYSFQVIDALLTNFHAPRSTVLMLTAAFAGAEHLKRAYQSALEEGYFFLSYGDSMLII

SEQ ID NO: 65194 - protein, 343 aa, Chlorobium limicola
  misc_feature (1)..(343): sp|B3EGG9|QUEA_CHLL2 S-adenosylmethionine:tRNA ribosylt ransferase-isomerase OS=Chlorobium limicola (strain DSM 245 / NBRC 103803 / 6330) OX=290315 GN=queA PE=3 SV=1
MKVSDFDYTLPEDMIARYPPAERGTTRLLVLDPATGETEHSRYAHLADFLKPGDLLLLNNSKVVRARMFASKKTGASIELMLLEKHEGVQNLVLYRGRLKKGDRLIAHSEELLVEEITGQGVARLSASDGSDLPHLFERHAEVPIPPYLKREAEAVDAERYQTVFAEQPGSVAAPTASLNMTAGLLAELGQKGIDTATVTLHVGLGTFLPIRVESFEEHVMHREYYSIPFRTIDKIRRTKAGGGRVVAVGTTVTRALEHAAGSSCWGTSVAPASGEADIFIYPGYRFRVIDALLTNFHAPRSTVLMLTAAFAGQQNLLSAYHEAIEKQYRFLSYGDSMLIRPM

SEQ ID NO: 65195 - protein, 346 aa, Chlorobium limicola
  misc_feature (1)..(346): tr|A0A101JQN0|A0A101JQN0_CHLLI S-adenosylmethionine:tRN A ribosyltransferase-isomerase OS=Chlorobium limicola O X=1092 GN=queA PE=3 SV=1
MRLSNFRYTLPKTKIADHPASPRDSCKLMVLNRRKKEIEHKVFEDIVSYFKKGDLLVVNNSRVFPAKIFGQKEKTDAKIEVFLLRVLNKEAGLWDVLVDPARKVRVGNKIYFDEDVVAEVVDNTTSRGRTIRFLNPEIDVFSLVERIGHVPLPPYFTRKPKESDKENYQTVYASQTGAVVAPMAGLHFTMPLLQKIQKIGVKILPVTLHPSLSTFNAIEVEDVSKHKMDSEYFNIPYQTAMEINETKINKTGRVIAVGTTTCRVLEANATVDGKIKFGRGWTDKFIYPPYQFKVTDALLTNFQQPETTLLMVVSAFAEHRLLMEAYKTAMKSDYQFLAYGDAMFIH

SEQ ID NO: 65196 - protein, 341 aa, Chlorobium phaeobacteroides
  misc_feature (1)..(341): sp|A1BEM6|QUEA_CHLPD S-adenosylmethionine:tRNA ribosylt ransferase-isomerase OS=Chlorobium phaeobacteroides (st rain DSM 266) OX=290317 GN=queA PE=3 SV=1
MKVSDFDYELPESHIARYPPDERGSTRLLVLQRSTGEIMHSRYAGLHGFLRKGDLLVLNNSRVVKARMFAFKPTGGKIELVLLEKHGDEQNLVLYRGSLKKGDALLAYGCEFGVEELVGQGVAVLSVKGEGTVQDVFERYAAMPIPPYLKREAEEIDRERYQTVFAEQPGSVAAPTASLNMTGELFDSLRQKGVSIASMTLHVGLGTFLPIRVDHFDEHVMHREFYVIPDETIALIRTTKNNGGRVIAVGTTVTRALEHAADVVFNSNGNGSVSGEADIFIYPGYRFRVIDALLTNFHAPRSTVLMLTAAFAGAEKLFHAYAEALRWEYDFLSYGDSMLIL

SEQ ID NO: 65197 - protein, 346 aa, Chlorobium phaeobacteroides
  misc_feature (1)..(346): tr|A1BGY5|A1BGY5_CHLPD S-adenosylmethionine:tRNA ribosy ltransferase-isomerase OS=Chlorobium phaeobacteroides ( strain DSM 266) OX=290317 GN=queA PE=3 SV=1
MRLSNFRYILPKTKIAEKPASPRDSCRLMVLNRRKKEIDHKNFEDISGYFKKGDLLVVNNSRVFPAKIFGQKEKTDAKIEVFLLRVLNKDAGLWDVLVDPARKVRVGNKIYFDEDIVAEVVDNTTSRGRTIRFLNPEVDVFSLVERIGHVPLPPYFTRLPVDSDKEDYQTVYASQTGAVVAPMAGMHFTMPLLQKIQKMGVKILPITLHPSLSTFNAIEVEDVSKHKMDSEYFNIPYQTAMEINETKINKTGRVIAVGTSTCRVLEANATVDGKIKFGSGWTDKFIYPPYQFKVTDALITNFQQPETTLLMVVSAFAEHRLLMDAYKVALKSEYQFLAYGDAMFIY

SEQ ID NO: 65198 - protein, 341 aa, Chlorobium phaeovibrioides
  misc_feature (1)..(341): sp|A4SDR0|QUEA_CHLPM S-adenosylmethionine:tRNA ribosylt ransferase-isomerase OS=Chlorobium phaeovibrioides (str ain DSM 265 / 1930) OX=290318 GN=queA PE=3 SV=1
MKVSDFDYSLPEERIAKYPPDNRGATRLLVLNRHTGSVQHARYSNLEAFLGYGDLLVINTTKVVRARLFAVKQTGAAIELMLLEKHEGPQNLALYRGRLKKGDRLLAHGHELIVEELAGQGVARLSVEGIESVHALFQNHAEVPIPPYLKRDAEAVDRERYQTVFAEHPGSVAAPTASLNMTPELLLKLEKGGVATAVMTLHVGLGTFLPIRTETMEEHVMHREFYSIPARTIEQIHETRRSGGRVVALGTTVTRALEHAATRISAFSGSDPLVGEADIFIHPGYSFQTIDALLTNFHAPRSTVLMLTAAFAGADHLRAAYREAVEKRYDFLSYGDSMLIS

SEQ ID NO: 65199 - protein, 341 aa, Chlorobium phaeovibrioides
  misc_feature (1)..(341): tr|A0A3S0NAE8|A0A3S0NAE8_CHLPH S-adenosylmethionine:tRN A ribosyltransferase-isomerase OS=Chlorobium phaeovibri oides OX=1094 GN=queA PE=3 SV=1
MKVSDFDYSLPEERIAKYPPDNRGATRLLVLNRHTGSVQHARYSNLEAFLGHGDLLVINTTKVVRARLFAVKQTGAAIELMLLEKHEGPQNLALYRGRLKQGDRLLAHGHELIVEELAGQGVARLSVEGIESVHALFQNYAEVPIPPYLKRDAEAVDRERYQTVFAEHPGSVAAPTASLNMTPELLLKLEKGGVATAGMTLHVGLGTFLPIRTETMEEHVMHREFYSIPARTIEQIHETRRSGGRVVALGTTVTRALEHAATRISAFSGSDPLVGEADIFIHPGYSFQTIDALLTNFHAPRSTVLMLTAAFAGADHLRAAYREAVEKRYDFLSYGDSMLIS

SEQ ID NO: 65200 - protein, 342 aa, Chlorobium sp.
  misc_feature (1)..(342): tr|A0A4R0QL20|A0A4R0QL20_9CHLB S-adenosylmethionine:tRN A ribosyltransferase-isomerase OS=Chlorobium sp. N1 OX= 2491138 GN=queA PE=3 SV=1
MRVADFDYELPDGRIARYPPEERGSTRLLVMRRREGSVRHAFYGDLDTFLSKGDLLVINNTQVVRARLMAVKSTGAKIELMLLEKHEGEQELVLYRGRLRQGDRLLSFGHEFLVEELVADGVARLTHAGGESLQKVFQAHAEVPIPPYLRREAEPLDRERYQTLFAEHPGSVAAPTASLNMTPELLGRLRSKGVDDARITLHVGLGTFLPIRTESITEHVMHREFYSIPPETLEKIRRTKAAGGRVVAVGTTVTRALEHAAPQILEGADAGPVEAEADIFLHPGGRPFRVIDALVTNFHAPRSTVLMLTAAFAGPELLRRAYREALEGEYRFLSYGDSTLIL

SEQ ID NO: 65201 - protein, 346 aa, Chlorobium sp.
  misc_feature (1)..(346): tr|A0A533TYU8|A0A533TYU8_CHLSQ S-adenosylmethionine:tRN A ribosyltransferase-isomerase OS=Chlorobium sp. OX=109 5 GN=queA PE=3 SV=1
MRLSNFRYTLPKTKIADEPTSPRDKCRMMVLNRRKKDIEHKVFEEIISYFKKGDLLVLNNSRVFPAKIFGQKEKTDAKIEVFLLRVLNKEAGLWDVLVDPARKVRVGNKIYFEEDVVAEVVDNTTSRGRTIRFLNPDIDVFSLVERIGNIPLPPYFTRPNRDSDRENYQTVYATETGAVVAPMAGLHFTMPVLQKIQKIGVKILPITLHPSLSTFNAIEVEDVSKHKMDSEYFNIPYQTAMAINETKVNKTGRVFAVGTTTLRVLEANATVDGKIKFGRGWTDKFIYPPYQFKVVDALLTNFQQPETTLLMAVSAFAEHRLLMEAYKIALKEDYQFLSYGDAMFIH

SEQ ID NO: 65202 - protein, 340 aa, Chloroflexi bacterium
  misc_feature (1)..(340): tr|A0A1F8TAF3|A0A1F8TAF3_9CHLR S-adenosylmethionine:tRN A ribosyltransferase-isomerase OS=Chloroflexi bacterium RBG_19FT_COMBO_62_14 OX=1797671 GN=queA PE=3 SV=1
MRTDDFDYRLPEAFIAQRPVEPRDASRLIVMDRAGGSLTHFSFHELPRFLTRGDALVLNETRVIPGRLAAMKIPHGGRVEILLLRRLGSQTWEALVGGRGLKSGSRLIVLHGPEAEIVDELGGARRVVRFARPISEELGRIGQVPLPPYIHVPLKDPEEYQTVYAARPGSAAAPTAGLHFTGGLLERIKTTGVDIVKVVLHVGLDTFQPVTEEDPRGHLIHSEWCRVSPEAAAAVNRAKAAGRRVIAVGTTTTRTLETAGLNAPAGQTVTSFEGASELYILPGFRFKVVDALITNFHLPRSTLLMMVSAFAGRERILAAYETAKQLGYRFYSFGDAMLIL

SEQ ID NO: 65203 - protein, 342 aa, Chloroflexi bacterium
  misc_feature (1)..(342): tr|A0A1F8NLQ4|A0A1F8NLQ4_9CHLR S-adenosylmethionine:tRN A ribosyltransferase-isomerase OS=Chloroflexi bacterium RBG_16_47_49 OX=1797639 GN=queA PE=3 SV=1
MRTSDFDYELPAGYIAQTPLELRDQSRLLVLNRQSGSIEHAIFTDLVKYLKAGDVLVVNETRVFPGRLFARKIPGGGRVEILLLRKRNERTWEALVGGKGLTVGRQLQVESKMPGEKIPMGEIMEDLDGAERLIQFDQPLEAFLPTIGHVPLPPYIHSRLDDPERYQTVYARNSGSAAAPTAGLHFTPQLIEVLTDLDIQFAKVTLHVGLDTFSPVNEVDPQEHKMHSEWCQITQESVDKINLARSKGGRVLAVGTTSVRLLESAVVDNKLMPFEGQTNLFILPGYKFRMVDAMITNFHLPRSTLIMLVSAFAGGENILKSYEVAKQANYRFYSFGDAMLII

SEQ ID NO: 65204 - protein, 369 aa, Chlorogloea sp.
  misc_feature (1)..(369): tr|A0A2T1ERJ1|A0A2T1ERJ1_9CHRO S-adenosylmethionine:tRN A ribosyltransferase-isomerase OS=Chlorogloea sp. CCALA 695 OX=2107693 GN=queA PE=3 SV=1
MIQDSNPTLNSLNFSDSSLASYDYRLPLEQIAQNPAFPRDSAKLLVVNSSTDYHHGIFSDLPSLLQPGDLLIMNDTRVIPARLYGRKTSGAAIEVLLLEEKQTNTWLALVKPGKRLQPGVQIVFVGTKEQYITATVLEIDEPTGGRLLKFDVPNNLSLLQVIDSFGKMPLPPYITNSQADDDEYQTVYAQNLGAIASPTAGLHFTPELIQKLAELGINSAFVTLHVGVGTFRPVEVEDVTTHKMHGEWIDVSQATVEQIRATKAKGGRIIAVGTTAVRALEGAAAASGQLKPFCGKTHMFIYPGYQWRVVDGLITNFHLPRSSLLMLVSALIGRQRLLDLYEDAIAQSYRFYSFGDAMLILPEATVNRP

SEQ ID NO: 65205 - protein, 394 aa, Chlorogloeopsis fritschii
  misc_feature (1)..(394): tr|A0A433NRN9|A0A433NRN9_CHLFR S-adenosylmethionine:tRN A ribosyltransferase-isomerase OS=Chlorogloeopsis frits chii PCC 6912 OX=211165 GN=queA PE=3 SV=1
MQQKLPETNLNLSSNPTVESSALDHSLASYDYELPNELIAQNPAFPRDSSRLLVVNSPSTGKNTEPLHYIFRDLPDLLRAGDLLVMNNTRVLSARLYGRKSTGAEVEVLLLEERQHNCWLALVKPGKRFKHGSKIIFEAKEVGEDAENLSKTFPMPSQLTATVLETDEATGGRLLQFDLPEEISLVQLLDVFGEVPLPPYITQTDAESEQYQTVYAKSPGAIAAPTAGLHFTPELLERLRQKGINQAFVTLHVGVGTFRPVEVEDVTTHKMHEEWIEVPAATVEQIRATQAAGGRVIAVGTTVVRSLEGAAVSGELQPFCGKTDLFIYPGYKWRVVEGLITNFHLPRSSLLMLVSALIGRQRLLNIYQQAIASQYRFYSFGDAMLILPEAKMVE

SEQ ID NO: 65206 - protein, 346 aa, Chloroherpeton thalassium
  misc_feature (1)..(346): sp|B3QXK9|QUEA_CHLT3 S-adenosylmethionine:tRNA ribosylt ransferase-isomerase OS=Chloroherpeton thalassium (stra in ATCC 35110 / GB-78) OX=517418 GN=queA PE=3 SV=1
MRLSDFRYTLPKTAVAEYPSEPRDSCKLMVLDRRKKTTDHKQFSDLLDYFKKGDVLVLNDTKVFPARLYGNKEKTSAKIEVFLLRELNKQAGLWDVLVEPARKVRVGNKIYFPNDLVAEVVDNTTSRGRTIRFLNPDIDIFSIVEKVGQMPIPPYIKRDPEEEDKERYQTVFARIPGAVVAPLAGLHFTNPLLKAIQDKGVEIISLTLHPGLSTFREVEVEDISKHKMDSEYYNVPYSCAKVINSIKEKKSGRVFAVGTTVCRALEANATVEGRIKFGEGWTDKYIYPPYDFKVVDALITNFHQPESTLLMLVSAFAEHDFLMKNYKLALKSDYKFLGYGDAMLIF

SEQ ID NO: 65207 - protein, 339 aa, Chloroherpeton thalassium
  misc_feature (1)..(339): tr|B3QV33|B3QV33_CHLT3 S-adenosylmethionine:tRNA ribosy ltransferase-isomerase OS=Chloroherpeton thalassium (st rain ATCC 35110 / GB-78) OX=517418 GN=queA PE=3 SV=1
MNVSDFDYTLPDEQIAKYPPKERGTTKLLALNRKTGEVQHSLYRSLDAFLEPGDLLVLNNTKVIKARLQANKPTGASVELLLLEKHEGPQQIVMYGGKIKAGNTLLVGEDEVLVEEILGNGLAKVSAAVPLLSLVEKYGNVPIPPYLNRKAEKSDEMRYQTVFAKEQGSVAAPTASLNFTESLEKKLKEKGVQLAFLTLHVGLGTFMPIRTETLSAHEMHREFYHISHETAAAIRLAKAEKRRVVALGTTVTRAIEHASARLLAHEPAELAGEADIFIYPGGYEFQIVDALLTNFHAPRSTVLMLAAAFAGAAHLKAAYEAALQNDYHFLSYGDSMFIF

SEQ ID NO: 65208 - protein, 362 aa, Chondrocystis sp.
  misc_feature (1)..(362): tr|A0A1Z4RVI6|A0A1Z4RVI6_9CHRO S-adenosylmethionine:tRN A ribosyltransferase-isomerase OS=Chondrocystis sp. NIE S-4102 OX=2005460 GN=queA PE=3 SV=1
MESDFLLASYNYQLPQQLIAQTPVDPRDSSRLLIVDSQTTCTHGVFRDLVEWLKPGDLLVLNDTRVIPARLYGHKTTGSQVEILLLEERLDNCWLALVKPGKRFGLGSKISFDLVNESDDLLDFSLQATVIEKDEATGGRVLKFELPAGKSLWEFLEYYGQLPLPPYITNQDTAGDRYQTVYAQHPGAIAAPTAGLHFTPELLAKLQQQGVEQSYITLHVGVGTFRPVESAEITNHTMHQEWIEVSQATVDQILATKARGGRVIAVGTTVTRALEGAAQKSFQGGKSLTAFRGQTNLFIYPGYQWQVIDGLITNFHLPGSSLLMLVSALIGRKRLLDLYQEAIALEYRFYSFGDAMLILPTA

SEQ ID NO: 65209 - protein, 361 aa, Chondromyces apiculatus
  misc_feature (1)..(361): tr|A0A017SZK1|A0A017SZK1_9DELT S-adenosylmethionine:tRN A ribosyltransferase-isomerase OS=Chondromyces apiculat us DSM 436 OX=1192034 GN=queA PE=3 SV=1
MRRDLLHFDLPAELIASRPAEDRDGARLLLVDRALPPGEVAHAHIRDLEQHIPEGALVVVNDTRVILARLLGRKRTSGGQVELLLVRKLADEPASTPTPAERWSALGRASKPIRPGADLDFGEPGTLSAHVLASGGGMLEVRLSSPAGLPLAEALDACGHIPLPPYLRRADDGADRERYQTIFARTPGAIAAPTAGLHLSERLVERLRARGVRLTSITLHVGLGTFQPVTVDDLDEHPMHEEQYLVSDEARAAIADARTRGAPVVAIGTTVVRTLESAADPERPGHVLASAGETRLLIQPGYRFRVVDALLTNFHLPESTLLALVCAFAGVDRALAAYRAAIAARYHFYSYGDAMLISGKA

SEQ ID NO: 65210 - protein, 342 aa, Chondromyces crocatus
  misc_feature (1)..(342): tr|A0A0K1EF36|A0A0K1EF36_CHOCO S-adenosylmethionine:tRN A ribosyltransferase-isomerase OS=Chondromyces crocatus OX=52 GN=CMC5_036320 PE=3 SV=1
MSPAAGPRTEPLLERLLHVDPHTGALLDATVGELGRFLRAGDLLVVNDGATLPGMLRGVTADGEAIEARLAQSLEDGRFQALLFGAGDARQRTEDRRPPPQLAVGAQVRFGPGLEAVIAEVSSLSSRLVVLVFSAQGAALWEAIYRNGRPVQYAYVPAPLALWDVQTRYASRPICAEMPSAGRPLAWGLLLSLVRRGVRLASLSHAAGLSSTGDPALDARLPLAERFEIPEATVRAVLDTRSRGGRVVAVGTTVTRALEGAAVLGRGTLLAGRGVTELILGAHHAPAVVDGLLTGVHEPSESHFELLSAFAGRDVLRRAHAHAEARGYLTHEFGDSMLLLAA

SEQ ID NO: 65211 - protein, 353 aa, Chondromyces crocatus
  misc_feature (1)..(353): tr|A0A0K1EN91|A0A0K1EN91_CHOCO S-adenosylmethionine:tRN A ribosyltransferase-isomerase OS=Chondromyces crocatus OX=52 GN=queA PE=3 SV=1
MLDFSLPDELIASRPTAEREEARLLLVDRTQPPGEVGHSTICKLDEHIPPGALVIVNDTRVVAARLLGRKLATGGQVELLLLRKLKSSEGGLVEHWLARGRASKPIRQGAELAFGENGEIKAHVVQCAGDAMLEVVLSSPRGVAVEKLIGIHGHIPLPPYMKRADDASDRERYQTVFARTPGAIAAPTAGLHFSNQLVEKLQSRGVKMTSITLHVGLGTFKPVTALDLDDHPMHEEEYFVSDEVSEAIDDARRRKVPVIAVGTTVVRALETAADPSRPGRVTASSGETRVLIQPGYRFRVVDALITNFHLPQSTLLALVCAFAGGRRTLAAYRAAITSSYRFYSYGDAMMVFG

SEQ ID NO: 65212 - protein, 339 aa, Christensenella minuta
  misc_feature (1)..(339): tr|A0A136Q6K8|A0A136Q6K8_9FIRM S-adenosylmethionine:tRN A ribosyltransferase-isomerase OS=Christensenella minut a OX=626937 GN=queA PE=3 SV=1
MKTSDFDYNLPEELIAQTPIEPRDHSRLLVYDRETQEVSHRHFYDVTDYLKQGDVLVLNETKVLPARLYGKKRGTGTDFEFLLLKRLKLDVWEAIMRPGKKLKPGGWVDFGGDLCAELLCKKEDGVCEVRFRYDGVFEELLDKYGNMPLPPYITKRLERKERYQTVYAKEDGSAAAPTAGLHFTPELLDKIEGMGVTVVKILLHVGLGTFRPMKEETVEEHVMHSEYYSVSPQAAETINAAKREGRRVIAVGTTSVRTLESAARNRLVQAGSADTDIFIYPGYEYQIVDALITNFHLPKSTLIMLVSALMGREATLDVYRQAVEERYRFFSFGDAMMIV

SEQ ID NO: 65213 - protein, 342 aa, Chromatiaceae bacterium
  misc_feature (1)..(342): tr|A0A3D4RXB6|A0A3D4RXB6_9GAMM S-adenosylmethionine:tRN A ribosyltransferase-isomerase OS=Chromatiaceae bacteri um OX=2049432 GN=queA PE=3 SV=1
MLRSDFHFELPRELIAQRPLSQRGQSRLLFLDGANGALNDHFFYHLPLLLRPNDLLIFNNTRVIPARLFVRKTTGGRAEVLLERLLSRRRASAQIRASKSPKPGGLLLLPSGERIEVAGRDGDLFLLDSLDADLGELMRRHGHVPLPPYIERPDDAADQQRYQTLYASRDGAVAAPTAGLHFDLETLAAIKRIGVDTAQVTLHVGAGTFQPVRVEDLDQHRMHAEWLEVGERVCRQVQQTRARGGRVVAVGTTTVRSLETAAAQGELSPFSGDSRLFIRPGYRFRVVDAMITNFHLPESTLLMLVAAFAGYDRVMAAYRHAVAERYRFFSYGDAMFLTRPVI

SEQ ID NO: 65214 - protein, 355 aa, Chromatiales bacterium
  misc_feature (1)..(355): tr|A0A257SVJ4|A0A257SVJ4_9GAMM S-adenosylmethionine:tRN A ribosyltransferase-isomerase OS=Chromatiales bacteriu m 21-64-14 OX=1970504 GN=queA PE=3 SV=1
MLRRDFEYQLPADLIAQRPSDERSASRLLHLDGAADTLEDRVFRDLPGLLRPGDLLVFNDTRVIPARVYGVKPSGGRVEVLVDRVIGPAEAWVRIRASKALRPGDTLRLEGGVAAVVRERSADRFRLSFDDPRPLPDLLDEVGHVPLPPYIRRGDEPADRARYQTVYGCRPGAIAAPTAGLHFDVPILERLRERGVDSAFVTLHVGAGTFQPVREDRVEEHVMHPEQVDVGDEVCAKVRRARRAGGRVVAVGTTVVRSLESAARDGELTPLRGETDLFILPGFRFRVVDALITNFHLPGSTLLMLVCAFGGYQRVMDAYRHAVERCYRFYSYGDAMLVVPPALGPERAPAPGMTT

SEQ ID NO: 65215 - protein, 339 aa, Chromatiales bacterium
  misc_feature (1)..(339): tr|A0A524KIX3|A0A524KIX3_9GAMM S-adenosylmethionine:tRN A ribosyltransferase-isomerase OS=Chromatiales bacteriu m OX=2026725 GN=queA PE=3 SV=1
MHPADFHFDLPAELIAQQALAERSASRLLHVGAGLQDLHVRDLPGLLRPGDLLVANDTRVLPARLYGRKETGGKIELLLERVLGETEALVQLRASHAPRAGAMLSFGADVTAEVIDRRNEFFVLRFSRPVVPVLEEQGHVPLPPYIRRGDEPADRERYQTVYAREQGSVAAPTAGLHVDDSLLAALAARDIEFQTLTLHVGAGTFAPLRPQQLKTGRLHAERLLVTPALCAAVVACRARGGRVIAIGTTATRALETAGESGELRPLRGETSLFIRPGFNFQIVDAMFTNFHLPESSLLMLVGAFGGTERVLAAYRHAVASRYRFFSYGDAMFVERARAI

SEQ ID NO: 65216 - protein, 346 aa, Chromatium okenii
  misc_feature (1)..(346): tr|A0A2S7XPG6|A0A2S7XPG6_9GAMM S-adenosylmethionine:tRN A ribosyltransferase-isomerase OS=Chromatium okenii OX= 61644 GN=queA PE=3 SV=1
MRFSRSDFHYDLPPELIAQHPLPERGGSRLLVVEHSAAALRDLQFADLPQLLRPHDLLVFNNTRVMRARLFGRKSSGGRVELLIERVLTPHIALAHLRASKAPAAGSTLLIDGVTLQVLGREGALFQLQSPELAFAELMAHHGHIPLPPYIQRPDTAADEARYQTLYASREGAVAAPTAGLHFDAAMLQRLDALGVTRAEVTLHVGAGTFQPVRVDDLDQHEMHAEWLEVTAQLCAQIAATRQVGGRVIAVGTTSVRSLETAAASGELKPYCGDSRLFIRPGYQFQVVDAILTNFHLPESTLLMLVAAFTGYDAMMNAYRHAVAEHYRFFSYGDAMFLPGRSARLK

SEQ ID NO: 65217 - protein, 354 aa, Chromatocurvus halotolerans
  misc_feature (1)..(354): tr|A0A4R2L7C0|A0A4R2L7C0_9GAMM S-adenosylmethionine:tRN A ribosyltransferase-isomerase OS=Chromatocurvus haloto lerans OX=1132028 GN=queA PE=3 SV=1
MQRTDFYYDLPTELIAQRPLPDRGASRLLCLQGDSGQIAHRGFSDLEALLHPGDLLVFNNTRVIPARLWGRKATGGAVEVLIERVTGDRTALAHIRASKSPKPGTRIHVAKTEGAEPGTDSFRVTGRDEGLHLIETERPVAELMARYGHMPLPPYIERADDVADQERYQTVYAAREGAVAAPTAGLHFDQALIRALVERGVSTTEVTLHVGAGTFQPVRVDDIAQHQMHAEYLEVGQDTCDAIAAARERGGRVVAVGTTAVRSLETAAAGGTLRPYQGDTRLFIHPGYRFRCIDALITNFHLPESTLLMLVSALAGREAVMAAYEEAVRERYRFFSYGDAMFVTASASALTARP

SEQ ID NO: 65218 - protein, 356 aa, Chromatocurvus sp.
  misc_feature (1)..(356): tr|A0A2N5XYH3|A0A2N5XYH3_9GAMM S-adenosylmethionine:tRN A ribosyltransferase-isomerase OS=Chromatocurvus sp. F0 2 OX=1905677 GN=queA PE=3 SV=1
MKLSDFKYHLPPELIAQHPLAERSASRLLSLDGATGALRHLQFTDLPSCLDPGDLLVFNNTRVIPARLWGQKETGGRVEILIERLTGTSTALAHIRSSKSPRPGTRIFLTAAEGDEPGPWQLEVSGREGALFALRAPEGVALPTILGAIGHMPLPPYIQRADEVIDQSRYQTVYAEREGAVAAPTAGLHFTDALLAELQAKGIERATVTLHVGAGTFQPVRVERIEEHQMHSEYLEVDEALCAAVAATRNRGGRVVAVGTTAVRSLESAACGGGKVAPLTGDTDIFIYPGYRFRVVDAMITNFHLSESTLLMLVSAFAGREAIATAYREAIAQRYRFFSYGDAMFITPSPDALEQR

SEQ ID NO: 65219 - protein, 341 aa, Chromobacterium amazonense
  misc_feature (1)..(341): tr|A0A2S9X874|A0A2S9X874_9NEIS S-adenosylmethionine:tRN A ribosyltransferase-isomerase OS=Chromobacterium amazo nense OX=1382803 GN=queA PE=3 SV=1
MQLSDFDYHLPEALIAQHPPAVRGASRLLHVDGMTLSDLTFADFPSRLQAGDLLVFNDTRVIRARLFGEKASGGKVEALIERVLDDHTALAHVRASKSPKPGSRLIFAGRWEAEMVERHDSMFKLRFLAEENVYDILEASGKLPLPPYIERSAEQDDDERYQTVYAREQGAVAAPTAGLHFTDDMLATLQAQGIATAFVTLHVGAGTFQPVKVENVAEHKMHSEIYDIPQSTVDAVAAARARGGRVVAIGTTSVRALESAAQHGELKAGRGETDIFITPGYRFRVVDRLLTNFHLPKSTLLMLVSAFAGYDEIFHAYRHAVEQQYRFFSYGDAMLLEKKEY

SEQ ID NO: 65220 - protein, 340 aa, Chromobacterium haemolyticum
  misc_feature (1)..(340): tr|A0A2T5P1J0|A0A2T5P1J0_9NEIS S-adenosylmethionine:tRN A ribosyltransferase-isomerase OS=Chromobacterium haemo lyticum OX=394935 GN=queA PE=3 SV=1
MQLSDFDYHLPERLIAQHPPAERGASRLLRVAGHDRANLRFTDFIDQVSPGDVMVFNDTRVIKARLFGEKASGGKIEALIERVLDAHTALAHVRASKSPKPGTRLIFADRWEAEMVERHGELFKLRFLAEDNLFDILEASGKLPLPPYIERGAGHEDDERYQTVYARERGAVAAPTAGLHFTEDMLERLRAKGVRLAYVTLHVGAGTFQPVRVDNIAEHKMHSEIYEVPETTRALIAEAHAAGRKVLSVGTTSMRALESAARGGELTAGHGETDIFITPGYRFRVVDRLLTNFHLPKSTLLMLVSAFAGYEEIRAAYQHAVEQEYRFFSYGDAMLLERKD

SEQ ID NO: 65221 - protein, 340 aa, Chromobacterium haemolyticum
  misc_feature (1)..(340): tr|A0A1W0CCQ7|A0A1W0CCQ7_9NEIS S-adenosylmethionine:tRN A ribosyltransferase-isomerase OS=Chromobacterium haemo lyticum OX=394935 GN=queA PE=3 SV=1
MQLSDFDYHLPERLIAQHPPAERGASRLLRVAGHNRANLRFTDFIDQVSPGDVMVFNDTRVIKARLFGEKASGGKVEALIERVLDAHSALAHVRASKSPKPGTRLIFADRWEAEMVERHGELFKLRFLAEDNLFDILEASGKLPLPPYIERGAGHEDDERYQTVYARERGAVAAPTAGLHFTEDMLEQLRAKGVQLAYVTLHVGAGTFQPVRVDNIAEHKMHSEIYEVPEATRALIAEAHAAGRKVLSVGTTSMRALESAARGGELAAGCGETDIFITPGYRFRVVDRLLTNFHLPKSTLLMLVSAFAGYEEIRAAYQHAVEQEYRFFSYGDAMLLERKD

SEQ ID NO: 65222 - protein, 340 aa, Chromobacterium sp.
  misc_feature (1)..(340): tr|A0A2T5NEB6|A0A2T5NEB6_9NEIS S-adenosylmethionine:tRN A ribosyltransferase-isomerase OS=Chromobacterium sp. P anama OX=2161826 GN=queA PE=3 SV=1
MQLSDFDYHLPERLIAQHPPAERGASRLLRVAGHDRANLRFSDFIDHISPGDVMVFNDTRVIKARLFGEKASGGKIEALIERVLDAHTALAHVRASKSPKPGTRLIFADRWEAEMVERHGELFKLRFLAEDNLFDILEASGKLPLPPYIERGAGHEDDERYQTVYARERGAVAAPTAGLHFTEDMLEQLRAKGVQLAYVTLHVGAGTFQPVRVDNIAEHKMHSEIYEVPETTRALIAEAHAAGRKVLSVGTTSMRALESAARDGELAAGCGETDIFITPGYRFRVVDRLLTNFHLPKSTLLMLVSAFAGYEEIRAAYQHAVEQEYRFFSYGDAMLLERKD

SEQ ID NO: 65223 - protein, 340 aa, Chromobacterium sp.
  misc_feature (1)..(340): tr|A0A2S5DGC5|A0A2S5DGC5_9NEIS S-adenosylmethionine:tRN A ribosyltransferase-isomerase OS=Chromobacterium sp. M WU14-2602 OX=2073169 GN=queA PE=3 SV=1
MQLSDFDYHLPEALIAQHPPAVRGASRLLHVDGMALSDLTFADFPSRLQAGDLLVFNDTRVIRARLFGEKASGGKVEALIERVLDDHTALAHVRASKSPKPGSRLIFAGRWEAEMVERQDSLFKLRFLAEEDVYDILEASGKLPLPPYIERSAEHDDDERYQTVYAREQGAVAAPTAGLHFTDDMLAGLKAQGVETAFVTLHVGAGTFQPVKVDNVAEHKMHSEIYDMPQATVDAIAAARARGGRVVAIGTTSVRALESAARGGELKAGRGETDIFITPGYTFRVVDRLLTNFHLPKSTLLMLVSAFAGYEEIFQAYRHAVEQEYRFFSYGDAMLLEKKA

SEQ ID NO: 65224 - protein, 340 aa, Chromobacterium sphagni
  misc_feature (1)..(340): tr|A0A1S1X391|A0A1S1X391_9NEIS S-adenosylmethionine:tRN A ribosyltransferase-isomerase OS=Chromobacterium sphag ni OX=1903179 GN=queA PE=3 SV=1
MQLSDFDYHLPEALIAQHPPAVRGASRLLHVDGMNLSDQTFADLPARLQAGDLLVFNDTRVIRARLFGEKASGGKIEALIERVLDDHTALAHVRSSKSPKPGSRLIFAGRWEAEMVERQGSLFKLRFLAEDKLFDILEASGKLPLPPYIERSAEGDDDERYQTVYAREQGAVAAPTAGLHFTDELLAKLQAEGVETAFVTLHVGAGTFLPVKVENVAEHKMHSEIYEIPQATVDAIARVRARGNRVVAVGTTSVRALESAARGGDLAAGRGETDIFITPGYRFRVVDRLLTNFHLPKSTLLMLVSAFAGYDEIRQAYRHAVEQQYRFFSYGDAMLLEKKD

SEQ ID NO: 65225 - protein, 340 aa, Chromobacterium vaccinii
  misc_feature (1)..(340): tr|A0A1D9LKF9|A0A1D9LKF9_9NEIS S-adenosylmethionine:tRN A ribosyltransferase-isomerase OS=Chromobacterium vacci nii OX=1108595 GN=queA PE=3 SV=1
MQLSDFDYHLPEALIAQHPPAERGASRLLHVDGMTLSDLGFADLPSRLQAGDLLVFNDTRVIRARLFGEKASGGKVEALIERVLDDHTALAHVRASKSPKPGSRLIFAGRWEAEMVERHDALFKLRFLAEENVYDILEASGRLPLPPYIERSAEHDDDERYQTVYAREQGAVAAPTAGLHFTDEMLAGLKAQGVETAFVTLHVGAGTFQPVKVDNVAEHKMHSEIYDIPQATVDAVAAARARGGRVVAIGTTSVRALESAVRGGELTAGRGETDIFITPGYRFRVVDRLLTNFHLPKSTLLMLVSAFAGYDQIFQAYRHAVEKEYRFFSYGDAMLLEKKA

SEQ ID NO: 65226 - protein, 340 aa, Chromobacterium vaccinii
  misc_feature (1)..(340): tr|A0A2L2B947|A0A2L2B947_9NEIS S-adenosylmethionine:tRN A ribosyltransferase-isomerase OS=Chromobacterium vacci nii OX=1108595 GN=queA PE=3 SV=1
MQLSDFDYHLPEALIAQHPPAERGASRLLHVDGMTLSDLSFADLPSRLQAGDLLVFNDTRVIRARLFGEKASGGKVEALIERVLDDHTALAHVRASKSPKPGSRLIFAGRWEAEMVERHDALFKLRFLAEENVYDILEASGKLPLPPYIERSAEHDDDERYQTVYAREQGAVAAPTAGLHFTDEMLAGLKAQGVETAFVTLHVGAGTFQPVKVDNVAEHKMHSEIYDIPQATVDAVAAARARGGRVVAIGTTSVRALESAARSGELTAGRGETDIFITPGYRFRVVDRLLTNFHLPKSTLLMLVSAFAGYDEIFQAYRHAVEKEYRFFSYGDAMLLEKKA

SEQ ID NO: 65227 - protein, 340 aa, Chromobacterium violaceum
  misc_feature (1)..(340): sp|Q7NZD4|QUEA_CHRVO S-adenosylmethionine:tRNA ribosylt ransferase-isomerase OS=Chromobacterium violaceum (stra in ATCC 12472 / DSM 30191 / JCM 1249 / NBRC 12614 / NCI MB 9131 / NCTC 9757) OX=243365 GN=queA PE=3 SV=1
MQLSDFDYHLPEALIAQHPPAERGASRLLHVDGMTLSDLSFADLPSRLQAGDLLVFNDTRVIRARLFGEKASGGKVEALIERVLDDHTALAHVRASKSPKPGSRLIFAGRWEAEMVERHDSMFKLRFLAEENVYDILEASGKLPLPPYIERSAEHDDDERYQTVYAREQGAVAAPTAGLHFTDAMLATLQAQGIATAFVTLHVGAGTFQPVKVDNVAEHKMHSEIYDIPQATVDAIAAARARGGRVVAVGTTSVRALESAARHGELKAGRGETDIFITPGYRFRVVDRLLTNFHLPKSTLLMLVSAFAGYDEIFQAYRHAVEKEYRFFSYGDAMLLEKKV

SEQ ID NO: 65228 - protein, 340 aa, Chromobacterium violaceum
  misc_feature (1)..(340): tr|A0A381EQ23|A0A381EQ23_CHRVL S-adenosylmethionine:tRN A ribosyltransferase-isomerase OS=Chromobacterium viola ceum OX=536 GN=queA PE=3 SV=1
MQLSDFDYHLPEALIAQHPPAERGASRLLHVDGMTLSDLGFADLPSRLQAGDLLVFNDTRVIRARLFGEKASGGKVEALIERVLDDHTALAHVRASKSPKPGSRLIFAGRWEAKMVERHDALFKLRFLAEENVYDILEASGRLPLPPYIERSAEHDDDERYQTVYAREQGAVAAPTAGLHFTDEMLAGLKAQGVETAFVTLHVGAGTFQPVKVDNVAEHKMHSEIYDIPQATVDAVAAARARGGRVVAIGTTSVRALESAARGGELTAGRGETDIFITPGYRFRVVDRLLTNFHLPKSTLLMLVSAFAGYDEIFQAYRHAVEKEYRFFSYGDAMLLEKKA

SEQ ID NO: 65229 - protein, 356 aa, Chromohalobacter canadensis
  misc_feature (1)..(356): tr|A0A285VL63|A0A285VL63_9GAMM S-adenosylmethionine:tRN A ribosyltransferase-isomerase OS=Chromohalobacter cana densis OX=141389 GN=queA PE=3 SV=1
MQRADFHFDLPDELIARYPSETRSDCRLLCLDDESGEVQHRRFTDLLTHLEPGDLLVFNDTRVIPARLFGQKASGGRVEMLLERPLDAHRGLAHLRASKAPKPGTELIFEGDIHAVVEERHEALFELRFLGETPMIELLENHGHMPLPPYIDREDELDDRERYQTVYARREGAVAAPTAGLHFDEALMAALRERGVEMGYVTLHVGAGTFQPVRVDDIREHHMHSEWLEVDETLCRQVEATRARGKRVIAVGTTSVRCLETASQGCDDGRIAPYRGDTDIFIYPGYAWRCVDALITNFHLPESTLLMLVSAFAGYRQVMHAYREAVAERYAFFSYGDAMLLSRAETSHPFPETSHA

SEQ ID NO: 65230 - protein, 356 aa, Chromohalobacter japonicus
  misc_feature (1)..(356): tr|A0A1Q8TG72|A0A1Q8TG72_9GAMM S-adenosylmethionine:tRN A ribosyltransferase-isomerase OS=Chromohalobacter japo nicus OX=223900 GN=queA PE=3 SV=1
MQRADFHFDLPAELIARYPSETRSDCRLLCLDDESGEVQHRRFTDLLTHLEPGDLLVFNDTRVIPARLFGQKSSGGRVEMLLERPLDAHRGLAHLRASKAPKPGTELIFEGDIHAVVEERHEGLFELRFLGETPMIELLERHGHMPLPPYIDREDELDDRERYQTVYARREGAVAAPTAGLHFDESLMAALRERGVEMGYVTLHVGAGTFQPVRVDDIREHHMHSEWLEVDETLCRQVEATRARGRRVIAVGTTSVRCLETASQGQKDGHIAPFRGDTDIFIYPGYEWRCVDALITNFHLPESTLLMLVSAFAGYRQVMHAYREAVAERYAFFSYGDAMLLSRAETSHPFPEISHA

SEQ ID NO: 65231 - protein, 356 aa, Chromohalobacter marismortui
  misc_feature (1)..(356): tr|A0A4R7NFK7|A0A4R7NFK7_9GAMM S-adenosylmethionine:tRN A ribosyltransferase-isomerase OS=Chromohalobacter mari smortui OX=42055 GN=queA PE=3 SV=1
MQRADFHFDLPDELIARYPSEKRSDCRLLCVDDTSGEIQHRRFTDLLTHLEPGDLLVFNDTRVIPARLFGQKASGGRIEMLLERPLDAHRGLAHLRASKAPRPGTELIFEGDIHAVVEERHEALFELRFLGETPMIELLERHGHMPLPPYIDRDDELDDRERYQTVYARREGAVAAPTAGLHFDTPLLEALRERGVEMGYVTLHVGAGTFQPVRVDDIREHHMHSEWLEVDETLCRQVEATQARGKRVIAVGTTSVRCLETASQGRDDGCITPYRGDTDIFIYPGYAWRCVDALITNFHLPESTLLMLVSAFAGYRQVMHAYREAVAERYAFFSYGDAMFLSRAETSHPFPETSHA

SEQ ID NO: 65232 - protein, 356 aa, Chromohalobacter salexigens
  misc_feature (1)..(356): sp|Q1QTN0|QUEA_CHRSD S-adenosylmethionine:tRNA ribosylt ransferase-isomerase OS=Chromohalobacter salexigens (st rain DSM 3043 / ATCC BAA-138 / NCIMB 13768) OX=290398 G N=queA PE=3 SV=1
MQRADFHFDLPDELIARYPSETRSDCRLLCLDDATGDIAHRRFTDLLTLLAPGDLLVFNDTRVIPARLFGQKASGGRVEMLLERPLDAHRGLAHLRASKAPRPGTELIFEGDVHAVVEARHDALFELRFLGETPMIELLENHGHMPLPPYIDREDELDDRERYQTVYARREGAVAAPTAGLHFDTPLMEALRERGVEMGYVTLHVGAGTFQPVRVDDIREHHMHSEWLEVDETLCRQVEATRARGGRVIAVGTTSVRCLETASQGQEDGHIAPFRGDTDIFIYPGYQWRCVDALITNFHLPESTLLMLVSAFAGYPQVMRAYRAAVAERYAFFSYGDAMFLNRSASSHPFPENSHA

SEQ ID NO: 65233 - protein, 356 aa, Chromohalobacter salexigens
  misc_feature (1)..(356): tr|A0A317R6C9|A0A317R6C9_CHRSL S-adenosylmethionine:tRN A ribosyltransferase-isomerase OS=Chromohalobacter sale xigens OX=158080 GN=queA PE=3 SV=1
MQRADFHFDLPDELIARYPSETRSDCRLLCLDDATGDIAHRRFTDLLTLLAPGDLLVFNDTRVIPARLFGQKASGGRVEMLLERPLDAHRGLAHLRASKAPRPGTELIFEGDVHAVVEARHDALFELRFLGETPMIELLENHGHMPLPPYIDREDELDDRERYQTVYARREGAVAAPTAGLHFDTPLMEALRERGVEMGYVTLHVGAGTFQPVRVDDIREHHMHSEWLEVDETLCRQVEATRARGGRVIAVGTTSVRCLETASQGQEDGHIAPFRGDTDIFIYPGYQWRCVDALITNFHLPESTLLMLVSAFAGYPQVMRAYRAAVAERYAFFSYGDAMFLNRSASSHPFPEDSHA

SEQ ID NO: 65234 - protein, 365 aa, Chroococcales cyanobacterium
  misc_feature (1)..(365): tr|A0A3N5IUK7|A0A3N5IUK7_9CHRO S-adenosylmethionine:tRN A ribosyltransferase-isomerase OS=Chroococcales cyanoba cterium metabat2.561 OX=2485785 GN=queA PE=3 SV=1
MIPDQSLSSYDYHLPPELIAQNPAEPRDSSRLLVVDSPNSHNLAIFRDLPTWLEPGDLLVFNDTRVIPARLFGRKTTGAPIEILLLEEQDDHRWLSLVKPGKRFKVGSEVLFYPKTGRTEDKEKLWLAKVIDRDLNTSGRLLEFQRHPGRSFWDMLEEYGHIPFPPYVTESEAEEDRYQTVYADKQGSVAAPTAGLHFTPELFHKLAQKGIDTAYITLHVGVGTFRPVEVENITEHLMHQEFLDISAETAEKIAQTKARGGRVIAVGTTVARALEGAIKETKSDKLTAFQGKTNLFVYPGYQWRVIDGMITNFHLPKSSLMMLVSALVGRERLLALYQAAIQERFRFYSFGDAMLILPSARSSNQ

SEQ ID NO: 65235 - protein, 373 aa, Chroococcales cyanobacterium
  misc_feature (1)..(373): tr|A0A2G7GM97|A0A2G7GM97_9CHRO S-adenosylmethionine:tRN A ribosyltransferase-isomerase OS=Chroococcales cyanoba cterium IPPAS B-1203 OX=2049454 GN=queA PE=3 SV=1
MLIPKTMFSGSLPSQEDCLLSAYDYELPQELIAQNPAVPRDSARLLVVDSTHYSHQRFFELPQLLQPGDLLVMNNTKVIPARLYGRKSSGASIEVLLLEERQHNQWLALVKPGKRLPLGAKIVFEGNASYSLNATVLATDAATGGRLLQFDVPGGMSLIQILDKYGQVPLPPYITDSQAAGDQYQTVYAQQPGAVAAPTAGLHFTPELLIQLQNKGIKTAFVTLHVGVGTFRPVEVEDITTHTMHGEWVEVSADTVTQIHQTQAQGGRVIAVGTTVVRSLEGAATSGQLQPFCGKTDLFIYPGYRWRVVEGLITNFHLPKSSLLMLVSALIGRQRLLALYQEAIAHRYRFYSFGDAMLLLPVDLSTIERKDRK

SEQ ID NO: 65236 - protein, 434 aa, Chroococcidiopsis cubana
  misc_feature (1)..(434): tr|A0A433VYD6|A0A433VYD6_9CYAN S-adenosylmethionine:tRN A ribosyltransferase-isomerase OS=Chroococcidiopsis cub ana SAG 39.79 OX=388085 GN=queA PE=3 SV=1
MHINQFKDALSALNSVKTPNFDLTSSAKSELDYSLSSYDYELPAERIAQNPVSPRDSSRLLVVNLDSHAHQIFRDLPEFLQKDDLLVMNDTRVIPARLYGQKPSGAAVEVLLLEERQPNVWLALVKPGRRLAPGAKIVFFEREDKGDKGDKGDKGDKEAGEQRGRGAEEKNSATPDSRLPYGRVSKPAPTDSRLPTPCSLTATVLETDEETGGRVIQFDLPEGLSVIQLLDKFGHVPLPPYITDSQAESEQYQTVYAEKPGSAAAPTAGLHFTPELLKRLQENGIEQAFVTLHVGVGTFRPVEVEDVKTHQMHGEWIEVPAATVEQIRAARSRGGRIIAVGTTTVRALEGAAASGELQPFCGKTNLFIYPGYQWRVVDGLITNFHLPRSSLMMLVSAAIGRERLLALYQEAIAQQYRFYSFGDAMLILPQGKEL

SEQ ID NO: 65237 - protein, 358 aa, Chroococcidiopsis sp.
  misc_feature (1)..(358): tr|A0A2S6VBF6|A0A2S6VBF6_9CYAN S-adenosylmethionine:tRN A ribosyltransferase-isomerase OS=Chroococcidiopsis sp. TS-821 OX=1378066 GN=queA PE=3 SV=1
MLRQLPAQEQDRLLSAYDYELPEELIAQNPAVPRDSARLLVVDSTRHSHHRFYELPQLLQPGDLLVMNNTRVIPARLYGRKQSGAAVEVLLLEERQYNQWLALVKPGRRLPPGATIVFSGNAPESLSATVLETDTATGGRVLQFDVPQGMSLIQVLDKYGQVPLPPYITNSQAASEQYQTVYAEQPGAVAAPTAGLHFTPELLARLKETGIRTAFVTLHVGVGTFRPVEVEDITRHEMHGEWAEVSADTVAQIRETQAQGGRVFAVGTTVVRSLEGAAVSGELQPFCGKTDLFIYPGYQWRVVEGLITNFHLPKSSLLMLVSALIGRQRLLELYKEAIAQRYRFYSFGDAMLILPQFE

SEQ ID NO: 65238 - protein, 145 aa, Chroococcidiopsis sp.
  misc_feature (1)..(145): tr|A0A2P8QM43|A0A2P8QM43_9CYAN S-adenosylmethionine:tRN A ribosyltransferase-isomerase (Fragment) OS=Chroococci diopsis sp. CCALA 051 OX=869949 GN=C7Y66_20480 PE=3 SV= 1
MSALNSVKTPNFDLTSSAKSELDYSLSSYDYELPAERIAQNPVSPRDSSRLLVVNLDSHAHQIFRDLPEFLQKDDLLVMNDTRVIPARLYGQKPSGAAVEVLLLEECQPNVWLALVKPGRRLAPGAKIVFFEREDKGDKGDKGDK

SEQ ID NO: 65239 - protein, 434 aa, Chroococcidiopsis thermalis; identical to SEQ ID NO: 65236
  misc_feature (1)..(434): tr|K9TUV5|K9TUV5_CHRTP S-adenosylmethionine:tRNA ribosy ltransferase-isomerase OS=Chroococcidiopsis thermalis ( strain PCC 7203) OX=251229 GN=queA PE=3 SV=1

SEQ ID NO: 65240 - protein, 361 aa, Chroogloeocystis siderophila
  misc_feature (1)..(361): tr|A0A1U7HQP6|A0A1U7HQP6_9CHRO S-adenosylmethionine:tRN A ribosyltransferase-isomerase OS=Chroogloeocystis side rophila 5.2 s.c.1 OX=247279 GN=queA PE=3 SV=1
MLRQLSAQEQDSLLSAYDYELPEELIAQNPAVPRDSARLLVVDSTRHHHHRFYELPQLLRSGDLLVMNNTKVIPARLYGRKQSGADVEVLLLEERQHNQWLALVKPGRRLPPGATIVFAGNATDPLSATVLEIDAATGGRLLQFDVPPAMSLLQVLDQYGQVPLPPYITNSQATSEQYQTVYAEQPGAVAAPTAGLHFTPELLTRLKGKGIRTAFVTLHVGVGTFRPVEVEDITTHKMHGEWVEVSADTVAQIRETQAQGGRVFAVGTTVVRSLEGAAVSGELQPFCGKTNLFIYPGYQWRVVEGLITNFHLPKSSLLMLVSALIGRQRLLALYQEAIAERYRFYSFGDAMLILPQFESMC

SEQ ID NO: 65241 - protein, 349 aa, Chryseobacterium angstadtii
  misc_feature (1)..(349): tr|A0A0J7IEV0|A0A0J7IEV0_9FLAO S-adenosylmethionine:tRN A ribosyltransferase-isomerase OS=Chryseobacterium angs tadtii OX=558151 GN=queA PE=3 SV=1
MKTSDFNFDLPAELLAEHPSEHRDEARLMVLNRKTETIEHKLFKDVVDYFDEKDLFIFNNTKVFPARLYGNKEKTGAKIEVFLLRELDKETRVWDVLVDPARKIRIGNKLFFTEDESLVAEVIDNTTSRGRTLRFLFDGSYDEFRTKLKELGETPLPKYIKRAVEPEDAERYQTIYAKVEGAVAAPTAGLHFSKHLMKKLEIKGIDFAEVTLHVGLGTFNPIEVEDLSKHKMESEEIIIDEKNAEIINRAVDAHRRVCAVGTTTMRALETSVSSNKKISAFNGWTNKFIYPPHDFGVANSMITNFHTPKSTLLMMIAAFAGRDFIMHAYEEAVKEKYKFYSYGDAMLIL

SEQ ID NO: 65242 - protein, 349 aa, Chryseobacterium antarcticum
  misc_feature (1)..(349): tr|A0A3S4W206|A0A3S4W206_9FLAO S-adenosylmethionine:tRN A ribosyltransferase-isomerase OS=Chryseobacterium anta rcticum OX=266748 GN=queA PE=3 SV=1
MKTSHFNFDLPEELLAEYPAEHRDDAKMMVLNRATQTIEHKFFKDVVDYFDEKDLFIFNNTKVFPARLYGNKEKTGAKIEVFLLRELDKETRVWDVLVDPARKIRIGNKLFFTEDEGLVAEVIDNTTSRGRTLRFLYDGSYEEFRTKLKELGETPLPKYIKREVEASDAERYQTIYAKHEGAVAAPTAGLHFSRHLMKRLEIKGIEFAEITLHVGLGTFNPIEVEDLSKHKMESEEAIITQENADIINKAVADGVRVCAVGTTTMRTIETSVSSNRKIGPYHGWTNKFIFPPHDFGVANCMITNFHTPKSTLMMMVAAFAGKDFLMRAYEEGVKHKYKFYSYGDAMLII

SEQ ID NO: 65243 - protein, 349 aa, Chryseobacterium aquaticum
  misc_feature (1)..(349): tr|A0A0Q3HRD5|A0A0Q3HRD5_9FLAO S-adenosylmethionine:tRN A ribosyltransferase-isomerase OS=Chryseobacterium aqua ticum OX=452084 GN=queA PE=3 SV=1
MKTSDFNFDLPEELLAEHPSEHRDEARLMVLDRKTQTIEHKLFKDVVDYFDEKDLFIFNNTKVFPARLYGNKEKTGAKIEVFLLRELDKETRVWDVLVDPARKIRIGNKLFFTEDESLVAEVIDNTTSRGRTLRFLFDGSYEEFRTKLKELGETPLPKYIKRDVEPEDAERYQTIYAKIEGAVAAPTAGLHFSRHLMKRLEIKGIDFAEVTLHVGLGTFNPIEVEDLSKHKMESEEIIIDEKNAEIINRAVQENRKVCAVGTTTMRAIETSVSSNKKISAFQGWTNKFIYPPHDFGVANTMITNFHTPKSTLLMMIAAFAGKDFIMHAYEEAVKEKYKFYSYGDAMLIL

SEQ ID NO: 65244 - protein, 349 aa, Chryseobacterium aquifrigidense
  misc_feature (1)..(349): tr|A0A543ELF9|A0A543ELF9_9FLAO S-adenosylmethionine:tRN A ribosyltransferase-isomerase OS=Chryseobacterium aqui frigidense OX=558021 GN=queA PE=3 SV=1
MKTSDFNFDLPAELLAEHPSEHRDEARLMVLDRKTQTIEHKLFKDVVDYFDEEDLFIFNNTKVFPARLYGNKEKTGAKIEVFLLRELDKETRVWDVLVDPARKIRIGNKLFFTEDESLVAEVIDNTTSRGRTLRFLFDGSYDEFRTKLKELGETPLPKYIKRAVEPEDAERYQTIYAKVEGAVAAPTAGLHFSKHLMKRLEIKGINFAEVTLHVGLGTFNPIEVEDLSKHKMESEEIIIDEKNAAIINKAVETHRRVCAVGTTTMRALETSVSSNKKISAFNGWTNKFIYPPHDFGVANSMITNFHTPKSTLIMMIAAFAGRDFVMHAYEEAVKEKYKFYSYGDAMLIL

SEQ ID NO: 65245 - protein, 349 aa, Chryseobacterium arachidiradicis
  misc_feature (1)..(349): tr|A0A420DAX2|A0A420DAX2_9FLAO S-adenosylmethionine:tRN A ribosyltransferase-isomerase OS=Chryseobacterium arac hidiradicis OX=1617282 GN=queA PE=3 SV=1
MKTSDFNFDLPAELLAEHPSENRDEARLMVLNRKTETIEHRLFKDVIDYFDEKDLFIFNNTKVFPARLFGNKEKTGAKIEVFLLRELDAETRVWDVLVDPARKIRIGNKLFFTEDESLVAEVIDNTTSRGRTLRFLFDGSYEEFRAKLTELGETPLPKYIKREVEPEDAERYQTIYAKVEGAVAAPTAGLHFSKHLMKRLEIKGIDFAEITLHVGLGTFNPIEVEDLSKHKMESEEAIIDEKNAAIINKAVEEGRRVCAVGTTTMRALETSVSSNKKISAYRGWTNKFIYPPHEFGVANAMITNFHTPKSTLIMMIAAFANKDFIMRAYEEAIKEKYKFYSYGDAMLIL

SEQ ID NO: 65246 - protein, 349 aa, Chryseobacterium arachidis
  misc_feature (1)..(349): tr|A0A1M5KT49|A0A1M5KT49_9FLAO S-adenosylmethionine:tRN A ribosyltransferase-isomerase OS=Chryseobacterium arac hidis OX=1416778 GN=queA PE=3 SV=1
MKTSDFNFDLPAELLAEHPSEHRDEARLMVLDRKTQTIEHKLFKDVVDYFEEDDLFIFNNTKVFPARLYGNKEKTGAKIEVFLLRELDKETRVWDVLVDPARKIRIGNKLFFTEDESLVAEVIDNTTSRGRTLRFLFDGSYEEFRAKLKELGETPLPKYIKRDVEPEDAERYQTIYAKVEGAVAAPTAGLHFSKHLMKRLEIKGINFAEVTLHVGLGTFNPIEVEDLSKHKMESEEIFIDEKNAQIINNAVDAHRRVCAVGTTTMRTLETSVSSNKKISAFHGWTNKFIYPPHDFGVANCMITNFHTPKSTLIMMIAAFAGRDFVMHAYEEAVKEKYKFYSYGDAMLIL

SEQ ID NO: 65247 - protein, 349 aa, Chryseobacterium arthrosphaerae
  misc_feature (1)..(349): tr|A0A1B8ZSM1|A0A1B8ZSM1_9FLAO S-adenosylmethionine:tRN A ribosyltransferase-isomerase OS=Chryseobacterium arth rosphaerae OX=651561 GN=queA PE=3 SV=1
MKTSDFNFDLPAELLAEHPSEHRDEARLMVLDRKTQTIEHKLFKDVVDYFDEEDLFIFNNTKVFPARLYGNKEKTGAKIEVFLLRELDKETRVWDVLVDPARKIRIGNKLFFTEDESLVAEVIDNTTSRGRTLRFLFDGSYEEFRTKLKELGETPLPKYIKRAVEPEDAERYQTIYAKVEGAVAAPTAGLHFSKHLMKRLEIKGINFAEVTLHVGLGTFNPIEVEDLSKHKMESEEIIIDEKNAAIINKAVDAHRRVCAVGTTTMRALETSVSSNKKISAFNGWTNKFIYPPHDFGVANSMITNFHTPKSTLIMMIAAFAGRDFVMHAYEEAVKEKYKFYSYGDAMLIL

SEQ ID NO: 65248 - protein, 349 aa, Chryseobacterium artocarpi
  misc_feature (1)..(349): tr|A0A1B9A024|A0A1B9A024_9FLAO S-adenosylmethionine:tRN A ribosyltransferase-isomerase OS=Chryseobacterium arto carpi OX=1414727 GN=queA PE=3 SV=1
MKTSDFNFDLPAELLAEHPSEHRDEARLMVLDRKTQTIEHKLFKDVVDYFDEEDLFIFNNTKVFPARLYGNKEKTGAKIEVFLLRELDKETRVWDVLVDPARKIRIGNKLFFTEDESLVAEVIDNTTSRGRTLRFLFDGSYDEFRTKLKELGETPLPKYIKRAVEPEDAERYQTIYAKVEGAVAAPTAGLHFSKHLMKRLEIKGINFAEVTLHVGLGTFNPIEVEDLSKHKMESEEIIIDERNAAIINKAVESHRRVCAVGTTTMRALETSVSSNKKISAFNGWTNKFIYPPHDFGVANSMITNFHTPKSTLIMMIAAFAGRDFVMHAYEEAVKEKYKFYSYGDAMLIL

SEQ ID NO: 65249 - protein, 349 aa, Chryseobacterium balustinum
  misc_feature (1)..(349): tr|A0A3G6TH46|A0A3G6TH46_9FLAO S-adenosylmethionine:tRN A ribosyltransferase-isomerase OS=Chryseobacterium balu stinum OX=246 GN=queA PE=3 SV=1
MKTSDFNFDLPEELLAEYPSEHRDEARLMVLDRKTQTIEHKMFKDVVDYFDEKDLFIFNNTKVFPARLYGNKEKTGAKIEVFLLRELDKETRVWDVLVDPARKIRIGNKLFFTEDESLVAEVIDNTTSRGRTLRFLFDGSYEEFRSKLKDLGETPLPKYIKREVEPEDAERYQTIYAKVEGAVAAPTAGLHFSKHLMKRLEIKGIDFAEVTLHVGLGTFNPIEVEDLSKHKMESEEVIIDEKNAEIINRAVQENRRVCAVGTTTMRAIETSVSSNRKISAFDGWTNKFIYPPHDFGIANTMITNFHTPKSTLMMMIAAFAGKDFLMHAYEEAVKEKYKFYSYGDAMLII

SEQ ID NO: 65250 - protein, 349 aa, Chryseobacterium bernardetii
  misc_feature (1)..(349): tr|A0A3G6TK74|A0A3G6TK74_9FLAO S-adenosylmethionine:tRN A ribosyltransferase-isomerase OS=Chryseobacterium bern ardetii OX=1241978 GN=queA PE=3 SV=1
MKTSDFNFDLPAELLAEHPSEHRDEARLMVLDRKTETIEHKLFKDVVDYFDEDDLFIFNNTKVFPARLYGNKEKTGAKIEVFLLRELDKETRVWDVLVDPARKIRIGNKLFFTEDESLVAEVIDNTTSRGRTLRFLFDGSYEEFRAKLKELGETPLPKYIKRAVEPEDAERYQTIYAKVEGAVAAPTAGLHFSKHLMKRLEIKGINFAEVTLHVGLGTFNPIEVEDLSKHKMESEEIIIDEKNAAIINKAVESHRRVCAVGTTTMRALETSVSSNKKISAFNGWTNKFIYPPHDFGVANSMITNFHTPKSTLIMMIAAFAGRDFVMHAYEEAVKEKYKFYSYGDAMLIL

SEQ ID NO: 65251 - protein, 349 aa, Chryseobacterium bovis
  misc_feature (1)..(349): tr|A0A1U7Q0E2|A0A1U7Q0E2_9FLAO S-adenosylmethionine:tRN A ribosyltransferase-isomerase OS=Chryseobacterium bovi s DSM 19482 OX=1121284 GN=queA PE=3 SV=1
MKTSDFNFDLPAELLAEHPSENRDEARLMVLDRKTETIEHRLFKDVIDYFDEKDLFIFNNTKVFPARLFGNKEKTGAKIEVFLLRELDAETRVWDVLVDPARKIRIGNKLFFTEDESLVAEVIDNTTSRGRTLRFLFDGSYEEFRAKLTELGETPLPKYIKREVEPEDAERYQTIYAKVEGAVAAPTAGLHFSKHLLKRMEIKGIDFAEITLHVGLGTFNPIEVEDLSKHKMESEEAIIDEKNAAIINKAVEEGRRVCAVGTTTMRALETSVSSNKKISAYRGWTNKFIYPPHDFGVANAMITNFHTPKSTLIMMIAAFANKDFIMRAYEEAIKEKYKFYSYGDAMLIL

SEQ ID NO: 65252 - protein, 349 aa, Chryseobacterium carnipullorum
  misc_feature (1)..(349): tr|A0A1M7J420|A0A1M7J420_9FLAO S-adenosylmethionine:tRN A ribosyltransferase-isomerase OS=Chryseobacterium carn ipullorum OX=1124835 GN=queA PE=3 SV=1
MKTSDFNFDLPEELLAEHPSEHRDEAKLMVLNRKTQTIEHKLFKDVVDYFDEKDLFIFNNTKVFPARLYGNKEKTGAKIEVFLLRELDKETRVWDVLVDPARKIRIGNKLFFTEDESLVAEVIDNTTSRGRTLRFLFDGSYDEFRTKLKELGETPLPKYIKRAVEPEDAERYQTIYAKIEGAVAAPTAGLHFSKHLMKKLEIKGIDFAEVTLHVGLGTFNPIEVEDLSKHKMESEEIIIDEKNADIINKAVDAHRRVCAVGTTTMRALETSVSSNKKISAFNGWTNKFIYPPHDFGVANSMITNFHTPKSTLLMMIAAFAGKDFIMHAYEEAVKEKYKFYSYGDAMLIL

SEQ ID NO: 65253 - protein, 349 aa, Chryseobacterium carnis
  misc_feature (1)..(349): tr|A0A3G8XII9|A0A3G8XII9_9FLAO S-adenosylmethionine:tRN A ribosyltransferase-isomerase OS=Chryseobacterium carn is OX=1241979 GN=queA PE=3 SV=1
MKTSDFNFHLPEELLAEHPAEHRDDAKMMVLNRKTQTIEHKHFKDVVDYFDEKDLFIFNNTKVFPARLYGNKEKTGAKIEVFLLRELDKETRVWDVLVDPARKIRIGNKLFFTEDEGLVAEVIDNTTSRGRTLRFLYDGSYEEFRTKLKELGETPLPKYIKRDVEPEDAERYQTIYAKHEGAVAAPTAGLHFSRHLMKRLEIKGIDFAEVTLHVGLGTFNPIEVEDLSKHKMESEEAIIDQKNADIINKAVEEGRRVCAVGTTTMRTLETSVSSNKKIGPYHGWTNKFIFPPHDFGVANCMITNFHTPKSTLMMMIAAFAGKDFLMHAYEEAIKHEYKFYSYGDAMLII

SEQ ID NO: 65254 - protein, 349 aa, Chryseobacterium chaponense
  misc_feature (1)..(349): tr|A0A1N7KD23|A0A1N7KD23_9FLAO S-adenosylmethionine:tRN A ribosyltransferase-isomerase OS=Chryseobacterium chap onense OX=713588 GN=queA PE=3 SV=1
MKTSDFNFHLPDELLAEHPSEHRDEAKLMVLNRATQTIEHKKFKDVVDYFNEHDLFIFNDTKVFPARLFGNKEKTGAKIEVFLLRELDKETRVWDVLVDPARKIRIGNKLFFTEDEGLVAEVIDNTTSRGRTLRFLYDGSYEEFRAKLKELGQTPLPKYIKREVEPEDAERYQTIYAKHEGAVAAPTAGLHFSKHLMKKLEIKGIDFAEITLHVGLGTFNPIEVEDLSKHKMESEEAIITQKNADIINKAVTEQRRVCAVGTTTMRAIETSVSSNKKIGPYHGWTNKFIFPPHDFGVANAMITNFHTPKSTLMMMVAAFAGKDFLMQAYEEAVKNEYKFYSYGDAMLII

SEQ ID NO: 65255 - protein, 349 aa, Chryseobacterium contaminans
  misc_feature (1)..(349): tr|A0A1M6ZC04|A0A1M6ZC04_9FLAO S-adenosylmethionine:tRN A ribosyltransferase-isomerase OS=Chryseobacterium cont aminans OX=1423959 GN=queA PE=3 SV=1
MKTSDFNFDLPAELLAEHPSEHRDEARLMVLDRKTQTIEHKLFKDVVDYFDEEDLFIFNNTKVFPARLYGNKEKTGAKIEVFLLRELDKETRVWDVLVDPARKIRIGNKLFFTEDESLVAEVIDNTTSRGRTLRFLFDGSYEEFRAKLKELGETPLPKYIKRAVEPEDAERYQTIYAKVEGAVAAPTAGLHFSKHLMKRLEIKGINFAEVTLHVGLGTFNPIEVEDLSKHKMESEEIIIDEKNAAIINKAVDAHRRVCAVGTTTMRALETSVSSNKKISAFNGWTNKFIYPPHDFGVANSMITNFHTPKSTLIMMIAAFAGRDFVMHAYEEAVKEKYKFYSYGDAMLIL

SEQ ID NO: 65256 - protein, 349 aa, Chryseobacterium culicis
  misc_feature (1)..(349): tr|A0A1H6H2Q5|A0A1H6H2Q5_9FLAO S-adenosylmethionine:tRN A ribosyltransferase-isomerase OS=Chryseobacterium culi cis OX=680127 GN=queA PE=3 SV=1
MKTSDFNFDLPAELLAEHPSEHRDEARLMVLDRKTQTIEHKLFKDVVDYFDENDLFIFNNTKVFPARLYGNKEKTGAKIEVFLLRELDKETRVWDVLVDPARKIRIGNKLFFTEDESLVAEVIDNTTSRGRTLRFLFDGSYDEFRTKLKELGETPLPKYIKRAVEPEDAERYQTIYAKVEGAVAAPTAGLHFSKHLMKRLEIKGINFAEVTLHVGLGTFNPIEVEDLSKHKMESEEIIIDEKNAELINRAVEAHKRVCAVGTTTMRALETSVSSNKKISAFNGWTNKFIYPPHDFGVATSMITNFHTPKSTLLMMIAAFAGRDFVMHAYEEAVKEKYKFYSYGDAMLIL

SEQ ID NO: 65257 - protein, 349 aa, Chryseobacterium culicis
  misc_feature (1)..(349): tr|A0A2S9D007|A0A2S9D007_9FLAO S-adenosylmethionine:tRN A ribosyltransferase-isomerase OS=Chryseobacterium culi cis OX=680127 GN=queA PE=3 SV=1
MKTSDFNFDLPAELLAEHPSEHRDEARLMVLDRKTQTIEHKLFKDVVDYFDEEDLFIFNNTKVFPARLYGNKEKTGAKIEVFLLRELDKETRVWDVLVDPARKIRIGNKLFFTEDESLVAEVIDNTTSRGRTLRFLFDGSYDEFRTKLKELGETPLPKYIKRAVEPEDAERYQTIYAKVEGAVAAPTAGLHFSKHLMKRLEIKGINFAEVTLHVGLGTFNPIEVEDLSKHKMESEEIIIDEKNAAIINKAVETHRRVCAVGTTTMRALETSVSSNKKISAFNGWTNKFIYPPHDFGVANSMITNFHTPKSTLIMMIAAFAGRDFIMHAYEEAVKEKYKFYSYGDAMLIL

SEQ ID NO: 65258 - protein, 349 aa, Chryseobacterium daecheongense
  misc_feature (1)..(349): tr|A0A3N0W5A1|A0A3N0W5A1_9FLAO S-adenosylmethionine:tRN A ribosyltransferase-isomerase OS=Chryseobacterium daec heongense OX=192389 GN=queA PE=3 SV=1
MKTSDFNFDLPAELLAEHPSEHRDEARLMVLDRKTQTIEHKLFKDVVDYFDEKDLFIFNNTKVFPARLYGNKEKTGAKIEVFLLRELDKETRVWDVLVDPARKIRIGNKLFFTEDESLVAEVIDNTTSRGRTLRFLFDGSYEEFRAKLKELGETPLPKYIKRAVEPEDAERYQTIYAKIEGAVAAPTAGLHFSKHLMKRLEIKGIDFAEITLHVGLGTFNPIEVEDLSKHKMESEEVFIDEKNAEIINRAVEGHRRVCAVGTTTMRALETSVSSNKKISAFHGWTNKFIYPPHDFGVANSMITNFHTPKSTLIMMIAAFAGRDFVMHAYEEAVKEKYKFYSYGDAMLIL

SEQ ID NO: 65259 - protein, 349 aa, Chryseobacterium defluvii
  misc_feature (1)..(349): tr|A0A495SMZ5|A0A495SMZ5_9FLAO S-adenosylmethionine:tRN A ribosyltransferase-isomerase OS=Chryseobacterium defl uvii OX=160396 GN=queA PE=3 SV=1
MKTSDFNFDLPAELLAEHPSEHRDEARLMVLDRKTQTIEHKLFKDVVDYFDEKDLFIFNNTKVFPARLYGNKEKTGAKIEVFLLRELDKETRVWDVLVDPARKIRIGNKLFFTEDESLVAEVIDNTTSRGRTLRFLFDGSYEEFRAKLKELGETPLPKYIKRAVEPEDAERYQTIYAKIEGAVAAPTAGLHFSRHLMKRLEIKGIDFAEITLHVGLGTFNPIEVEDLSKHKMESEEVFIDERNAEIINKAVESNRRVCAVGTTTMRALETSVSSNKKISAFHGWTNKFIYPPHDFGVANSMITNFHTPKSTLIMMIAAFAGRDFVMHAYEEAVKEKYKFYSYGDAMLIL

SEQ ID NO: 65260 - protein, 349 aa, Chryseobacterium elymi
  misc_feature (1)..(349): tr|A0A3D9DMW1|A0A3D9DMW1_9FLAO S-adenosylmethionine:tRN A ribosyltransferase-isomerase OS=Chryseobacterium elym i OX=395936 GN=queA PE=3 SV=1
MKTSDFNFDLPAELLAEHPSEHRDEAKLMVLNRKTETIEHKLFKDVVDYFDEKDLFIFNNTKVFPARLYGNKEKTGAKIEVFLLRELDKETRVWDVLVDPARKIRIGNKLFFTEDESLVAEVIDNTTSRGRTLRFLFDGSYDEFRTKLKELGETPLPKYIKRAVEPEDAERYQTIYAKVEGAVAAPTAGLHFSKHLMKKLEIKGIDFAEVTLHVGLGTFNPIEVEDLSKHKMESEEIIIDEKNADIINKAVDAHRRVCAVGTTTMRALETSVSSNKKISAFNGWTNKFIYPPHDFGVANSMITNFHTPKSTLLMMIAAFAGKDFIMHAYEEAVKEKYKFYSYGDAMLIL

SEQ ID NO: 65261 - protein, 349 aa, Chryseobacterium flavum
  misc_feature (1)..(349): tr|A0A3D9CQV0|A0A3D9CQV0_9FLAO S-adenosylmethionine:tRN A ribosyltransferase-isomerase OS=Chryseobacterium flav um OX=415851 GN=queA PE=3 SV=1
MKTSDFNFDLPAELLAEHPSEHRDEARLMVLDRKTETIEHKLFKDVVDYFDEDDLFIFNNTKVFPARLYGNKEKTGAKIEVFLLRELDKETRVWDVLVDPARKIRIGNKLFFTEDESLVAEVIDNTTSRGRTLRFLFDGSYEEFRAKLKELGETPLPKYIKRAVEPEDAERYQTIYAKVEGAVAAPTAGLHFSKHLMKRLEIKGINFAEVTLHVGLGTFNPIEVEDLSKHKMESEEIIIDEKNAAIINKAVEAHRRVCAVGTTTMRALETSVSSNKKISAFNGWTNKFIYPPHEFGVANSMITNFHTPKSTLIMMIAAFAGRDFVMHAYEEAVKEKYKFYSYGDAMLIL

SEQ ID NO: 65262 - protein, 349 aa, Chryseobacterium formosense
  misc_feature (1)..(349): tr|A0A085Z7R0|A0A085Z7R0_9FLAO S-adenosylmethionine:tRN A ribosyltransferase-isomerase OS=Chryseobacterium form osense OX=236814 GN=queA PE=3 SV=1
MKTSDFNFDLPEELLAEHPSEHRDEARLMVLDRKTQTIEHKLFKDVVDYFDEKDLFIFNNTKVFPARLYGNKEKTGAKIEVFLLRELDKETRVWDVLVDPARKIRIGNKLFFTEDESLVAEVIDNTTSRGRTLRFLFDGSYEEFRAKLKELGETPLPKYIKRDVEPEDAERYQTIYAKVEGAVAAPTAGLHFSKHLMKRLEIKGIDFAEVTLHVGLGTFNPIEVEDLSKHKMESEEIIIDEKNAQIINNAVQENRRVCAVGTTTMRALETSVSSNKKISAFQGWTNKFIYPPHDFGVANTMITNFHTPKSTLIMMIAAFAGRDFVMHAYEEAVKEKYKFYSYGDAMLIL

SEQ ID NO: 65263 - protein, 352 aa, Chryseobacterium frigidisoli
  misc_feature (1)..(352): tr|A0A1I3DYF5|A0A1I3DYF5_9FLAO S-adenosylmethionine:tRN A ribosyltransferase-isomerase OS=Chryseobacterium frig idisoli OX=1125876 GN=queA PE=3 SV=1
MSKLKTSDFYFDLPEHLLAEHPSPNRDESKLMVLHRKTGKIEHKMFKDVIDYFDEKDLFIFNNTKVFPARLYGNKEKTGAKIEVFLLRELDKETRVWDVLVDPARKIRIGNKLFFNEDESLVAEVIDNTTSRGRTLRFLYDGSYEEFRAKLKELGETPLPKYIKREVEPEDAERYQTIYAKNEGAVAAPTAGMHFSKHLMKRLEIKGVDFAEVTLHIGLGTFNPIEVEDLSKHKMESEEAIIDQKNADIINKAVEEGRQICAVGTTTMRAIETSVSSNKKLGPYNGWTNKFIFPPHDFGVATAMITNFHMPKSTLMMMIAAFAGKDFLMEAYEEAVKMDYKFFSYGDAMLIL

SEQ ID NO: 65264 - protein, 349 aa, Chryseobacterium gallinarum
  misc_feature (1)..(349): tr|A0A0G3LWC6|A0A0G3LWC6_9FLAO S-adenosylmethionine:tRN A ribosyltransferase-isomerase OS=Chryseobacterium gall inarum OX=1324352 GN=queA PE=3 SV=1
MKTSDFNFDLPAELLAEHPSEHRDEARLMVLDRKTQTIEHKLFKDVVDYFDEDDLFIFNNTKVFPARLYGNKEKTGAKIEVFLLRELDKETRVWDVLVDPARKIRIGNKLFFTEDESLVAEVIDNTTSRGRTLRFLFDGSYEEFRAKLKELGETPLPKYIKRAVEPEDAERYQTIYAKVEGAVAAPTAGLHFSKHLMKRLEIKGINFAEVTLHVGLGTFNPIEVEDLSKHKMESEEIIIDEKNAEIINKAVDAHRRVCAVGTTTMRALETSVSSNKKISAFNGWTNKFIYPPHEFGVANSMITNFHTPKSTLIMMIAAFAGRDFVMHAYEEAVKEKYKFYSYGDAMLIL

SEQ ID NO: 65265 - protein, 349 aa, Chryseobacterium gambrini
  misc_feature (1)..(349): tr|A0A1N7QCH0|A0A1N7QCH0_9FLAO S-adenosylmethionine:tRN A ribosyltransferase-isomerase OS=Chryseobacterium gamb rini OX=373672 GN=queA PE=3 SV=1
MKTSDFNFDLPAELLAEHPSEHRDEARLMVLDRKTETIQHKLFKDVVDYFDEGDLFIFNNTKVFPARLYGNKEKTGAKIEVFLLRELDKETRVWDVLVDPARKIRIGNKLFFTEDESLVAEVIDNTTSRGRTLRFLFDGSYEEFRAKLKELGETPLPKYIKRDVEPEDAERYQTIYAKVEGAVAAPTAGLHFSRHLMKRLEIKGIDFAEVTLHVGLGTFNPIEVEDLSKHKMESEEIFIDEKNAQIINNAVDANRRVCAVGTTTMRTLETSVSSNKKISAFHGWTNKFIYPPHDFGVANCMITNFHTPKSTLIMMIAAFAGRDFIMHAYEEAVKEKYKFYSYGDAMLIL

SEQ ID NO: 65266 - protein, 349 aa, Chryseobacterium geocarposphaerae
  misc_feature (1)..(349): tr|A0A2M9C9I5|A0A2M9C9I5_9FLAO S-adenosylmethionine:tRN A ribosyltransferase-isomerase OS=Chryseobacterium geoc arposphaerae OX=1416776 GN=queA PE=3 SV=1
MKTSDFNFDLPAELLAEHPSEHRDEARLMVLNRKTETIEHKLFKDVVDYFDEGDLFIFNNTKVFPARLYGNKEKTGAKIEVFLLRELDKETRVWDVLVDPARKIRIGNKLFFTEDESLVAEVIDNTTSRGRTLRFLFDGSYEEFRAKLKELGETPLPKYIKRDVEPEDAERYQTIYAKVEGAVAAPTAGLHFSKHLMKRLEIKGIDFAEVTLHVGLGTFNPIEVEDLSKHKMESEEIFIDEKNAQIINNAVEANKRVCAVGTTTMRTLETSVSSNKKISAFHGWTNKFIYPPHEFGVANCMITNFHTPKSTLIMMIAAFAGRDFVMHAYEEAVKEKYKFYSYGDAMLIL

SEQ ID NO: 65267 - protein, 349 aa, Chryseobacterium glaciei
  misc_feature (1)..(349): tr|A0A172XYG1|A0A172XYG1_9FLAO S-adenosylmethionine:tRN A ribosyltransferase-isomerase OS=Chryseobacterium glac iei OX=1685010 GN=queA PE=3 SV=1
MKTSDFNFDLPEELLAEHPSEHRDESRLMVLDRKTQTIEHKLFKDVVDYFDEKDLFIFNNTKVFPARLYGNKEKTGAKIEVFLLRELDKETRVWDVLVDPARKIRIGNKLFFTEDESLVAEVIDNTTSRGRTLRFLFDGSYEEFRTKLKELGETPLPKYIKRAVEPEDAERYQTIYAKIEGAVAAPTAGLHFSRHLMKRLEIKGIDFAEVTLHVGLGTFNPIEVEDLSKHKMESEEIIIDEKNADIINKAVDEHRRVCAVGTTTMRALETSVSSNKKISAFNGWTNKFIYPPHDFGVANTMITNFHTPKSTLLMMIAAFAGRDFIMQAYEEAVKEKYKFYSYGDAMLIL

SEQ ID NO: 65268 - protein, 349 aa, Chryseobacterium gleum
  misc_feature (1)..(349): tr|A0A448B174|A0A448B174_9FLAO S-adenosylmethionine:tRN A ribosyltransferase-isomerase OS=Chryseobacterium gleu m OX=250 GN=queA PE=3 SV=1
MKTSDFNFDLPAELLAEHPSEHRDEARLMVLDRKTQTIEHKLFKDVVDYFDEEDLFIFNNTKVFPARLYGNKEKTGAKIEVFLLRELDKETRVWDVLVDPARKIRIGNKLFFTEDESLVAEVIDNTTSRGRTLRFLFDGSYEEFRSKLKELGETPLPKYIKRAVEPEDAERYQTIYAKVEGAVAAPTAGLHFSKHLMKRLEIKGINFAEVTLHVGLGTFNPIEVEDLSKHKMESEEIIIDEKNAAIINKAVEAHRRVCAVGTTTMRALETSVSSNKKISAFNGWTNKFIYPPHEFGVANSMITNFHTPKSTLIMMIAAFAGRDFVMHAYEEAVKEKYKFYSYGDAMLIL

SEQ ID NO: 65269 - protein, 349 aa, Chryseobacterium gleum
  misc_feature (1)..(349): tr|A0A4U8WCF0|A0A4U8WCF0_9FLAO S-adenosylmethionine:tRN A ribosyltransferase-isomerase OS=Chryseobacterium gleu m OX=250 GN=queA PE=3 SV=1
MKTSDFNFDLPAELLAEHPSEHRDEARLMVLNRKTETIEHKLFKDVVDYFDEKDLFIFNNTKVFPARLYGNKEKTGAKIEVFLLRELDKETRVWDVLVDPARKIRIGNKLFFTEDESLVAEVIDNTTSRGRTLRFLFDGSYEEFRAKLKELGETPLPKYIKREVEPEDAERYQTIYAKVEGAVAAPTAGLHFSKHLMKRLEIKGVDFAEITLHVGLGTFNPIEVEDLSKHKMESEEVIIDEKNAEIINRAVQENRRVCAVGTTTMRAIETSVSSNKKISAFQGWTNKFIYPPHDFGIANSMITNFHTPKSTLIMMIAAFAGKDFVMHAYEEAVKEKYKFYSYGDAMLIL

SEQ ID NO: 65270 - protein, 349 aa, Chryseobacterium greenlandense
  misc_feature (1)..(349): tr|A0A124F2L7|A0A124F2L7_9FLAO S-adenosylmethionine:tRN A ribosyltransferase-isomerase OS=Chryseobacterium gree nlandense OX=345663 GN=queA PE=3 SV=1
MKTSDFNFDLPEELLAEHPSEHRDEARLMVLDRKTQTIEHKLFKDVVDYFDEKDLFIFNNTKVFPARLYGNKEKTGAKIEVFLLRELDKETRVWDVLVDPARKIRIGNKLFFTEDESLVAEVIDNTTSRGRTLRFLFDGSYEEFRTKLKELGETPLPKYIKRDVEPEDAERYQTIYAKVEGAVAAPTAGLHFSRHLMKRLEIKGIDFAEVTLHVGLGTFNPIEVEDLSKHKMESEEIIIDEKNAEIINRAVQENRKVCAVGTTTMRAIETSVSSNKKISAFQGWTNKFIYPPHDFGVANTMITNFHTPKSTLLMMIAAFAGKDFIMHAYEEAVKEKYKFYSYGDAMLIL

SEQ ID NO: 65271 - protein, 349 aa, Chryseobacterium hagamense
  misc_feature (1)..(349): tr|A0A511YJJ9|A0A511YJJ9_9FLAO S-adenosylmethionine:tRN A ribosyltransferase-isomerase OS=Chryseobacterium haga mense OX=395935 GN=queA PE=3 SV=1
MKTSDFNFDLPAELLAEHPSEHRDEARLMVLDRKTETIEHKLFKDVVDYFDEGDLFIFNNTKVFPARLYGNKEKTGAKIEVFLLRELDKETRVWDVLVDPARKIRIGNKLFFTEDESLVAEVIDNTTSRGRTLRFLFDGSYEEFRSKLKELGETPLPKYIKRDVEPEDAERYQTIYAKVEGAVAAPTAGLHFSRHLMKRLEIKGIDFAEVTLHVGLGTFNPIEVEDLSKHKMESEEIFIDEKNAQIINNAVESHRRVCAVGTTTMRTLETSVSSNKKISAFHGWTNKFIYPPHDFGVANCMITNFHTPKSTLIMMIAAFAGKEFIMRAYEEAVKEKYKFYSYGDAMLIL

SEQ ID NO: 65272 - protein, 349 aa, Chryseobacterium haifense
  misc_feature (1)..(349): tr|A0A246B8J2|A0A246B8J2_9FLAO S-adenosylmethionine:tRN A ribosyltransferase-isomerase OS=Chryseobacterium haif ense DSM 19056 OX=1450526 GN=queA PE=3 SV=1
MKTSDFNFHLPEELLAEHPAEHRDESKLMVLDRKTQTIEHKLFKDVVDYFDEHDLFIFNNTKVFPARLYGNKEKTGAKIEVFLLRELDKETRVWDVLVDPARKIRIGNKLFFTEDESLVAEVIDNTTSRGRTLRFLYDGSYEEFRAKLKELGETPLPKYIKRPVEPEDAERYQTIYAKHEGAVAAPTAGLHFSKHLMKKLEIKGIDFAEVTLHVGLGTFNPIEVEDLSKHKMESEEAIIDQVNADIINKAVAEQRRVCAVGTTTMRALETSVSSNKKIGAYHGWTNKFIFPPHEFGVANAMITNFHTPKSTLLMMVAAFAGKDFVMHAYEEAIKNEYKFFTYGDAMLIL

SEQ ID NO: 65273 - protein, 410 aa, Chryseobacterium haifense
  misc_feature (1)..(410): tr|A0A246BCE6|A0A246BCE6_9FLAO S-adenosylmethionine:tRN A ribosyltransferase-isomerase OS=Chryseobacterium haif ense DSM 19056 OX=1450526 GN=AP75_02425 PE=3 SV=1
MHPKHLRIEDFTYDLPAEKIAYNPVNPRDQSKLLVYQNNKISENTYRNISEYLPENAVLVFNDTKVVKSRIFFNNENGATIEVFCLEPYGEAIDYEQHFTERNSVTWICFIGKVSKWREQQLTKTIEVEGLPVELSAEITGKLEDAYLVTFTWSPSEIPFGKIMDAAGVTPLPPYIKRIAEKVDEDSYQTVYSENEGSVAAPTAGLHFTQDVLDDLKKKGISSLFTTLHVGAGTFKPVKSEVMEDHVMHSEYLNITTAFLEDLAVKIHQPIITVGTTSTRTLESIYWMGNKIVQNPEISYNALKINQWEPYEAEAICSAEEAIDALLKWIKNTHQDHLSIETEIIIAPGYSFKMVKGLVTNFHQPQSTLLLLVSALIGDQWKNIYQYALENDFRFLSYGDGSLLLPNNNF

SEQ ID NO: 65274 - protein, 349 aa, Chryseobacterium halperniae
  misc_feature (1)..(349): tr|A0A085BJA2|A0A085BJA2_9FLAO S-adenosylmethionine:tRN A ribosyltransferase-isomerase OS=Chryseobacterium halp erniae OX=421072 GN=queA PE=3 SV=1
MKTSDFNFDLPEELLAEHPSENRDEARLMVLDRKTETITHRLFKDVIEYFDEKDLFIFNNTKVFPARLFGNKEKTGAKIEVFLLRELDRETRVWDVLVDPARKIRIGNKLFFTEDESLVAEVIDNTTSRGRTLRFLFDGSYEEFRAKLTELGETPLPKYIKRDVEPEDADRYQTIYAKIEGAVAAPTAGLHFSKHLMKRLEIKGIDFAEITLHVGLGTFNPIEVEDLSKHKMESEEAIIDEKNAAIINKAVEEGRRVCAVGTTTMRALETSVSSNKKISAYRGWTNKFIYPPHDFGVANAMITNFHTPKSTLIMMIAAFSNKDFIMRAYEEAIKERYKFYSYGDAMLIL

SEQ ID NO: 65275 - protein, 349 aa, Chryseobacterium hispanicum
  misc_feature (1)..(349): tr|A0A3D9D3Z0|A0A3D9D3Z0_9FLAO S-adenosylmethionine:tRN A ribosyltransferase-isomerase OS=Chryseobacterium hisp anicum OX=358687 GN=queA PE=3 SV=1
MKTSDFNFDLPAELLAEHPSENRDEARLMVLNRKTETIEHRLFKDVIEYFDEKDLFIFNNTKVFPARLFGNKEKTGAKIEVFLLRELDAETRVWDVLVDPARKIRIGNKLFFTEDESLVAEVIDNTTSRGRTLRFLFDGSYEEFRAKLTELGETPLPKYIKRDVEPEDAERYQTIYAKVEGAVAAPTAGLHFSKHLMKRLEIKGIDFAEITLHVGLGTFNPIEVEDLSKHKMESEEAIIDEKNAEIINRAVQEGRRVVAVGTTTMRALETSVSSNKKISAYRGWTNKFIYPPHDFGVANAMITNFHTPKSTLIMMIAAFANKDFIMRAYEEAVKEKYKFYSYGDAMLIL

SEQ ID NO: 65276 - protein, 349 aa, Chryseobacterium hominis
  misc_feature (1)..(349): tr|A0A1H6HWY0|A0A1H6HWY0_9FLAO S-adenosylmethionine:tRN A ribosyltransferase-isomerase OS=Chryseobacterium homi nis OX=420404 GN=queA PE=3 SV=1
MKTSDFNFNLPPELLAEHPSENRDEARLMVLDRKTETIEHRLFKDVIDYFDEKDLFIFNNTKVFPARLYGNKEKTGAKIEVFLLRELDAETRVWDVLVDPARKIRIGNKLFFTEDESLVAEVIDNTTSRGRTLRFLFDGSYEEFRAKLTELGETPLPKYIKREVEPEDAERYQTIYAKVEGAVAAPTAGLHFSKHLMKRLEIKGIDFAEITLHVGLGTFNPIEVEDLSKHKMESEEAIIDEKNAEIINRAVEEGRRVCAVGTTTMRALETSVSSNKKISAYRGWTNKFIYPPHDFGVANAMITNFHTPKSTLIMMIAAFANKDFIMRAYEEAVKEKYKFYSYGDAMLIL

SEQ ID NO: 65277 - protein, 352 aa, Chryseobacterium humi
  misc_feature (1)..(352): tr|A0A1H5TM09|A0A1H5TM09_9FLAO S-adenosylmethionine:tRN A ribosyltransferase-isomerase OS=Chryseobacterium humi OX=493375 GN=queA PE=3 SV=1
MSKLKTSDFNFHLPEHLLAEHPANNRDESKLMVLHRKTGKIEHKLFKDVIDYFEEKDLFIFNNTKVFPARLYGNKEKTGAKIEVFLLRELDKETRVWDVLVDPARKIRIGNKLFFNEDESLVAEVIDNTTSRGRTLRFLYDGSYEEFRAKLKELGETPLPKYIKRDVEPEDAERYQTIYAKNEGAVAAPTAGMHFSKHLMKRLEIKGVDFAEVTLHIGLGTFNPIEVEDLSKHKMESEEAIIDQLNADKINLAVEEGRQICAVGTTTMRAIETSVSSNKKIGPFHGWTNKFIFPPHDFGVATSMITNFHMPKSTLMMMIAAFAGKDFLMEAYEEAVKNEYKFYSYGDAMLIL

SEQ ID NO: 65278 - protein, 349 aa, Chryseobacterium hungaricum
  misc_feature (1)..(349): tr|A0A1G7J9K9|A0A1G7J9K9_9FLAO S-adenosylmethionine:tRN A ribosyltransferase-isomerase OS=Chryseobacterium hung aricum OX=454006 GN=queA PE=3 SV=1
MKTSDFNFDLPAELLAEHPSENRDEARLMVLNRKTETIEHRLFKDVIDYFDEKDLFIFNNTKVFPARLFGNKEKTGAKIEVFLLRELDAETRVWDVLVDPARKIRIGNKLFFTEDESLVAEVIDNTTSRGRTLRFLFDGSYEEFRAKLTELGETPLPKYIKRDVEPEDAERYQTIYAKVEGAVAAPTAGLHFSKHLMKRLEIKGIDFAEITLHVGLGTFNPIEVEDLSKHKMESEEAIIDEKNAEIINKAVEEGRRVCAVGTTTMRALETSVSSNKKISAYRGWTNKFIYPPHEFGVANAMITNFHTPKSTLIMMIAAFANKDFIMRAYEEAIKEKYKFYSYGDAMLIL

SEQ ID NO: 65279 - protein, 349 aa, Chryseobacterium indologenes
  misc_feature (1)..(349): tr|A0A411DME1|A0A411DME1_9FLAO S-adenosylmethionine:tRN A ribosyltransferase-isomerase OS=Chryseobacterium indo logenes OX=253 GN=queA PE=3 SV=1
MKTSDFNFDLPAELLAEHPSEHRDEARLMVLDRKTQTIEHKLFKDVVDYFDEEDLFIFNNTKVFPARLYGNKEKTGAKIEVFLLRELDKETRVWDVLVDPARKIRIGNKLFFTEDESLVAEVIDNTTSRGRTLRFLFDGSYDEFRTKLKELGETPLPKYIKRAVEPEDAERYQTIYAKVEGAVAAPTAGLHFSKHLMKRLEIKGINFAEVTLHVGLGTFNPIEVEDLSKHKMESEEIIIDEKNAAIINKAVESHRRVCAVGTTTMRALETSVSSNKKISAFNGWTNKFIYPPHDFGVANSMITNFHTPKSTLIMMIAAFAGRDFVMHAYEEAVKEKYKFYSYGDAMLIL

SEQ ID NO: 65280 - protein, 349 aa, Chryseobacterium indologenes
  misc_feature (1)..(349): tr|A0A1Z3W2J3|A0A1Z3W2J3_9FLAO S-adenosylmethionine:tRN A ribosyltransferase-isomerase OS=Chryseobacterium indo logenes OX=253 GN=queA PE=3 SV=1
MKTSDFNFDLPAELLAEHPSEHRDEARLMVLDRKTETIEHKLFKDVVDYFDESDLFIFNNTKVFPARLYGNKEKTGAKIEVFLLRELDKETRVWDVLVDPARKIRIGNKLFFTEDESLVAEVIDNTTSRGRTLRFLFDGSYEEFRTKLKELGETPLPKYIKRAVEPEDAERYQTIYAKVEGAVAAPTAGLHFSKHLMKKLEIKGIDFAEVTLHVGLGTFNPIEVEDLSKHKMESEEIIIDEKNAEIINKAVEAHRRVCAVGTTTMRALETSVSSNKKISAFNGWTNKFIYPPHDFGVANSMITNFHTPKSTLLMMIAAFAGRDFVMHAYEEAVKEKYKFYSYGDAMLIL

SEQ ID NO: 65281 - protein, 349 aa, Chryseobacterium indoltheticum
  misc_feature (1)..(349): tr|A0A381F4J8|A0A381F4J8_9FLAO S-adenosylmethionine:tRN A ribosyltransferase-isomerase OS=Chryseobacterium indo ltheticum OX=254 GN=queA PE=3 SV=1
MKTSDFNFDLPEELLAEHPSEHRDEARLMVLDRKTQTIEHKLFKDVVDYFDEKDLFIFNNTKVFPARLYGNKEKTGAKIEVFLLRELDKETRVWDVLVDPARKIRIGNKLFFTEDESLVAEVIDNTTSRGRTLRFLFDGSYEEFRSKLKELGETPLPKYIKRDVEPEDAERYQTIYAKVEGAVAAPTAGLHFSKHLMKRLEIKGIDFAEVTLHVGLGTFNPIEVEDLSKHKMESEEIIIDEKNAEIINRAVQENRRVCAVGTTTMRAIETSVSSNRKISAFNGWTNKFIYPPHDFGIANTMITNFHTPKSTLMMMIAAFAGKDFLMHAYEEAVKEKYKFYSYGDAMLII

SEQ ID NO: 65282 - protein, 349 aa, Chryseobacterium jejuense
  misc_feature (1)..(349): tr|A0A2X2VFT3|A0A2X2VFT3_9FLAO S-adenosylmethionine:tRN A ribosyltransferase-isomerase OS=Chryseobacterium jeju ense OX=445960 GN=queA PE=3 SV=1
MKTSDFNFDLPAELLAEHPSEHRDEARLMVLDRKTQTIEHKLFKDVVDYFDEEDLFIFNNTKVFPARLYGNKEKTGAKIEVFLLRELDKETRVWDVLVDPARKIRIGNKLFFTEDESLVAEVIDNTTSRGRTLRFLFDGSYDEFRTKLKELGETPLPKYIKRAVEPEDAERYQTIYAKVEGAVAAPTAGLHFSKHLMKRLEIKGINFAEVTLHVGLGTFNPIEVEDLSKHKMESEEIIIDEKNALIINKAVESHRRVCAVGTTTMRALETSVSSNKKISAFNGWTNKFIYPPHDFGVANTMITNFHTPKSTLIMMIAAFAGRDFIMHAYEEAVKEKYKFYSYGDAMLIL

SEQ ID NO: 65283 - protein, 349 aa, Chryseobacterium jeonii
  misc_feature (1)..(349): tr|A0A0C1D9B2|A0A0C1D9B2_9FLAO S-adenosylmethionine:tRN A ribosyltransferase-isomerase OS=Chryseobacterium jeon ii OX=266749 GN=queA PE=3 SV=1
MKTSDFNFHLPEELLAEHPSEHRDEAKLMVLNRATQTIEHKKFKDVVDYFDEHDLFIFNNTKVFPARLFGNKEKTGAKIEVFLLRELDKETRVWDVLVDPARKIRIGNKLFFTEDEGLVAEVIDNTTSRGRTLRFLYDGSYEEFRTKLKELGQTPLPKYIKRDVEPEDAERYQTIYAKYEGAVAAPTAGLHFSKHLMKKLEIKGIDFAEITLHVGLGTFNPIEVEDLSKHKMESEEAIITQKNADIINKAVAEQRRVCAVGTTTMRAIETSVSSNRKIGPYHGWTNKFIFPPHDFGVANCMITNFHTPKSTLMMMVAAFAGKDFLMQAYEEAIKNEYKFYSYGDAMLII

SEQ ID NO: 65284 - protein, 349 aa, Chryseobacterium joostei
  misc_feature (1)..(349): tr|A0A1N7I1D2|A0A1N7I1D2_9FLAO S-adenosylmethionine:tRN A ribosyltransferase-isomerase OS=Chryseobacterium joos tei OX=112234 GN=queA PE=3 SV=1
MKTSDFNFDLPAELLAEHPSEHRDEARLMVLDRKTQTIEHKLFKDVVDYFDEKDLFIFNNTKVFPARLYGNKEKTGAKIEVFLLRELDKETRVWDVLVDPARKIRIGNKLFFTEDESLVAEVIDNTTSRGRTLRFLFDGSYDEFRTKLKELGETPLPKYIKRAVEPEDAERYQTIYAKVEGAVAAPTAGLHFSRHLMKKLEIKGIDFAEVTLHVGLGTFNPIEVEDLSKHKMESEEIIIDEKNAAIINNAVESHRRVCAVGTTTMRALETSVSSNKKISAFNGWTNKFIYPPHDFGVANTMITNFHTPKSTLIMMIAAFAGRDFIMQAYEEAVKEKYKFYSYGDAMLIL

SEQ ID NO: 65285 - protein, 349 aa, Chryseobacterium koreense
  misc_feature (1)..(349): tr|A0A0J7J080|A0A0J7J080_9FLAO S-adenosylmethionine:tRN A ribosyltransferase-isomerase OS=Chryseobacterium kore ense CCUG 49689 OX=1304281 GN=queA PE=3 SV=1
MKTSDFNFHLPEHLLAEHPSEHRDEAKLMVLNRKDQTIEHKLFKDVVDYFDEHDLFIFNNTKVFPARLYGNKEKTGAKIEVFLLRELDKETRVWDVLVDPARKIRIGNKLFFTEDESLVAEVIDNTTSRGRTLRFLYDGSYEEFRAKLKELGETPLPKYIKREVEPEDAERYQTIYAKIEGAVAAPTAGLHFSKHLMKRLEIKGIDFAEITLHVGLGTFNPIEVEDLSKHKMESEEAIIDQKNADIINKAVEEQRRVCAVGTTTMRALETSVSSNKKIGPYHGWTNKFIFPPHDFGVANAMITNFHTPKSTLLMMIAAFAGKDFVMHAYEEAIKNEYKFYSYGDAMLIL

SEQ ID NO: 65286 - protein, 349 aa, Chryseobacterium kwangjuense
  misc_feature (1)..(349): tr|A0A135WJG5|A0A135WJG5_9FLAO S-adenosylmethionine:tRN A ribosyltransferase-isomerase OS=Chryseobacterium kwan gjuense OX=267125 GN=queA PE=3 SV=1
MKTSDFNFDLPDELLAEHPSEHRDEARLMVLNRKTETIEHKLFKDVVDYFDEKDLFIFNNTKVFPARLYGNKEKTGAKIEVFLLRELDKETRVWDVLVDPARKIRIGNKLFFTEDESLVAEVIDNTTSRGRTLRFLFDGSYDEFRTKLKELGETPLPKYIKRAVEPEDAERYQTIYAKIEGAVAAPTAGLHFSKHLMKKLEIKGIDFAEVTLHVGLGTFNPIEVEDLSKHKMESEEIIIDEKNAAIINNAVESHRRVCAVGTTTMRALETSVSSNKKISAFNGWTNKFIYPPHDFGVANSMITNFHTPKSTLLMMIAAFAGKDFIMHAYEEAVKEKYKFYSYGDAMLIL

SEQ ID NO: 65287 - protein, 349 aa, Chryseobacterium lactis
  misc_feature (1)..(349): tr|A0A3G6RJ63|A0A3G6RJ63_9FLAO S-adenosylmethionine:tRN A ribosyltransferase-isomerase OS=Chryseobacterium lact is OX=1241981 GN=queA PE=3 SV=1
MKTSDFNFDLPAELLAEHPSEHRDEARLMVLDRKTQTIEHKLFRDVVDYFDEDDLFIFNNTKVFPARLYGNKEKTGAKIEVFLLRELDKETRVWDVLVDPARKIRIGNKLFFTEDESLVAEVIDNTTSRGRTLRFLFDGSYEEFRSKLKELGETPLPKYIKRAVEPEDAERYQTIYAKIEGAVAAPTAGLHFSRHLMKRLEIKGINFAEVTLHVGLGTFNPIEVEDLSKHKMESEEIIIDEKNADIINKAVDSHRRVCAVGTTTMRALETSVSSNKKISAFNGWTNKFIYPPHDFGVANSMITNFHTPKSTLIMMIAAFAGRDFIMHAYEEAVKEKYKFYSYGDAMLIL

SEQ ID NO: 65288 - protein, 349 aa, Chryseobacterium lathyri
  misc_feature (1)..(349): tr|A0A511Y881|A0A511Y881_9FLAO S-adenosylmethionine:tRN A ribosyltransferase-isomerase OS=Chryseobacterium lath yri OX=395933 GN=queA PE=3 SV=1
MKTSDFNFDLPAELLAEHPSEHRDEAKLMVLNRKTQTIEHKLFKDVVDYFEEKDLFIFNNTKVFPARLYGNKEKTGAKIEVFLLRELDKETRVWDVLVDPARKIRIGNKLFFTEDESLVAEVIDNTTSRGRTLRFLFDGSYDEFRTKLKELGETPLPKYIKRAVEPEDAERYQTIYAKIEGAVAAPTAGLHFSKHLMKKLEIKGIDFAEVTLHVGLGTFNPIEVEDLSKHKMESEEIIIDEKNADIINKAVDAHRRVCAVGTTTMRALETSVSSNKKISAFNGWTNKFIYPPHDFGVANSMITNFHTPKSTLLMMIAAFAGKDFIMHAYEEAVKEKYKFYSYGDAMLIL

SEQ ID NO: 65289 - protein, 349 aa, Chryseobacterium limigenitum
  misc_feature (1)..(349): tr|A0A1K2IQN4|A0A1K2IQN4_9FLAO S-adenosylmethionine:tRN A ribosyltransferase-isomerase OS=Chryseobacterium limi genitum OX=1612149 GN=queA PE=3 SV=1
MKTSDFNFDLPEELLAEHPSEHRDEARLMVLDRKTQTIEHKLFKDVVDYFDEKDLFIFNNTKVFPARLYGNKEKTGAKIEVFLLRELDKETRVWDVLVDPARKIRIGNKLFFTEDESLVAEVIDNTTSRGRTLRFLFDGSYEEFRTKLKELGETPLPKYIKRAVEPEDAERYQTIYAKIEGAVAAPTAGLHFSRHLMKRLEIKGIDFAEVTLHVGLGTFNPIEVEDLSKHKMESEEIIIDEKNADIINRAVDEHRRVCAVGTTTMRALETSVSSNKKISAFNGWTNKFIYPPHDFGVANTMITNFHTPKSTLLMMIAAFAGRDFIMQAYEEAVKEKYKFYSYGDAMLIL

SEQ ID NO: 65290 - protein, 349 aa, Chryseobacterium luteum
  misc_feature (1)..(349): tr|A0A085ZFB3|A0A085ZFB3_9FLAO S-adenosylmethionine:tRN A ribosyltransferase-isomerase OS=Chryseobacterium lute um OX=421531 GN=queA PE=3 SV=1
MKTSDFNFDLPAELLAEHPSEHRDEARLMVLNRKTETIEHKLFKDVVDYFDEKDLFIFNNTKVFPARLYGNKEKTGAKIEVFLLRELDKETRVWDVLVDPARKIRIGNKLFFTEDESLVAEVIDNTTSRGRTLRFLFDGSYDEFRTKLKELGETPLPKYIKRAVEPEDAERYQTIYAKVEGAVAAPTAGLHFSRHLMKKLEIKGIDFAEVTLHVGLGTFNPIEVEDLSKHKMESEEVIIDEKNADIINKAVDAHRRVCAVGTTTMRALETSVSSNRKISAFNGWTNKFIYPPHDFGVASAMITNFHTPKSTLLMMIAAFAGKEFIMHAYEEAVKEKYKFYSYGDAMLIL

SEQ ID NO: 65291 - protein, 349 aa, Chryseobacterium molle
  misc_feature (1)..(349): tr|A0A1M6RWP3|A0A1M6RWP3_9FLAO S-adenosylmethionine:tRN A ribosyltransferase-isomerase OS=Chryseobacterium moll e OX=216903 GN=queA PE=3 SV=1
MKTSDFNFDLPAELLAEHPSENRDEARLMVLDRKTETITHRLFKDVIDYFDEKDLFIFNNTKVFPARLFGNKEKTGAKIEVFLLRELDAETRVWDVLVDPARKIRIGNKLFFTEDESLVAEVIDNTTSRGRTLRFLFDGSYEEFRAKLTELGETPLPKYIKREVEPEDAERYQTIYAKVEGAVAAPTAGLHFSKHLMKRLEIKGIDFAEITLHVGLGTFNPIEVEDLSKHKMESEEAIIDEKNAEIINRAVEEGRRVCAVGTTTMRALETSVSSNKKISAYRGWTNKFIYPPHDFGVANAMITNFHTPKSTLIMMIAAFANKDFVMRAYEEAIKEGYKFYSYGDAMLIL

SEQ ID NO: 65292 - protein, 349 aa, Chryseobacterium mucoviscidosis; identical to SEQ ID NO: 64741
  misc_feature (1)..(349): tr|A0A202C4Q9|A0A202C4Q9_9FLAO S-adenosylmethionine:tRN A ribosyltransferase-isomerase OS=Chryseobacterium muco viscidosis OX=1945581 GN=queA PE=3 SV=1

SEQ ID NO: 65293 - protein, 349 aa, Chryseobacterium nakagawai
  misc_feature (1)..(349): tr|A0A3S4VHA0|A0A3S4VHA0_9FLAO S-adenosylmethionine:tRN A ribosyltransferase-isomerase OS=Chryseobacterium naka gawai OX=1241982 GN=queA PE=3 SV=1
MKTSDFNFDLPAELLAEHPSEHRDEARLMVLDRKTQTIEHKLFKDVVDYFDESDLFIFNNTKVFPARLYGNKEKTGAKIEVFLLRELDKETRVWDVLVDPARKIRIGNKLFFTEDESLVAEVIDNTTSRGRTLRFLFDGSYDEFRTKLKELGETPLPKYIKRAVEPEDAERYQTIYAKIEGAVAAPTAGLHFSRHLMKRLEIKGIDFAEVTLHVGLGTFNPIEVEDLSKHKMESEEIIIDEKNAAIINKAVESHRRVCAVGTTTMRALETSVSSNKKISAFNGWTNKFIYPPHDFGVANSMITNFHTPKSTLIMMIAAFAGRDFIMHAYEEAVKEKYKFYSYGDAMLIL

SEQ ID NO: 65294 - protein, 349 aa, Chryseobacterium nakagawai
  misc_feature (1)..(349): tr|A0A3N2F7V7|A0A3N2F7V7_9FLAO S-adenosylmethionine:tRN A ribosyltransferase-isomerase OS=Chryseobacterium naka gawai OX=1241982 GN=queA PE=3 SV=1
MKTSDFNFDLPAELLAEHPSEHRDEARLMVLDRKTQTIEHKLFKDVVDYFDEKDLFIFNNTKVFPARLYGNKEKTGAKIEVFLLRELDKETRVWDVLVDPARKIRIGNKLFFTEDESLVAEVIDNTTSRGRTLRFLFDGSYDEFRTKLKELGETPLPKYIKRAVEPEDAERYQTIYAKIEGAVAAPTAGLHFSKHLMKRLEIKGIDFAEVTLHVGLGTFNPIEVEDLSKHKMESEEIIIDEKNADIINKAVESHRRVCAVGTTTMRALETSVSSNKKISAFNGWTNKFIYPPHDFGVANSMITNFHTPKSTLIMMIAAFAGRDFIMQAYEEAVKEKYKFYSYGDAMLIL

SEQ ID NO: 65295 - protein, 349 aa, Chryseobacterium nematophagum
  misc_feature (1)..(349): tr|A0A3M7LDS9|A0A3M7LDS9_9FLAO S-adenosylmethionine:tRN A ribosyltransferase-isomerase OS=Chryseobacterium nema tophagum OX=2305228 GN=queA PE=3 SV=1
MKTSDFNFDLPAELLAEHPSEHRDEARLMVLNRKTETIEHKLFKDVVDYFDEKDLFIFNNTKVFPARLYGNKEKTGAKIEVFLLRELDKETRVWDVLVDPARKIRIGNKLFFTEDESLVAEVIDNTTSRGRTLRFLFDGSYDEFRTKLKELGETPLPKYIKRAVEPEDAERYQTIYAKVEGAVAAPTAGLHFSKHLMKRLEIKGIDFAEITLHVGLGTFNPIEVEDLSKHKMESEEITIDERNADIINNAVDAHRRVCAVGTTTMRALETSVSSNKKISAFHGWTNKFIYPPHDFGVANSMITNFHTPKSTLIMMIAAFAGRDFIMHAYEEAVKEKYKFYSYGDAMLIL

SEQ ID NO: 65296 - protein, 349 aa, Chryseobacterium nematophagum
  misc_feature (1)..(349): tr|A0A3M7TES7|A0A3M7TES7_9FLAO S-adenosylmethionine:tRN A ribosyltransferase-isomerase OS=Chryseobacterium nema tophagum OX=2305228 GN=queA PE=3 SV=1
MKTSDFNFDLPAELLAEHPSEHRDEARLMVLNRKTETIEHKLFKDVVDYFDEKDLFIFNNTKVFPARLYGNKEKTGAKIEVFLLRELDKETRVWDVLVDPARKIRIGNKLFFTEDESLVAEVIDNTTSRGRTLRFLFDGSYDEFRTKLKELGETPLPKYIKRAVEPEDAERYQTIYAKVEGAVAAPTAGLHFSKHLMKRLEIKGIDFAEITLHVGLGTFNPIEVEDLSKHKMESEEITIDERNAEIINNAVDAHRRVCAVGTTTMRALETSVSSNKKISAFHGWTNKFIYPPHDFGVANSMITNFHTPKSTLIMMIAAFAGRDFIMHAYEEAVKEKYKFYSYGDAMLIL

SEQ ID NO: 65297 - protein, 349 aa, Chryseobacterium oleae
  misc_feature (1)..(349): tr|A0A1I4VSQ0|A0A1I4VSQ0_9FLAO S-adenosylmethionine:tRN A ribosyltransferase-isomerase OS=Chryseobacterium olea e OX=491207 GN=queA PE=3 SV=1
MKTSDFNFDLPAELLAEHPSEHRDEARLMVLNRKTETIEHKLFKDVVDYFDEKDLFIFNNTKVFPARLYGNKEKTGAKIEVFLLRELDKETRVWDVLVDPARKIRIGNKLFFTEDESLVAEVIDNTTSRGRTLRFLFDGSYDEFRTKLKELGETPLPKYIKRAVEPEDAERYQTIYAKIEGAVAAPTAGLHFSKHLMKKLEIKGIDFAEVTLHVGLGTFNPIEVEDLSKHKMESEEIIIDEKNADIINKAVDAHRRVCAVGTTTMRALETSVSSNKKISAFNGWTNKFIYPPHDFGVANSMITNFHTPKSTLLMMIAAFAGREFIMHAYEEAVKEQYKFYSYGDAMLIL

SEQ ID NO: 65298 - protein, 349 aa, Chryseobacterium oncorhynchi
  misc_feature (1)..(349): tr|A0A316X2J5|A0A316X2J5_9FLAO S-adenosylmethionine:tRN A ribosyltransferase-isomerase OS=Chryseobacterium onco rhynchi OX=741074 GN=queA PE=3 SV=1
MKTSDFNFDLPEELLAEHPSEHRDEARLMVLDRKTQTIEHKLFKDVVDYFDEKDLFIFNNTKVFPARLYGNKEKTGAKIEVFLLRELDKETRVWDVLVDPARKIRIGNKLFFTEDESLVAEVIDNTTSRGRTLRFLFDGSYDEFRTKLKELGETPLPKYIKRAVEPEDAERYQTIYAKVEGAVAAPTAGLHFSRHLMKKLEIKGIDFAEVTLHVGLGTFNPIEVEDLSKHKMESEEIIIDEKNAAIINNAVESHRRVCAVGTTTMRALETSVSSNKKISAFNGWTNKFIYPPHDFGVANTMITNFHTPKSTLIMMIAAFAGRDFIMQAYEEAVKEKYKFYSYGDAMLIL

SEQ ID NO: 65299 - protein, 349 aa, Chryseobacterium oranimense
  misc_feature (1)..(349): tr|A0A1M5KKQ1|A0A1M5KKQ1_9FLAO S-adenosylmethionine:tRN A ribosyltransferase-isomerase OS=Chryseobacterium oran imense OX=421058 GN=queA PE=3 SV=1
MKTSDFNFDLPAELLAEHPSEHRDEARLMVLNRKTETIEHKLFKDVVDYFDEKDLFIFNNTKVFPARLYGNKEKTGAKIEVFLLRELDKETRVWDVLVDPARKIRIGNKLFFTEDESLVAEVIDNTTSRGRTLRFLFDGSYDEFRTKLKELGETPLPKYIKRAVEPEDAERYQTIYAKVEGAVAAPTAGLHFSKHLMKKLEIKGIDFAEVTLHVGLGTFNPIEVEDLSKHKMESEEIIIDEKNAEIINKAVEAHRRVCAVGTTTMRALETSVSSNKKISAFNGWTNKFIYPPHDFGVANSMITNFHTPKSTLLMMIAAFAGKDFIMHAYEEAVKEKYKFYSYGDAMLIL

SEQ ID NO: 65300 - protein, 349 aa, Chryseobacterium piperi
  misc_feature (1)..(349): tr|A0A086B2G7|A0A086B2G7_9FLAO S-adenosylmethionine:tRN A ribosyltransferase-isomerase OS=Chryseobacterium pipe ri OX=558152 GN=queA PE=3 SV=1
MKTSDFNFDLPAELLAEHPSEHRDDARLMVLDRKTETIEHKLFKDVVDYFDEKDLFIFNNTKVFPARLYGNKEKTGAKIEVFLLRELDKETRVWDVLVDPARKIRIGNKLFFTEDESLVAEVIDNTTSRGRTLRFLFDGSYEEFRAKLKELGETPLPKYIKRAVEPEDAERYQTIYAKIEGAVAAPTAGLHFSKHLMKRLEIKGIDFAEVTLHVGLGTFNPIEVEDLSKHKMESEEIIIDEKNAEIINKAVDAHRRVCAVGTTTMRALETSVSSNKKISAFNGWTNKFIYPPHDFGVANSMITNFHTPKSTLIMMIAAFAGRDFIMHAYEEAVKEKYKFYSYGDAMLIL

SEQ ID NO: 65301 - protein, 349 aa, Chryseobacterium piscicola
  misc_feature (1)..(349): tr|A0A1N7LS97|A0A1N7LS97_9FLAO S-adenosylmethionine:tRN A ribosyltransferase-isomerase OS=Chryseobacterium pisc icola OX=551459 GN=queA PE=3 SV=1
MKTSDFNFDLPEELLAEHPAEHRDEARLMVLDRKNQTITHKQFKDVVDYFDEKDLFIFNNTKVFPARLYGNKEKTGAKIEVFLLRELDKETRVWDVLVDPARKIRIGNKLFFTEDESLVAEVIDNTTSRGRTLRFLYDGPYEEFRTKLKELGETPLPKYIKRDVEPEDAERYQTIYAKVEGAVAAPTAGLHFSRHLMKRLEIKGIDFAEVTLHVGLGTFNPIEVEDLSKHKMESEEIFIDEKNAEIINKAVDENRRVCAVGTTTMRTLETSVSSNKKISAFSGWTNKFIFPPHDFGVANCMITNFHTPKSTLMMMIAAFAGKDFLMQAYEEAVREKYKFYTYGDAMLIL

SEQ ID NO: 65302 - protein, 349 aa, Chryseobacterium piscium
  misc_feature (1)..(349): tr|A0A3D9BMW9|A0A3D9BMW9_9FLAO S-adenosylmethionine:tRN A ribosyltransferase-isomerase OS=Chryseobacterium pisc ium OX=333702 GN=queA PE=3 SV=1
MKTSDFNFDLPEELLAEHPSEHRDEARLMVLDRKTQTIEHKLFKDVVDYFDEKDLFIFNNTKVFPARLYGNKEKTGAKIEVFLLRELDKETRVWDVLVDPARKIRIGNKLFFTEDESLVAEVIDNTTSRGRTLRFLFDGSYEEFRSKLKELGETPLPKYIKRDVEPEDAERYQTIYAKVEGAVAAPTAGLHFSKHLMKRLEIKGIDFAEVTLHVGLGTFNPIEVEDLSKHKMESEEIIIDEKNAEIINKAVQENRRVCAVGTTTMRAIETSVSSNRKISAFNGWTNKFIYPPHDFGIANTMITNFHTPKSTLMMMIAAFAGKDFLMHAYEEAVKEKYKFYSYGDAMLII

SEQ ID NO: 65303 - protein, 349 aa, Chryseobacterium polytrichastri
  misc_feature (1)..(349): tr|A0A1M6UUP1|A0A1M6UUP1_9FLAO S-adenosylmethionine:tRN A ribosyltransferase-isomerase OS=Chryseobacterium poly trichastri OX=1302687 GN=queA PE=3 SV=1
MKTSDFNFDLPEELLAEHPSEHRDESRLMVLDRKTQTIEHKLFKDVVDYFDEKDLFIFNNTKVFPARLYGNKEKTGAKIEVFLLRELDKETRVWDVLVDPARKIRIGNKLFFTEDESLVAEVIDNTTSRGRTLRFLFDGSYEEFRTKLKELGETPLPKYIKRSVEPEDAERYQTIYAKIEGAVAAPTAGLHFSRHLMKRLEIKGIDFAEVTLHVGLGTFNPIEVEDLSKHKMESEEIIIDEKNADIINRAVDEHRRVCAVGTTTMRALETSVSSNKKISAFNGWTNKFIYPPHDFGVANTMITNFHTPKSTLLMMIAAFAGREFIMHAYEEAVKEKYKFYSYGDAMLIL

SEQ ID NO: 65304 - protein, 349 aa, Chryseobacterium rhizoplanae
  misc_feature (1)..(349): tr|A0A521DGT6|A0A521DGT6_9FLAO S-adenosylmethionine:tRN A ribosyltransferase-isomerase OS=Chryseobacterium rhiz oplanae OX=1609531 GN=queA PE=3 SV=1
MKTSDFNFDLPAELLAEHPSEHRDEARLMVLDRKTQTIEHKLFKDVVDYFDEDDLFIFNNTKVFPARLYGNKEKTGAKIEVFLLRELDKETRVWDVLVDPARKIRIGNKLFFTEDESLVAEVIDNTTSRGRTLRFLFDGSYDEFRTKLKELGETPLPKYIKRAVEPEDAERYQTIYAKIEGAVAAPTAGLHFSKHLMKRLEIKGINFAEVTLHVGLGTFNPIEVEDLSKHKMESEEIIIDEKNAELINRAVESHRRVCAVGTTTMRALETSVSSNKKISAFNGWTNKFIYPPHDFGVATSMITNFHTPKSTLLMMIAAFAGKDFVMHAYEEAVKEKYKFYSYGDAMLIL

SEQ ID NO: 65305 - protein, 349 aa, Chryseobacterium rhizosphaerae
  misc_feature (1)..(349): tr|A0A3D9DFW4|A0A3D9DFW4_9FLAO S-adenosylmethionine:tRN A ribosyltransferase-isomerase OS=Chryseobacterium rhiz osphaerae OX=395937 GN=queA PE=3 SV=1
MKTSDFNFDLPEELLAEHPSEHRDEARLMVLDRKTETIEHKLFKDVVDYFDEKDLFIFNNTKVFPARLYGNKEKTGAKIEVFLLRELDKETRVWDVLVDPARKIRIGNKLFFTEDESLVAEVIDNTTSRGRTLRFLFDGSYDEFRTKLKELGETPLPKYIKRAVEPEDAERYQTIYAKIEGAVAAPTAGLHFSRHLMKRLEIKGIDFAEVTLHVGLGTFNPIEVEDLSKHKMESEEIIIDEKNAEIINRAVETHRRVCAVGTTTMRALETSVSSNKKISAFNGWTNKFIYPPHDFGVANSMITNFHTPKSTLLMMIAAFAGRDFVMHAYEEAVKEKYKFYSYGDAMLIL

SEQ ID NO: 65306 - protein, 349 aa, Chryseobacterium scophthalmum
  misc_feature (1)..(349): tr|A0A1N6FHA9|A0A1N6FHA9_9FLAO S-adenosylmethionine:tRN A ribosyltransferase-isomerase OS=Chryseobacterium scop hthalmum OX=59733 GN=queA PE=3 SV=1
MKTSDFNFDLPEELLAEHPSEHRDESRLMVLDRKAQTIEHKLFKDVVDYFDEKDLFIFNNTKVFPARLYGNKEKTGAKIEVFLLRELDKETRVWDVLVDPARKIRIGNKLFFTEDESLVAEVIDNTTSRGRTLRFLFDGSYEEFRSKLKELGETPLPKYIKRDVEPEDAERYQTIYAKVEGAVAAPTAGLHFSKHLMKRLEIKGIDFAEVTLHVGLGTFNPIEVEDLSKHKMESEEIIIDEKNAEIINKAVQENRRVCAVGTTTMRAIETSVSSNRKISAFNGWTNKFIYPPHDFGIANTMITNFHTPKSTLMMMIAAFAGKDFLMHAYEEAVKEKYKFYSYGDAMLII

SEQ ID NO: 65307 - protein, 349 aa, Chryseobacterium sediminis
  misc_feature (1)..(349): tr|A0A5B2UCN5|A0A5B2UCN5_9FLAO S-adenosylmethionine:tRN A ribosyltransferase-isomerase OS=Chryseobacterium sedi minis OX=1679494 GN=queA PE=3 SV=1
MKTSDFNFDLPAELLAEHPSEHRDEARLMVLDRKTQTIEHKLFKDVVDYFDEDDLFIFNNTKVFPARLYGNKEKTGAKIEVFLLRELDKETRVWDVLVDPARKIRIGNKLFFTEDESLVAEVIDNTTSRGRTLRFLFDGSYDEFRTKLKELGETPLPKYIKRAVEPEDAERYQTIYAKVEGAVAAPTAGLHFSKHLMKRLEIKGINFAEVTLHVGLGTFNPIEVEDLSKHKMESEEIIIDEKNAALINRAVESHRRVCAVGTTTMRALETSVSSNKKISAFNGWTNKFIYPPHDFGVATSMITNFHTPKSTLLMMIAAFAGKDFVMQAYEEAVREKYKFYSYGDAMLIL

SEQ ID NO: 65308 - protein, 349 aa, Chryseobacterium shandongense
  misc_feature (1)..(349): tr|A0A3G6QWW1|A0A3G6QWW1_9FLAO S-adenosylmethionine:tRN A ribosyltransferase-isomerase OS=Chryseobacterium shan dongense OX=1493872 GN=queA PE=3 SV=1
MKTSDFNFDLPAELLAEHPSEHRDEARLMVLDRKTETIEHKLFKDVVDYFDEGDLFIFNNTKVFPARLYGNKEKTGAKIEVFLLRELDKETRVWDVLVDPARKIRIGNKLFFTEDESLVAEVIDNTTSRGRTLRFLFDGSYEEFRAKLKELGETPLPKYIKRDVEPEDAERYQTIYAKVEGAVAAPTAGLHFSKHLMKRLEIKGIDFAEVTLHVGLGTFNPIEVEDLSKHKMESEEIFIDEKNAQIINNAVDAHKRVCAVGTTTMRTLETSVSSNKKISAFHGWTNKFIYPPHEFGVANCMITNFHTPKSTLIMMIAAFAGRDFIMHAYEEAVKEKYKFYSYGDAMLIL

SEQ ID NO: 65309 - protein, 349 aa, Chryseobacterium shigense; identical to SEQ ID NO: 65252
  misc_feature (1)..(349): tr|A0A376DRE8|A0A376DRE8_9FLAO S-adenosylmethionine:tRN A ribosyltransferase-isomerase OS=Chryseobacterium shig ense OX=297244 GN=queA PE=3 SV=1

SEQ ID NO: 65310 - protein, 349 aa, Chryseobacterium shigense
  misc_feature (1)..(349): tr|A0A1N7HZP7|A0A1N7HZP7_9FLAO S-adenosylmethionine:tRN A ribosyltransferase-isomerase OS=Chryseobacterium shig ense OX=297244 GN=queA PE=3 SV=1
MKTSDFNFDLPEELLAEHPSEHRDEAKLMVLNRKTETIEHKLFKDVVDYFDEKDLFIFNNTKVFPARLYGNKEKTGAKIEVFLLRELDKETRVWDVLVDPARKIRIGNKLFFTEDESLVAEVIDNTTSRGRTLRFLFDGSYDEFRTKLKELGETPLPKYIKRAVEPEDAERYQTIYAKIEGAVAAPTAGLHFSKHLMKKLEIKGIDFAEVTLHVGLGTFNPIEVEDLSKHKMESEEIIIDEKNADIINKAVDAHRRVCAVGTTTMRALETSVSSNKKISAFNGWTNKFIYPPHDFGVANSMITNFHTPKSTLLMMIAAFAGKDFIMHAYEEAVKEKYKFYSYGDAMLIL

SEQ ID NO: 65311 - protein, 349 aa, Chryseobacterium soldanellicola
  misc_feature (1)..(349): tr|A0A1H1CPK8|A0A1H1CPK8_9FLAO S-adenosylmethionine:tRN A ribosyltransferase-isomerase OS=Chryseobacterium sold anellicola OX=311333 GN=queA PE=3 SV=1
MKTSDFNFDLPAELLAEHPSEHRDEARLMVLDRKTQTIEHKLFKDVVDYFDEHDLFIFNNTKVFPARLYGNKEKTGAKIEVFLLRELDKETRVWDVLVDPARKIRIGNKLFFTEDESLVAEVIDNTTSRGRTLRFLFDGSYEEFRSKLKELGETPLPKYIKREVEPEDAERYQTIYAKVEGAVAAPTAGLHFSRHLMKRLEIKGIDFAEVTLHVGLGTFNPIEVEDLSKHKMESEEIIIDEKNAEIINKAVQENRKVCAVGTTTMRAIETSVSSNRKISAFNGWTNKFIYPPHDFGVANTMITNFHTPKSTLLMMIAAFAGREFVMHAYEEAVKEKYKFYSYGDAMLIL

SEQ ID NO: 65312 - protein, 349 aa, Chryseobacterium soli
  misc_feature (1)..(349): tr|A0A086A2M0|A0A086A2M0_9FLAO S-adenosylmethionine:tRN A ribosyltransferase-isomerase OS=Chryseobacterium soli OX=445961 GN=queA PE=3 SV=1
MKTSDFNFDLPEELLAEHPSEHRDEARLMVLDRKTETIEHKLFKDVVDYFDEKDLFIFNNTKVFPARLYGNKEKTGAKIEVFLLRELDKETRVWDVLVDPARKIRIGNKLFFTEDESLVAEVIDNTTSRGRTLRFLFDGSYEEFRSKLKELGETPLPKYIKRAVEPEDAERYQTIYAKIEGAVAAPTAGLHFSKHLMKRLEIKGIDFAEVTLHVGLGTFNPIEVEDLSKHKMESEEIIIDEKNADIINKAVDEHRRVCAVGTTTMRALETSVSSNKKISAFNGWTNKFIYPPHDFGVANSMITNFHTPKSTLLMMIAAFAGREFVMHAYEEAVKEKYKFYSYGDAMLIL

SEQ ID NO: 65313 - protein, 349 aa, Chryseobacterium solincola
  misc_feature (1)..(349): tr|A0A0C1F5R2|A0A0C1F5R2_9FLAO S-adenosylmethionine:tRN A ribosyltransferase-isomerase OS=Chryseobacterium soli ncola OX=510955 GN=queA PE=3 SV=1
MKTSDFNFDLPEELLAEHPAEHRDDAKLMVLNRATQTIEHRLFKDVVDYFEEKDLFIFNNTKVFPARLYGNKEKTGAKIEVFLLRELDKETRVWDVLVDPARKIRIGNKLFFTEDEGLVAEVIDNTTSRGRTLRFLYDGSYEEFRAKLKELGETPLPKYFKREVEPEDAERYQTIYAKHEGAVAAPTAGLHFSRHLMKKLEIKGIDFAEVTLHVGLGTFNPIEVEDLSKHKMESEEAIIDQKNADIINKAVSEGRRVCAVGTTTMRTIETSVSSNKKIGPYHGWTNKFIFPPHEFGVANCMITNFHMPKSTLMMMIAAFAGKDFLMHAYEEAIKHKYKFYSYGDAMLIL

SEQ ID NO: 65314 - protein, 349 aa, Chryseobacterium sp.
  misc_feature (1)..(349): tr|A0A0T0M7M0|A0A0T0M7M0_9FLAO S-adenosylmethionine:tRN A ribosyltransferase-isomerase OS=Chryseobacterium sp. Leaf394 OX=1736361 GN=queA PE=3 SV=1
MKTSDFNFDLPEELLAEHPSEHRDEARLMVLDRKTQTIEHKLFKDVVDYFDEKDLFIFNNTKVFPARLYGNKEKTGAKIEVFLLRELDKETRVWDVLVDPARKIRIGNKLFFTEDESLVAEVIDNTTSRGRTLRFLYDGPYEEFRAKLKELGETPLPKYIKREVEPEDAERYQTIYAKVEGAVAAPTAGLHFSRHLMKRLEIKGIDFAEVTLHVGLGTFNPIEVEDLSKHKMESEEIFIDEKNAEIINKAVEENRRVCAVGTTTMRTLETSVSSNKKISAFHGWTNKFIFPPHDFGVANCMITNFHTPKSTLMMMIAAFAGKDFVMHAYEEAVKEKYKFYSYGDAMLIL

SEQ ID NO: 65315 - protein, 349 aa, Chryseobacterium sp.
  misc_feature (1)..(349): tr|A0A316XGD6|A0A316XGD6_9FLAO S-adenosylmethionine:tRN A ribosyltransferase-isomerase OS=Chryseobacterium sp. ISE14 OX=475075 GN=queA PE=3 SV=1
MKTSDFNFDLPEELLAEHPSEHRDEARLMVLDRKTETIEHKLFKDVVDYFDENDLFIFNNTKVFPARLYGNKEKTGAKIEVFLLRELDKETRVWDVLVDPARKIRIGNKLFFTEDESLVAEVIDNTTSRGRTLRFLFDGSYDEFRTKLKELGETPLPKYIKRAVEPEDAERYQTIYAKIEGAVAAPTAGLHFSKHLMKKLEIKGIDFAEVTLHVGLGTFNPIEVEDLSKHKMESEEIIIDEKNAAIINKAVDAHRRVCAVGTTTMRALETSVSSNKKISAFNGWTNKFIYPPHDFGVANSMITNFHTPKSTLLMMIAAFAGRDFVMHAYEEAVKEKYKFYSYGDAMLIL

SEQ ID NO: 65316 - protein, 349 aa, Chryseobacterium taeanense
  misc_feature (1)..(349): tr|A0A1G8LXU1|A0A1G8LXU1_9FLAO S-adenosylmethionine:tRN A ribosyltransferase-isomerase OS=Chryseobacterium taea nense OX=311334 GN=queA PE=3 SV=1
MKTSDFNFDLPAELLAEHPSEHRDEARLMVLDRKTETIEHKLFKDVVDYFDEGDLFIFNNTKVFPARLYGNKEKTGAKIEVFLLRELDKETRVWDVLVDPARKIRIGNKLFFTEDESLVAEVIDNTTSRGRTLRFLFDGSYEEFRAKLKELGETPLPKYIKRDVEPEDAERYQTIYAKVEGAVAAPTAGLHFSRHLMKRLEIKGIDFAEVTLHVGLGTFNPIEVEDLSKHKMESEEIFIDEKNAQIINNAVDSHRRVCAVGTTTMRTLETSVSSNKKISAFHGWTNKFIYPPHDFGVANCMITNFHTPKSTLIMMIAAFAGRDFVMHAYEEAVKEKYKFYSYGDAMLIL

SEQ ID NO: 65317 - protein, 349 aa, Chryseobacterium taichungense; identical to SEQ ID NO: 65308
  misc_feature (1)..(349): tr|A0A1H8DSG3|A0A1H8DSG3_9FLAO S-adenosylmethionine:tRN A ribosyltransferase-isomerase OS=Chryseobacterium taic hungense OX=295069 GN=queA PE=3 SV=1

SEQ ID NO: 65318 - protein, 349 aa, Chryseobacterium taihuense; identical to SEQ ID NO: 65269
  misc_feature (1)..(349): tr|A0A1G9N0H0|A0A1G9N0H0_9FLAO S-adenosylmethionine:tRN A ribosyltransferase-isomerase OS=Chryseobacterium taih uense OX=1141221 GN=queA PE=3 SV=1

SEQ ID NO: 65319 - protein, 349 aa, Chryseobacterium taiwanense
  misc_feature (1)..(349): tr|A0A0B4CR75|A0A0B4CR75_9FLAO S-adenosylmethionine:tRN A ribosyltransferase-isomerase OS=Chryseobacterium taiw anense OX=363331 GN=queA PE=3 SV=1
MKTSDFNFDLPAELLAEHPSEHRDEARLMVLDRKTETIQHKLFKDVVDYFDEGDLFIFNNTKVFPARLYGNKEKTGAKIEVFLLRELDKETRVWDVLVDPARKIRIGNKLFFTEDESLVAEVIDNTTSRGRTLRFLFDGSYEEFRTKLKELGETPLPKYIKRDVEPEDAERYQTIYAKVEGAVAAPTAGLHFSKHLMKRLEIKGIDFAEVTLHVGLGTFNPIEVEDLSKHKMESEEIFIDEKNAQIINNAVEANRRVCAVGTTTMRTLETSVSSNKKISAFHGWTNKFIYPPHDFGVANCMITNFHTPKSTLIMMIAAFAGRDFIMHAYEEAVKEKYKFYSYGDAMLII

SEQ ID NO: 65320 - protein, 349 aa, Chryseobacterium takakiae
  misc_feature (1)..(349): tr|A0A1M4WID0|A0A1M4WID0_9FLAO S-adenosylmethionine:tRN A ribosyltransferase-isomerase OS=Chryseobacterium taka kiae OX=1302685 GN=queA PE=3 SV=1
MKTSDFNFDLPAELLAEHPSEHRDEARLMVLDRKTETIEHKLFKDVVDYFDEGDLFIFNNTKVFPARLYGNKEKTGAKIEVFLLRELDKETRVWDVLVDPARKIRIGNKLFFTEDESLVAEVIDNTTSRGRTLRFLFDGSYEEFRAKLKELGETPLPKYIKRDVEPEDAERYQTIYAKVEGAVAAPTAGLHFSKHLMKRLEIKGIDFAEVTLHVGLGTFNPIEVEDLSKHKMESEEIFIDEKNAQIINNAVDAHKRVCAVGTTTMRTLETSVSSNKKISAFHGWTNKFIYPPHEFGVANCMITNFHTPKSTLIMMIAAFAGRDFVMHAYEEAVKEKYKFYSYGDAMLIL

SEQ ID NO: 65321 - protein, 349 aa, Chryseobacterium taklimakanense
  misc_feature (1)..(349): tr|A0A239WH57|A0A239WH57_9FLAO S-adenosylmethionine:tRN A ribosyltransferase-isomerase OS=Chryseobacterium takl imakanense OX=536441 GN=queA PE=3 SV=1
MKTSDFNFDLPEELLAEHPSEHRDEARLMVLDRKTETIEHKLFKDVVDYFDEGDLFIMNNTKVFPARLYGNKEKTGAKIEVFLLRELDRETRVWDVLVDPARKIRIGNKLFFTEDESLVAEVIDNTTSRGRTLRFLYDGTYEEFRAKLKELGETPLPKYIKRAVEPEDAERYQTIYAKHEGAVAAPTAGLHFSKHLMKRLEIKGIDFAEVTLHVGLGTFNPIEVEDLSKHKMESEEAIIDQKNADIINKAVEENRRICAVGTTTMRALETSVSSNRKIGPYHGWTNKFIYPPHDFGVANAMITNFHTPKSTLIMMIAAFAGKDFVMRAYEEAIKEKYKFYSYGDAMLIL

SEQ ID NO: 65322 - protein, 349 aa, Chryseobacterium treverense
  misc_feature (1)..(349): tr|A0A1I3K334|A0A1I3K334_9FLAO S-adenosylmethionine:tRN A ribosyltransferase-isomerase OS=Chryseobacterium trev erense OX=631455 GN=queA PE=3 SV=1
MKTSDFNFDLPEELLAEHPAEHRDDAKLMVLNRATQTIEHRLFKDVVDYFEEKDLFIFNNTKVFPARLYGNKEKTGAKIEVFLLRELDKETRVWDVLVDPARKIRIGNKLFFTEDEGLVAEVIDNTTSRGRTLRFLYDGSYEEFRAKLKELGETPLPKYFKREVEPEDAERYQTIYAKHEGAVAAPTAGLHFSRHLMKKLEIKGIDFAEVTLHVGLGTFNPIEVEDLSKHKMESEEAIIDQKNADIINKAVSEGRRVCAVGTTTMRTIETSVSSNKKIGPYHGWTNKFIFPPHEFGVANCMITNFHMPKSTLMMMIAAFAGKDFLMQAYEEAIKHKYKFYSYGDAMLIL

SEQ ID NO: 65323 - protein, 349 aa, Chryseobacterium ureilyticum
  misc_feature (1)..(349): tr|A0A1N7K9P1|A0A1N7K9P1_9FLAO S-adenosylmethionine:tRN A ribosyltransferase-isomerase OS=Chryseobacterium urei lyticum OX=373668 GN=queA PE=3 SV=1
MKTSDFNFDLPAELLAEHPSEHRDEARLMVLDRKTQTIEHKLFKDVVDYFDEEDLFIFNNTKVFPARLYGNKEKTGAKIEVFLLRELDKETRVWDVLVDPARKIRIGNKLFFTEDESLVAEVIDNTTSRGRTLRFLFDGSYDEFRAKLKELGETPLPKYIKRAVEPEDAERYQTIYAKVEGAVAAPTAGLHFSKHLMKRLEIKGINFAEVTLHVGLGTFNPIEVEDLSKHKMESEEIIIDEKNALIINKAVESHRRVCAVGTTTMRALETSVSSNKKISAFNGWTNKFIYPPHDFGVANTMITNFHTPKSTLIMMIAAFAGRDFVMHAYEEAVKEKYKFYSYGDAMLIL

SEQ ID NO: 65324 - protein, 349 aa, Chryseobacterium viscerum
  misc_feature (1)..(349): tr|A0A316WS66|A0A316WS66_9FLAO S-adenosylmethionine:tRN A ribosyltransferase-isomerase OS=Chryseobacterium visc erum OX=1037377 GN=queA PE=3 SV=1
MKTSDFNFDLPEELLAEHPSEHRDEARLMVLDRKTQTIEHKLFKDVVDYFDEDDLFIFNNTKVFPARLYGNKEKTGAKIEVFLLRELDKETRVWDVLVDPARKIRIGNKLFFTEDESLVAEVIDNTTSRGRTLRFLFDGSYDEFRTKLKELGETPLPKYIKRAVEPEDAERYQTIYAKIEGAVAAPTAGLHFSRHLMKRLEIKGINFAEVTLHVGLGTFNPIEVEDLSKHKMESEEIIIDEKNALIINKAVETHRRVCAVGTTTMRALETSVSSNKKISAFNGWTNKFIYPPHDFGVATSMITNFHTPKSTLLMMIAAFAGRDFIMQAYEEAIKEKYKFYSYGDAMLIL

SEQ ID NO: 65325 - protein, 349 aa, Chryseobacterium wanjuense
  misc_feature (1)..(349): tr|A0A1I0NSJ2|A0A1I0NSJ2_9FLAO S-adenosylmethionine:tRN A ribosyltransferase-isomerase OS=Chryseobacterium wanj uense OX=356305 GN=queA PE=3 SV=1
MKTSDFNFDLPAELLAEHPSEHRDEARLMVLDRKTQTIEHKLFKDVVDYFSEEDLFIFNNTKVFPARLYGNKEKTGAKIEVFLLRELDKETRVWDVLVDPARKIRIGNKLFFTEDESLVAEVIDNTTSRGRTLRFLFDGSYEEFRAKLKELGETPLPKYIKRAVEPEDAERYQTIYAKIEGAVAAPTAGLHFSKHLMKRLEIKGINFAEITLHVGLGTFNPIEVEDLSKHKMESEEVFIDERNAEIINKAVDGNRRVCAVGTTTMRALETSVSSNKKISAFHGWTNKFIYPPHDFGVANSMITNFHTPKSTLIMMIAAFAGRDFIMHAYEEAVKEKYKFYSYGDAMLIL

SEQ ID NO: 65326 - protein, 349 aa, Chryseobacterium xixisoli
  misc_feature (1)..(349): tr|A0A4R8I9B8|A0A4R8I9B8_9FLAO S-adenosylmethionine:tRN A ribosyltransferase-isomerase OS=Chryseobacterium xixi soli OX=1476462 GN=queA PE=3 SV=1
MKTSDFNFDLPEELLAEHPTENRDEARLMVLDRKTETITHRLFKDVIEYFDEKDLFIFNNTKVFPARLFGNKEKTGAKIEVFLLRELDAETRVWDVLVDPARKIRIGNKLFFTEDESLVAEVIDNTTSRGRTLRFLFDGSYEEFRAKLTELGETPLPKYIKREVEPEDAERYQTIYAKHEGAVAAPTAGLHFSKHLMKRLEIKGIDFAEITLHVGLGTFNPIEVEDLSKHKMESEEAIIDEKNAEIINKAVAEGRRVVAVGTTTMRALETSVSSNKKISAYRGWTNKFIYPPHEFGVANAMITNFHTPKSTLIMMIAAFANKDFVMRAYEEAIKEKYKFYSYGDAMLIL

SEQ ID NO: 65327 - protein, 349 aa, Chryseobacterium zeae
  misc_feature (1)..(349): tr|A0A1N6F1J2|A0A1N6F1J2_9FLAO S-adenosylmethionine:tRN A ribosyltransferase-isomerase OS=Chryseobacterium zeae OX=1416779 GN=queA PE=3 SV=1
MKTSDFNFDLPAELLAEHPTENRDEARLMVLNRKTETIEHRLFKDVIEYFDEKDLFIFNNTKVFPARLFGNKEKTGAKIEVFLLRELDAETRVWDVLVDPARKIRIGNKLFFTEDESLVAEVIDNTTSRGRTLRFLFDGSYEEFRAKLTELGETPLPKYIKREVEPEDAERYQTIYAKVEGAVAAPTAGLHFSKHLMKRLEIKGIDFAEITLHVGLGTFNPIEVEDLSKHKMESEEAIIDEKNAEIINRAVQEGRRVCAVGTTTMRALETSVSSNKKISAYRGWTNKFIYPPHEFGVANAMITNFHTPKSTLIMMIAAFANKDFIMRAYEEAIKEKYKFYSYGDAMLIL

SEQ ID NO: 65328 - protein, 348 aa, Chryseolinea flava
  misc_feature (1)..(348): tr|A0A364XVZ0|A0A364XVZ0_9BACT S-adenosylmethionine:tRN A ribosyltransferase-isomerase OS=Chryseolinea flava OX =2059302 GN=queA PE=3 SV=1
MKLSEFKFELPNSLIALDPAENRDESRLMVVHKDTGKIEHKVFKDIVEYFGEGDVMVGNDTMVFPARLYGRKEKTGAKIEVFLLRELNADMHLWDVLVDPARKIRVGNKLYFGNGDLVAEVIDNTTSRGRTIRFLFDGDSAAFDKVVETLGETPLPKYIKRKVKSEDKERFQTIFAKNKGAVSAPTAGLHFTRQLLKRLQLRGVDMAFITLHIGLGTFRPVDVEDLTKHKMDSENFIVSNEAVDIVNKALDNKNKVCAIGTTTMRALESAVSATNRLKAREGWTDKFIFPPYDFKICNAMITNFHMPESTLLMMASAFGGYELITEAYKVAKKEKYKFLTYGDAMLII

SEQ ID NO: 65329 - protein, 399 aa, Chryseolinea flava
  misc_feature (1)..(399): tr|A0A364XY53|A0A364XY53_9BACT S-adenosylmethionine:tRN A ribosyltransferase-isomerase OS=Chryseolinea flava OX =2059302 GN=queA PE=3 SV=1
MKPQLFIKDYTYDLPHERIAKFPLEKRDDSKLLVYQAGQIEHAAFRNILDFLPSNSFLVFNDTKVIPARLHFTKETGASIETFLLHPLLPSTLVVEAMIAHPSATWQCTIGNLKKWTTGTILQKKLGSTTLEAHLIDREKGVVEFRWNSSQSFAEIVSLSGETPLPPYLKRDVESSDKERYQTVYAHHDGAVAAPTAGLHFTDKILSAIQQQKMSTDFVTLHVSAGTFQPVKAEVASEHTMHEEQIIVRRETIINLLKANHFIVPVGTTAMRTLESLYWFGVRLLNDPAASFSIHQDEPYTIKQSATRTQILERILQQMDKKGIDMLTGETSIFIMPGYQFRMCDGLITNFHQPGSTLILLVAALVGDDWKKIYHEAMTNDYRFLSYGDSSLLLPSISS

SEQ ID NO: 65330 - protein, 396 aa, Chryseolinea serpens
  misc_feature (1)..(396): tr|A0A1M5LWG8|A0A1M5LWG8_9BACT S-adenosylmethionine:tRN A ribosyltransferase-isomerase OS=Chryseolinea serpens OX=947013 GN=queA PE=3 SV=1
MDISISNYTYTLPPERIAVYPLANRDQSKLLFYDQGTIHHQVFSSLPDLLPADTLLFFNDTKVIPARLHFQKDTGAVIEIFLLHPVLPSTLVMEAMQAHHHCTWQCTLGNLKRWKDEPLFKTFHGITLKATLRDREAGLVEFEWATDHSFAEVVNLAGETPLPPYLHRKAEQADRERYQTIYSHHEGAVAAPTAGLHFTPAIFDQLKAKGIAHDFVTLHVSAGTFQPVKVENAVEHVMHNEQVVVTRDNLDHLLSGRYIVPVGTTSMRTLESLYWYGVKLLKDPQAVFAISQHEAYTAADHRPTRDEALRAVVDYMDRNQLELLTGETSIYIMPGYTFRVCEALITNFHQPGSTLILLVAAFIGEDWRKVYNESLANGYRFLSYGDSSLLIPRTRS

SEQ ID NO: 65331 - protein, 376 aa, Chryseolinea serpens
  misc_feature (1)..(376): tr|A0A1M5RPT3|A0A1M5RPT3_9BACT S-adenosylmethionine:tRN A ribosyltransferase-isomerase OS=Chryseolinea serpens OX=947013 GN=queA PE=3 SV=1
MSKRAILDLFLPLIKKFTLYWAPFAFTNMKLSEFKFELPNNLIALDPAENRDESRLMVVHKDTGKIEHKIFKDVVEYFKEGDVMVGNDTMVFPARLYGRKEKTGAKIEVFLLRELNAEMHLWDVLVDPARKIRVGNKLYFGNGDLVAEVIDNTTSRGRTIRFLFDGDSAAFDKVVETLGETPLPKYIKRKIKPEDKERFQTIFAKHKGAVSAPTAGMHFTRQLLKRLQIKGVDMTYVTLHIGLGTFRPVDVEDLTKHKMDSENFIVGQEAVDIVNKALDNKNHVCAIGTTTMRALESAVSATNRLKAREGWTDKFIFPPYDFKICNAMITNFHMPESTLLMMASAFAGYDLAMEAYKVAKKEKYKFLTYGDAMLII

SEQ ID NO: 65332 - protein, 348 aa, Chryseolinea sp.
  misc_feature (1)..(348): tr|A0A385SCD5|A0A385SCD5_9BACT S-adenosylmethionine:tRN A ribosyltransferase-isomerase OS=Chryseolinea sp. KIS6 8-18 OX=2321403 GN=queA PE=3 SV=1
MKLSEFKFELPNNLIALDPAENRDESRLMVVHKDTGKIEHKIFKDVVDYFKEGDVMVGNDTMVFPARLYGRKEKTGAKIEVFLLRELNAEMHLWDVLVDPARKIRVGNKLYFGNGDLVAEVIDNTTSRGRTIRFLFDGDSAAFDKVVETLGETPLPKYIKRKIKPEDKERFQTIFAKHKGAVSAPTAGMHFTRQLLKRLQIKGVDMTYVTLHIGLGTFRPVDVEDLTKHKMDSENFIVGQEAVDIVNKALDNKNHVCAIGTTTMRALESAVSATNRLKAREGWTDKFIFPPYDFKICNAMITNFHMPESTLLMMASAFAGYDLAMEAYKVAKKEKYKFLTYGDAMLII

SEQ ID NO: 65333 - protein, 396 aa, Chryseolinea sp.
  misc_feature (1)..(396): tr|A0A385SX08|A0A385SX08_9BACT S-adenosylmethionine:tRN A ribosyltransferase-isomerase OS=Chryseolinea sp. KIS6 8-18 OX=2321403 GN=queA PE=3 SV=1
MDISISDYTYTLPPERIAVYPLANRDQSKLLFYDRGVIDHQIFSSLPDLLPADTLLFFNDTKVIPARLHFQKDTGAVIEIFLLHPVLPSPLVMEAMQAHHRCTWQCTLGNLKRWKDEPLFKTFHGITLKATLSDREEGLVEFEWATEHSFAEVVNLAGETPLPPYLHRKPEQADRDRYQTIYSHHEGAVAAPTAGLHFTPAIFEQLKAKGIAHDFVTLHVSAGTFQPVKVENAMEHVMHNEQVVVTRANLDRLLSGRYIVPVGTTSMRTLESLYWYGVKLLKDPRAVFTISQHEAYAAADRWPSRDEALRAVVAYMERNQLDLLTGETSIYIMPGYTFRVCEALITNFHQPGSTLILLVAAFIGADWRKVYDESLANGYRFLSYGDSSLLIPRTEG

SEQ ID NO: 65334 - protein, 347 aa, Chryseomicrobium excrementi
  misc_feature (1)..(347): tr|A0A2M9F209|A0A2M9F209_9BACL S-adenosylmethionine:tRN A ribosyltransferase-isomerase OS=Chryseomicrobium excr ementi OX=2041346 GN=queA PE=3 SV=1
MKVEDFDFHLPEELIAQTPLADRTSSKLLVADYPNNELHHTTFQHILDELRAGDCLILNDTKVMPARLMGVKEETGASVEVLLLTQLADDEWETLVKPAKRVKIGTVISFGDGLLTATCTAIKDHGGRVFKMNYDGVFFEVLDQLGEMPLPPYIHEKLEDRDRYQTVYAKEQGSAAAPTAGLHFTSELLEAVEKKGVKIGYVTLHVGLGTFRPVSVDTIESHEMHAEFYRMPQVTADLINETKATGGRVVAVGTTSTRTLESVAKKFDGEVKEDSDWTSIFIYPGFEFKVIDAMITNFHLPKSTLVMLVSALTSRDFILNAYQEAIDQRYRFFSFGDAMLIKGKDFK

SEQ ID NO: 65335 - protein, 340 aa, Chrysiogenales bacterium
  misc_feature (1)..(340): tr|A0A524JN47|A0A524JN47_9BACT S-adenosylmethionine:tRN A ribosyltransferase-isomerase (Fragment) OS=Chrysiogen ales bacterium OX=2528039 GN=queA PE=3 SV=1
MKLTDFDFVLPAERIARFPTDRRDESRLLVLDRKSGKITHATFKQLPDVLAADDFLVMNNSRVRPARLLGRIGGKAVEMLVVRNLGDKKVEVLCQPAKYFNLGAIFCGADGLEAEVLETGRRGRRLLLCNREYEQVLAQGYAPLPPYIKRKSAEAINYRSFDLERYQTIYARNAGSIAAPTAGLHFTPEVLARIRSSNPLLEITLEVGEATFQKIEAEDISRHRMGSEKIRIAAEVAHRILALKEQDKKLLAVGTTSVRALESYALLSEPCQEFDSDIFISPGFHFRMVDKLLTNFHLPRSSLFILAAAFAGQDLLQETYRQAIAQGYRFFSYGDAMLIV

SEQ ID NO: 65336 - protein, 345 aa, Chrysiogenales bacterium
  misc_feature (1)..(345): tr|A0A524PVV3|A0A524PVV3_9BACT S-adenosylmethionine:tRN A ribosyltransferase-isomerase OS=Chrysiogenales bacter ium OX=2528039 GN=queA PE=3 SV=1
MRDDEYSLDDFDFELPPELIAQEPAEKRDESRLLVLDRATGKVTHSRFSRISEFLRPGDLLVFNDARVMHARVPCMRESGGAVELILLAHCGNLRWTAISNRTKKLKPGGRLIPLRGEGVEFRITGRVGDIIELETNVPLTPDALDSIGVVPLPPYITREAAEYDMERYQTVYARASGAVAAPTAGLHFTDDLLRRIDEMGVQTEFVTLLVSWGTFQPVRSKNIAEHKMHFERFDIRDETAVAINKARIEGRRVVAVGTTSLRVLESTFHSGRNIPGEGDTNIFIRPPGKVLSIDALITNFHTPRSTLLMLVSAFAGHDTVMAAYREAVEMRYRFFSYGDAMFII

SEQ ID NO: 65337 - protein, 322 aa, Chthoniobacter flavus
  misc_feature (1)..(322): tr|B4DBL0|B4DBL0_9BACT S-adenosylmethionine:tRNA ribosy ltransferase-isomerase OS=Chthoniobacter flavus Ellin42 8 OX=497964 GN=queA PE=3 SV=1
MLLTSDYDYSLPDDLIASHPLARREDSRMMVLHRAEQRIEHRFFREFPGFLRAGDLVVLNDTRVIPARVFADGGKIELLFLETVREDTWKCLVKPGRKMRLGATVQIRGVTGTVEEILPDGERIIAFTGPVDLDAAGELPLPPYFARAVEPADSERYQTVFARERGAVAAPTAGLHFTPEILAQVPHTFVTLHVGVGTFRPVQVDDLTQHRMHSERFRISEESARAINAAQRLVAIGTTTARVLESQGLPVSACESSTDIFIYPPYQPRAVGALLTNFHLPKSTLLMLVSALAGREFVLRAYAEAIAQRYRFYSYGDCMLIL

SEQ ID NO: 65338 - protein, 179 aa, Chthoniobacterales bacterium
  misc_feature (1)..(179): tr|A0A2W5Z9J9|A0A2W5Z9J9_9BACT S-adenosylmethionine:tRN A ribosyltransferase-isomerase (Fragment) OS=Chthonioba cterales bacterium OX=2201154 GN=DLM52_00830 PE=3 SV=1
MDETLHDYEYQLPRELIAQRPLARRDQSRMMVLRRGRESIEHATFADLPRFISRDDLLVLNDSRVLPARHFSDDGAVEFLFLRKVAPCRWHALVKPGRRFRKGAVTMINGVRAEAGESDEEGAREIILAEDVDVQRAGVMPLPPYIARLSESEDEARYQTVFARTDGSIAAPTAGLHFT

SEQ ID NO: 65339 - protein, 326 aa, Chthoniobacterales bacterium
  misc_feature (1)..(326): tr|A0A2W6ADC9|A0A2W6ADC9_9BACT S-adenosylmethionine:tRN A ribosyltransferase-isomerase OS=Chthoniobacterales ba cterium OX=2201154 GN=queA PE=3 SV=1
MSSRLSDYDYPLPEELIARRPLPRRDESRMMVLHRREERIEHRRFAELGVFLTPGDFLVLNDTRVVTARRFSDDGKIEFLFLERLGQTQWKCLVRPGSKMRAGAVTVIAGAIARVDEVLPEGQRVVSLECEINLWEGGMVPLPPYLRRQGDRDDVERYQTVFAKFPGAVAAPTAGLHFTPELLEKLPHAFITLHVSAGTFQPVKTEAIAEHRMHREEFSISASAAAAINNATRIVAVGTTTVRVLESAARQEDRLFEQKGATDIFIYPPAQIRRVDCLLTNFHLPRSTLLMLVSAFAGREFILAAYQEAIRERYRFYSYGDCMLIV

SEQ ID NO: 65340 - protein, 342 aa, Chthonomonas calidirosea
  misc_feature (1)..(342): tr|S0EVY9|S0EVY9_CHTCT S-adenosylmethionine:tRNA ribosy ltransferase-isomerase OS=Chthonomonas calidirosea (str ain DSM 23976 / ICMP 18418 / T49) OX=1303518 GN=queA PE =3 SV=1
MNAMRTELFDYELPPHLIAQTPLPRGESRLLVLHRKEERIEHRKFSDLPDYLVEGDVLVLNDTRVSARRVQAQRENGKPAEVLLLRPVAETDWEALVHPGLKPGRKLTLIGPNDDRVEAIVVGVTPEGGRLLSLPNREWRDRIASWGEIPLPPYIHQSVEDEERYQTVYGHRPGSAAAPTAGLHFNEALLDALARKGVKRVELTLHISVDTFRPVREENVEEHKMHGEQVMLSEEAAQVINQASGRIVAVGTTCVRALETAAQHARPGQRVAPFQGETHLFITPGYTFRAVDALITNFHLPKSTLLMLVSAFAGRELVLRAYREAVEKEYRFYSFGDAMLIL

SEQ ID NO: 65341 - protein, 360 aa, Ciceribacter sp.
  misc_feature (1)..(360): tr|A0A4Q2TDI5|A0A4Q2TDI5_9RHIZ S-adenosylmethionine:tRN A ribosyltransferase-isomerase OS=Ciceribacter sp. F882 5 OX=2509717 GN=queA PE=3 SV=1
MRVDLFDFDLPDERIALRPVSPRDSARMLVVRPDREPVLEDRHVFDLPSFLSPGDALVFNDTKVIPAQLEGKRLREGGQETPVSATLHMRIGPERWKAFARPGKRIKVGDRIEFGHSGNACLLGTLGAVVEEKGEAGEVTLRFDFSGPALDEAIMTVGHIPLPPYIASKRGEDEKDRTDYQTVYARKEGAVAAPTAGLHFTPALFEALDRAGIERHFVTLHVGAGTFLPVKADDTDDHKMHLETGHVSAETAARLNAVKARGGRIVCVGTTSLRLIESAANASGQIEPWSGATGIFITPGYRFRAVDVLMTNFHLPKSTLFMLVSAFAGLDTMRAAYAHAIESGYRFYSYGDASLLFRKS

SEQ ID NO: 65342 - protein, 349 aa, Citreicella sp.
  misc_feature (1)..(349): tr|A0A357RWN9|A0A357RWN9_9RHOB S-adenosylmethionine:tRN A ribosyltransferase-isomerase OS=Citreicella sp. OX=19 60284 GN=queA PE=3 SV=1
MLLSDFDFPLPEDLIATRPASPRSAARLLVADGARLTDSVVRDLPDWLRPGDRLVLNDTRVIPARLSGLRHRHGAQGDTAAQIELTLLEPRPGGLWAALVKPLKKLREGETVVLSDELSATLEGREDGQGLFRFNLTGEDFDAALARAGAMPLPPYIAAKRPADEQDKTDYQTVWARHSGAVAAPTASLHFDAPLLAALEARGVSFTHVTLHVGAGTFLPVKVEDVTTHRMHGEWGEVTAQAAAEIAATKAAGGRVIPVGTTALRLIETAARDSGQVVPWQGVTDIFIYPGFTFRAADALMTNFHLPKSTLMMLVAAFMGKARIDQVYAHALAERYRFFSYGDASLLIP

SEQ ID NO: 65343 - protein, 349 aa, Citreicella sp.
  misc_feature (1)..(349): tr|D0D3K8|D0D3K8_9RHOB S-adenosylmethionine:tRNA ribosy ltransferase-isomerase OS=Citreicella sp. SE45 OX=50147 9 GN=queA PE=3 SV=1
MKLSDFDFDLPEALIATRPANPRSSARLLVADGDTLTDAVVRDLTQWLRPGDRLVLNDTKVIPARLSGTRERDGAQGLTRAQIEVTLLEPRADGCWAALVKPLKKLREGETVVFSDALSAVLESRDEGQGLLRFNLVGEDFDAALAEAGAMPLPPYIAARRAADAQDKQDYQTVWAERKGAVAAPTASLHFDEPLLESLRAHGVAFTKVTLHVGAGTFLPVKVEDVTTHRMHGEWGEVSDSAAAEIAATKAAGGRVIPVGTTALRLLETAARDTGAIAPWQGVTDIFIYPGFTFRVTDALMTNFHLPKSTLMMLVSALMGQERMKRIYDHAITERYRFFSYGDSSLLIP

SEQ ID NO: 65344 - protein, 349 aa, Citreimonas salinaria
  misc_feature (1)..(349): tr|A0A1H3G3C8|A0A1H3G3C8_9RHOB S-adenosylmethionine:tRN A ribosyltransferase-isomerase OS=Citreimonas salinaria OX=321339 GN=queA PE=3 SV=1
MKLSDFDFDLPDELIATRPAQPRSSARLLVAQGDAITDAVVRDLPDWLRPGDRLVLNDTRVIPARLSGTRTRPGAAGEGTARIEVTLLEPQADGSWAALVRPLRKLREGEVVVFSDTLSATCESKEDGQARLRFNLSGEDFDAALNEAGAMPLPPYIEAKRKADARDREDYQTVWARRSGAVAAPTASLHFDEPLLAALAARGVDFTHVTLHVGAGTFLPVKVDDVTEHKMHGEWGEVTETAAAEIAATKAAGGRVVPVGTTALRLIETAAQGGAIAPFRGVTDIFIYPGFTFRVTDALMTNFHLPRSTLMMLVSALMGRARMMRVYEHAVEDRYRFFSYGDASLLIPD

SEQ ID NO: 65345 - protein, 356 aa, Citrobacter amalonaticus
  misc_feature (1)..(356): tr|A0A3R9CH81|A0A3R9CH81_CITAM S-adenosylmethionine:tRN A ribosyltransferase-isomerase OS=Citrobacter amalonati cus OX=35703 GN=queA PE=3 SV=1
MRVADFSFELPESLIAHYPMPERSSCRLLSLDGPTGELTHGTFTDLLDKLNPGDLLVFNNTRVIPARLFGRKASGGKIEVLVERMLDDKRILAHIRASKAPKPGAELLLGDDESIKATMTARHDALFEVEFDDARTVLDILNAIGHMPLPPYIERPDEEADRELYQTVYSEKPGAVAAPTAGLHFDEPLLEKLREKGVEMAFVTLHVGAGTFQPVRVDTIEDHIMHSEYAEVPQEVVDAVLAAKTRGNRVIAVGTTSVRSLESAAQAAKNALIEPFFGDTQIFIYPGYQYKVIDALVTNFHLPESTLIMLVSAFAGYQHTMNAYKAAVEQHYRFFSYGDAMFITYNPQAISERVGE

SEQ ID NO: 65346 - protein, 356 aa, Citrobacter amalonaticus
  misc_feature (1)..(356): tr|A0A0F6RDT6|A0A0F6RDT6_CITAM S-adenosylmethionine:tRN A ribosyltransferase-isomerase OS=Citrobacter amalonati cus Y19 OX=1261127 GN=queA PE=3 SV=1
MRVTDFSFELPESLIAHYPQPERSSCRLLSLDGPTGALTHGTFTDLLDKLNPGDLLVFNNTRVIPARLFGRKASGGKIEVLVERMLDDKRILAHIRASKAPKPGAELLLGDDESINATMTARHGALFEVEFNDARPVLDILNAIGHMPLPPYIDRPDEDADRELYQTVYSEKPGAVAAPTAGLHFDEPLLEKLREKGIEMAFVTLHVGAGTFQPVRVDTIEDHIMHSEYAEVPQEVVDAVLAAKARGNRVIAVGTTSVRSLESAAQAAKHALIEPFFGDTQIFIYPGYQYNVIDALVTNFHLPESTLIMLVSAFAGYQHTMNAYKAAVEQNYRFFSYGDAMFITYNPQALNERVGE

SEQ ID NO: 65347 - protein, 356 aa, Citrobacter braakii
  misc_feature (1)..(356): tr|A0A1R0G031|A0A1R0G031_CITBR S-adenosylmethionine:tRN A ribosyltransferase-isomerase OS=Citrobacter braakii O X=57706 GN=queA PE=3 SV=1
MRVTDFTFELPESLIAHYPQAERSSCRLLSLDGPTGALTHGTFTDLLDKLNPGDLLVFNNTRVIPARLFGRKASGGKIEVLVERMLDDKRILAHIRASKAPKPGAELLLGDDESIKATMVARHDALFEVEFNDERSVLDILNAIGHMPLPPYIDRPDEDADRELYQTVYSEKPGAVAAPTAGLHFDDPLLAKLRDKGIEMAFVTLHVGAGTFQPVRVDTIEDHIMHSEYAEVPQDVVDAVLAAKARGNRVIAVGTTSVRSLESAAQAAKNDLIEPFFGDTQIFIYPGYKYQVIDALVTNFHLPESTLIMLVSAFAGYKNTMHAYHEAVKAEYRFFSYGDAMFITYNPQAISERVGE

SEQ ID NO: 65348 - protein, 356 aa, Citrobacter braakii
  misc_feature (1)..(356): tr|A0A1V8P0S8|A0A1V8P0S8_CITBR S-adenosylmethionine:tRN A ribosyltransferase-isomerase OS=Citrobacter braakii O X=57706 GN=queA PE=3 SV=1
MRVTDFTFELPEFLIAHYPQAERSSCRLLSLDGPTGALTHGTFTDLLDKLNPGDLLVFNNTRVIPARLFGRKASGGKIEVLVERMLDDKRILAHIRASKAPKPGAELLLGDDESIKATMVARHDALFEVEFNDERSVLDILNAIGHMPLPPYIDRPDEDADRELYQTVYSEKPGAVAAPTAGLHFDDPLLAKLRDKGIEMAFVTLHVGAGTFQPVRVDTIEDHIMHSEYAEVPQDVVDAVLAAKARGNRVIAVGTTSVRSLESAAQAAKNDLIEPFFGDTQIFIYPGYKYQVIDALVTNFHLPESTLIMLVSAFAGYKNTMHAYHEAVKAEYRFFSYGDAMFITYNPQAISERVGE

SEQ ID NO: 65349 - protein, 356 aa, Citrobacter farmeri
  misc_feature (1)..(356): tr|A0A223JN76|A0A223JN76_9ENTR S-adenosylmethionine:tRN A ribosyltransferase-isomerase OS=Citrobacter farmeri O X=67824 GN=queA PE=3 SV=1
MRVTDFSFELPESLIAHYPQPERSRCRLLSLDGPTGALTHGTFTDLLDKLNPGDLLVFNNTRVIPARLFGRKASGGKIEVLVERMLDDKRILAHIRASKAPKPGAELLLGDDENINATMTARHGALFEVEFNDARPVLDILNAIGHMPLPPYIDRPDEDADRELYQTVYSEKPGAVAAPTAGLHFDEPLLNKLREKGIEMAFVTLHVGAGTFQPVRVDTIEDHIMHSEYAEVPQEVVDAVLAAKARGNRVIAVGTTSVRSLESAAQAAKNALIEPFFGDTQIFIYPGYQYNVIDALVTNFHLPESTLIMLVSAFAGYQHTMNAYKAAVEQNYRFFSYGDAMFITYNPQALNERVGE

SEQ ID NO: 65350 - protein, 354 aa, Citrobacter freundii
  misc_feature (1)..(354): tr|A0A2S4QAG7|A0A2S4QAG7_CITFR S-adenosylmethionine:tRN A ribosyltransferase-isomerase OS=Citrobacter freundii OX=546 GN=queA PE=3 SV=1
MRVTDFTFELPESLIAHYPQAERSSCRLLSLDGPTGALTHGTFTDLLDKLNPGDLLVFNNTRVIPARLFGRKASGGKIEVLVERMLDDKRILAHIRASKAPKPGAELLLGDDENINATMVARHDALFEVEFNDERSVLDILNAIGHMPLPPYIDRPDEDADRELYQTVYSEKPGAVAAPTAGLHFDDPLLAKLRDKGIEMAFVTLHVGAGTFQPVRVDTIEDHIMHSEYAEVPQDVVDAVLAAKARGNRVIAVGTTSVRSLESAAQAAKNDLIEPFFGDTQIFIYPGYKYQVIDALVTNFHLPESTLIMLVSAFAGYKNTMHAYHEAVKAEYRFFSYGDAMFITYNPQAISERP

SEQ ID NO: 65351 - protein, 356 aa, Citrobacter freundii
  misc_feature (1)..(356): tr|A0A336QLM7|A0A336QLM7_CITFR S-adenosylmethionine:tRN A ribosyltransferase-isomerase OS=Citrobacter freundii OX=546 GN=queA PE=3 SV=1
MRVTDFTFELPESLIAHYPQAERSSCRLLSLDGPTGALTHGTFTDLLDKLNPGDLLVFNNTRVIPARLFGRKASGGKIEVLVERMLDDKRILAHIRASKAPKPGAELLLGDDESIKATMVARHDALFEVEFNDERSVLDILNAIGHMPLPPYIDRPDEDADRELYQTVYSEKPGAVAAPTAGLHFDDPLLARLREKGIEMAFVTLHVGAGTFQPVRVDTIEDHIMHSEYAEVPQDVVDAVLAAKARGNRVIAVGTTSVRSLESAAQAAKNDLIEPFFGDTQIFIYPGYKYQVIDALVTNFHLPESTLIMLVSAFAGYKNTMHAYHEAVKAEYRFFSYGDAMFITYNPQAISERVGE

SEQ ID NO: 65352 - protein, 356 aa, Citrobacter gillenii
  misc_feature (1)..(356): tr|A0A3E2KWX1|A0A3E2KWX1_9ENTR S-adenosylmethionine:tRN A ribosyltransferase-isomerase OS=Citrobacter gillenii OX=67828 GN=queA PE=3 SV=1
MRVTDFTFELPESLIAHYPQAERSSCRLLSLDGPTGALTHGTFTDLLDKLNPGDLLVFNNTRVIPARLFGRKASGGKIEVLVERMLDDKRILAHIRASKAPKPGAELLLGDDESIKATMVARHDALFEVAFDDERSVLDILNAIGHMPLPPYIDRPDEDADRELYQTVYSEKPGAVAAPTAGLHFDDPLLAKLREKGIEMAFVTLHVGAGTFQPVRVDTIEDHIMHSEYAEVPQDVVDAVLAAKARGNRVIAVGTTSVRSLESAAQAAKNDLIEPFFGDTQIFIYPGYQYNVIDALVTNFHLPESTLIMLVSAFAGYKNTMNAYHEAVKAEYRFFSYGDAMFITYNPQAISERVGE

SEQ ID NO: 65353 - protein, 356 aa, Citrobacter koseri
  misc_feature (1)..(356): tr|A0A427PI33|A0A427PI33_CITKO S-adenosylmethionine:tRN A ribosyltransferase-isomerase OS=Citrobacter koseri OX =545 GN=queA PE=3 SV=1
MRVTDFSFELPESLIAHYPQPERSRCRLLSLDGPTGALTHGTFTDLLDKLNPGDLLVFNNTRVIPARLFGRKASGGKIEVLVERMLDDKRILAHIRASKAPKPGAELLLGDDESINATMTARHGALFEVEFNDARPVLEILNAIGHMPLPPYIDRPDEDADRELYQTVYSEKPGAVAAPTAGLHFDDPLLAALREKGIEMAFVTLHVGAGTFQPVRVETIEDHIMHSEYAEVPQEVVDAVLAAKARGNRIIAVGTTSVRSLESAAQAAKSDLIEPFFGDTQIFIYPGYQYKVIDALVTNFHLPESTLIMLVSAFAGYQHTMNAYKAAVEQNYRFFSYGDAMFITYNPQALNERVGK

SEQ ID NO: 65354 - protein, 356 aa, Citrobacter koseri
  misc_feature (1)..(356): sp|A8AK49|QUEA_CITK8 S-adenosylmethionine:tRNA ribosylt ransferase-isomerase OS=Citrobacter koseri (strain ATCC BAA-895 / CDC 4225-83 / SGSC4696) OX=290338 GN=queA PE =3 SV=1
MRVTDFSFELPESLIAHYPQPERSRCRLLSLDGPTGALTHGTFTDLLDKLNPGDLLVFNNTRVIPARLFGRKASGGKIEVLVERMLDDKRILAHIRASKAPKPGAELLLGDDESINATMTARHGALFEVEFNDARPVLEILNAIGHMPLPPYIDRPDEDADRELYQTVYSEKPGAVAAPTAGLHFDDPLLAALREKGIEMAFVTLHVGAGTFQPVRVETIEDHIMHSEYAEVPQEVVDAVLAAKARGNRIIAVGTTSVRSLESAAQAAKNDLIEPFFGDTQIFIYPGYQYKVIDALVTNFHLPESTLIMLVSAFAGYQHTMNAYKAAVEQNYRFFSYGDAMFITYNPQALNERVGK

SEQ ID NO: 65355 - protein, 356 aa, Citrobacter murliniae
  misc_feature (1)..(356): tr|A0A4V6RTP7|A0A4V6RTP7_9ENTR S-adenosylmethionine:tRN A ribosyltransferase-isomerase OS=Citrobacter murliniae OX=67829 GN=queA PE=3 SV=1
MRVTDFTFELPESLIAHYPQAERSSCRLLSLDGPTGALTHGTFTDLLDKLNPGDLLVFNNTRVIPARLFGRKASGGKIEVLVERMLDDKRILAHIRASKAPKPGAELLLGDDESIKATMVARHDALFEVEFDDERSVLDILNAIGHMPLPPYIDRPDEDADRELYQTVYSEKPGAVAAPTAGLHFDDPLLAKLRDKGIEMAFVTLHVGAGTFQPVRVDTIEDHIMHSEYAEVPQDVVDAVLAAKARGNRVIAVGTTSVRSLESAAQAAKNDLIEPFFGDTQIFIYPGYQYKVIDALVTNFHLPESTLIMLVSAFAGYKNTMNAYHEAVKAEYRFFSYGDAMFITYNPQAISERVGE

SEQ ID NO: 65356 - protein, 354 aa, Citrobacter pasteurii
  misc_feature (1)..(354): tr|A0A0A1RWG5|A0A0A1RWG5_9ENTR S-adenosylmethionine:tRN A ribosyltransferase-isomerase OS=Citrobacter pasteurii OX=1563222 GN=queA PE=3 SV=1
MRVTDFTFELPESLIAHYPQAERSSCRLLSLDGPTGALTHGTFTDLLDKLNPGDLLVFNNTRVIPARLFGRKASGGKIEVLVERMLDDKRILAHIRASKAPKPGAELLLGDDESIKATMVARHDALFEVEFNDERSVLDILNAIGHMPLPPYIDRPDEDADRELYQTVYSEKPGAVAAPTAGLHFDDPLLAKLRDKGIEMAFVTLHVGAGTFQPVRVDTIEDHIMHSEYAEVPQDVVDAVLAAKARGNRVIAVGTTSVRSLESAAQAAKNDLIEPFFGDTQIFIYPGYQYKVIDALVTNFHLPESTLIMLVSAFAGYKNTMHAYHEAVKAEYRFFSYGDAMFITYNPQAISERP

SEQ ID NO: 65357 - protein, 354 aa, Citrobacter portucalensis
  misc_feature (1)..(354): tr|A0A5A9CJH5|A0A5A9CJH5_9ENTR S-adenosylmethionine:tRN A ribosyltransferase-isomerase OS=Citrobacter portucale nsis OX=1639133 GN=queA PE=3 SV=1
MRVTDFTFELPESLIAHYPQAERSSCRLLSLDGPTGALTHGTFTDLLDKLNPGDLLVFNNTRVIPARLFGRKASGGKIEVLVERMLDDKHILAHIRASKAPKPGAELLLGDDESIKATMVARHDALFEVEFNDERSVLDILNAIGHMPLPPYIDRPDEDADRELYQTVYSEKPGAVAAPTAGLHFDDPLLAKLRDKGIEMAFVTLHVGAGTFQPVRVDTIEDHIMHSEYAEVPQDVVDAVLAAKARGNRVIAVGTTSVRSLESAAQAAKNDLIEPFFGDTQIFIYPGYKYQVIDALVTNFHLPESTLIMLVSAFAGYKNTMHAYHEAVKAEYRFFSYGDAMFITYNPQAISERP

SEQ ID NO: 65358 - protein, 354 aa, Citrobacter portucalensis
  misc_feature (1)..(354): tr|A0A4P7UN07|A0A4P7UN07_9ENTR S-adenosylmethionine:tRN A ribosyltransferase-isomerase OS=Citrobacter portucale nsis OX=1639133 GN=queA PE=3 SV=1
MRVTDFTFELPESLIAHYPQAERSSCRLLSLDGPTGALTHGTFTDLLDKLNPGDLLVFNNTRVIPARLFGRKASGGKIEVLVERMLDDKRILAHIRASKAPKPGAELLLGDDESIKATMVARHDALFEVEFNDERSVLDILNAIGHMPLPPYIDRPDEDADRELYQTVYSEKPGAVAAPTAGLHFDDPLLAKLRDKGIEMAFVTLHVGAGTFQPVRVDTIEDHIMHSEYAEVPQDVVDAVLAAKARGNRVIAVGTTSVRSLESAAQAAKNDLIEPFFGDTQIFIYPGYKYQVIDALVTNFHLPESTLIMLVSAFAGYKNTMHAYHEAVKAEYRFFSYGDAMFITYNPQAISERP

SEQ ID NO: 65359 - protein, 356 aa, Citrobacter rodentium
  misc_feature (1)..(356): tr|A0A482PLH8|A0A482PLH8_CITRO S-adenosylmethionine:tRN A ribosyltransferase-isomerase OS=Citrobacter rodentium OX=67825 GN=queA PE=3 SV=1
MRVTDFSFELPESLIAHYPQPERSSCRLLSLDGPTGALTHGTFTDLLAKLNPGDLLVFNNTRVIPARLFGRKASGGKIEVLVERMLDDKRILAHIRASKAPKPGAELLLGDDESINATMTARHGALFEVEFNDARPVLDILNAIGHMPLPPYIDRPDEDADRELYQTVYSEKPGAVAAPTAGLHFDEPLLAALREKGIEMAFVTLHVGAGTFQPVRVDSIEDHIMHSEYAEVPQEVVDAVLAAKARGNRVIAVGTTSVRSLESAAQAAKSDLIEPFFGDTQIFIYPGYQYKVIDALVTNFHLPESTLIMLVSAFAGYQHTMNAYKAAVEQKYRFFSYGDAMFITYNPQALHERVGE

SEQ ID NO: 65360 - protein, 356 aa, Citrobacter sp.; identical to SEQ ID NO: 65345
  misc_feature (1)..(356): tr|A0A3S7D842|A0A3S7D842_9ENTR S-adenosylmethionine:tRN A ribosyltransferase-isomerase OS=Citrobacter sp. CFNIH 10 OX=1920110 GN=queA PE=3 SV=1

SEQ ID NO: 65361 - protein, 356 aa, Citrobacter sp.; identical to SEQ ID NO: 65347
  misc_feature (1)..(356): tr|A0A0J1KWA6|A0A0J1KWA6_9ENTR S-adenosylmethionine:tRN A ribosyltransferase-isomerase OS=Citrobacter sp. MGH10 3 OX=1686378 GN=queA PE=3 SV=1

SEQ ID NO: 65362 - protein, 356 aa, Citrobacter werkmanii
  misc_feature (1)..(356): tr|A0A090TYH4|A0A090TYH4_9ENTR S-adenosylmethionine:tRN A ribosyltransferase-isomerase OS=Citrobacter werkmanii NBRC 105721 OX=1114921 GN=queA PE=3 SV=1
MRVTDFTFELPESLIAHYPQAERSSCRLLSLDGPTGALTHGTFTDLLDKLNPGDLLVFNNTRVIPARLFGRKASGGKIEVLVERMLDDKRILAHIRASKAPKPGAELLLGDDESIKATMVARHDALFEVAFDDERSVLDILNAIGHMPLPPYIDRPDEDADRELYQTVYSEKPGAVAAPTAGLHFDEPLLAKLRDKGIEMAFVTLHVGAGTFQPVRVDTIEDHIMHSEYAEVPQDVVDAVLAAKARGNRVIAVGTTSVRSLESAAQAAKNDLIAPFFGDTQIFIYPGYKYQVIDALVTNFHLPESTLIMLVSAFAGYKNTMHAYHEAVKAEYRFFSYGDAMFITYNPQAISERVGE

SEQ ID NO: 65363 - protein, 356 aa, Citrobacter werkmanii; identical to SEQ ID NO: 65362
  misc_feature (1)..(356): tr|A0A422V5M4|A0A422V5M4_9ENTR S-adenosylmethionine:tRN A ribosyltransferase-isomerase OS=Citrobacter werkmanii OX=67827 GN=queA PE=3 SV=1

SEQ ID NO: 65364 - protein, 354 aa, Citrobacter youngae
  misc_feature (1)..(354): tr|D4BD62|D4BD62_9ENTR S-adenosylmethionine:tRNA ribosy ltransferase-isomerase OS=Citrobacter youngae ATCC 2922 0 OX=500640 GN=queA PE=3 SV=1
MRVTDFTFELPESLIAHYPQAERSSCRLLSLDGPTGALTHGTFTDLLDKLNPGDLLVFNNTRVIPARLFGRKASGGKIEVLVERMLDDKRILAHIRASKAPKPGAELLLGDDESIKATMVARHDALFEVEFDDERSVLDILNAIGHMPLPPYIDRPDEDADRELYQTVYSEKPGAVAAPTAGLHFDERLLAKLREKGIEMAFVTLHVGAGTFQPVRVDTIEDHIMHSEYAEVPQDVVDAVLAAKARGNRVIAVGTTSVRSLESAAQAAKNDLIAPFFGDTQIFIYPGYQYKVIDALVTNFHLPESTLIMLVSAFAGYKNTMHAYHEAVKAEYRFFSYGDAMFITYNPQAISERP

SEQ ID NO: 65365 - protein, 356 aa, Citrobacter youngae
  misc_feature (1)..(356): tr|A0A549VAR0|A0A549VAR0_9ENTR S-adenosylmethionine:tRN A ribosyltransferase-isomerase OS=Citrobacter youngae O X=133448 GN=queA PE=3 SV=1
MRVTDFTFELPESLIAHYPQAERSSCRLLSLDGPTGALTHGTFTDLLDKLNPGDLLVFNNTRVIPARLFGRKASGGKIEVLVERMLDDKRILAHIRASKAPKPGAELLLGDDESIKATMVARHDALFEVEFNDERSVLDILNAIGHMPLPPYIDRPDEDADRELYQTVYSEKPGAVAAPTAGLHFDEPLLAKLRDKGIEMAFVTLHVGAGTFQPVRVDTIEDHIMHSEYAEVPQDVVDAVLAAKARGNRVIAVGTTSVRSLESAAQAAKNDLIEPFFGDTQIFIYPGYQYKVIDALVTNFHLPESTLIMLVSAFAGYKNTMRAYHEAVKAEYRFFSYGDAMFITYNPQAISERVGE

SEQ ID NO: 65366 - protein, 349 aa, Citromicrobium sp.
  misc_feature (1)..(349): tr|A0A0P7ACE7|A0A0P7ACE7_9SPHN S-adenosylmethionine:tRN A ribosyltransferase-isomerase OS=Citromicrobium sp. RC C1885 OX=1647104 GN=queA PE=3 SV=1
MKVDLFDFDLPPERIALRPVAPRDAAKMLVVDGAAPFADRQVRDLPDLLRAGDVLVFNDTRVIPAQLEGERIREGASGAAIGATLHKRIDARRWQAFVRNAKRLREGDVIRFPDGVSVTAEARAEDGSWTLAFAGEEPVQELLARAGAMPLPPYIAQRRAADERDAQDYQTLFADKAGAVAAPTAALHFTPELVERLDAAGIVRETLTLHVGAGTFLPVKADDTAQHKMHAEWGEITAEAAARLNAARAEGRRVIAVGTTSLRLLESAADQNHTIQPFAGDTDIFITPGYEFRAVDGLMTNFHLPKSTLMMLVSALMGRERMMETYAYAIAHEYRFYSYGDSSLLLPPR

SEQ ID NO: 65367 - protein, 349 aa, Citromicrobium sp.
  misc_feature (1)..(349): tr|A0A2E4CTN5|A0A2E4CTN5_9SPHN S-adenosylmethionine:tRN A ribosyltransferase-isomerase OS=Citromicrobium sp. OX =2024827 GN=queA PE=3 SV=1
MKVDLFDFDLPPELIALRPVAPRDAARMLVVDGDAPFADRHVRDLPELLRAGDVLVFNDTRVIPARLEGERIREGASGAAVGATLHKRIDARRWQAFVRNAKRLREGDRIVFPQDVSAIAETRAEDGSWTLAFEGEEPVELLLERAGAMPLPPYIAQRRPTDERDAQDYQTLFAEKAGAVAAPTAALHFTPDLVARLGKAGIATETLTLHVGAGTFLPVKADDTADHSMHAEWGEITPEAAERLNAARAEGRRVIAVGTTSLRLLESAADEDGTIHPFAEDTDIFITPGYRFRAIDGLMTNFHLPKSTLFMLVSALMGRERMLAAYAYAIKNEYRFYSYGDSSLLLPRS

SEQ ID NO: 65368 - protein, 351 aa, Cloacibacillus porcorum
  misc_feature (1)..(351): tr|A0A1B2I4Z4|A0A1B2I4Z4_9BACT S-adenosylmethionine:tRN A ribosyltransferase-isomerase OS=Cloacibacillus porcor um OX=1197717 GN=queA PE=3 SV=1
MERDLTKTAAYDYQLPKELIAQDPAEPRDSSRLLVVHRENGGTEDRIFRDITEYLHPGDLLVMNDTRVLPARVEGVKNNEGGGGAKVEIFFLNPGASGNEWTALVRPGRKLPEGTRVTLGGETEVIVGARLEDGLRTIIFAPEDDPLALIHRFGSTPLPHYITDSHADPERYQTVYAKREKENSVAAPTAGLHFTPELLKKLADMGVPHIFITLQVGLGTFRPVKAENIAEHVMHTEFCEIPPEAAAAIKAAKERGGRVVAVGTTVVRTLESFAQRYGEIVPGVLDTKLFISPGYRFRVIDALITNFHLPMSTLLMLVSAFGGYETMMRVYNEAVEKRYRFFSFGDSMFIE

SEQ ID NO: 65369 - protein, 350 aa, Cloacibacillus sp.
  misc_feature (1)..(350): tr|A0A1Y4G869|A0A1Y4G869_9BACT S-adenosylmethionine:tRN A ribosyltransferase-isomerase OS=Cloacibacillus sp. An 23 OX=1965591 GN=queA PE=3 SV=1
MERDLTKTAAYDYELPKELIAQDPAEPRDSSRLMVVHRDCGATEDRIFRDVTEYLDDGDLLVLNDTRVLPARVKGVKKSGEHGAHVEIFFLNPGGAPNEWTALVRPGRKLPEGTKVALDAETEVVVGARLEDGLRTLIFDEKADPLAIIHKFGKTPLPHYITETHAEPERYQTVYAKAEKENSVAAPTAGLHFTPELLNKLEDKGVPHVFVTLRVGLGTFRPVKAENIADHIMHEEFCEIPRETADAINAAKARGGRVVAVGTTVVRTLESFAMRYGKVVPGALDTRLFISPGFEFRVIDALITNFHLPMSTLLMLVSAFGGYDTMMNAYNEAVRKRYRFFSFGDSMLIE

SEQ ID NO: 65370 - protein, 349 aa, Cloacibacterium normanense
  misc_feature (1)..(349): tr|A0A1E5UD94|A0A1E5UD94_9FLAO S-adenosylmethionine:tRN A ribosyltransferase-isomerase OS=Cloacibacterium norma nense OX=237258 GN=queA PE=3 SV=1
MKTSDFNFHLPEHLLAEHPSEHRDEARLMVLDRKTQTIEHKLFKDVIDYFNEDDLFIFNNTKVFPARLYGNKEKTGAKIEVFLLRELDKETRVWDVLVDPARKIRIGNKLFFTEDESLVAEVIDNTTSRGRTLRFLFDGSYEEFRAKLKELGETPLPKYIKREVEPEDAERYQTIYAKIEGAVAAPTAGLHFSKHLMKRLEIKGINFAEVTLHVGLGTFNPIEVEDLSKHKMECEEAIIDEKTADIINKAADENRRICAVGTTTMRALETSVSSNKKISAYQGWTNKFIYPPYDFGVANAMITNFHTPKSTLIMMIAAFAGTDFIMHAYEEAVKNEYKFYSYGDAMLIL

SEQ ID NO: 65371 - protein, 346 aa, Cloacimonas acidaminovorans
  misc_feature (1)..(346): tr|B0VJ80|B0VJ80_CLOAI S-adenosylmethionine:tRNA ribosy ltransferase-isomerase OS=Cloacimonas acidaminovorans ( strain Evry) OX=459349 GN=queA PE=3 SV=1
MMPDLLATDTYDYYLPKELIAQFPAEKRTDSRLMQVKRQSREIYHHRFTAILELLKEGDLVIINSSKVFPARLFATKETGAKIEILLLHQLNENTWQCIAKPGKKLKSPQWLHFSDNLSGYISQGNSEGIREIQFTCKTDFWDEIKRIGHIPLPPYIERSDTILDSERYQTVYAKENGSIAAPTAGFHFDAEILKALKKKGVLFSEVILHIGIGTFRPVKTKRITDHKMHSELATIPEITAAAINLAKKEGRRVVCVGTTSVRSVESFWQDGEMQSGSKWTDLFIYPGFNFKVTDALLTNFHLPKSTLLMMISAFGGWETIRKAYNIAVQEKYRFFSYGDAMFIED

SEQ ID NO: 65372 - protein, 341 aa, Clostridia bacterium
  misc_feature (1)..(341): tr|A0A523BRJ0|A0A523BRJ0_9FIRM S-adenosylmethionine:tRN A ribosyltransferase-isomerase OS=Clostridia bacterium OX=2044939 GN=queA PE=3 SV=1
MKVSYFDYELPEELIAQEPVYPRDAARLLVVHRETDRMEFRQFQEIVDYLRPGDVLVLNETRVMPARLRGEKESSGGKVEVLLLHPIGPDLWEVLVRPGRRVQAGASLIFAGGRLRASVVEVKPGGRRVLAFTSPEAVAAVIEEIGLVPLPPYIKKPLADSGRYQTVYARIPGSAAAPTAGLHFTPELLARVREAGVAVARVLLHIGLGTFRPVRVENVEEHQMHAEYFQIGAEACEVINRCREGGGRIVAVGTTAVRVLETAADQDGRVRPQEGWADLFIYPGYQFRAVEALVTNFHLPRSTLLMLVCAFAGQERVLRAYQEAVSRRFRFYSFGDAMLII

SEQ ID NO: 65373 - protein, 340 aa, Clostridia bacterium
  misc_feature (1)..(340): tr|A0A2V2CX48|A0A2V2CX48_9FIRM S-adenosylmethionine:tRN A ribosyltransferase-isomerase OS=Clostridia bacterium OX=2044939 GN=queA PE=3 SV=1
MKKSDFYFDLPEELIAQTPLQQRDHSRLLRLDKNSGEIEHCHFYQLPAYLRAGDCLVLNDSRVLPARLLGSRPGGGSVELVLLRDLGAGCWECLSRPGRKTKPGTRLSFGGGELEATVERVAEGGNRIVRFEYEGIFLEVLERLGKMPLPPYIKEELKDSERYQTVYSRELGSAAAPTAGLHFTPELLEKIRAKGVEICYVTLHVGLGTFRPVKEDEIEDHAMHSEFCMIPEETARIVTETKRSGGRVIAVGTTSCRTLESFASADGTLPAASGWTDIFIYPGYKFKCVDGLITNFHLPESTLIMLVSALAGREHVLEAYKAAVEERYRFFSFGDAMIIE

SEQ ID NO: 65374 - protein, 341 aa, Clostridiaceae bacterium
  misc_feature (1)..(341): tr|A0A355SGE0|A0A355SGE0_9CLOT S-adenosylmethionine:tRN A ribosyltransferase-isomerase OS=Clostridiaceae bacter ium OX=1898204 GN=queA PE=3 SV=1
MKLEEFDYNLPEELIAQEPLKQRDQSRLMILHKDTGKIEHRIFKDIIDYLNPGDCLVLNNTRVMPARLYGRREDTGGKIEVLLLKRVEKDKWEVLVNPGRKARIGERIIFGNGELAAKILSHTDAGGRIIEFEYSGIFEEILDRLGEMPLPHYIKKKLADKESYQTVYSKVEGSAAAPTAGLHFTKELLNNIKEKGISIVYITLHVGLGTFRPVKEENIEEHKMHSEYYMIDGLSAITINECRKKGGRIIAAGTTSTRTLETASRPDGIMEAKSGWTDMYIYPGYKFKAVDCLITNFHLPKSSLIMLVSALAGRERILNAYNCAVMNKYRFYSFGDAMFIV

SEQ ID NO: 65375 - protein, 344 aa, Clostridiaceae bacterium
  misc_feature (1)..(344): tr|A0A3R6TY47|A0A3R6TY47_9CLOT S-adenosylmethionine:tRN A ribosyltransferase-isomerase OS=Clostridiaceae bacter ium AF29-16BH OX=2292179 GN=queA PE=3 SV=1
MNLHDFYYDLPQELIAQDPLEDRSSSRLMVLDQETGHIEHHIFREIIDYLNPGDCLVVNNTKVIPARLMGSKVGTDAHIEVLLLKRNENDVWETLVKPGKKAKPGTKISFGDGLLVGEVLDVVEDGNRMIKFTYEGIFEEILDQLGQMPLPPYITHQLKDKNRYQTVYAKHEGSAAAPTAGLHFTPELLQAIKDKGVNIAHVTLHVGLGTFRPVKVENILEHHMHSEFYMVEEDQAKLINETKKNGGRIIAVGTTSCRTLESATGEDGILKAGSGWTEIFIYPGYQFKLIDCLITNFHLPESTLMMLVSALAGRDKIMAAYEEAVKERYRFFSFGDAMFIKKDK

SEQ ID NO: 65376 - protein, 337 aa, Clostridiales bacterium
  misc_feature (1)..(337): tr|A0A3B9QDY8|A0A3B9QDY8_9FIRM S-adenosylmethionine:tRN A ribosyltransferase-isomerase OS=Clostridiales bacteri um UBA9857 OX=2060923 GN=queA PE=3 SV=1
MKTEEFDYHLPEELIAQTPAERRDSSRLLILDRAHKTITHGLFSDIVNYIHPGDALVINNTRVIKARLLGRRRTGGRVEVLLLNPVGRDTWECLVRPGNKMPPGEQVFVGDMVGRIEAKTSYGGRLIKWQYQGRWEDVLERYGEIPLPPYIKTPLKDPERYQTVYAEVPGSAAAPTAGLHFTPSLLETLKSKGVEIVPVTLNVGLGTFRPVKAKYVEEHKMHSEHYEVSEEAAETINRCRESGHRVFAVGTTVVRVLETVGKGGKIVAGKGSTDLFIYPGYQFKAVDCLITNFHLPKSTLLMLVSAFAGKQFVMEAYQEAIKHRYRFFSFGDAMLIL

SEQ ID NO: 65377 - protein, 340 aa, Clostridiales bacterium
  misc_feature (1)..(340): tr|A0A354UDQ4|A0A354UDQ4_9FIRM S-adenosylmethionine:tRN A ribosyltransferase-isomerase OS=Clostridiales bacteri um OX=1898207 GN=queA PE=3 SV=1
MLKKSDFYYDLPEELIAQTPLEPRDSSRLLVYDKKTDKTEEKIFRDITEYFHEGDLLVVNNTKVYPARIYAHAKTGGKMEILLLKRLNLTQWECLVKPGKRAKIGETFTVNEELSFTVLDNADGGGRKIEFIFSGVFEDILSRVGEMPLPPYIKEKLKNQSRYQTVYAKREGSSAAPTAGLHFTKELIQKLKDKGVKFAEVELNVGLGTFRPVKEENVLEHKMHTEHYYIDEQNANLINEYKKNGGRIIAVGTTSVRTLETVADENGFVKPCSGDTSIFIYPPYKFKCVNCLITNFHLPESTLIMLVSAFLTREKTLELYNYAVKEKFRFFSFGDAMLLL

SEQ ID NO: 65378 - protein, 351 aa, Clostridiales Family
  misc_feature (1)..(351): tr|A0A2V2FS97|A0A2V2FS97_9FIRM S-adenosylmethionine:tRN A ribosyltransferase-isomerase OS=Clostridiales Family XIII bacterium OX=2137877 GN=queA PE=3 SV=1
MNINDFDYELPEELIAQHPADKRDASRLLVVHRATGETEHKHFYDIIDYLKPSDCLVLNNSKVIPARLFGVKKETGAKIEFLLVKRIDGDKWETMVRPGKRIKPGDIVSFSDDSLFEAEVLGFGDEGTRIVEFKYEGLFAEKLEEIGRIPLPPYIDRESTSEDKERYQTVYASDSEEGSVAAPTAGLHFTPELLEKAAEKGVKIAYVTLHVGIGTFRPVKCENIEEHQMHFEEYHIDEETARVINETKKNGGRIVSVGTTSTRTLESAAVFNEESGVYEVRAGADSTGIFIYPGYEFKMVDSLITNFHLPKSTLLMLISALYNREDILRIYNMAVKEKYRFFSYGDAMFIE

SEQ ID NO: 65379 - protein, 341 aa, Clostridioides difficile
  misc_feature (1)..(341): sp|Q183N9|QUEA_CLOD6 S-adenosylmethionine:tRNA ribosylt ransferase-isomerase OS=Clostridioides difficile (strai n 630) OX=272563 GN=queA PE=3 SV=1
MKTRDFKFDLPQELIAQVPIEDRASSRLMVLDKETGNIEHKVFRDIIEYLNPGDCLVLNNTRVIPARLIGEKLETGGKIEFLLLKRTEEDTWQALVKPGKRAKVGTKFSFGNGKLIGEVVDLSDEGSRIIKFHYDGIFEEILDELGNMPLPPYITARLDEKERYQTVYSKHNGSAAAPTAGLHFTEELLNKIKEKGVDIAFVTLHVGLGTFRPVKVEDVLNHKMHSEYYMVSQEAADKINRAKENGKNVICVGTTSCRTIESACNEDGKMKETSGWTEIFIYPGYKFKVLDKLITNFHLPESTLIMLVSAICGKDNVLNAYNEAVKERYRFFSFGDAMIIK

SEQ ID NO: 65380 - protein, 341 aa, Clostridioides difficile
  misc_feature (1)..(341): tr|A0A3T1GR50|A0A3T1GR50_CLODI S-adenosylmethionine:tRN A ribosyltransferase-isomerase OS=Clostridioides diffic ile OX=1496 GN=queA PE=3 SV=1
MKTSDFKFDLPQELIAQVPIEDRASSRLMVLDKETGNIEHKVFRDIIEYLNPGDCLVLNNTRVIPARLIGEKLETGGKIEFLLLKRTEEDTWQALVKPGKRAKVGTKFSFGNGKLIGEVVDLSDEGSRIIKFHYDGIFEEILDELGNMPLPPYITARLDEKERYQTVYSKHNGSAAAPTAGLHFTEELLNKIKEKGVDIAFVTLHVGLGTFRPVKVEDVLNHKMHSEYYMVSQEAADKINRAKENGNNVICVGTTSCRTIESACNEDGKMKETSGWTEIFIYPGYKFKVLDKLITNFHLPESTLIMLVSAICGKDNVLNAYNEAVKERYRFFSFGDAMIIK

SEQ ID NO: 65381 - protein, 341 aa, Clostridium aceticum
  misc_feature (1)..(341): tr|A0A0D8IFR0|A0A0D8IFR0_9CLOT S-adenosylmethionine:tRN A ribosyltransferase-isomerase OS=Clostridium aceticum OX=84022 GN=queA PE=3 SV=1
MKTKDFYFDLPEELIAQKPLEKRDQSRLLVLDKKTGEMDHTYFYNILDFLKEGDCIVVNDTRVLPARLIGEKEGTGGKIEFLLLKRKELDTWETLVKPGKKAKVGSRFVFGDGLLQAEVIDIAEEGNRIIKFHYDGVFEELLDQLGKMPLPPYITETLEDNERYQTVYSKNQGSAAAPTAGLHFTEELLEKIKQKGVKIVYITLHVGLGTFRPVKVEDIESHKMHAEYYIIGKEAADTINATKAQGGKVIAVGTTSCRTLESAAIETSKIKEGSGWTDIFIYPGYQFKIVDSLITNFHLPESTLIMLVSALSEKDMIMKAYETAVKERYRFFSFGDAMFIK

SEQ ID NO: 65382 - protein, 341 aa, Clostridium acetireducens
  misc_feature (1)..(341): tr|A0A1E8EWX1|A0A1E8EWX1_9CLOT S-adenosylmethionine:tRN A ribosyltransferase-isomerase OS=Clostridium acetiredu cens DSM 10703 OX=1121290 GN=queA PE=3 SV=1
MKAEEFDFYLPEELIAQYPLEKRDEARLMVVDKKTGQIKHKIFKDIIDYFQPGDCLVLNDTRVIPARLLGVKEGTGGKMEFLLLKRIDKDSWEILVKPGKRAKVGSRFVFGNGELVGEIKSIGEEGSRIVEFQYEGIFEEVLDKLGQMPLPPYIKEKLENKEMYQTVYSKEQGSAAAPTAGLHFTEELLNKIRDIGVNVVFLTLHVGLGTFRPVKVENIEDHNMHSEYYNMSKETADIINKTKENGKKVIAVGTTSSRTLETIGDENGRVKEQSGWTNIFIYPGYKFKIVDELITNFHLPQSTLIMLVSALEGKELIMKAYNEAVKDKYRFFSFGDAMLLK

SEQ ID NO: 65383 - protein, 341 aa, Clostridium acetobutylicum
  misc_feature (1)..(341): sp|Q97GT2|QUEA_CLOAB S-adenosylmethionine:tRNA ribosylt ransferase-isomerase OS=Clostridium acetobutylicum (str ain ATCC 824 / DSM 792 / JCM 1419 / LMG 5710 / VKM B-17 87) OX=272562 GN=queA PE=3 SV=1
MQLEDFDYYLPEELIAQHPCDKRDECRLMVVDKKSGEVEHRIFKDVIDYLNPGDCLVLNDTRVLPARLIGNKVGTGGKMEFLLLKRIDKDTWETLVKPGKRAKVGAEFEFGGGVLKAVIKSIGEDGNRVVEFKYEGIFEEILDKLGQMPLPPYITEELENKEEYQTVYSKNNGSAAAPTAGLHFTNELLDKIRAKGIKTVFLTLHVGLGTFRPVKVENIESHHMHSEYYMLSKESADTINETRKNGGRIISVGTTSTRTLETIADEKGNVREQSGWTDIYIYPGYKYKIVDGLITNFHLPKSTLVMLVSALSSRDNILNAYKIAVENRYRFFSFGDAMFIK

SEQ ID NO: 65384 - protein, 341 aa, Clostridium acidisoli
  misc_feature (1)..(341): tr|A0A1W1XB88|A0A1W1XB88_9CLOT S-adenosylmethionine:tRN A ribosyltransferase-isomerase OS=Clostridium acidisoli DSM 12555 OX=1121291 GN=queA PE=3 SV=1
MQLKDFDFDLPEELIAQHPAAKRDECRLMILDKESGSIEHKVFKDVINYLNPGDCLVMNDTRVIPARLIGTKEGSGGKMEFLLLKRIDKDHWETLVKPGKKAKIGARFEFGEGHLKAEVTEIKEEGNRIVRFEYEGIFEEILDRLGEMPLPPYITEKLEDKEQYQTVYSKNEGSAAAPTAGLHFTNELLDKIRAKGIKTVFLTLHVGLGTFRPVKVEKIEEHHMHSEFYIMSKDTADIINETKAKGGKVFSVGTTSTRTLETIADENGLVKESSGWTDIFIYPGYKYKVVDGLITNFHLPESTLIMLVSALSDREKIMNAYEVAVNERYRFFSFGDAMFIR

SEQ ID NO: 65385 - protein, 341 aa, Clostridium algidicarnis
  misc_feature (1)..(341): tr|A0A2S6G1A1|A0A2S6G1A1_9CLOT S-adenosylmethionine:tRN A ribosyltransferase-isomerase OS=Clostridium algidicar nis DSM 15099 OX=1121295 GN=queA PE=3 SV=1
MKVSDFDFDLPEELIAQYPLKDRAKSRIMVLDKYTGQIEHKIFYDIVDYLNKGDTLVLNNTRVIPARIIGEKEDSGGKIEFLLLKRTEGDSWEALAKPGKRAKVGAIFSFGDGRLKAEVTKVKDDGNRIIKFCYEGIFEEVLDELGQMPLPPYIKATLEDKERYQTVYSKESGSAAAPTAGLHFTKELLENIEKKGVNIAYLTLHVGLGTFRPVKVETIEEHDMHSEYYHIDKENADIINKTKENGGKVIAVGTTSCRTLETLGKDGFPLKESSGWTNIFIYPGYEFKVVDKLITNFHLPESTLIMLVSALAKKENVIKAYEVAIEEKYRFFSFGDAMFIK

SEQ ID NO: 65386 - protein, 341 aa, Clostridium amylolyticum
  misc_feature (1)..(341): tr|A0A1M6CVM1|A0A1M6CVM1_9CLOT S-adenosylmethionine:tRN A ribosyltransferase-isomerase OS=Clostridium amylolyti cum OX=1121298 GN=queA PE=3 SV=1
MEVSEFNFDLPEELIAQHPLEQRDSSRLMVLNKETGNIEHRIFKDILDYLNEGDTLVLNDTRVIPARLIGEKIESGGKIEFLLLKRISQDQWECLAKPGKKAKPGAEFTFGQGKLKAVVKEVLENGNRIIKFKYTGIFEQILDELGQMPLPPYIHESLEDKERYQTVYSKEKGSAAAPTAGLHFTKELLEKIQDKKINIVYVTLHVGLGTFRPVKVDKIEEHEMHSEYYIMSKETADIINDTKRKGKRIIAVGTTSCRTLETIGDECSKVKEQSGWTDIFIYPGYKFKIVDALITNFHLPESTLIMLVSALAGKENVLNAYHTAISKKYRFFSFGDAMFIK

SEQ ID NO: 65387 - protein, 341 aa, Clostridium argentinense
  misc_feature (1)..(341): tr|A0A0C1U6Y2|A0A0C1U6Y2_9CLOT S-adenosylmethionine:tRN A ribosyltransferase-isomerase OS=Clostridium argentine nse CDC 2741 OX=1418104 GN=queA PE=3 SV=1
MKVKDFYFDLPQELIAQVPLEKRDESKLMVVNKINGEIEHKKFKDIIDYFEEGDTLVLNDTRVLPARLHGIKEETGAKMEFLLLRRLEKDIWETLVKPGKRAKLGSRFIFGNGELKAEIIEVLENGNRKVRFEYEGIFEEVLDMLGEMPLPPYITEKLEDRERYQTVYSKEVGSAAAPTAGLHFTEELLEQIKSKGVKVVFITLHVGLGTFRPVKAENIEEHEMHSEYYYLSKETADIINATKEAGKRVIAVGTTSNRTLESVSDENGRVKEASGYTNIFIYPGYKFKIVDALITNFHLPESTLIMLISAFSNKDIVMNAYKIAVENKYRFFSFGDAMFLH

SEQ ID NO: 65388 - protein, 341 aa, Clostridium autoethanogenum
  misc_feature (1)..(341): tr|U5RVE5|U5RVE5_9CLOT S-adenosylmethionine:tRNA ribosy ltransferase-isomerase OS=Clostridium autoethanogenum D SM 10061 OX=1341692 GN=queA PE=3 SV=1
MKVTDFDFYLPEELIAQHPLMQRDEARLMVLDKKTGDIEHKVFKDILDYLNPGDCLVLNDTRVLPARLIGSKEGSGGKMEILLLKRNADDTWETLVKPGKRAKVGSRFDFGDGELKAEIVSVKEDGNRIVKFEYEGIFEEVLDRLGQMPLPPYIKEKLEDKEMYQTVYSKEEGSAAAPTAGLHFTKELLKKIEDKGIKLAFLTLHVGLGTFRPVKVENIEEHNMHSEYYCMTKETADMINETREKGGSIIAVGTTSCRTLETIGDENGKVREQSGWTDIFIYPGYKYKVVDKLITNFHLPQSTLIMLVSALCGREKILNAYNCAVKEKYRFFSFGDAMFLK

SEQ ID NO: 65389 - protein, 341 aa, Clostridium autoethanogenum; identical to SEQ ID NO: 65388
  misc_feature (1)..(341): tr|A0A3M0S5I9|A0A3M0S5I9_9CLOT S-adenosylmethionine:tRN A ribosyltransferase-isomerase OS=Clostridium autoethan ogenum OX=84023 GN=queA PE=3 SV=1

SEQ ID NO: 65390 - protein, 341 aa, Clostridium baratii
  misc_feature (1)..(341): tr|A0A0F3FMF4|A0A0F3FMF4_9CLOT S-adenosylmethionine:tRN A ribosyltransferase-isomerase OS=Clostridium baratii O X=1561 GN=queA PE=3 SV=1
MKVSDFDFYLPEELIAQHPLEKRDTSRLMVLDKKTGEIEHKIFKDIIDYLNEGDTLVLNNTRVMPARLIGEKENTGGKIEFLLLKRLEGDKWECLAKPGKTAKPGRRFTFGDGKLKCEVLEVLETGNRVIEFEYDGIFEEVLDSLGEMPLPPYIHERLEDSERYQTVYSKEKGSAAAPTAGLHFTEELLEQIKAKGVNIAYVTLHVGLGTFRPVKAETIDEHVMHSEFYQVSEETARIVNETKDRGGKIISVGTTSTRTLETIGDENGRIKECSGWTNIFIYPGYKFKVVDRLITNFHLPESTLIMLVSTLAGKDHVLNAYNEAVKERYRFFSFGDAMFIK

SEQ ID NO: 65391 - protein, 341 aa, Clostridium baratii
  misc_feature (1)..(341): tr|A0A174PXQ5|A0A174PXQ5_9CLOT S-adenosylmethionine:tRN A ribosyltransferase-isomerase OS=Clostridium baratii O X=1561 GN=queA PE=3 SV=1
MKVSDFDFYLPEELIAQHPLEKRDTSRLMVLDKKTGEIEHKIFKDIIDYLNEGDTLVLNNTRVMPARLIGEKENTGGKIEFLLLKRLEGDKWECLAKPGKTAKPGRRFTFGDGKLKCEVLEVLETGNRVIEFEYDGIFEEVLDSLGEMPLPPYIHERLEDSERYQTVYSKEKGSAAAPTAGLHFTEELLEQIKAKGVNIAYVTLHVGLGTFRPVKAETIDEHVMHSEFYQVSEETARIVNETKDRGGKIISVGTTSTRTLETIGDENGRIKECSGWTNIFIYPGYKFKVVDNLITNFHLPESTLIMLVSTLAGKDHVLNAYNEAVKERYRFFSFGDAMFIK

SEQ ID NO: 65392 - protein, 341 aa, Clostridium beijerinckii
  misc_feature (1)..(341): sp|A6LTM8|QUEA_CLOB8 S-adenosylmethionine:tRNA ribosylt ransferase-isomerase OS=Clostridium beijerinckii (strai n ATCC 51743 / NCIMB 8052) OX=290402 GN=queA PE=3 SV=1
MNVKDFDFYLPEELIAQHPLEQRDSSRLMVLDKKTGEIKHKKFHDIIEYLNEGDTLVLNNTRVMPARLIGEKEGTGGKIEFLLLKRIEKDRWECLAKPGKSAKVGRKFTFGEGKLKAEVVEVEENGNRIVEFFYDGIFEEVLDSLGEMPLPPYIHERLEDRERYQTVYSKENGSAAAPTAGLHFTKELLQEIKNKGINIVYLTLHVGLGTFRPVKVESLEEHEMHSEFYMLSKESADIINETKKRGNAVISVGTTSTRTLETIGDENGFVKEQSGWTNIFIYPGYKFKVVDKLITNFHLPESTLIMLVSTLAGRENVMNAYEEAVNEKYRFFSFGDAMFIK

SEQ ID NO: 65393 - protein, 341 aa, Clostridium beijerinckii
  misc_feature (1)..(341): tr|A0A0K2MGP0|A0A0K2MGP0_CLOBE S-adenosylmethionine:tRN A ribosyltransferase-isomerase OS=Clostridium beijerinc kii NRRL B-598 OX=1428454 GN=queA PE=3 SV=1
MNVKDFDFYLPEELIAQHPLEQRDSSRLMVLDKKTGEIKHKKFHDIIEYLNEGDTLVLNNTRVMPARLIGEKEGTGGKIEFLLLKRIEKDRWECLAKPGKSAKVGRKFTFGEGKLKAEVVEVKENGNRIVEFFYDGIFEEVLDSLGEMPLPPYIHERLEDRERYQTVYSKENGSAAAPTAGLHFTKELLQEIKNKGINIVYLTLHVGLGTFRPVKVESLEEHEMHSEFYMLSKESADIINETKKRGNAVISVGTTSTRTLETIGDENGFVKEQSGWTNIFIYPGYKFKVVDKLITNFHLPESTLIMLVSTLAGRENVMNAYEEAVNEKYRFFSFGDAMFIK

SEQ ID NO: 65394 - protein, 349 aa, Clostridium bolteae
  misc_feature (1)..(349): tr|A8RIE8|A8RIE8_CLOBW S-adenosylmethionine:tRNA ribosy ltransferase-isomerase OS=Clostridium bolteae (strain A TCC BAA-613 / WAL 16351) OX=411902 GN=queA PE=3 SV=1
MDVKDFDYELPEELIAQDPLEDRSASRLMVLDRETGEIQHRIFKDITEYLRPGDCLVINDTKVIPARLFGVKKDTGAKIEILLLKRRENDVWETLVRPGKKAKPGTVIEFGEGLLTGTVVDTVDDGNRLIQFHYKGIFEEILDQLGQMPLPPYITHQLKDKNRYQTVYARHEGSAAAPTAGLHFTQELLAEIEGMGVKIAHVTLHVGLGTFRPVKVENVQDHHMHSEFYIVEESEAKKVNDTRAAGGRVICVGTTSCRTVESASTEDGVLKAGTGWTEIFIYPGYRFKVLDALITNFHLPQSTLVMLVSALAGREHILDAYREAVKEGYRFFSFGDAMFIAAHPAAEKR

SEQ ID NO: 65395 - protein, 349 aa, Clostridium bolteae
  misc_feature (1)..(349): tr|R5FHR7|R5FHR7_9CLOT S-adenosylmethionine:tRNA ribosy ltransferase-isomerase OS=Clostridium bolteae CAG:59 OX =1263064 GN=queA PE=3 SV=1
MDVKDFDYELPEELIAQDPLEDRSASRLMVLDRETGEIQHRIFKDITEYLRPGDCLVINDTKVIPARLFGVKKDTGAKIEILLLKRRENDIWETLVRPGKKAKPGTVIEFGEGLLTGTVVDTVDDGNRLIQFHYTGIFEEILDQLGQMPLPPYITHQLKDKNRYQTVYARHEGSAAAPTAGLHFTQELLAEIEGMGVKIAHVTLHVGLGTFRPVKVENVQDHHMHSEFYIVEESEAKKVNDTRAAGGRVICVGTTSCRTVESASTEEGVLKAGTGWTEIFIYPGYRFKVLDALITNFHLPQSTLVMLVSALAGREHILDAYREAVKEGYRFFSFGDAMFIAAHPAAEKR

SEQ ID NO: 65396 - protein, 340 aa, Clostridium bornimense
  misc_feature (1)..(340): tr|W6RXJ8|W6RXJ8_9CLOT S-adenosylmethionine:tRNA ribosy ltransferase-isomerase OS=Clostridium bornimense OX=121 6932 GN=queA PE=3 SV=1
MKVSDFDFHLPEELIGQTPYKDRDQCRLLVMDKETGEIEHKHFYDIYDQLEKGDTLVLNDTRVIPARLIGEKEDTKGKMEFLLLKRIDKDKWQTLVKPGKRAKIGATFVFGDGLLKAKVIDISDEGSRIVEFYYEGIFEEVLDKLGEMPLPPYITEKLEDKEAYQTVYSKNSGSAAAPTAGLHFTEELLERIKEKGINIVYVTLHVGLGTFRPVKVEDIENHFMHSEYFEISEESAKVINETKENGGRVICVGTTSIRTVESSSEKGKVIPGSGWTNIFIYPGYEFKVVDALITNFHLPESTLLMLVSALSDREKILNAYNIAVEERYKFFSFGDAMFIK

SEQ ID NO: 65397 - protein, 341 aa, Clostridium botulinum
  misc_feature (1)..(341): sp|B2TMZ3|QUEA_CLOBB S-adenosylmethionine:tRNA ribosylt ransferase-isomerase OS=Clostridium botulinum (strain E klund 17B / Type B) OX=935198 GN=queA PE=3 SV=1
MNVKDFDFYLPEELIAQHPLEKRDTSRLMVLDKETGEISHKNFYDIIDYLNEGDTLVLNNTRVMPARLIGEKEGTGGKIEFLLLKRVEKDRWECLAKPGKSARVGRRFTFGDGKLKAEVVEVKDNGNRIVEFYYEGIFEEVLDSLGEMPLPPYIHERLEDRERYQTVYSKENGSAAAPTAGLHFTEELLHKIKDRGINIAYVTLHVGLGTFRPVKVDTIEDHEMHSEYYHLSKEDAEVINATKKRGNKVISVGTTSTRTLETIADEDGNVKETNGWTNIFIYPGYKFKVVDRLITNFHLPESTLIMLVSTLAGKEHVMNAYEEAVKEKYRFFSFGDAMFIK

SEQ ID NO: 65398 - protein, 341 aa, Clostridium botulinum
  misc_feature (1)..(341): sp|A7GHT7|QUEA_CLOBL S-adenosylmethionine:tRNA ribosylt ransferase-isomerase OS=Clostridium botulinum (strain L angeland / NCTC 10281 / Type F) OX=441772 GN=queA PE=3 SV=1
MKVKDFDFYLPEELIAQHPMEKRDEARLLVLDKETGEIEHKIFKDILDYLTPNDCLVLNNTRVLPARLIGSKEETGGKMEFLLLKRKEKDVWETLVKPGKRAQIGARFIFGNGELEAEVIGMGEEGSRIVKFYYEGIFEEILDQLGQMPLPPYIKEKLDDKEMYQTVYSKEEGSAAAPTAGLHFTEELLKKIEEKGVKLAFLTLHVGLGTFRPVKVEDIQEHVMHSEYYKMDKKTAEIINDTKENGGRVIAVGTTSCRTLETIGDIEGKVGEQSGWTDIFIYPGYKYKVVDALITNFHLPQSTLLMLVSALAGRDNIMNAYNVAVEKEYRFFSFGDAMFIK

SEQ ID NO: 65399 - protein, 341 aa, Clostridium butyricum
  misc_feature (1)..(341): tr|A0A512TLS5|A0A512TLS5_CLOBU S-adenosylmethionine:tRN A ribosyltransferase-isomerase OS=Clostridium butyricum OX=1492 GN=queA PE=3 SV=1
MNVKDFDFYLPEELIAQHPLEKRDTSRLMVLDKKTGEIEHKVFHDIVDYLNAGDTLVLNNTRVMPARLIGEKEETGGKIEFLLLKRVERDRWECLAKPGKSARVGRKFTFGEGKLKAEVVEVKENGNRIVEFHYEGIFEEVLDSLGEMPLPPYIHERLEDRERYQTVYSKENGSAAAPTAGLHFTNQLLEQIKEKGINVVYLTLHVGLGTFRPVKVENLEEHEMHSEFYMLSKESADIINETKRNGGRVISVGTTSTRTLETIGDENGFVKEQSGWTNIFIYPGYKFKVVDNLITNFHLPESTLIMLVSTLAGKEHVMNAYKTAVEEKYRFFSFGDAMFIK

SEQ ID NO: 65400 - protein, 341 aa, Clostridium butyricum; identical to SEQ ID NO: 65399
  misc_feature (1)..(341): tr|W1UB98|W1UB98_CLOBU S-adenosylmethionine:tRNA ribosy ltransferase-isomerase OS=Clostridium butyricum DORA_1 OX=1403941 GN=queA PE=3 SV=1

SEQ ID NO: 65401 - protein, 341 aa, Clostridium cadaveris
  misc_feature (1)..(341): tr|A0A1I2MQ73|A0A1I2MQ73_9CLOT S-adenosylmethionine:tRN A ribosyltransferase-isomerase OS=Clostridium cadaveris OX=1529 GN=queA PE=3 SV=1
MKVTDFDFVLPEELIAQHPLENREQSRLMVVDKNTGELQHKHFYNVVEYFNPGDTLVLNNTRVLPARLIGHKKGSTGKIEFLLLKRLSDNRWEALSKPGKRARVGAEFVFGDGLLEAEVVEVKEDGNRIIEFKYEGIFEEILDRLGQMPLPPYIKETLDDKERYQTVYSKESGSAAAPTAGLHFTNELLKEIKDKGVNIVYLTLHVGLGTFRPVKVENIESHNMHSEFYMLSKESADIINNTKKSGKKVIAVGTTSTRTLETIADEDGTVRESSGWTDIFIYPGYKFKVVDNLITNFHLPESTLIMLVSALAGRENILRAYNTAVEEKYRFFSFGDAMFLH

SEQ ID NO: 65402 - protein, 341 aa, Clostridium carboxidivorans
  misc_feature (1)..(341): tr|C6PXP9|C6PXP9_9CLOT S-adenosylmethionine:tRNA ribosy ltransferase-isomerase OS=Clostridium carboxidivorans P 7 OX=536227 GN=queA PE=3 SV=1
MKVTDFDFYLPEELIAQCPLEKRDEARLMLLDKNTGEIEHKIFKDIIDYLEPGDCLVLNDTRVLPARLIGSKENTGGKIEFLLLKRIDKDKWETLVKPGKRAQVGTRFVFGDGELKAEVVSVEEDGNRIVKFEYEGIFEEVLDKLGQMPLPPYIKEKLEDKEMYQTVYSKEQGSAAAPTAGLHFTEELLKKIEEKGVNIAFLTLHVGLGTFRPVKVENIQDHNMHSEYYTMSKETADIINKTRKNGKSIIAVGTTSCRTLETIGNDEGEVREQSGWTDIFIYPGYKYKMVDKLITNFHLPESTLIMLVSALAGRENVMNAYDTAVKERYRFFSFGDAMFIK

SEQ ID NO: 65403 - protein, 341 aa, Clostridium carnis
  misc_feature (1)..(341): tr|A0A3P6K5V5|A0A3P6K5V5_9CLOT S-adenosylmethionine:tRN A ribosyltransferase-isomerase OS=Clostridium carnis OX =1530 GN=queA PE=3 SV=1
MDVKDFYFYLPEELIAQHPLEKRDTSRLMVLDKESGEITHRTFHDIIEYLNKGDTLVLNNTRVMPARLIGEKEKTGGKIEFLLLKRIEGDKWECLAKPGKSAREGRRFSFGEGKLKAEVVEVLENGNRIVEFYYKGIFEEVLDSLGEMPLPPYIHEKLEDKERYQTVYSKENGSAAAPTAGLHFTKELLEQIKEKGVKIVYLTLHVGLGTFRPVKVEKIEEHEMHSEFYILSKESADIINETKKRGNKVISVGTTSTRTLETIGDENGFVKEQSGWTNIFIYPGYKFKVVDRLITNFHLPESTLIMLVSTLAGKEHTMKAYEEAVKEKYRFFSFGDAMFIK

SEQ ID NO: 65404 - protein, 341 aa, Clostridium cavendishii
  misc_feature (1)..(341): tr|A0A1M6ABL8|A0A1M6ABL8_9CLOT S-adenosylmethionine:tRN A ribosyltransferase-isomerase OS=Clostridium cavendish ii DSM 21758 OX=1121302 GN=queA PE=3 SV=1
MKVNDFYFDLPEELIAQCPLEKRDASRLMVLDRNTGEVEHKSFHDIIDYLNPGDTLVLNNTRVLPARLIGEKEGTGGKIEFLLLKRLHGDTWEALAKPGKRAKIGTVFTFGDGKLKATVKEIGEEGNRIIEFSYDGIFEQVLDELGQMPLPPYIHEKLEDKERYQTVYSKEKGSAAAPTAGLHFTKELIEEIKAKGINIAFLTLHVGLGTFRPVKVDTIENHVMHSEFYQLSKEDADIINKTKQLGHRVISVGTTSTRTLETIADENGIVKPQSGWTDIFIYPGYKYKVVDSLITNFHLPESTLIMLVSALAGKENVMNAYNTAVKEKYRFFSFGDSMFIK

SEQ ID NO: 65405 - protein, 341 aa, Clostridium celatum
  misc_feature (1)..(341): tr|L1QDY4|L1QDY4_9CLOT S-adenosylmethionine:tRNA ribosy ltransferase-isomerase OS=Clostridium celatum DSM 1785 OX=545697 GN=queA PE=3 SV=1
MKTSDFDFYLPEELIAQHPLEKRDYSRLMVLDKETGEIEHKHFYDVLDYLNEGDTLVLNNTRVMPARIIGEKAETGGKIEFLLLKRIEGDKWECLAKPGKRAKIGAEFTFGEGKLKCTVVDIVEEGNRIIEFSYDGIFEQVLDELGEMPLPPYITERLDDRERYQTVYSKEQGSAAAPTAGLHFTKELLEKVKEKGVNIAYVTLHVGLGTFRPVKVDDVNAHVMHSEFYHLDEENANIINETKKRGNKVISVGTTSTRTLETIGDENGFVKEQSGWTNIFIYPGYKFKVVDKLITNFHLPESTLIMLVSALAGKEKVMNAYNEAVKERYRFFSFGDSMIIK

SEQ ID NO: 65406 - protein, 341 aa, Clostridium cellulovorans
  misc_feature (1)..(341): tr|D9SMV8|D9SMV8_CLOC7 S-adenosylmethionine:tRNA ribosy ltransferase-isomerase OS=Clostridium cellulovorans (st rain ATCC 35296 / DSM 3052 / OCM 3 / 743B) OX=573061 GN =queA PE=3 SV=1
MDVKDYYYDLPEELIAQHPSEERDLCRLLLLDKISGETEHKIFKDIIDELHTGDCLVLNDTRVLPARLIGEKEDTHGKMEFLLLKRIEKDTWQALVKPGKRAKIGSRFSFGDGILKAEVVDISDEGSRIIKFFYDGIFEEVLDSLGEMPLPPYITEKLDDKEKYQTVYSKNNGSAAAPTAGLHFTKELLSKIEAKGIKIAYLTLHVGLGTFRPVKVDKIEEHFMHSEYFNVSEETSNIINSTKANGGRIICVGTTSVRTLETVAEKDGKVIAKDGWTDIFIYPGYQYKVVDALITNFHLPESTLLMLVSALSSRENIINAYELAVKEQYRFFSFGDAMFIR

SEQ ID NO: 65407 - protein, 341 aa, Clostridium chauvoei
  misc_feature (1)..(341): tr|S6ELF1|S6ELF1_9CLOT S-adenosylmethionine:tRNA ribosy ltransferase-isomerase OS=Clostridium chauvoei JF4335 O X=1351755 GN=queA PE=3 SV=1
MKVSDFDFYLPEELIAQHPLEKRDSSRLMVLDRKTGKVEHKHFHDIIEYLNEGDTLVLNNTRVLPARLIGEKQGTGGKIEFLLLKRIEGDKWECLAKPGKRAKIGQKFVFGEGKLTCEVVDIIEEGNRIIEFSYEGIFEQVLDELGEMPLPPYITERLEDRERYQTVYSKEKGSAAAPTAGLHFTEDLLKQIKAKGINIAYLTLHVGLGTFRPVKAETIDDHIMHSEYYLLDEEDAKIINETKKRGNRVISVGTTSTRTLETIADENGFVKAQSGWTNIFIYPGYKFKVVDNLITNFHLPESTLIMLVSALAGKENVMNAYKEAVEEKYRFFSFGDSMFIK

SEQ ID NO: 65408 - protein, 341 aa, Clostridium chromiireducens
  misc_feature (1)..(341): tr|A0A1V4IHJ6|A0A1V4IHJ6_9CLOT S-adenosylmethionine:tRN A ribosyltransferase-isomerase OS=Clostridium chromiire ducens OX=225345 GN=queA PE=3 SV=1
MDVKDFDFYLPEELIAQHPLEQRDASRLMVLDKKTGEILHKRFHDVLEYLNKGDTLVLNNTRVMPARLIGEKEGTGGKIEFLLLRRIEKDKWECLAKPGKSARVGRKFTFGEGKLKAEVIEVKEDGNRIVEFFYEGIFEEVLDSLGEMPLPPYIHERLDDRERYQTVYSKETGSAAAPTAGLHFTKELLHEIKERGINVVYLTLHVGLGTFRPVKVESLEEHEMHSEFYMLSKESADIINETKKRGNSVISVGTTSTRTLETIGDENGFVKEQSGWTNIFIYPGYKFKVVDKLITNFHLPESTLIMLVSTLAGRDNVMNAYKEAVNESYRFFSFGDAMFIK

SEQ ID NO: 65409 - protein, 354 aa, Clostridium clostridioforme
  misc_feature (1)..(354): tr|R7PRB5|R7PRB5_9CLOT S-adenosylmethionine:tRNA ribosy ltransferase-isomerase OS=Clostridium clostridioforme C AG:511 OX=1263066 GN=queA PE=3 SV=1
MDVKDFDYELPEELIAQDPLEDRSASRLMVLDRETGEIQHRIFKDITQYLRPGDCLVINDTKVIPARLFGVKKDTGAKIEILLLKRGENDIWETLVRPGKKAKPGTVIEFGEGLLTGTVVDTVDDGNRMIQFYYKGIFEEILDQLGQMPLPPYITHQLKDKNRYQTVYARHEGSAAAPTAGLHFTQELLAEIEGMGVKIAHVTLHVGLGTFRPVKVENVQDHHMHSEFYIVEESEAKKVNDTKAAGGRVICVGTTSCRTVESASTEDGVLKSGTGWTEIFIYPGYRFKVLDALITNFHLPQSTLVMLVSALAGREHILNAYREAVKERYRFFSFGDAMFIAAHPAAEKRQGLWE

SEQ ID NO: 65410 - protein, 341 aa, Clostridium clostridioforme
  misc_feature (1)..(341): tr|R6JDP6|R6JDP6_9CLOT S-adenosylmethionine:tRNA ribosy ltransferase-isomerase OS=Clostridium clostridioforme C AG:132 OX=1263065 GN=queA PE=3 SV=1
MDVKDFDYELPEELIAQDPLEDRSASRLMVLDRETGEIQHRIFKDITQYLRPGDCLVINDTKVIPARLFGVKKDTGAKIEILLLKRGENDIWETLVRPGKKAKPGTVIEFGEGLLTGTVVDTVDDGNRLIQFYYKGIFEEILDQLGQMPLPPYITHQLKDKNRYQTVYARHEGSAAAPTAGLHFTQELLDEIEGMGVKIAHVTLHVGLGTFRPVKVENVQDHHMHSEFYIVEESEAKKVNDTKAAGGRVICVGTTSCRTVESASTEDGVLKSGTGWTEIFIYPGYRFKVLDALITNFHLPQSTLVMLVSALAGREHILNAYREAVKERYRFFSFGDAMIIL

SEQ ID NO: 65411 - protein, 341 aa, Clostridium cochlearium
  misc_feature (1)..(341): tr|A0A1G9HHQ5|A0A1G9HHQ5_CLOCO S-adenosylmethionine:tRN A ribosyltransferase-isomerase OS=Clostridium cochleari um OX=1494 GN=queA PE=3 SV=1
MKAKDFDYYLPEELIAQHPLEKRDECRLMILDKETGQVEHKVFKDILDYLNKGDCLVLNDTRVMPARLIGEKEETRGKMEFLLLKRKDKDTWETLVKPGKRAKIGSRFVFGQGELKAEVIGMEEEGSRIVKFQYEGVFEEVLDRLGQMPLPPYITEKLEDKEKYQTVYSKETGSAAAPTAGLHFTEELLNKIKEKGIKIAFLTLHVGLGTFRPVKEEEIENHIMHSEYYSINKETADIINSTKENGGRVIAVGTTSCRTLETLGTKYGKVIEDSGWTDIFMYPGYEFKVTDALITNFHLPQSTLIMLVSALCGREKVLNAYEIAVKERYRFFSFGDAMFVK

SEQ ID NO: 65412 - protein, 341 aa, Clostridium cochlearium
  misc_feature (1)..(341): tr|A0A240AQS6|A0A240AQS6_CLOCO S-adenosylmethionine:tRN A ribosyltransferase-isomerase OS=Clostridium cochleari um OX=1494 GN=queA PE=3 SV=1
MKAKDFDYYLPEELIAQHPLEKRDECRLMILDKETGQVEHKVFKDILDYLNKGDCLVLNDTRVMPARLIGEKEETRGKMEFLLLKRKDKDTWETLVKPGKRAKIGSRFVFGQGELKAEVIGMGEEGSRIVKFQYEGVFEEVLDRLGQMPLPPYITEKLEDKEKYQTVYSKETGSAAAPTAGLHFTEELLNKIKEKGIKIAFLTLHVGLGTFRPVKEEEIENHIMHSEYYSINKETADIINSTKENGGRVIAVGTTSCRTLETLGTKYGKVIEDSGWTDIFMYPGYEFKVTDALITNFHLPQSTLIMLVSALCGREKVLNAYEIAVKERYRFFSFGDAMFVK

SEQ ID NO: 65413 - protein, 341 aa, Clostridium colicanis
  misc_feature (1)..(341): tr|A0A151AR44|A0A151AR44_9CLOT S-adenosylmethionine:tRN A ribosyltransferase-isomerase OS=Clostridium colicanis DSM 13634 OX=1121305 GN=queA PE=3 SV=1
MKVKDFDFYLPEELIAQHPLEKRDESRLMVVDKNSGNIEHRIFKNIIDYLNEGDCLVLNNTRVLPARLIGEKEGTGGKMEFLLLKRIDVNTWETLVKPGKRAKIGARFIFGGGELKAEVKEIGEDGSRIVQFEYEGVFEEVLDRLGEMPLPPYITETLEDKERYQTVYSKEAGSAAAPTAGLHFTEELLTKIKDKGIKLAFVTLHVGLGTFRPVKVDTIEEHHMHSEYYTMSKETAEIINETKEKGGRVIAVGTTSCRTLETIANEEGRVREQSGWTSIFMYPGYKFKIVDALITNFHLPESTLIMLVSAFSSREIIMKAYEEAVKEKYRFFSFGDAMFLK

SEQ ID NO: 65414 - protein, 342 aa, Clostridium collagenovorans
  misc_feature (1)..(342): tr|A0A1M5YD23|A0A1M5YD23_9CLOT S-adenosylmethionine:tRN A ribosyltransferase-isomerase OS=Clostridium collageno vorans DSM 3089 OX=1121306 GN=queA PE=3 SV=1
MKVKDFDFYLPEESIAQHPAAKRDESRLMVLQKETGEIEHKKFKDIVDYLRAGDCLVLNNTRVLPARLFGAKEDTNGKMEFLLLKRVEKDTWETLVKPGKRAKIGNRFVFGNGELKAEVVGMGEEGSRLVRFEYEGIFEEVLDSLGQMPLPPYITEQLEEKERYQTVYSKEVGSAAAPTAGLHFTEELLQRIKDKGVEIAFVTLHVGLGTFRPVKVDDINDHHMHSEYYQMSQETADTINRCKENGGRLIGVGTTSCRTIESIADENGKLKEQSGWTEIFIYPGYKFKALDCLITNFHLPQSTLIMLVSALAGKEHVMNAYEVAVKDGYRFFSFGDAMFIHK

SEQ ID NO: 65415 - protein, 341 aa, Clostridium combesii
  misc_feature (1)..(341): tr|A0A2G7HJ44|A0A2G7HJ44_9CLOT S-adenosylmethionine:tRN A ribosyltransferase-isomerase OS=Clostridium combesii OX=39481 GN=queA PE=3 SV=1
MKVKDFDFYLPEELIAQHPMEKRDEARLLVLDKETGEIEHKIFKDILDYLTPNDCLVLNNTRVLPARLIGSKEETGGKMEFLLLKRKEKDVWETLVKPGKRAQIGARFIFGNGELKAEVIGMGEEGSRIVKFYYEGIFEEILDQLGQMPLPPYIKEKLDDKEMYQTVYSKEEGSAAAPTAGLHFTEELLKKIEEKGVKLAFLTLHVGLGTFRPVKVEDIQEHVMHSEYYKMDKETAEIINDTRENGGRVIAVGTTSCRTLETIGDIEGKVREQSGWTDIFIYPGYKYKVVDALITNFHLPQSTLLMLVSALAGRDNIMNAYNVAVEKEYRFFSFGDAMFIK

SEQ ID NO: 65416 - protein, 341 aa, Clostridium coskatii; identical to SEQ ID NO: 65388
  misc_feature (1)..(341): tr|A0A166U5M5|A0A166U5M5_9CLOT S-adenosylmethionine:tRN A ribosyltransferase-isomerase OS=Clostridium coskatii OX=1705578 GN=queA PE=3 SV=1

SEQ ID NO: 65417 - protein, 341 aa, Clostridium cylindrosporum
  misc_feature (1)..(341): tr|A0A0J8G0E7|A0A0J8G0E7_CLOCY S-adenosylmethionine:tRN A ribosyltransferase-isomerase OS=Clostridium cylindros porum DSM 605 OX=1121307 GN=queA PE=3 SV=1
MKVSDFYFDLPEELIAQEPLEERDNSRLLVLDKNTGEINHRRFKDILEYLKEGDTLVLNNSRVIPARLFGIKKETGAKIEFVLLKRVDKDKWETLVKPGKKAKPGTEFVFGNGELECKVLETTEIGGRIIEFKYEGIFEEVLDKLGQMPLPPYITKQLEDKERYQTVYSKINGSAAAPTAGLHFTKELMEKIKEKGVNIAYVTLHVGLGTFRPVKVEDINEHIMHSEFYSIDKENADIINNTKRQGKRVITVGTTSTRTLETVGDENGFIKECSGWTDIFIYPGYKFKVVDNLITNFHLPESTLIMLVSTLAGQENTMNAYKEAVEEKYRFFSFGDAMFIK

SEQ ID NO: 65418 - protein, 341 aa, Clostridium diolis; identical to SEQ ID NO: 65392
  misc_feature (1)..(341): tr|A0A2P8RKY7|A0A2P8RKY7_9CLOT S-adenosylmethionine:tRN A ribosyltransferase-isomerase OS=Clostridium diolis OX =223919 GN=queA PE=3 SV=1

SEQ ID NO: 65419 - protein, 341 aa, Clostridium disporicum
  misc_feature (1)..(341): tr|A0A174HTI9|A0A174HTI9_9CLOT S-adenosylmethionine:tRN A ribosyltransferase-isomerase OS=Clostridium disporicu m OX=84024 GN=queA PE=3 SV=1
MKTSDFDFYLPEELIAQHPLERRDYSRLMVLDKETGEIEHKHFYDVINYLNPGDTLVLNNTRVMPARLIGEKAESGGKIEFLLLKRIEGDKWECLAKPGKRAKIGAEFVFGEGKLRCKVVDIIEEGNRIIEFSYDGIFEQVLDELGEMPLPPYITERLDDKERYQTVYSKEKGSAAAPTAGLHFTKELLEEVKEKGINIAYVTLHVGLGTFRPVKVDDVNEHVMHSEFYHLEEEDAKIINETKKRGNKIISVGTTSTRTLETIGDENGFVKAQSGWTNIFIYPGYKFKVVDKLITNFHLPESTLIMLVSALAGKEKVMNAYNEAVKERYRFFSFGDSMIIK

SEQ ID NO: 65420 - protein, 341 aa, Clostridium disporicum
  misc_feature (1)..(341): tr|A0A174DUR5|A0A174DUR5_9CLOT S-adenosylmethionine:tRN A ribosyltransferase-isomerase OS=Clostridium disporicu m OX=84024 GN=queA PE=3 SV=1
MKTSDFNFDLPEELIAQHPLEKRDYSRLMVLDKKTGEIEHRHFYDILEYLKEGDTLVLNNTRVMPARLFGQKEETGAKIEFLLLKRIEGDKWECLAKPGKKAKIGATFTFGEGKLKCKVVDIVEEGNRIIEFSYDGIFEQVLDELGEMPLPPYITERLDDRERYQTVYSKEKGSAAAPTAGLHFTEELLEKVREKGVNIAYLTLHVGLGTFRPVKVDDVNEHVMHSEYYCLSEEDADIINNTKKNGGRVISVGTTSTRTLETIGDENGYVSAKSGWTNIFIYPGYKFKVVDNLITNFHLPESTLIMLVSALAGKEHVMNAYNEAVKEKYRFFSFGDSMFIK

SEQ ID NO: 65421 - protein, 341 aa, Clostridium drakei
  misc_feature (1)..(341): tr|A0A2U8DVK4|A0A2U8DVK4_9CLOT S-adenosylmethionine:tRN A ribosyltransferase-isomerase OS=Clostridium drakei OX =332101 GN=queA PE=3 SV=1
MKVTDFDFYLPEELIAQCPLEKRDEARLMLLDKNTGEIEHKIFKDIIDYLEPGDCLVLNDTRVLPARLIGSKENTGGKIEFLLLKRIDKDKWETLVKPGKRAQVGTRFVFGDGELKAEVVSVEEDGNRIVQFEYEGIFEEVLDKLGQMPLPPYIKEKLEDKEMYQTVYSKEQGSAAAPTAGLHFTEELLKKIEEKGVNIAFLTLHVGLGTFRPVKVENIQDHNMHSEYYTMSKETADIINKAKKSEKKVIAVGTTSCRTLETIGDDKGEVREQSGWTDIFIYPGYKYKVVDRLITNFHLPESTLIMLVSALAGREKIMNAYNTAVKERYRFFSFGDAMFIK

SEQ ID NO: 65422 - protein, 341 aa, Clostridium estertheticum
  misc_feature (1)..(341): tr|A0A1J0GHA7|A0A1J0GHA7_9CLOT S-adenosylmethionine:tRN A ribosyltransferase-isomerase OS=Clostridium esterthet icum subsp. estertheticum OX=1552 GN=queA PE=3 SV=1
MKVKDFYFDLPKELIAQHPLEKRDESRLMVINKTKKEIEHKHFKNIIDYLNPGDCLVLNDTRVLPARLLGFKEGTGGKMEFLLLKRIDINKWETLVKPGKKAKIGATFIFGNGELKATVISDSEGGSRIVEFEYDGIFEEILDKLGEMPLPPYITEKLEDKERYQTVYSREEGSAAAPTAGLHFTKQLLAQIKAKGVEIAFVTLHVGLGTFRPVKAEEVEEHEMHSEHYMLNSETAQLINETKENGGRVIAVGTTSNRTLESIADDNGRVCAKSGWTDIFIYPGYKFKIVDALITNFHLPESTLIMLVSAFADKDLIMGAYEVAVKEKYRFFSFGDAMFLY

SEQ ID NO: 65423 - protein, 341 aa, Clostridium fallax
  misc_feature (1)..(341): tr|A0A1M4UBN4|A0A1M4UBN4_9CLOT S-adenosylmethionine:tRN A ribosyltransferase-isomerase OS=Clostridium fallax OX =1533 GN=queA PE=3 SV=1
MKVTDFDFYLPEELIAQHPLKDRDSSRLMVLDRETGKVSHKVFHDIIDYLNPGDTLVLNNTRVLPARLIGEKAETGGKIEFLLLKRIEGDKWECLAKPGKRAKVGTEFTFGDGKLKGIVREIGEEGNRIVEFIYDGIFETVLDELGQMPLPPYIHERLEDRERYQTVYSKEKGSAAAPTAGLHFTKDLLEKIKEKGVNIAYLTLHVGLGTFRPVKVDTIENHIMHSEYYHLDKEDAKIINDTKENGGRVIAVGTTSTRTLETIGDENGRVKESSGWTDIFIYPGYKFKIVDSLITNFHLPESTLIMLVSALAGKENVMNAYKEAVEEKYRFFSFGDAMFIK

SEQ ID NO: 65424 - protein, 341 aa, Clostridium felsineum
  misc_feature (1)..(341): tr|A0A1S8LKK8|A0A1S8LKK8_9CLOT S-adenosylmethionine:tRN A ribosyltransferase-isomerase OS=Clostridium felsineum DSM 794 OX=1121310 GN=queA PE=3 SV=1
MQLEDFDYYLPEELIAQHPCDKRDECRLMVMNKKSGEVEHKIFKDIINYLNTGDCLVLNDTRVLPARLIGNKMETGGKMEFLLLKRIDKDTWETLVKPGKRAKVGAKFEFGNGILKAEVKSIGEDGNRIVEFQYDGIFEEILDELGQMPLPPYITEELENKEEYQTVYSKNNGSAAAPTAGLHFTNELLNKIRAKGIKTVFLTLHVGLGTFRPVKVENVESHHMHSEFYMLSKESADIINETKKNGGRVISVGTTSTRTLETIADEDGKVREQSGWTDIYIYPGYKYKIVDGLITNFHLPKSTLVMLVSALSSRENILNAYKNAVENKYRFFSFGDAMFIK

SEQ ID NO: 65425 - protein, 341 aa, Clostridium formicaceticum
  misc_feature (1)..(341): tr|A0A1D9FP01|A0A1D9FP01_9CLOT S-adenosylmethionine:tRN A ribosyltransferase-isomerase OS=Clostridium formicace ticum OX=1497 GN=queA PE=3 SV=1
MKTKDFYFDLPEELIAQKPLEKRDQSRLLVLDKKTGEMEHTYFYNILNYLKAGDCLVVNDTRVLPARLIGEKEGTGGKVEFLLLKRKELDTWETLVKPGKKAKLGSRFVFGDGLLQAEVIDIVEEGNRVIKFHYTGVFEEILDQLGKMPLPPYITETLEDNERYQTVYSKNQGSAAAPTAGLHFTEELLEKIKEKGVKIVYITLHVGLGTFRPVKVEDIESHKMHSEYYTISKEAADSINATKAQGGQVIAVGTTSCRTLESAAIEASKIKEGSGWTDIFIYPGYEFKIVDHLITNFHLPESTLIMLVSALSQKDIIMKAYETAVKERYRFFSFGDAMFIK

SEQ ID NO: 65426 - protein, 341 aa, Clostridium frigidicarnis
  misc_feature (1)..(341): tr|A0A1I0VJT4|A0A1I0VJT4_9CLOT S-adenosylmethionine:tRN A ribosyltransferase-isomerase OS=Clostridium frigidica rnis OX=84698 GN=queA PE=3 SV=1
MNVKDFDFYLPEELIAQHPLKERETSRLMVLDRNTGDIDHKHFYDVLNYFNEGDTLVLNNTRVIPARLIGEKADTGGKIEFLLLKRIEGDKWEALAKPGKRARVGREFTFGDGKLKATVVEVLENGNRIIEFSYEGIFEQILDDLGQMPLPPYITETLEDKERYQTVYSKEKGSAAAPTAGLHFTTELLEKIKEKGVNIAYLTLHVGLGTFRPVKVDVIEEHDMHSEFYCLDKENADIINKTKERGNKVIAVGTTSCRTLETIGDGNNRVQEQSGWTDIFIYPGYKFKVVDRLITNFHLPESTLIMLVSALATKENVMNAYSTAVENRYRFFSFGDAMFIK

SEQ ID NO: 65427 - protein, 341 aa, Clostridium gasigenes
  misc_feature (1)..(341): tr|A0A1H0UD01|A0A1H0UD01_9CLOT S-adenosylmethionine:tRN A ribosyltransferase-isomerase OS=Clostridium gasigenes OX=94869 GN=queA PE=3 SV=1
MKVSDFDFELPQELIAQHPLEKRDSSRLMVLDKKTGELNHKNFHDILEYLGCGDTLVLNNTRVMPARLIGEKEETGSKIEFLLLKRIEGDKWECLAKPGKRAKIGQRFIFGDGKLKCVVVDIVEEGNRIIEFSYEGIFEQVLDELGEMPLPPYITERLEDRERYQTVYSKEEGSAAAPTAGLHFTQELLKKIKAKGVNIAYLTLHVGLGTFRPVKVESTDDHVMHSEFYSLTKEDADLINDTKRKGNRVISVGTTSTRTLETIGDENGFVKEDSGWTNIFIYPGYKFKVIDALITNFHLPESTLIMLVSALSTKENVMNAYNEAVKEKYRFFSFGDSMFIQ

SEQ ID NO: 65428 - protein, 341 aa, Clostridium grantii
  misc_feature (1)..(341): tr|A0A1M5SK65|A0A1M5SK65_9CLOT S-adenosylmethionine:tRN A ribosyltransferase-isomerase OS=Clostridium grantii D SM 8605 OX=1121316 GN=queA PE=3 SV=1
MKVKDFDFYLPEELIAQHPMKKRDESRLMVLDKVTGKVQHKVFKDIIDYLEEGDCLVLNDTRVMPARLFGVKKDTQSKIEFLLLKRLNDNKWETLVKPGKKAKIGAEIIFGEGILTGTIVDICEDGSRIIQFNYKGIFEEILDELGQMPLPPYITERLEDKERYQTVYSKEVGSAAAPTAGLHFTKDLMEKIKDKGIKIAFLTLHVGLGTFRPVKVENIDDHHMHSEFYVMTKETAEIINETKKNKGRIIAVGTTSCRTLETVADENGWISEKTGWTDIFIYPGYKFKVVDKMITNFHLPQSTLLMLISALSSQKIIMDAYEEAIEQRYRFFSFGDSMFIK

SEQ ID NO: 65429 - protein, 341 aa, Clostridium haemolyticum
  misc_feature (1)..(341): tr|A0A1V2Y6H0|A0A1V2Y6H0_CLOHA S-adenosylmethionine:tRN A ribosyltransferase-isomerase OS=Clostridium haemolyti cum OX=84025 GN=queA PE=3 SV=1
MKVKDFDFYLPEELIAQHPMEKRDESRLMVVDRISGHIEHKIFKDILGYFNEGDCIVLNNTRVLPARLIGEKENTGGKIEFLLLKRIEGDKWETLVKPGKKAKIGARFVFGLGELKAEVKGMGEDGSRIIEFEYEGIFEEVLDKLGQMPLPPYITEKLDDKERYQTVYSKEKGSAAAPTAGLHFTKELLKDIENKGVKIAFVTLHVGLGTFRPVKVEDIEEHHMHSEYYTMSKETADIINKTKENGGKVIAVGTTSCRTLETIGDENGKVKETSGWTDIFMYPGYKFKIVDRLITNFHLPQSTLLMLVSAFSRRENIMNAYKEAVDEKYRFFSFGDAMFLK

SEQ ID NO: 65430 - protein, 341 aa, Clostridium haemolyticum
  misc_feature (1)..(341): tr|A0A0A0IW94|A0A0A0IW94_CLOHA S-adenosylmethionine:tRN A ribosyltransferase-isomerase OS=Clostridium haemolyti cum NCTC 8350 OX=1443115 GN=queA PE=3 SV=1
MKVKDFDFYLPEELIAQHPMEKRDESRLMVVDRISGHIEHKIFKDILGYFNEGDCLVLNNTRVLPARLIGEKENTGGKIEFLLLKRIEGDNWETLVKPGKKAKIGARFVFGLGELKAEVKGMGEDGSRIIEFEYEGIFEEVLDKLGQMPLPPYITEKLDDKERYQTVYSKEKGSAAAPTAGLHFTKELLKDIENKGVKIAFVTLHVGLGTFRPVKVEDIEEHHMHSEYYTMSKETADIINKTKENGGKVIAVGTTSCRTLETIGDENGKVKETSGWTDIFMYPGYKFKIVDRLITNFHLPQSTLLMLVSAFSRRENIMNAYKEAVDEKYRFFSFGDAMFLK

SEQ ID NO: 65431 - protein, 365 aa, Clostridium hathewayi
  misc_feature (1)..(365): tr|R5U267|R5U267_9CLOT S-adenosylmethionine:tRNA ribosy ltransferase-isomerase OS=Clostridium hathewayi CAG:224 OX=1263067 GN=queA PE=3 SV=1
MNVKDFNFELPQELIAQDPLEDRSSSRLLVLDKKTGEIEHRTFRDILSYLRKGDCLVINDTKVIPARLFGVKEGTEAKIEILLLKRRENDIWETLVKPGKKAKIGTVITFGEGLLTGTVVDIVDEGNRLIQFSYEGIFEEILDRLGQMPLPPYITHQLKDQTRYQTVYAKHEGSAAAPTAGLHFTKELLAEIEAMGVVIAHVTLHVGLGTFRPVKVDEIEDHHMHSEFYIVDEAEAKKVNDTKKNGGRIVCVGTTSCRTVESASSDDGVLKAGSGWTEIFIYPGYRFKTLDCLITNFHLPESTLVMLVSALAGREHVLNAYEEAIRERYRFFSFGDAMFITDLHEGVSSDDGDQTGKETGERTER

SEQ ID NO: 65432 - protein, 341 aa, Clostridium homopropionicum
  misc_feature (1)..(341): tr|A0A0L6ZDR5|A0A0L6ZDR5_9CLOT S-adenosylmethionine:tRN A ribosyltransferase-isomerase OS=Clostridium homopropi onicum DSM 5847 OX=1121318 GN=queA PE=3 SV=1
MKVTDFDFYLPEELIAQHPLEKRDESRLMVISKDTGKIEHKRFKNIIEYLNDGDCLVLNNTRVLPARLIGEKENTGGKMEFLLLKRIDKDTWETLVKPGKRAKVGSKFIFGNGELKAKVKDIGEEGSRIVQFQYEGIFEEVLDKLGQMPLPPYIRERLEDKERYQTVYSKENGSAAAPTAGLHFTEELLKKIKDKGVKIAFVTLHVGLGTFRPVKVENIEEHPMHSEYYTILKEDVELINKTKRNGGRIIAVGTTSCRTLETISTIDGSVREQSGWTNIFIYPGYKFKVVDALITNFHLPQSTLLMLVSAFSSRELILKAYSEAVEEKYRFFSFGDAMIIK

SEQ ID NO: 65433 - protein, 341 aa, Clostridium intestinale
  misc_feature (1)..(341): tr|A0A1M5Z2T9|A0A1M5Z2T9_9CLOT S-adenosylmethionine:tRN A ribosyltransferase-isomerase OS=Clostridium intestina le DSM 6191 OX=1121320 GN=queA PE=3 SV=1
MKVEDFYFDLPEELIAQHPLEDRTSSRLMVLDRETGEVSHKHFYDVIEYFNKGDTLVLNNTRVLPARLIGEKEGTGGRIEFLLLKKVGEDLWECLSKPGKKAKPKARFTFGSGKLTAEVKEVLDNGNRIVKFYYEGLFENVLDDLGEMPLPPYIHEALEDKERYQTVYSKEKGSAAAPTAGLHFTEELLEKIKAKGVNVVYLTLHVGLGTFRPVKVENIEEHDMHSEFYVLSEETAKVINETKKRGNKVISVGTTSTRTLETVGDENGEVKEASGWTNIFIYPGYRFKVVDNLITNFHLPESTLIMLVSTLAGQDNVMKAYKTAVEEKYRFFSFGDAMFIK

SEQ ID NO: 65434 - protein, 341 aa, Clostridium intestinale
  misc_feature (1)..(341): tr|U2N5F6|U2N5F6_9CLOT S-adenosylmethionine:tRNA ribosy ltransferase-isomerase OS=Clostridium intestinale URNW OX=1294142 GN=queA PE=3 SV=1
MKVEDFYFDLPEELIAQHPLEDRTSSRLMVLDRETGEVSHKHFYDVIEYFNEGDTLVLNNTRVLPARLIGQKEGTGGRIEFLLLKKVGEDLWECLSKPGKKAKPKARFTFGSGKLTAEVKEVLDNGNRIVKFYYEGLFENVLDDLGEMPLPPYIHETLDDKERYQTVYSKEKGSAAAPTAGLHFTEELLEKIKAKGVNVVYLTLHVGLGTFRPVKVENIEEHDMHSEYYVLSEETAKIINETKKRGNKVISVGTTSTRTLETVGDENGEVKEASGWTNIFIYPGYKFKVVDNLITNFHLPESTLIMLVSTLAGQGNVMKAYKTAVEEKYRFFSFGDAMFIK

SEQ ID NO: 65435 - protein, 342 aa, Clostridium isatidis
  misc_feature (1)..(342): tr|A0A343JAJ1|A0A343JAJ1_9CLOT S-adenosylmethionine:tRN A ribosyltransferase-isomerase OS=Clostridium isatidis OX=182773 GN=queA PE=3 SV=1
MKVSEFNFYLPEELIAQHPLKERDASRLMVLDKKNGKIEHKKFHDIIDYLNPGDTLVLNNTRVLPARLIGEKESTGGKIEFLLLKRIEGDKWECLAKPGKRAKIGTIFTFGNGRLKCEVVDIAEEGNRIIEFSYDGIFEEVLDELGEMPLPPYITERLEDKERYQTVYSKEEGSAAAPTAGLHFTEKLLNDIKNKGINIAYLTLHVGLGTFRPVKVEDTDDHIMHSEFYQLDEENAKIINETKKRGNKIISVGTTSTRTLETIGDENGFVRAQNGWTDIFIYPGYKFKVVDQLITNFHLPESTLIMLVSALAGKENILRAYNEAVKERYRFFSFGDAMFIKE

SEQ ID NO: 65436 - protein, 341 aa, Clostridium kluyveri
  misc_feature (1)..(341): tr|A0A1L5FC34|A0A1L5FC34_CLOKL S-adenosylmethionine:tRN A ribosyltransferase-isomerase OS=Clostridium kluyveri OX=1534 GN=queA PE=3 SV=1
MEVTDFDFYLPEELIAQKPLKQRDEGRLMVLDKKTGKVCHKVFKDIVDYLNPGDCVVLNDTRVLPARLIGVREDTMGKMEFLLLKRRDNCTWETLVKPGKRARVGNRFNFGDGELMAEVVSINEDGNRIVRFEYNGVFEEILDKLGQIPLPPYIKEKLENKELYQTVYSREEGSAAAPTAGLHFTEELLRELREKGVNLAFLTLHVGLGTFRPVKVENIEEHTMHSEFYSMSKETADMINAAKESGHSVISVGTTSCRTLETIGDENGRVKEQSGWTDIFIYPGYKYKVVDKLITNFHLPKSTLIMLVSAFYGRENTLHAYNVAVKEKYRFFSFGDAMFIK

SEQ ID NO: 65437 - protein, 341 aa, Clostridium kluyveri
  misc_feature (1)..(341): sp|A5N205|QUEA_CLOK5 S-adenosylmethionine:tRNA ribosylt ransferase-isomerase OS=Clostridium kluyveri (strain AT CC 8527 / DSM 555 / NCIMB 10680) OX=431943 GN=queA PE=3 SV=1
MEVTDFDFYLPEELIAQKPLEQRDEGRLMVLDKKTGKVCHKIFKDIVYYLNPGDCVVLNDTRVLPARLIGVREDTMGKIEFLLLKRRDNFTWETLVKPGRRAKVGNRFNFGSGQLKAEVVSINEDGNRIVRFEYNGVFEEILDKLGQIPLPPYIKEKLENKELYQTVYSKEEGSAAAPTAGLHFTEELLRELREKGVNLAFLTLHVGLGTFRPVKVENIEDHAMHSEFYSMSKETADMINAAKESGHSVISVGTTSCRTLETIGDENGRVKEQSGWTDIFIYPGYKYKVVDKLITNFHLPKSTLIMLVSAFYGRENTLHAYNVAVKEKYRFFSFGDAMFIK

SEQ ID NO: 65438 - protein, 344 aa, Clostridium leptum; identical to SEQ ID NO: 62533
  misc_feature (1)..(344): tr|R6N5M4|R6N5M4_9CLOT S-adenosylmethionine:tRNA ribosy ltransferase-isomerase OS=Clostridium leptum CAG:27 OX= 1263068 GN=queA PE=3 SV=1

SEQ ID NO: 65439 - protein, 341 aa, Clostridium liquoris
  misc_feature (1)..(341): tr|A0A2T0AZT8|A0A2T0AZT8_9CLOT S-adenosylmethionine:tRN A ribosyltransferase-isomerase OS=Clostridium liquoris OX=1289519 GN=queA PE=3 SV=1
MQVKDFDYYLPKELIAQCPLEKRDEARLMILDKKSGEIEHKIFKDIIDYLNPGDCLVLNDTRVIPARLIGEKQDTHGKMEFLLLKRIDKDTWETLVKPGKRAKIGTKFSFGNGELTAEIMALGEEGSRIVKFEYDGIFEEVLDRLGQMPLPPYIKEKLEDKEQYQTVYSKEQGSAAAPTAGLHFTEELLQRIKDKGVNLAFLTLHVGLGTFRPVKVDDVLEHHMHSEYYRMTKETAELINKTKEAGKRVIAVGTTSSRTLETIGDESGRVREQSGWTDIFIYPGYKFKIVDALITNFHLPKSTLIMLVSALCGRDKIINAYNIAVKEKYRFFSFGDAMFIK

SEQ ID NO: 65440 - protein, 341 aa, Clostridium ljungdahlii
  misc_feature (1)..(341): tr|A0A166S9R0|A0A166S9R0_9CLOT S-adenosylmethionine:tRN A ribosyltransferase-isomerase OS=Clostridium ljungdahl ii OX=1538 GN=queA PE=3 SV=1
MKVTDFDFYLPEELIAQHPLMQRDEARLMVLDKETGDIEHKVFKDILDYLNPGDCLVLNDTRVLPARLIGAKEGSGGKMEILLLKRNEDDTWETLVKPGKRAKVGSRFDFGDGELKAEIVSVKEDGNRIVKFEYEGIFEEVLDRLGQMPLPPYIKEKLEDKEMYQTVYSKEEGSAAAPTAGLHFTKELLKKIEDKGVKLAFLTLHVGLGTFRPVKVENIEEHNMHSEYYCMTKETADMINETREKGGSIISVGTTSCRTLETIGDENGRVREQSGWTDIFIYPGYKYKVVDKLITNFHLPQSTLIMLVSALCGREKILNAYNCAVKEKYRFFSFGDAMFLK

SEQ ID NO: 65441 - protein, 344 aa, Clostridium ljungdahlii
  misc_feature (1)..(344): tr|D8GRQ8|D8GRQ8_CLOLD S-adenosylmethionine:tRNA ribosy ltransferase-isomerase OS=Clostridium ljungdahlii (stra in ATCC 55383 / DSM 13528 / PETC) OX=748727 GN=queA PE= 3 SV=1
MKILKVTDFDFYLPEELIAQHPLMQRDEARLMVLDKKTGDIEHKVFKDILDYLNPGDCLVLNDTRVLPARLIGSKEGSGGKMEILLLKRNADDTWETLVKPGKRAKVGSRFDFGDGELKAEIVSVKEDGNRIVKFEYEGIFEEVLDRLGQMPLPPYIKEKLEDKEMYQTVYSKEEGSAAAPTAGLHFTKELLKKIEDKGIKLAFLTLHVGLGTFRPVKVENIEEHNMHSEYYCMTKETADMINETREKGGSIIAVGTTSCRTLETIGDENGKVREQSGWTDIFIYPGYKYKVVDKLITNFHLPQSTLIMLVSALCGREKILNAYNCAVKEKYRFFSFGDAMFLK

SEQ ID NO: 65442 - protein, 341 aa, Clostridium luticellarii
  misc_feature (1)..(341): tr|A0A2T0BLL2|A0A2T0BLL2_9CLOT S-adenosylmethionine:tRN A ribosyltransferase-isomerase OS=Clostridium luticella rii OX=1691940 GN=queA PE=3 SV=1
MKVTDFDFYLPKELIAQHPLKQRDEARLMVLDKETGKVEHRVFKDIIDYLNPGDCLVLNDTRVLPARLIGKKEGTGGKMEILLLKRNGDNTWETLVKPGKRARVGDRFDFGDGELKAEISQIKEDGNRIVKFEYEGIFEEVLDRLGQMPLPPYIKEKLKDKEMYQTVYSKEEGSAAAPTAGLHFTEDLLQKIEEKGVKLAFLTLHVGIGTFRPVKVENIEDHDMHSEYYRMSRKTADIINGARKNGHSVISVGTTSCRTLETIADENGEVREQSGWTDIFIYPGYKYKIVDKLITNFHLPQSTLIMLVSALCGRENILNAYQEAVKNRYRFFSFGDAMFIK

SEQ ID NO: 65443 - protein, 341 aa, Clostridium magnum
  misc_feature (1)..(341): tr|A0A162UCQ2|A0A162UCQ2_9CLOT S-adenosylmethionine:tRN A ribosyltransferase-isomerase OS=Clostridium magnum DS M 2767 OX=1121326 GN=queA PE=3 SV=1
MKVTDFDFNLPEELIAQHPMEKRDEARLMVMNKENGEIEHKVFKDIIDYLEPGDCIVLNDTRVLPARLIGSKEGTGGKIEFLLLKRVDKDTWETLVKPGKRAQIGTRFVFGDGELKAEVIGLGEEGSRIVKFEYEGIFEEVLDKLGQMPLPPYITERLEDKEMYQTVYSREQGSAAAPTAGLHFTKELLEKIEGKGVSIAFLTLHVGLGTFRPVKVENIEEHNMHAEYYCMSKATADIINKTKENGKNVIAVGTTSCRTLETIGDESGKVREQSGWTDIFIFPGYKYKVVDKLITNFHLPQSTLIMLVSALAGKENVMNAYETAVREKYKFFSFGDAMFVK

SEQ ID NO: 65444 - protein, 341 aa, Clostridium neonatale
  misc_feature (1)..(341): tr|A0A2A7MHN4|A0A2A7MHN4_9CLOT S-adenosylmethionine:tRN A ribosyltransferase-isomerase OS=Clostridium neonatale OX=137838 GN=queA PE=3 SV=1
MDVKDFDFYLPEELIAQHPLEKRDTSRLMVLDKESGEITHRTFHDIIEYLNKGDTLVLNNTRVMPARLIGEKEKTGGKIEFLLLKRIKGDKWECLAKPGKSAREGRRFSFGEGKLKAEVVEVLENGNRIVEFYYKGIFEEVLDSLGEMPLPPYIHEKLEDKERYQTVYSKENGSAAAPTAGLHFTKELLEQIKEKGVNIVYLTLHVGLGTFRPVKVEKIEEHEMHSEFYILSKESADIINETKKRGNKIISVGTTSTRTLETIGDENGFVKEQSGWTNIFIYPGYKFKVVDILITNFHLPESTLIMLVSTLAGKEHTMKAYEEAVKERYRFFSFGDAMFIK

SEQ ID NO: 65445 - protein, 341 aa, Clostridium nexile
  misc_feature (1)..(341): tr|R6QQ98|R6QQ98_9CLOT S-adenosylmethionine:tRNA ribosy ltransferase-isomerase OS=Clostridium nexile CAG:348 OX =1263069 GN=queA PE=3 SV=1
MRKEDFYFDLPEELIAQDPLEDRSSSRLLVLDKETGKVEHHVFREIIDYLQEGDCLVINDTKVIPARLIGSKIGTDAKIEVLLLKRKENDVWETLVKPGKKAKVGTRISFGDGLLVGEVVDIVEEGNRLIHFEYEGIFEEILDQLGQMPLPPYITHQLEDKNRYQTVYAKHSGSAAAPTAGLHFTPELLKEIEEKGVQIARVTLHVGLGTFRPVKVDNILEHHMHSEFYQIDEEAAEKINRAKESGHRVICVGTTSCRTIESAADKNGKLHATNGWTEIFIYPGYEFKVLDCLITNFHLPESTLVMLVSALAGREQVLSAYEEAVKEKYRFFSFGDAMFIK

SEQ ID NO: 65446 - protein, 341 aa, Clostridium novyi
  misc_feature (1)..(341): tr|A0A386YP90|A0A386YP90_CLONO S-adenosylmethionine:tRN A ribosyltransferase-isomerase OS=Clostridium novyi OX= 1542 GN=queA PE=3 SV=1
MKVKDFDFYLPEELIAQHPMEKRDESRLMVVDRKSGHIEHKIFKDILGYFNEGDCLVLNNTRVLPARLIGEKENTGGKIEFLLLKRIEGDKWETLVKPGKKAKIGARFVFGSGELKAEVKGMGEDGSRIIEFEYEGIFEEVLDKLGQMPLPPYITEKLDDKERYQTVYSKEKGSAAAPTAGLHFTKELLKEIENKGVKIAFVTLHVGLGTFRPVKVEDIEEHHMHSEYYTMSKETADIINKTKENGGKVIAVGTTSCRTLETIGDENGKVKETSGWTDIFMYPGYKFKIVDRLITNFHLPQSTLLMLVSAFSSRENIMNAYKEAVDEKYRFFSFGDAMFLK

SEQ ID NO: 65447 - protein, 341 aa, Clostridium novyi
  misc_feature (1)..(341): tr|A0A072YIM4|A0A072YIM4_CLONO S-adenosylmethionine:tRN A ribosyltransferase-isomerase OS=Clostridium novyi B s tr. NCTC 9691 OX=1443122 GN=queA PE=3 SV=1
MKVKDFDFYLPEELIAQHPMEKRDESRLMVVDRISGHIEHKIFKDILGYFNEGDCLVLNNTRVLPARLIGEKENTGGKIEFLLLKRIEGDKWETLVKPGKKAKIGARFVFGLGELKAEVKGMGEDGSRIIEFEYEGIFEEVLDKLGQMPLPPYITEKLDDKERYQTVYSKEKGSAAAPTAGLHFTKELLKDIENKGVKIAFVTLHVGLGTFRPVKVEDIEEHHMHSEYYTMSKETADIINKTKENGGKVIAVGTTSCRTLETIGDENGKVKETSGWTDIFMYPGYKFKIVDRLITNFHLPQSTLLMLVSAFSRRENIMNAYKEAVDEKYRFFSFGDAMFLK

SEQ ID NO: 65448 - protein, 348 aa, Clostridium oryzae
  misc_feature (1)..(348): tr|A0A1V4I4H9|A0A1V4I4H9_9CLOT S-adenosylmethionine:tRN A ribosyltransferase-isomerase OS=Clostridium oryzae OX =1450648 GN=queA_3 PE=3 SV=1
MKLETFKYDLPEQLIAQQTIYPKHCCRMMYANPKTEEIKDFHFYDFNNFIDSNDVIVVNDTRVLSAVLRGKRQNGSQIEIKMVSRKENNVWDCVVESRKGVEIGERLYFGENSELVGKVINENWCETGWLIKFSINNGSVEDEIKKIGQYFLPLHLPQKLNDNEDYQTVYSKVEGSLQPPTAGLHFTDKYLNFLSEKGIKIIKITQHVGRLDKRLENDNIESHQMYEEHYDVSEEAASEINQARKNGGRIIGIGTTVTRTLETVVDDDGIIHSGSGWTKLYIYPGFKFKAIDALLTNFQSPGITTLILACAFGGTEFTLNAYREAVRRNYRFLEFGDCIFFENTKSHR

SEQ ID NO: 65449 - protein, 344 aa, Clostridium oryzae
  misc_feature (1)..(344): tr|A0A1V4I5C4|A0A1V4I5C4_9CLOT S-adenosylmethionine:tRN A ribosyltransferase-isomerase OS=Clostridium oryzae OX =1450648 GN=queA_2 PE=3 SV=1
MKIDNFNFDLPETLVAKKLCNPRDGARMAVLNRKNNEIVDDYFYNIINYFEEGDLFVINNTKVFPCVLRGRKENGGLIEIKLGSRKDEYIWDCIVESARELKTGEKLFFGDNNEIIANVIERNSFDTGYLMKFDSETNIEEQIEKIGSYFFPIYLPQKIDNPEDYQTIYASEWGSMQPPVAGMHFTDELFKKAKDKNINVCNITLHIGRLDKLALQNGKMEIEEHKMYKEHYILDDDTAKLINKTKENGKRIVAIGTTAVRTLESIADEKGYVHGGEGWTDLYIYPGYKFKIIDALLSNLQPPMTTNLMLACAFGGREQVMNLYEHAVRDNYKFLEYGDCALYI

SEQ ID NO: 65450 - protein, 341 aa, Clostridium paraputrificum
  misc_feature (1)..(341): tr|A0A174RPB6|A0A174RPB6_9CLOT S-adenosylmethionine:tRN A ribosyltransferase-isomerase OS=Clostridium paraputri ficum OX=29363 GN=queA PE=3 SV=1
MKVSDFDFYLPEELIAQHPLEKRDTSRLMVLNKETGEIEHKRFYDIIDYLDKGDTLVLNNTRVLPARLIGEKEHTGGKIEFLLLKRLEGDKWECLAKPGKSAREGRRFTFGDGKLKAEVVEVLENGNRIVQFFYEGIFEEVLDSLGEMPLPPYIHERLEDKERYQTVYSKEEGSAAAPTAGLHFTEELLQKIKDKGINIAYVTLHVGLGTFRPVKVEDIESHDMHSEFYVLDEENAQIINDTKKRGNRVISVGTTSTRTIETIADDNGLVKAQTGWTNIFIYPGYKFKTIDNLITNFHLPESTLIMLVSALAGKEHVLNAYNEAVKEKYRFFSFGDAMFIK

SEQ ID NO: 65451 - protein, 341 aa, Clostridium pasteurianum
  misc_feature (1)..(341): tr|R4K650|R4K650_CLOPA S-adenosylmethionine:tRNA ribosy ltransferase-isomerase OS=Clostridium pasteurianum BC1 OX=86416 GN=queA PE=3 SV=1
MQLKDFDFYLPEELIAQHPAEKRDECRLMVLSKDKGHIENKVFKDIIDYLNPGDCLVLNDTRVIPARLIGNKESSGGKIELLLLKRVNKDSWETLVKPGKKAKVGAKFEFGDGLLTAEVKSIAEEGNRIIEFQYDGIFEEILDKLGQMPLPPYITEKLEDKEQYQTVYSKNEGSAAAPTAGLHFTEELLDKIREKGIKTVFLTLHVGLGTFRPVKVENIEQHHMHSEFYILSKESADIINDVKDKGGRVISVGTTSTRTLETIGDENGRVKESTGWTDIFIYPGYKYKVVDGLITNFHLPESTLIMLVSALSNREIIMNAYETAVKERYRFFSFGDAMFIR

SEQ ID NO: 65452 - protein, 341 aa, Clostridium pasteurianum
  misc_feature (1)..(341): tr|A0A1D9N4J8|A0A1D9N4J8_CLOPA S-adenosylmethionine:tRN A ribosyltransferase-isomerase OS=Clostridium pasteuria num OX=1501 GN=queA PE=3 SV=1
MQLKDFDFDLPEELIAQHPSEKRDECRLMVLNKQTGEIEHKIFKDIIEYLDPKDCLVLNDTRVIPARLIGSKEDSGGKIELLLLKRLNKNTWETLVKPGKKAKVGAKFEFGEGMLKAQVKSIAEEGNRIIEFQYSGIFEEILDKLGQMPLPPYITERLKDREQYQTVYSKNEGSAAAPTAGLHFTEELLDKIRGKGIKIVFLTLHVGLGTFRPVKVDNIQEHHMHSEFYQLSKESADIINKTKEEGGRIISVGTTSTRTLETIGDEQGKVKEASGWTDIFIYPGYKYKVVDGLITNFHLPESTLIMLVSALSNREIIMKAYNTAVREKYRFFSFGDAMFIR

SEQ ID NO: 65453 - protein, 341 aa, Clostridium perfringens
  misc_feature (1)..(341): sp|Q0TP14|QUEA_CLOP1 S-adenosylmethionine:tRNA ribosylt ransferase-isomerase OS=Clostridium perfringens (strain ATCC 13124 / DSM 756 / JCM 1290 / NCIMB 6125 / NCTC 82 37 / Type A) OX=195103 GN=queA PE=3 SV=1
MKVSDFYFELPEELIAQYPLEKRDSSRLMVLDKKTGEIEHRKFHDILEYLNEGDTLVLNNTRVLPARLIGEKEETGGKIEFLLLKRIEGDKWECLAKPGRKAKVGTVFTFGEGKLKAIVREIGEEGNRIIEFKYDGIFEQVLDELGQMPLPPYIHEKLEDKERYQTVYSKEKGSAAAPTAGLHFTEELLKEIKDKGVNIAYLTLHVGLGTFRPVKVDDVNNHVMHSEYYHLDKENAELINKTKEAGKRVIAVGTTSSRTLETIGDENGRVREQSGWTDIFIYPGYKFKIVDNLITNFHLPESTLIMLVSALAGQDNIMNAYNTAVKEKYRFFSFGDSMFIK

SEQ ID NO: 65454 - protein, 341 aa, Clostridium perfringens
  misc_feature (1)..(341): sp|Q0SRN4|QUEA_CLOPS S-adenosylmethionine:tRNA ribosylt ransferase-isomerase OS=Clostridium perfringens (strain SM101 / Type A) OX=289380 GN=queA PE=3 SV=1
MKVSDFYFELPEELIAQYPLEKRDSSRLMVLDKKTGEIEHRKFHDILEYLNEGDTLVLNNTRVLPARLIGEKEETGGKIEFLLLKRIEGDKWECLAKPGRKAKVGTVFTFGEGKLKAIVREIGEEGNRIIEFKYDGIFEQVLDELGQMPLPPYIHEKLEDKERYQTVYSKEKGSAAAPTAGLHFTEDLLKEIKDKGVNIAYLTLHVGLGTFRPVKVDDVNNHVMHSEYYHLDKENAELINKTKEAGKRVIAVGTTSSRTLETIGDENGRVREQSGWTDIFIYPGYKFKIVDNLITNFHLPESTLIMLVSALAGQDNIMNAYNTAVKEKYRFFSFGDSMFIK

SEQ ID NO: 65455 - protein, 341 aa, Clostridium puniceum
  misc_feature (1)..(341): tr|A0A1S8TDY7|A0A1S8TDY7_9CLOT S-adenosylmethionine:tRN A ribosyltransferase-isomerase OS=Clostridium puniceum OX=29367 GN=queA PE=3 SV=1
MNVKDFDFYLPEELIAQHPLEKRDSSKLMVLDKKTGDISHKRFHDIVEYLKEGDTLVLNNTRVMPARLIGEKEETGGKIEFLLLKRVEKDKWECLAKPGKSARLGRKFTFGDGKLKAEVVEVKDNGNRIVEFFYDGIFEEVLDTLGEMPLPPYIHERLEDKERYQTVYSKENGSAAAPTAGLHFTKELLSEIKVKGINIVYLTLHVGLGTFRPVKVESLEEHEMHSEFYMLSKESADIINETKKRGNYVISVGTTSTRTLETIGDENGLVKEQSGWTNIFIYPGYNFKVVDKLITNFHLPESTLIMLVSTLAGRDNVMNAYKEAVNERYRFFSFGDAMFIN

SEQ ID NO: 65456 - protein, 341 aa, Clostridium putrefaciens
  misc_feature (1)..(341): tr|A0A381J802|A0A381J802_9CLOT S-adenosylmethionine:tRN A ribosyltransferase-isomerase OS=Clostridium putrefaci ens OX=99675 GN=queA PE=3 SV=1
MKVSDFDFDLPEGLIAQYPLKDRAKSRIMVLDKYTGEIEHKIFYDVLDYLNKGDTLVLNNTRVIPARIIGEKQDSGGKIEFLLLKRTEGDSWEALAKPGKRAKVGAVFNFGDGRLRAEVTGVKEDGNRIIKFCYEGIFEEVLDELGQMPLPPYIKATLEDKERYQTVYSKESGSAAAPTAGLHFTEELIKAIEEKGVNIAYLTLHVGLGTFRPVKVETIEEHDMHSEYYHIDKENADIINRTKESGGKVIAVGTTSCRTLETLGKDGFPLKESSGWTNIFIYPGYEFKVVDRLITNFHLPESTLIMLVSALAKKENVIKAYELAIEEKYRFFSFGDAMFIK

SEQ ID NO: 65457 - protein, 341 aa, Clostridium ragsdalei
  misc_feature (1)..(341): tr|A0A1A6AQR8|A0A1A6AQR8_9CLOT S-adenosylmethionine:tRN A ribosyltransferase-isomerase OS=Clostridium ragsdalei P11 OX=1353534 GN=queA PE=3 SV=1
MKVTDFDFYLPEELIAQHPLMQRDEARLMVLDKKTGDIEHKVFKDILDYLNPGDCLVLNDTRVLPARLIGAKEGSGGKMEILLLKRNEDDTWETLVKPGKRAKVGSRFGFGDGELKAEIVSVKEDGNRIVKFEYEGIFEEVLDRLGQMPLPPYIKEKLEDKEMYQTVYSKEEGSAAAPTAGLHFTKELLKKIEDRGVKLAFLTLHVGLGTFRPVKVENIEEHNMHSEYYCMTKETADMINGTREKGGSIIAVGTTSCRTLETIGDENGRVREQSGWTDIFIYPGYKYKVVDKLITNFHLPESTLIMLVSALCGREKILNAYNCAVKEKYRFFSFGDAMFLK

SEQ ID NO: 65458 - protein, 341 aa, Clostridium roseum
  misc_feature (1)..(341): tr|A0A1S8MHX8|A0A1S8MHX8_9CLOT S-adenosylmethionine:tRN A ribosyltransferase-isomerase OS=Clostridium roseum OX =84029 GN=queA PE=3 SV=1
MQLEDFDYYLPEELIAQHPCDKRDECRLMVMNKKSGEVEHKIFKDIIDYLNTGDCLVLNDTRVLPARLIGNKIETGGKMEFLLLKRIDKDTWETLVKPGKRAKIGAKFEFGNGILKAEVKSIGEDGNRIVEFQYDGIFEEILDELGQMPLPPYITEELENKEEYQTVYSKNNGSAAAPTAGLHFTNELLNKIRAKGIKTVFLTLHVGLGTFRPVKVENVESHHMHSEFYMLSKESADIINETKKNGGRVISVGTTSTRTLETIADEDGKVREQSGWTDIYIYPGYKYKIVDGLITNFHLPKSTLVMLVSALSSRENILNAYKNAVENKYRFFSFGDAMFIK

SEQ ID NO: 65459 - protein, 341 aa, Clostridium saccharobutylicum
  misc_feature (1)..(341): tr|A0A1S8MZA0|A0A1S8MZA0_CLOSA S-adenosylmethionine:tRN A ribosyltransferase-isomerase OS=Clostridium saccharob utylicum OX=169679 GN=queA PE=3 SV=1
MNVKDFDFYLPEELIAQHPLEKRDTSRLMVLDKESGEIKHRVFHDVVEYLNEGDTLVLNNTRVMPARLIGEKEETGGKIEFLLLKRIEGDKWECLAKPGKSARVGRRFTFGEGKLKAEVIEVKEDGNRIVEFYYDGIFEEVLDSLGEMPLPPYIHERLDDRERYQTVYSKEKGSAAAPTAGLHFTKELLKQIQDKGVNVVYLTLHVGLGTFRPVKVENIEEHDMHSEYYHLSRETAEIINETKRRGNKVISVGTTSTRTLETIGDENGFVKEQSGWTNIFIYPGYKFKVVDRLITNFHLPESTLIMLVSTLAGRDHVLNAYNEAVKEKYRFFSFGDAMFIK

SEQ ID NO: 65460 - protein, 341 aa, Clostridium saccharobutylicum
  misc_feature (1)..(341): tr|U5MTC0|U5MTC0_CLOSA S-adenosylmethionine:tRNA ribosy ltransferase-isomerase OS=Clostridium saccharobutylicum DSM 13864 OX=1345695 GN=queA PE=3 SV=1
MNVKDFDFYLPEELIAQHPLEKRDTSRLMVLDKESGEIKHRVFHDVVEYLNEGDTLVLNNTRVMPARLIGEKEETGGKIEFLLLKRIEGDKWECLAKPGKSARVGRRFTFGEGKLKAEVIEVKEDGNRIVEFYYDGIFEEVLDSLGEMPLPPYIHERLDDRERYQTVYSKEKGSAAAPTAGLHFTKELLKQIQDKGVNVVYLTLHVGLGTFRPVKVENIEEHDMHSEYYHLSKETAEIINETKRRGNKVISVGTTSTRTLETIGDENGFVKEQSGWTNIFIYPGYKFKVVDRLITNFHLPESTLIMLVSTLAGRDHVLNAYNEAVKEKYRFFSFGDAMFIK

SEQ ID NO: 65461 - protein, 349 aa, Clostridium saccharolyticum
  misc_feature (1)..(349): tr|D9R600|D9R600_CLOSW S-adenosylmethionine:tRNA ribosy ltransferase-isomerase OS=Clostridium saccharolyticum ( strain ATCC 35040 / DSM 2544 / NRCC 2533 / WM1) OX=6101 30 GN=queA PE=3 SV=1
MNVRDFNFNLPQELIAQDPLEDRSASRLLVLDKHTGEIQHRHFRDILSYLRKGDCLVINDTKVIPARLFGVKEGTEAKIEILLLKRRENDIWETLVKPGKKAKMGTVISFGEGLLKGTVIDVVEEGNRLIQFSYEGIFEEILDRLGQMPLPPYITHQLKDKNRYQTVYAKHEGSAAAPTAGLHFTKELLKEIEDMGVSIAHVTLHVGLGTFRPVKVDEIEAHHMHSEFYMVEEEEARKVNDAKKNGGRIVCVGTTSCRTVESASGSDGMLRAGSGWTEIFIYPGYRFKLLDCLITNFHLPESTLVMLVSALAGRDHVLHAYEEAIKERYRFFSFGDAMFLTDLQDGQTS

SEQ ID NO: 65462 - protein, 341 aa, Clostridium saccharoperbutylacetonicum
  misc_feature (1)..(341): tr|M1MJ30|M1MJ30_9CLOT S-adenosylmethionine:tRNA ribosy ltransferase-isomerase OS=Clostridium saccharoperbutyla cetonicum N1-4(HMT) OX=931276 GN=queA PE=3 SV=1
MNVKDFDFYLPEELIAQHPLEERDSSRLIVLNKKTGEINHKKFRDIIGYLNEGDTLVLNNTRVMPARLIGEKEETGGKIEFLLLKRVEKDQWECLAKPGKSARVGRRFTFGEGKLKAEVIEVKDNGNRIVEFYYDGIFEEVLDSLGEMPLPPYIHERLDDRERYQTVYSKENGSAAAPTAGLHFTKELLEEIKAKGVNVVYLTLHVGLGTFRPVKVDTIEDHEMHSEFYMLSKETADIINKTKKRGNAVISVGTTSTRTLETIGDENGFVKEQSGWTNIFIYPGYKFKVVDKLITNFHLPESTLIMLVSTLAGKDNVMNAYKEAVNERYRFFSFGDAMFIN

SEQ ID NO: 65463 - protein, 342 aa, Clostridium sartagoforme
  misc_feature (1)..(342): tr|A0A4S2DQ13|A0A4S2DQ13_9CLOT S-adenosylmethionine:tRN A ribosyltransferase-isomerase OS=Clostridium sartagofo rme OX=84031 GN=queA PE=3 SV=1
MKVSDFDFYLPEELIAQHPLEKRDASRLMVLDKKTGSIEHKSFHDVIDYLNEGDTLVLNNTRVMPARLIGEKENTGGKIEFLLLKRIEGDKWECLAKPGKRAKIGQRFTFGEGKLKCEVVDIVEEGNRIIEFSYDGIFEQVLDELGEMPLPPYITERLEDKERYQTVYSKEKGSAAAPTAGLHFTEELLKEIKAKGINIAYLTLHVGLGTFRPVKVDDINEHIMHSEFYHLDKENADIINETKKRGNKVIAVGTTSTRTLETIGDENGFVREQSGWTDIFLYPGYKYKVIDELITNFHLPESTLIMLVSALAGKENVMNAYNEAVKERYRFFSFGDSMLIKE

SEQ ID NO: 65464 - protein, 342 aa, Clostridium sartagoforme
  misc_feature (1)..(342): tr|R9C0E0|R9C0E0_9CLOT S-adenosylmethionine:tRNA ribosy ltransferase-isomerase OS=Clostridium sartagoforme AAU1 OX=1202534 GN=queA PE=3 SV=1
MKVSDFDFYLPEELIAQHPLEKRDSSRLMILDKKTGVIKHKYFHDVIEYLNEGDTLVLNNTRVMPARLIGEKEETGGKIEFLLLKRIQGDKWECLAKPGKRAKIGQKFTFGEGKLTCTVVDIVEEGNRIIEFSYDGIFEQVLDELGEMPLPPYITEKLQDKERYQTVYSKEKGSAAAPTAGLHFTEELLQQIRAKGVNIAYLTLHVGLGTFRPVKVEDINEHIMHSEYYVLDRENADIINKTKKNGNKIIAVGTTSTRTLETIGDENGFVREQSGWTDIFIYPGYKYKVIDELITNFHLPESTLIMLVSALAGKENVMNAYNEAVKEKYRFFSFGDSMLIKE

SEQ ID NO: 65465 - protein, 341 aa, Clostridium scatologenes
  misc_feature (1)..(341): tr|A0A0E3MBP8|A0A0E3MBP8_CLOSL S-adenosylmethionine:tRN A ribosyltransferase-isomerase OS=Clostridium scatologe nes OX=1548 GN=queA PE=3 SV=1
MKVTDFDFYLPEQLIAQCPLEKRDEARLMLLDKNTGEIEHKIFKDIINYLEPGDCLVLNDTRVLPARLIGSKENTGGKIEFLLLKRIDKDKWETLVKPGKRAQVGTRFVFGDGELKAEVVSVEEDGNRIVQFEYEGIFEEVLDKLGQMPLPPYIKEKLEDKEMYQTVYSKEQGSAAAPTAGLHFTEELLKKIEEKGVNIAFLTLHVGLGTFRPVKVENIQDHNMHSEYYTMSKETADIINKSKKSGKKVIAVGTTSCRTLETIGDDKGEVREQSGWTDIFIYPGYKYKVVDRLITNFHLPESTLIMLVSALAGREKIMNAYNTAVKERYRFFSFGDAMFIK

SEQ ID NO: 65466 - protein, 343 aa, Clostridium scindens
  misc_feature (1)..(343): tr|B0NJ87|B0NJ87_CLOS5 S-adenosylmethionine:tRNA ribosy ltransferase-isomerase OS=Clostridium scindens (strain ATCC 35704 / DSM 5676 / VPI 13733 / 19) OX=411468 GN=qu eA PE=3 SV=1
MKRQDFYYELPEELIAQDPLEDRSSSRLLVLDKESGAVSHHVFKEITDYLHEGDCLVINDTKVIPARLIGSKVGTEAKIEILLLKRKENNIWETLVKPGKKAKIGTKISFGEGLLVGEVVDIVDEGNRLIQFTYEGIFEEILDKLGQMPLPPYITHQLEDKNRYQTVYATHTGSAAAPTAGLHFTPELLEEIERKGIDIARITLHVGLGTFRPVKVDEITEHHMHSEFFQIDEEAAMKINRAKDSGKRVICVGTTSCRTIESAADETGHLKACSGWTEIFIYPGYQFKILDCLITNFHLPESTLIMLVSALAGREHVLAAYEEAVKERYRFFSFGDAMLIGEI

SEQ ID NO: 65467 - protein, 341 aa, Clostridium septicum
  misc_feature (1)..(341): tr|A0A386PJP6|A0A386PJP6_CLOSE S-adenosylmethionine:tRN A ribosyltransferase-isomerase OS=Clostridium septicum OX=1504 GN=queA PE=3 SV=1
MKVSDFDFYLPEELIAQHPLERRDSSRLMVLDRNTGDVEHKHFHDIIEYLNEGDTIVLNNTRVMPARLIGEKEGTGGKIEFLLLKRIEGDKWECLAKPGKKAKIGQKFVFGSGKLNCEVIDIIEEGNRIIEFSYEGIFEQVLDELGEMPLPPYITERLEDRERYQTVYSKEKGSAAAPTAGLHFTEELLNEIKAKGINIAYLTLHVGLGTFRPVKAETIDEHVMHSEYYSLDEKDAEIINDTKIRGNRVISVGTTSTRTLETIANEDGLVRPQSGWTNIFIYPGYKFKVVDNLITNFHLPESTLIMLVSALAGKENVMNAYKEAVEEKYRFFSFGDSMFIK

SEQ ID NO: 65468 - protein, 341 aa, Clostridium sp.
  misc_feature (1)..(341): tr|A0A099S5R7|A0A099S5R7_9CLOT S-adenosylmethionine:tRN A ribosyltransferase-isomerase OS=Clostridium sp. HMP27 OX=1487921 GN=queA PE=3 SV=1
MQVKDFDYYLPEELIAQHPTAKRDEARLMILDKATGELEHKVFKDIIDYLKPGDCLVLNDTRVLPARLIGEKEETHGKIEFLLLKRTDKDTWETLVKPGKRAKIGSKFVFGNGELNAEVIGLGEEGSRIVRFQYEGIFEEVLDRLGQMPLPPYITETLEDKEMYQTVYSKEQGSAAAPTAGLHFTEELLEDIKNKGIKLAFLTLHVGLGTFRPVKVDEIENHTMHSEYYSMTKETAEIINSTKEAGGRVIAVGTTSNRTLETIADAYGRVKEQSGWTDIFIYPGYKFKVVDALITNFHLPQSTLLMLISALAGRDKIMNAYETAVKEKYRFFSFGDAMFIK

SEQ ID NO: 65469 - protein, 344 aa, Clostridium sp.
  misc_feature (1)..(344): tr|R6LZQ5|R6LZQ5_9CLOT S-adenosylmethionine:tRNA ribosy ltransferase-isomerase OS=Clostridium sp. CAG:302 OX=12 62793 GN=queA PE=3 SV=1
MKTDDFDYYLPEELIAQVPLEHREESRLLVMDRDTGKLEDKKFYNIVDYLHKGDVLVLNDTKVMPARLIGEKEDTGAIIEVLLLKNIDGNNWECLVKPAKRIHKDTIVSFGNGLLKAKCTGVNDEGIRNFEFIYDGIFYEILDKLGTMPLPPYIKTKLDDQSRYQTVYAKNIGSAAAPTAGLHFTKELLKQIEDIGVTVCYITLHVGLGTFRPVNVEDVTKHKMHSEFYSMNKVAADILNKAKEENRCIVAVGTTTTRTLETIMSKYNTFKECNGWTDIFIYPGYEFKGIDSLITNFHLPKSTLIMLVSALAGKENIMNAYKHAVEEKYRFFSFGDAMFIKKNK

SEQ ID NO: 65470 - protein, 341 aa, Clostridium sporogenes
  misc_feature (1)..(341): tr|A0A1V9IRT1|A0A1V9IRT1_CLOSG S-adenosylmethionine:tRN A ribosyltransferase-isomerase OS=Clostridium sporogene s OX=1509 GN=queA PE=3 SV=1
MKVKDFDFYLPEELIAQHPMEKRDEARLLVLDKETGEIEHKIFKDILDYLTPNDCLVLNNTRVLPARLIGSKEETGGKMEFLLLKRKEKDVWETLVKPGKRAQIGARFIFGNGELKAEVIGMGEEGSRIVKFYYEGIFEEILDQLGQMPLPPYIKEKLDDKEMYQTVYSKEEGSAAAPTAGLHFTEELLKKIREKGVKLAFLTLHVGLGTFRPVKVEDIQEHVMHSEYYKMDKETAEIINDTKENGGRVIAVGTTSCRTLETIGDIEGKVREQSGWTDIFIYPGYKYKVVDALITNFHLPQSTLLMLVSALAGRDNIMNAYNVAVEKEYRFFSFGDAMFIK

SEQ ID NO: 65471 - protein, 341 aa, Clostridium sporogenes
  misc_feature (1)..(341): tr|A0A1V9I7E3|A0A1V9I7E3_CLOSG S-adenosylmethionine:tRN A ribosyltransferase-isomerase OS=Clostridium sporogene s OX=1509 GN=queA PE=3 SV=1
MKVKDFDFYLPEELIAQHPMEKRDEARLLVLDKKTGEIEHKIFKDILDYLTPNDCLVLNNTRVLPARLIGSKEETGGKMEFLLLKRTGNDEWETLVKPGKRAQIGAKFIFGNGELKAEVIAMGEEGSRIVKFYYEGIFEEILDQLGQMPLPPYIKEKLDDKEMYQTVYSKEEGSAAAPTAGLHFTEELLEKIKEKGVKLAFLTLHVGLGTFRPVKVEEIQEHIMHSEYYKMDKETAKIINTTREKGGRVIAVGTTSCRTLETIGDIEGKVKEQSGWTDIFIYPGYKYKVVDALITNFHLPQSTLLMLVSALAGRDNIMNAYNMAVEKEYRFFSFGDAMFIK

SEQ ID NO: 65472 - protein, 342 aa, Clostridium sulfidigenes
  misc_feature (1)..(342): tr|A0A084J951|A0A084J951_9CLOT S-adenosylmethionine:tRN A ribosyltransferase-isomerase OS=Clostridium sulfidige nes OX=318464 GN=queA PE=3 SV=1
MKVKDFYFDLPKELIAQHPLEKRDESRLMVLNKKSGEVEHKVFKDIIEYLNPGDCLVLNDTRVMPARLYGAKEGSGGKMEFLLLNRHEDDIWETLVKPGKRGKVGAKFVFGNGELKAEVVEVLDNGNRKVKFYYDGIFEEVLDRLGEMPLPPYIEEKLEDRERYQTVYSKEVGSAAAPTAGLHFTDELLQAIKKKGINIAFVTLHVGLGTFRPVKAEEIQDHEMHSEYYILDKENAEIINNAKRSGKRVIAVGTTSNRTLESIANEEGQVKEQSGYTSIFIYPGYKFKIVDAIITNFHLPESTLIMLISAFSTREIVMNAYKIAVENKYRFFSFGDAMFIHE

SEQ ID NO: 65473 - protein, 347 aa, Clostridium symbiosum; identical to SEQ ID NO: 62542
  misc_feature (1)..(347): tr|A0A413JJV4|A0A413JJV4_CLOSY S-adenosylmethionine:tRN A ribosyltransferase-isomerase OS=Clostridium symbiosum OX=1512 GN=queA PE=3 SV=1

SEQ ID NO: 65474 - protein, 347 aa, Clostridium symbiosum
  misc_feature (1)..(347): tr|A0A174FJ02|A0A174FJ02_CLOSY S-adenosylmethionine:tRN A ribosyltransferase-isomerase OS=Clostridium symbiosum OX=1512 GN=queA PE=3 SV=1
MDVKDFYYDLPEELIAQDPLEDRSSSRLLVLNKDTGEIQHKVFRDILSYLRKGDCLVINDTKVIPARLIGSKEGTDAKIEVLLLKRRENDIWETLVKPGKKAKIGTVINFGEGLLKGTVVDVVEEGNRLIQFSYKGIFEEILDELGQMPLPPYITHQLQDKNRYQTVYAKHEGSAAAPTAGLHFTNELLGKIAEKGIEIAHVTLHVGLGTFRPVKVDNVLEHHMHSEFYIVEEEEARKINDTKKKGGRVICVGTTSCRTLESAAGEDGILKVGSGWTDIFIYPGYRFKILDCLITNFHLPESTLVMLVSALAGREHVLKAYEEAIKERYRFFSFGDAMFIASKPEQD

SEQ ID NO: 65475 - protein, 341 aa, Clostridium taeniosporum
  misc_feature (1)..(341): tr|A0A1D7XIA3|A0A1D7XIA3_9CLOT S-adenosylmethionine:tRN A ribosyltransferase-isomerase OS=Clostridium taeniospo rum OX=394958 GN=queA PE=3 SV=1
MNVKDFDFYLPEELIAQHPLEKRDTSRLMVLDKETGEIYHKKFYDIIDYLNEGDTLVLNNTRVMPARLIGEKEETGGKIEFLLLKRVEKDRWECLAKPGKSARVGRKFTFGEGKLKAEVVEVKENGNRIVEFYYDGIFEEVLDSLGEMPLPPYIHEKLEDKERYQTVYSKENGSAAAPTAGLHFTEELLQKIKDKGINIAYVTLHVGLGTFRPVKVEIIEEHEMHSEYYHLSKEDADIINETKKRGNKVISVGTTSTRTLETIADEKGNVKETSGWTSIFIYPGYKFKIVDRLITNFHLPESTLIMLVSTLAGKEHVMKAYEEAVKERYRFFSFGDAMFIK

SEQ ID NO: 65476 - protein, 341 aa, Clostridium tagluense
  misc_feature (1)..(341): tr|A0A401UJB8|A0A401UJB8_9CLOT S-adenosylmethionine:tRN A ribosyltransferase-isomerase OS=Clostridium tagluense OX=360422 GN=queA PE=3 SV=1
MKVKDFNFDLPQELIAQHPLQKRDESRLMVINKTSSEIQQKKFKDIIDYLNPEDCLVLNDTRVLPARLLGVKEGTGGKMEFLLLKRIDINHWETLVKPGKKAKIGTKFIFGNGELKAEVISISEGGSRIVEFEFEGIFEEVLDKLGEMPLPPYITEKLEDKERYQTVFSKQIGSAAAPTAGLHFTEDLLSKIKAKGVKIAFVTLHIGLGTFRPVKAETVEEHEMHSEYYVLNKQTADVINETKENGGRIIAVGTTSNRTLESIANENGRVEEKSGWTDIFIYPGYKFKIVDALITNFHLPESTLIMLVSAFAGQNLVMGAYDMAVKEKYRFFSFGDAMFLY

SEQ ID NO: 65477 - protein, 341 aa, Clostridium tepidiprofundi
  misc_feature (1)..(341): tr|A0A151B8B0|A0A151B8B0_9CLOT S-adenosylmethionine:tRN A ribosyltransferase-isomerase OS=Clostridium tepidipro fundi DSM 19306 OX=1121338 GN=queA PE=3 SV=1
MKVKDFDFDLPQEYIAQHPIEKRDESRLLVLDKKTGNIEHRKFKNIIEYLRDGDCLILNNTKVLPARLFGIKENTGGKMEFLLLKRVSEDTWETLVKPGKRAKIGSRFVFGDGELKAEIMGMGEDGSRIVKFEYEGIFEQVLDQLGQMPLPPYITEQLEDKDRYQTVYSKELGSAAAPTAGLHFTQELLKKIEEKGVKIGYVTLHVGLGTFRPVKSDTIEEHHMHSEYYEMSKETAELINRTKENGGRVIAVGTTSCRTLESIADESGNVEAKSGWTDIFIYPGYKFKVLDALITNFHLPQSTLIMLVSALAGKEKVMNAYKIAVEEKYRFFSFGDAMFIK

SEQ ID NO: 65478 - protein, 341 aa, Clostridium tepidum
  misc_feature (1)..(341): tr|A0A1S9IA06|A0A1S9IA06_9CLOT S-adenosylmethionine:tRN A ribosyltransferase-isomerase OS=Clostridium tepidum O X=1962263 GN=queA PE=3 SV=1
MKVKDFDFYLPEELIAQHPMAKRDEARLLVLNKETGEIEHKIFKDILDYLKPNDCLVLNDTRVLPARLIGSKAETGGKMEFLLLKRKEKDVWETLVKPGKRAQIGTKFIFGNGELKAEVIAMGEEGSRIVKFYYEGIFEEILDQLGQMPLPPYIKEKLDDKEMYQTVYSKEQGSAAAPTAGLHFTEELLEKIKDKGIKLAFLTLHVGLGTFRPVKVEDIQDHIMHSEYYKMDKETAEIINSTKEKGGRVIAVGTTSCRTLETIGDEEGKVKEQSGWTDIFIYPGYKYKVVDSLITNFHLPQSTLLMLVSALAGRNNIMNAYNTAVEREYRFFSFGDAMFIK

SEQ ID NO: 65479 - protein, 341 aa, Clostridium tetani
  misc_feature (1)..(341): sp|Q891Z9|QUEA_CLOTE S-adenosylmethionine:tRNA ribosylt ransferase-isomerase OS=Clostridium tetani (strain Mass achusetts / E88) OX=212717 GN=queA PE=3 SV=2
MKAKDFDYYLPEELIAQHPLEKRDECRLMVLDKETGHVEHKVFKDILDYLNKGDCLVLNDTRVMPARLIGEKEETKGKMEFLLLKRTDKDTWETLVKPGKRAKIGSRFIFGQGELKAEVIGMAEEGSRIVKFEYDGIFEEVLDRLGQMPLPPYITEKLEDKEKYQTVYSKESGSAAAPTAGLHFTEELLNKIKEKGIKIVFLTLHVGLGTFRPVKEGEIENHIMHSEYYCISKETADIINTTKEAGGRVIAVGTTSCRTLETLGSKHGKIIEDSGWTNIFMYPGYEFKVTDALITNFHLPQSTLIMLVSALSERERVLNAYEIAVREKYRFFSFGDAMFVK

SEQ ID NO: 65480 - protein, 341 aa, Clostridium tetani
  misc_feature (1)..(341): tr|A0A4Q0VBY2|A0A4Q0VBY2_CLOTA S-adenosylmethionine:tRN A ribosyltransferase-isomerase OS=Clostridium tetani OX =1513 GN=queA PE=3 SV=1
MKAKDFDYYLPEELIAQHPLEKRDECRLMILDKETGHVEHKVFKDILDYLNKGDCLVLNDTRVMPARLIGEKEETKGKMEFLLLKRTDKDTWETLVKPGKRAKIGSRFIFGQGELKAEVIGMAEEGSRIVKFEYDGIFEEVLDRLGQMPLPPYITEKLEDKEKYQTVYSKESGSAAAPTAGLHFTEELLNKIKEKGIKIVFLTLHVGLGTFRPVKEGEIENHIMHSEYYCISKETADIINTTKEAGGRVIAVGTTSCRTLETLGSKHGKIIEDSGWTNIFMYPGYEFKVTDALITNFHLPQSTLIMLVSALSERERVLNAYEIAVREKYRFFSFGDAMFVK

SEQ ID NO: 65481 - protein, 341 aa, Clostridium tetanomorphum
  misc_feature (1)..(341): tr|A0A037ZDR3|A0A037ZDR3_CLOTT S-adenosylmethionine:tRN A ribosyltransferase-isomerase OS=Clostridium tetanomor phum DSM 665 OX=1230342 GN=queA PE=3 SV=1
MRVKDFDYYLPEELIAQHPLERRDEARLMVLDKESGEIQHKIFKDIVDYLNPGDCLVLNDTRVIPARLIGEKEDTHGKMEFLLLKRIDKDIWQTLVKPGKRAKVGTRFSFGDGELKAEVIDIGEEGSRIVRFEYEGIFEEVLDRLGQMPLPPYIKEKLDDKEQYQTVYSKEQGSAAAPTAGLHFTEKLLEKIKQRGVNLAFLTLHVGLGTFRPVKAEEIEEHHMHSEYYRMSKDTADLINKTKEAGKRVISVGTTSCRTLETIGDETGRVREQSGWTDIFIYPGYKFNIVDALITNFHLPQSTLVMLVSALSGRENIMNAYNTAVKEKYRFFSFGDAMFIK

SEQ ID NO: 65482 - protein, 341 aa, Clostridium thermobutyricum
  misc_feature (1)..(341): tr|A0A1V4SXX0|A0A1V4SXX0_9CLOT S-adenosylmethionine:tRN A ribosyltransferase-isomerase OS=Clostridium thermobut yricum DSM 4928 OX=1121339 GN=queA PE=3 SV=1
MKVSDFNFDLPEELIAQHPLEKRDSSRLMVLNKETGEIEHKVFSDIIDYLNPGDTLILNNTRVMPARLIGEKEETGGKIEFLLLKRLEGDKWECLAKPGKTARVGRKFTFGNGQLKCEVVEVLETGNRVIEFSYDGIFEEVLDSLGEMPLPPYIHEKLDDRERYQTVYSKEKGSAAAPTAGLHFTKDLLKKIEDKGVNVGYLTLHVGLGTFRPVKVDDINDHVMHSEFYQLSKETADLINKTKENGGRIISVGTTSTRTLETIGDENGKVRECSGWTDIFIYPGYKFKIVDNLITNFHLPESTLIMLVSALAGQEHVLNAYKTAVKDKYRFFSFGDAMFIK

SEQ ID NO: 65483 - protein, 341 aa, Clostridium thermobutyricum
  misc_feature (1)..(341): tr|N9Y1W7|N9Y1W7_9CLOT S-adenosylmethionine:tRNA ribosy ltransferase-isomerase OS=Clostridium thermobutyricum O X=29372 GN=queA PE=3 SV=1
MKVSDFNFDLPEELIAQHPLEKRDSSRLMVLNKETGEIEHKVFSDIIDYLNPGDTLILNNTRVMPARLIGEKEETGGKIEFLLLKRLEGDKWECLAKPGKTARIGRKFTFGNGQLKCEVVEVLETGNRVIEFSYDGIFEEVLDSLGEMPLPPYIHEKLDDRERYQTVYSKEKGSAAAPTAGLHFTKDLLKKIEDKGVNVGYLTLHVGLGTFRPVKVDDINDHVMHSEFYQLSKETADLINKTKENGGRIISVGTTSTRTLETIGDENGKVRECSGWTDIFIYPGYKFKIVDNLITNFHLPESTLIMLVSALAGQEHVLNAYKTAVKDKYRFFSFGDAMFIK

SEQ ID NO: 65484 - protein, 341 aa, Clostridium thermopalmarium
  misc_feature (1)..(341): tr|A0A2T0AX75|A0A2T0AX75_9CLOT S-adenosylmethionine:tRN A ribosyltransferase-isomerase OS=Clostridium thermopal marium DSM 5974 OX=1121340 GN=queA PE=3 SV=1
MKVKDFDFYLPEELIAQHPLEKRDESRLMVVDKNSGNIEHRIFKNIIDYLNEGDCLVLNNTRVLPARLIGEKEGTGGKMEFLLLKRIDVNTWETLVKPGKRAKIGARFIFGGGELKAEVKEIGEDGSRIVQFEYEGIFEEVLDRLGEMPLPPYITETLEDKERYQTVYSKEAGSAAAPTAGLHFTEELLTKIKDKGIKLAFVTLHVGLGTFRPVKVDTIEEHHMHSEYYTMSKETAEIINETKEKGGRVIAVGTTSCRTLETIANEEGRVREQSGWTSIFMYPGYKFKIVDALITNFHLPESTLIMLVSAFSSREIIMKAYEEAVKEKYRFFSFGDAMFLK

SEQ ID NO: 65485 - protein, 341 aa, Clostridium tyrobutyricum
  misc_feature (1)..(341): tr|W6N442|W6N442_CLOTY S-adenosylmethionine:tRNA ribosy ltransferase-isomerase OS=Clostridium tyrobutyricum DIV ETGP OX=1408889 GN=queA PE=3 SV=1
MRITDFDFYLPKELIAQHPLKQRDEARLMVLDKNSGNVEHKVFRDIIDYLNQGDCLVLNDTRVLPARLIGSKEGTGGKMEILLLKRTEDDTWETLVKPGKRARVGSRFNFGNGELKAEILEEKEDGNRMVKFEYAGIFEEVLDRLGQMPLPPYIKEKLEDKEMYQTVYSKEEGSAAAPTAGLHFTKELLSKIAEKGVEIAFLTLHVGLGTFRPVKVENIEDHDMHSEYYRMTKDTSDKINKAKETGHKIVAVGTTSCRTLETIGDEDGRVREQSGWTDIFIYPGYKYKVVDNLITNFHLPESTLIMLVSALCGRENILNAYKIAVDEEYRFFSFGDAMFIK

SEQ ID NO: 65486 - protein, 341 aa, Clostridium tyrobutyricum
  misc_feature (1)..(341): tr|A0A4P8A2X9|A0A4P8A2X9_CLOTY S-adenosylmethionine:tRN A ribosyltransferase-isomerase OS=Clostridium tyrobutyr icum OX=1519 GN=queA PE=3 SV=1
MRITDFDFYLPKELIAQYPLKQRDEARLMVLDKNSGNVEHKVFRDIIDYLNPGDCLVLNDTRVLPARLIGSKEGTGGKMEILLLKRTEDDTWETLVKPGKRARVGSRFNFGNGELKAEILEEKEDGNRMVKFEYAGIFEEVLDRLGQMPLPPYIKEKLEDKEMYQTVYSKEEGSAAAPTAGLHFTKELLSKIAEKGVEIAFLTLHVGLGTFRPVKVENIEDHDMHSEYYRMTKDTSDKINKAKETGHKIVAVGTTSCRTLETIGDEDGRVREQSGWTDIFIYPGYKYKVVDNLITNFHLPESTLIMLVSALCGRENILNAYKIAVDEEYRFFSFGDAMFIK

SEQ ID NO: 65487 - protein, 341 aa, Clostridium uliginosum
  misc_feature (1)..(341): tr|A0A1I1PW08|A0A1I1PW08_9CLOT S-adenosylmethionine:tRN A ribosyltransferase-isomerase OS=Clostridium uliginosu m OX=119641 GN=queA PE=3 SV=1
MNVKDFDFYLPEELIAQHPLEQRDSSRLMVLDKETGEVEHKTFHGIIDYLNSGDTLVLNNTRVMPARLIGEKEETGGKIEFLLLKRIEGDKWECLAKPGKSARVGRRFTFGNGKLKAEVIEVKEDGNRIIEFYYASIFEEVLDSLGEMPLPPYIHEKLDDKERYQTVYSKEKGSAAAPTAGLHFTKELLKQIEEKGVNVVYLTLHVGLGTFRPVKAEKLEEHEMHSEFYHLSKESADIINATKKRGNKIISVGTTSVRTLETIGDENGIVREQSGWTNIFIYPGYKFNIVDKLITNFHLPQSTLIMLVSTLAGKENVMNAYNEAVKEKYRFFSFGDAMFIK

SEQ ID NO: 65488 - protein, 341 aa, Clostridium ventriculi
  misc_feature (1)..(341): tr|A0A174BF53|A0A174BF53_CLOVE S-adenosylmethionine:tRN A ribosyltransferase-isomerase OS=Clostridium ventricul i OX=1267 GN=queA PE=3 SV=1
MKVSDFDFYLPEELIAQCPLKERDSSRFMVVDRKTGEIEHKVFHDVIDYLEKGDTLVLNNTRVMPARLIGEKEETGGKIEFLLLKRIEGDKWECLAKPGKKAKVGAMFTFGEGKLKAVVREIGLEGNRVIEFIYNGIFEEILDELGQMPLPPYIHEKLDDRERYQTVYSKEKGSAAAPTAGLHFTEDLLEKIREKGVNIAFVTLHVGLGTFRPVKVESIDEHIMHSEYYELDEENAKIINDTKKRGNRVIAVGTTSTRTLETIGNENGEVRAQSGWTNIFIFPGYKFNIVDALITNFHLPESTLIMLVSALAGKENIMNAYKKAVEEKYRFFSFGDSMFIR

SEQ ID NO: 65489 - protein, 341 aa, Clostridium vincentii
  misc_feature (1)..(341): tr|A0A2T0BBE2|A0A2T0BBE2_9CLOT S-adenosylmethionine:tRN A ribosyltransferase-isomerase OS=Clostridium vincentii OX=52704 GN=queA PE=3 SV=1
MNVSDFNFNLPEGLIAQHPLEKRDESRLMVLDKKTGEIQHEKFYDIIDYLKTGDTLVLNNTRVMPARLIGQKEITGGKIEFLLLKKIEGDTWEALAKPGRSAKVGKKFTFGDGKLKAEVIEVLENGNRIIELYYEGIFEQVLDELGEMPLPPYIHERLEEQERYQTVYSKEKGSAAAPTAGLHFTKELMDKIEAKGINIVYVTLHVGLGTFRPVKVAIIEDHDMHSEFYMLSQDSADIINETKKRGNKIISVGTTSTRTLETIGDENGIVREQSGWTNIFIYPGYKFKVIDKLITNFHLPESTLIMLVSTLATREYVMHAYDEAVKEKYRFFSFGDAMFIK

SEQ ID NO: 65490 - protein, 410 aa, Cnuella takakiae
  misc_feature (1)..(410): tr|A0A1M4WI32|A0A1M4WI32_9BACT S-adenosylmethionine:tRN A ribosyltransferase-isomerase OS=Cnuella takakiae OX=1 302690 GN=queA PE=3 SV=1
MKQKPQEIKIADYTYELPNERIAAFPLPKRDDSKLLVYKSGRISDERFYQLPSQLPPNTTLVVNNTKVIEARVLFRKPSGGVIEIFCLEPHNTSMEMALQGGGVCSWNCLVGGASKWKPGQVLEKEVPGGGTLQAFYVSKEVDHFVIRFAWQPAHLPFADVLHQTGAIPLPPYIKRDAQTEDSTRYQTVFADKEGSVAAPTAALHFTDEVFSALAAKNIHTAPVTLHVGAGTFKPVKSETIGEHPMHAEHFQVSQHTLRKLIDSENIVAVGTTSLRTLESLHWIGIKLLNGAFLSNEEELELVQWECYELAAQTITYKESLQALLQHLEQKNQELLFCRTSLIIVPGYTFKSASAIVTNFHQPQSTLLLLVAAFVGPEWKKVYRHALDNEYRFLSYGDSSLLSRTPPLSP

SEQ ID NO: 65491 - protein, 349 aa, Cnuella takakiae
  misc_feature (1)..(349): tr|A0A1M5I8D2|A0A1M5I8D2_9BACT S-adenosylmethionine:tRN A ribosyltransferase-isomerase OS=Cnuella takakiae OX=1 302690 GN=queA PE=3 SV=1
MKLSQFKFDLPLNLIAQNPAKKREDSRLMVIDRKSGNIENKNFRDILDYFDDKDAFVVNNTKVFPARMYGRKEKTGAKIEVFLLRELNKEHKLWDVIVDPARKIRVGNKLYFGDNEDLVAEVIDNTTSRGRTIKFLFDGTEDEFRQVLEVHGETPLPKYIKRKPDEEDRERYQTVYAKYEGAVAAPTAGLHFSRELIKRCEIKGIRFAEVTLHTGLGTFRPIEVEDLSKHKMDAEYYRIEDTACKIVNKAKETGHRICSIGTTTMRALESSFTAQKFLKPSEGWTNTFIHPPYDFSIADSLVTNFHLPKTSLLIMTCAFAGYDLTMEAYKKAIKDKYRFFSYGDALLVL

SEQ ID NO: 65492 - protein, 342 aa, Cobetia crustatorum
  misc_feature (1)..(342): tr|A0A558HGA9|A0A558HGA9_9GAMM S-adenosylmethionine:tRN A ribosyltransferase-isomerase OS=Cobetia crustatorum O X=553385 GN=queA PE=3 SV=1
MRSDYDFSLPDELIARYPSEQRSNCRLLHLDGKSGDIAHRRFPELIELLEPGDVVVFNDTRVIPARLHGHKASGGKIEMLLERPLDAQRGLAHIRSSKSPKPGTELIFEGGITAVVEGRQDALFELRFHGETPMIELLNQHGHMPLPPYITRDDELSDRERYQTVYAKRDGAVAAPTAGLHFDEPMMAAMANKGIETTFVTLHVGAGTFQPVRVDSILEHHMHSEWIDVGQDTCDKIARARANGHRVMAVGTTSVRCLESAAKAHGGTLAPYSGDTDIFIYPGYEWQVVDRLITNFHLPESTLLMLVSAFAGYENTIAAYQAAVEERYQFFSYGDAMLLERV

SEQ ID NO: 65493 - protein, 363 aa, Cobetia marina
  misc_feature (1)..(363): tr|A0A4U1LSL2|A0A4U1LSL2_COBMA S-adenosylmethionine:tRN A ribosyltransferase-isomerase OS=Cobetia marina OX=282 58 GN=queA PE=3 SV=1
MSRIDSGDASGVAPSASERPLQRSDYDFSLPDELIARYPSEQRSDCRLLHLDGKSGEIVHRHFPDLLEQLEPGDVVVFNDTRVIPARLHGQKASGGKIEMLLERPLDAHRGLAHIRSSKSPKPGTELIFEGGITAVVEGRQDALFELRFHGETPMIELLNQHGHMPLPPYITRDDELSDRERYQTVYARRDGAVAAPTAGLHFDEPIMAAMAEKGIETAFVTLHVGAGTFQPVRVDSILEHHMHSEWIEVGQEACDTIARARAAGRRVVAVGTTSVRCLESAAKAHGGELAPYSGDTDIFIYPGYEWQVVDLLITNFHLPESTLLMLVSAFAGYEHTMAAYQAAVQERYQFFSYGDAMLLERA

SEQ ID NO: 65494 - protein, 363 aa, Cobetia sp.; identical to SEQ ID NO: 65493
  misc_feature (1)..(363): tr|A0A2S4JXL9|A0A2S4JXL9_9GAMM S-adenosylmethionine:tRN A ribosyltransferase-isomerase OS=Cobetia sp. MM1IDA2H- 1 OX=1268241 GN=queA PE=3 SV=1

SEQ ID NO: 65495 - protein, 343 aa, Cobetia sp.
  misc_feature (1)..(343): tr|A0A2E4Q3N7|A0A2E4Q3N7_9GAMM S-adenosylmethionine:tRN A ribosyltransferase-isomerase OS=Cobetia sp. OX=187387 6 GN=queA PE=3 SV=1
MQRSDYDFSLPDELIARYPSEQRSDCRLLHLDGKSGEIVHRRFPDLLEQLEPGDVVVFNDTRVIPARLHGQKASGGKIEMLLERPLDAHRGLAHIRSSKSPKPGTELIFEGGITAVVEGRQEALFELRFHGETPMIELLNQHGHMPLPPYITRDDELSDRERYQTVYAKRDGAVAAPTAGLHFDEPIMAAMAEKGIETAFVTLHVGAGTFQPVRVDSILEHHMHSEWIEVGQEACDKIARARAAGRRVVAVGTTSVRCLESAAKAHAGELAPYSGDTDIFIYPGYEWQVVDLLITNFHLPESTLLMLVSAFAGYEHTMAAYQAAVEERYQFFSYGDAMLLERA

SEQ ID NO: 65496 - protein, 347 aa, Cocleimonas flava
  misc_feature (1)..(347): tr|A0A4R1F6I3|A0A4R1F6I3_9GAMM S-adenosylmethionine:tRN A ribosyltransferase-isomerase OS=Cocleimonas flava OX= 634765 GN=queA PE=3 SV=1
MQLSDFSYSLPPELIAQEALEDRTASRLLHLNTGITPAEVHDKHFSDIVDLIQPNDLLIFNDTRVIPARLNGFKESGGKVEVLIERILDDHRALAHIRANKSPKVGGCLLLENAINAEVLDRHDALYEIKFKNEESIFKLLDQYGHIPLPPYIEREDTEADKERYQTVFADKVGAVAAPTAGLHFTDELLQSLKDKGVETAQITLHVGAGTFLPVRVDNLEDHVMHAEWVEVTQQTCDAVAACKARGSKVVAVGTTSVRSLESAAKETGKLEPFASDTRLFITPGFKFNVVDAMVTNFHVPESTLLMLVSAFSGYENIMSAYEHAVAEKYRFFSYGDAMFLEKANQI

SEQ ID NO: 65497 - protein, 348 aa, Cognatishimia maritima
  misc_feature (1)..(348): tr|A0A1M5JF54|A0A1M5JF54_9RHOB S-adenosylmethionine:tRN A ribosyltransferase-isomerase OS=Cognatishimia maritim a OX=870908 GN=queA PE=3 SV=1
MQLSDFDFDLPERLIATRPAKPRTSAKLLVATADTITDAHVHDIAQFFRPGDRLVLNDTKVIPARLTGVRRRESAQGPVEAKIEVTLLDPKGEGQWSALLKPLKKIKEGELIHFAEDFSAELLRKEDGQAVLRFDAEGEAFEAALQSSGAMPLPPYIAAKRPADEQDRTDYQTVFARHSGAVAAPTASLHFDEELLAKLNALGVQFSHVTLHVGAGTFLPVKVDDVTTHKMHAEWGRVSEKAAAEIAETKAQGGRVIPVGTTALRLIESAARGGEIAPWEGETDIFIYPGFQFQVTDALMTNFHLPKSTLMMLVSALMGQDRVREIYRHAIDQEYRFFSYGDSSLLLP

SEQ ID NO: 65498 - protein, 349 aa, Cognatiyoonia koreensis
  misc_feature (1)..(349): tr|A0A1I0PN59|A0A1I0PN59_9RHOB S-adenosylmethionine:tRN A ribosyltransferase-isomerase OS=Cognatiyoonia koreens is OX=364200 GN=queA PE=3 SV=1
MKLSDFDFVLPEELIATRPARPRTSARLLVANGDEFNDLHVRDIVDQLAPGDRLILNDTKVIPARLTGHRTRESAESHTTARIEVTLLEPQTNGNWSALIKPLKKVKDGETIVFSDDLSAVVASRSDGQAILAFNLAGDDFDTALADVGAMPLPPYIAAKRPADEADKIDYQTAWAKHAGAVAAPTASLHFDADLLAALKQKGVTFSHVTLHVGAGTFLPVKVDDITQHKMHAEWGHVSQSAAAEINATKAAGGRIIPVGTTALRLIESAAKKGQVGPWKGPTDIFITPGYQFQITDGLMTNFHLPKSTLMMLVSALMGTDRIKAIYKHAISHRYRFFSYGDSSLLLPP

SEQ ID NO: 65499 - protein, 354 aa, Cognatiyoonia sediminum
  misc_feature (1)..(354): tr|A0A1M5LKY3|A0A1M5LKY3_9RHOB S-adenosylmethionine:tRN A ribosyltransferase-isomerase OS=Cognatiyoonia sedimin um OX=1508389 GN=queA PE=3 SV=1
MKLSDFDFDLPEHLIATRPANPKTSAKLLVAGPDRIEDLIVADLTKVLRAGDRLVLNDTKVIPARLSGTRTRTGEAGTTQAAIEVTLLEPQASGTWSALVKPLKKVRDGETIKFSDALSAELVSRADGQASLVFNLTGDDFDAALADVGAMPLPPYIAAKRAADEQDKTDYQTEWAKHSGAVAAPTASLHFDQPLLDTLAEMGVEFSFVTLHVGAGTFLPVKVDDIKDHKMHAELGYVSAQAADEINATKRAGGRVIPVGTTALRLIESAAKGGELHAWEGPTDIFITPGFPFQIADALMTNFHLPKSTLMMLVSALIGSDRIKDIYAHAISQNYRFFSYGDASLLMPNGSELP

SEQ ID NO: 65500 - protein, 347 aa, Cohaesibacter gelatinilyticus
  misc_feature (1)..(347): tr|A0A285NDQ7|A0A285NDQ7_9RHIZ S-adenosylmethionine:tRN A ribosyltransferase-isomerase OS=Cohaesibacter gelatin ilyticus OX=372072 GN=queA PE=3 SV=1
MLVDLFDFDLPPENIALRPHSPRDEARLLFVPFTGAFQNYQVTSLPDFLQPGDALVFNDTKVIPAELSGIRVRGDSRAKISFNLHKREDGATWRAFARPAKKVKLDDVIEFGTNLNAIITEKGDAGEITLSFDKSGPILDQEIAKIGHIPLPPYIASKRKEDEKDKVDYQTIYAEREGAVAAPTAGLHFTDRLFDALDAKKIERHFVTLHVGAGTFLPVKAENTMDHKMHAEWGEIPQDLADHLNAVRARGNRVIAVGTTSLRLLESAAQEKGQLSGFCGDTDIFITPGYEFKAIDGLMTNFHLPKSTLFMLVSALMGRERMQQAYAHAVEHGYKFYSYGDSSLLLR

SEQ ID NO: 65501 - protein, 360 aa, Cohaesibacter marisflavi
  misc_feature (1)..(360): tr|A0A1I5I8D5|A0A1I5I8D5_9RHIZ S-adenosylmethionine:tRN A ribosyltransferase-isomerase OS=Cohaesibacter marisfl avi OX=655353 GN=queA PE=3 SV=1
MRVDSFDFDLPQDSIALRPHNPRDEAKLLLVPPTGAFEDHSVLNLPDFLEPGDALVFNDTKVIPAELSGTRVRGEIRAGIHFNLHKREDLSTWRAFARPAKKVQLGDRIDFSDRFSAEISEKGDAGEVCLRFNCDGTALDQAIASVGHIPLPPYIASKRAEDEKDKTDYQTIYADKDGAVAAPTAGLHFTDRLFSMLDEKKIERHFVTLHVGAGTFLPVKAEDTDDHKMHAEWGEISPALADKLNAVHARGNRIIAVGTTSLRLLESAAGDDGIIRPFCGDTDIFITPGYRFRAIDGLMTNFHLPKSTLFMLVSAIMGRDRMQAAYVHAIANGYRFYSYGDSSLLLPERHKGAAQGEETK

SEQ ID NO: 65502 - protein, 351 aa, Cohaesibacter sp.
  misc_feature (1)..(351): tr|A0A2N5XT58|A0A2N5XT58_9RHIZ S-adenosylmethionine:tRN A ribosyltransferase-isomerase OS=Cohaesibacter sp. H13 04 OX=2067669 GN=queA PE=3 SV=1
MRVDLFDFNLPTERIALRPHNPRDEAKLLYIPPSGPFENHVVLDLVDFLNPGDALVFNDTKVIPAELSGTRVRGDIRANIHFNLHKREDLSVWRAFARPAKKVQIGDLLEFGDTLTAKIEEKGDAGEVTLRFDCSGPALDRAIAEVGSIPLPPYIASKRPEDEQDLTDYQTIYAREEGAVAAPTAGLHFTDRLFNRLQIKGVERHFATLHVGAGTFLPVKADDTDDHKMHAEWGEITADLAGKLNAVNARGNRIIAVGTTSLRLLESATDPDGTIKPFCGDTDIFITPGYQFRAIDGLMTNFHLPKSTLFMLVSAIMGQDRMQAAYAHAIENKYSFYSYGDSSLLLRPKKG

SEQ ID NO: 65503 - protein, 349 aa, Cohaesibacter sp.
  misc_feature (1)..(349): tr|A0A285M9A2|A0A285M9A2_9RHIZ S-adenosylmethionine:tRN A ribosyltransferase-isomerase OS=Cohaesibacter sp. ES. 047 OX=1798205 GN=queA PE=3 SV=1
MLVNLFDFDLPPECIALRPHNPRDEAKLLFVPPEGAFEDYQVLDLPDFLAPGDALIFNNTKVIPAELEGTRVRGDIRAGVHFNLHKREDLSTWRAFARPAKKVQLGDRVEFGAHLSATICEKGDAGEVVLRFDCEGQQLDAAIAEVGHVPLPPYIASKRAEDERDKSDYQTIYAREEGAVAAPTAGLHFTDRLFERLDAKGIERHFVTLHVGAGTFLPVKADDTNDHKMHAEWGVITPELADHLNAVRARGNRIIAVGTTSLRLLESAADADGTIRPFSGDTDIFITPGYAFRAIDGLMTNFHLPKSTLFMLVSAIMGPERMQAAYAYAIENGYRFYSYGDSSLLLRPK

SEQ ID NO: 65504 - protein, 353 aa, Cohnella kolymensis
  misc_feature (1)..(353): tr|A0A0C2R5P5|A0A0C2R5P5_9BACL S-adenosylmethionine:tRN A ribosyltransferase-isomerase OS=Cohnella kolymensis O X=1590652 GN=queA PE=3 SV=1
MNVSDFDFELPESLIAQAPLAERTSSRLLVLHRKEGSVEHRSFTDLAEYLKPGDTLVLNDTRVLPARLFGVKAETGAKAEVLLLKNLDGDRWEALVRPGKKIHKGTKLLFGMQGDEAPSGDQAALTAVIEEEGEMGARTLRFEYDGIFNELLDRLGQMPLPPYIKERLPDRERYQTVYSKHEGSAAAPTAGLHFTDDFLQQLQDSGVKLCPITLHVGLGTFRPVSVDNLEEHAMHAEWYSVSEESASMLNEAKAGSGRIVAVGTTSARTLETIGQRFQGGPVQACSGWTDIFIYPGYEFTMVNALLTNFHLPKSTLVMLVSALAGREAVLGAYREAIERRYRFFSFGDAMFIT

SEQ ID NO: 65505 - protein, 348 aa, Cohnella luojiensis
  misc_feature (1)..(348): tr|A0A4Y8M5G8|A0A4Y8M5G8_9BACL S-adenosylmethionine:tRN A ribosyltransferase-isomerase OS=Cohnella luojiensis O X=652876 GN=queA PE=3 SV=1
MNVSDYDFDLPESLIAQTPLLERTSSRLLVLDRRNGKIEHRAFTDLADYLNPGDTLVLNDTRVLPARLFGVKADTGAKVELLLLKRIEGDRWEALVKPGKRVHTGARLNFGSSEDASPLLSAIVEDEGEMGARTIRFEYKGIFNELLDRLGQMPLPPYIKESLSDRERYQTVYSRNEGSAAAPTAGLHFTDSFLERLQANGVKLCPITLHVGLGTFRPVSVNKIEEHEMHSEWYSVSEESAKLLNEARASGGRIVAVGTTSARTLETVGQRFQDQSIEACSGWTNIFIYPGYEFTMANALLTNFHLPKSTLVMLVSALAGRDNVLNAYQEAIAHQYRFFSFGDAMFIT

SEQ ID NO: 65506 - protein, 357 aa, Cohnella lupini
  misc_feature (1)..(357): tr|A0A3D9IR61|A0A3D9IR61_9BACL S-adenosylmethionine:tRN A ribosyltransferase-isomerase OS=Cohnella lupini OX=12 94267 GN=queA PE=3 SV=1
MNVSDYDFDLPESLIAQTPLLERTSSRLLALNRINGKIEHRAFTDLAEFLKPGDTLVVNDTRVLPARLFGFKADTGAKVELLLLKRLEGDRWEALVRPGKKIHKGAKLSFGLAEKPDGTTEQENLVPLLSAFVEEEGEMGSRVIRFEYEGIFNELLDKLGQMPLPPYIKESLDDRERYQTVYSRHEGSAAAPTAGLHFTDEFLDRLQSEGVKLCRITLHVGLGTFRPVSAETIEEHEMHAEWYSVSEESAKLLNEAKASGGKIVAVGTTSARTLETVGQRFRDQPIESCNGWTDIFIFPGYEFTMVDALLTNFHLPKSTLVMLVSALAGRENVLNAYREAVEEQYRFFSFGDAMYIY

SEQ ID NO: 65507 - protein, 347 aa, Cohnella phaseoli
  misc_feature (1)..(347): tr|A0A3D9KNH3|A0A3D9KNH3_9BACL S-adenosylmethionine:tRN A ribosyltransferase-isomerase OS=Cohnella phaseoli OX= 456490 GN=queA PE=3 SV=1
MNVSDYDFELPESLIAQTPLLERTSSRLLVLHRQTGRVEHRVFTELEDHLQPGDTLVLNDTRVLPARLFGSKADTGAKAELLLLKRLDGDRWETLVRPGKKLHRGARIVFGPAEQPLLSATVEEEGELGARVVRFEYEGIFNELLDRLGHMPLPPYIKETLSDRERYQTVYSRNEGSAAAPTAGLHFTKEFLERLQAKGVKLCPITLHVGLGTFRPVSAETIEEHEMHAEWYSVSEESAKLLNEAKASGGRIVAVGTTSARTLETIGQRFKEGGQVEACSGWTSIFIFPGYEFTMVDALLTNFHLPRSTLVMLVSALAGRENILAAYREAVEREYRFFSFGDAMFIS

SEQ ID NO: 65508 - protein, 349 aa, Cohnella sp.
  misc_feature (1)..(349): tr|A0A1I1ART6|A0A1I1ART6_9BACL S-adenosylmethionine:tRN A ribosyltransferase-isomerase OS=Cohnella sp. OV330 OX =1855288 GN=queA PE=3 SV=1
MNVGDYDFELPERLIAQTPLSDRTSSRLLVLHKDGGRVEHRSFKDLADYLVPGDTLVLNDTKVIPARLFGRKADTGAKAEVLLLKALGDDRWEALVRPGKKLHKGAVLHFGETEDSMKPLLAAVVEEEGEMGARTIRFQYDGIFNEILDRLGEMPLPPYIKERLEDRDRYQTVYAQNEGSAAAPTAGLHFTEDFLRELQGRGIAVCRVTLHVGLGTFRPVSVDNVLEHKMHEEWYGVDEENAALLNRARQAGTRIVAVGTTSARTLETLGQRFGDRPIEACSGWTGIFIYPGYEFRLVSALLTNFHLPKSTLVMLVSALAGREAVLAAYREAVADEYRFFSFGDAMFIT

SEQ ID NO: 65509 - protein, 350 aa, Cohnella sp.
  misc_feature (1)..(350): tr|A0A3G3JY64|A0A3G3JY64_9BACL S-adenosylmethionine:tRN A ribosyltransferase-isomerase OS=Cohnella sp. 18JY8-7 OX=2480923 GN=queA PE=3 SV=1
MNVSDFDFELPERLIAQTPLANRTASRLLVLHREDGRTEHRTFTDLAEYLGPGDTLVLNDTRVLPARLFGTKADTGAKAELLLLKRREGDRWEALVRPGKKIRQGAVLHFGQASEGGKPLLTATILDEGDMGARVLEFSYEGIFQELLDRLGHMPLPPYIKETLDDRERYQTVYARHEGSAAAPTAGLHFTEEFLGQLQAKGVRLCWITLHVGLGTFRPVSADTIEEHEMHSEWYSVSEESAAMLNETRAAGGRIAAVGTTSARTLETIGQKFGDAPIEACSGWTDIFIYPGYRFTMVNALLTNFHLPKSTLVMLVSALAGREAILNAYREAVQKEYRFFSFGDAMFITR

SEQ ID NO: 65510 - protein, 386 aa, Coleofasciculus chthonoplastes
  misc_feature (1)..(386): tr|B4VP97|B4VP97_9CYAN S-adenosylmethionine:tRNA ribosy ltransferase-isomerase OS=Coleofasciculus chthonoplaste s PCC 7420 OX=118168 GN=queA PE=3 SV=1
MIEPSMTNDLLLSSYNYDLPEGRIAQTPISPRDSSRLLVVESPTQHQHRIFRDLPQLLRSGDLLVLNNTRVIPARLYGRKVTGTPVEVLLLEEREQNCWLALVKPGRRLKVGSTIVFEPDQPIVPASYGKTPLSSDDTETLRQDNLKNRSPLKATIIARDDATSGRLLQFDLPKGQSLVTLLPNYGQVPFPPYITHSQATPDQYQTVYAQIPGAVAAPTAGLHFTPELLEQCHISGIEQASITLHVGVGTFRPVEVEDVTNHQMHGEWLEISAATVAQIQQTKAAGGRVIAVGTTVVRALEGAAANGEFQPYCGKTELFIYPGYQWQVVDGLITNFHLPRSTLLMLVSALIGRERLLKLYAEAIAYNYRFYSFGDAMLILPEAVNH

SEQ ID NO: 65511 - protein, 352 aa, Collimonas arenae
  misc_feature (1)..(352): tr|A0A0A1F634|A0A0A1F634_9BURK S-adenosylmethionine:tRN A ribosyltransferase-isomerase OS=Collimonas arenae OX= 279058 GN=queA PE=3 SV=1
MATRALFFIIYPNMHSLSDYDFDLPPELIAQTPLSERSASRLLHLDGEQLIDRQFTDIVAQLNAGDLLVFNDTRVLKARFFGVKETGGKVEVLVERVVDNRTVHAQVRASKSPPAGTRIRLAEVFDVVVGERVGEFYTLVFPADVFDLIDAHGRLPLPPYIEHDADAFDETRYQTVYAKHAGAVAAPTAGLHFDQVLLEQLSQKGVSFGYVTLHVGAGTFQPVRSENLAEHKMHSEWYTITEATVDAVRATKAAGGKVVAVGTTSLRALESASQSGALQAGSADTTLFITPGYVFKTVDRLITNFHLPKSTLLMLVSAFAGYDRIRAAYAHAIVQRYRFFSYGDAMLLTYNV

SEQ ID NO: 65512 - protein, 339 aa, Collimonas arenae
  misc_feature (1)..(339): tr|A0A127QEN5|A0A127QEN5_9BURK S-adenosylmethionine:tRN A ribosyltransferase-isomerase OS=Collimonas arenae OX= 279058 GN=queA PE=3 SV=1
MHSLSDYDFDLPPELIAQTPLSERSASRLLHVDGEQLIDRQFTDIVDLLNAGDLLVFNDTRVLKARFFGIKETGGKVEVLVERVVDDRTVHAQVRASKSPPPGTRIRLAEAFDVVVGERVGEFYTLVFPGDVFELIEAHGRLPLPPYIEHDADAFDETRYQTVYAKHAGAVAAPTAGLHFDQALLERLRQKGIGFAYVTLHVGAGTFQPVRSENLAEHKMHSEWYTISEATVDAVQAAKAAGGKVVAVGTTSLRALESASQSGVLQSGSADTALFITPGYAFKTVDRLVTNFHLPKSTLLMLVSAFVGYERIRSAYAHAIAQRYRFFSYGDAMLLTYNV

SEQ ID NO: 65513 - protein, 339 aa, Collimonas fungivorans
  misc_feature (1)..(339): tr|A0A127P7L6|A0A127P7L6_9BURK S-adenosylmethionine:tRN A ribosyltransferase-isomerase OS=Collimonas fungivoran s OX=158899 GN=queA PE=3 SV=1
MHSLSDYDFELPPELIAQTPLSERSASRLLHVDGNRLIDRQFTDIVDQLNAGDLLVFNDTRVLKARFFGVKETGGKVEVLVERVVDNRTVHAQVRASKSPPAGSRICLAEAFDVVVSERVGEFYTLVFPADVFELIDAHGRLPLPPYIEHDADAFDETRYQTVYAKHAGAVAAPTAGLHFDQALLERLQQKGIGFAYVTLHVGAGTFQPVRSENLAEHKMHSEWYTITEATVEAVRATKAAGGKVIAVGTTSLRALESASQSGVLQAGSADTALFITPGYVFKTVERLITNFHLPKSTLLMLVSAFAGYDCIRAAYAHAIAQRYRFFSYGDAMLLTYNA

SEQ ID NO: 65514 - protein, 342 aa, Collimonas fungivorans
  misc_feature (1)..(342): tr|G0AI13|G0AI13_COLFT S-adenosylmethionine:tRNA ribosy ltransferase-isomerase OS=Collimonas fungivorans (strai n Ter331) OX=1005048 GN=queA PE=3 SV=1
MHSLSDYDFELPPELIAQTPLSERSASRLLHLDGDRLIDRQFTDIVDQLAAGDLLVFNDTRVLKARFFGVKETGGKVEVLVERVVDNRTVHAQVRASKSPPAGARICLAEAFDVVVGERVGEFYTLVFPADVFELIEAHGRLPLPPYIEHDADAFDETRYQTVYAKHAGAVAAPTAGLHFDQALLERLQQKGIGFAYVTLHVGAGTFQPVRSENLAEHKMHSEWYTITEATVEAVRATKAAGGKVIAVGTTSLRALESASQSGVLQAGSADTALFITPGYVFKTVERLITNFHLPKSTLLMLVSAFAGYDCIRAAYAHAIAQRYRFFSYGDAMLLSLQRASQ

SEQ ID NO: 65515 - protein, 339 aa, Collimonas pratensis
  misc_feature (1)..(339): tr|A0A127PZL2|A0A127PZL2_9BURK S-adenosylmethionine:tRN A ribosyltransferase-isomerase OS=Collimonas pratensis OX=279113 GN=queA PE=3 SV=1
MHSLSDYDFDLPPELIAQTPLSERSASRLLHLDGEQLIDRQFTDIVEQLNAGDLLVFNDTRVLKARFFGIKETGGKVEVLVERVVDDRTVHAQVRASKSPPAGAVIRLADAFDVTVGERVGEFYTLRFPADVFELIDAHGRLPLPPYIEHDADAFDETRYQTVYAKHAGAVAAPTAGLHFDQALLERLQQKGIGFAYVTLHVGAGTFQPVRSENLAEHKMHSEWYTISDATVEAVRAAKAAGGKVVAVGTTSLRALESASQSGALQAGSADTALFITPGYRFKTVDRLITNFHLPKSTLLMLVSAFAGYDRIRAAYAHAIAQHYRFFSYGDAMLLTYTV

SEQ ID NO: 65516 - protein, 339 aa, Collimonas pratensis
  misc_feature (1)..(339): tr|A0A127QSL1|A0A127QSL1_9BURK S-adenosylmethionine:tRN A ribosyltransferase-isomerase OS=Collimonas pratensis OX=279113 GN=queA PE=3 SV=1
MHSLSDYDFDLPPELIAQTPLSERSASRLLHLDGEQLVDRQFTDIVEQLNAGDLLVFNDTRVLKARFFGIKETGGKVEVLVERVVDDRTVHAQVRASKSPPAGAVIRLADAFDVTVGERVGEFYTLRFPADVFELIDAHGRLPLPPYIEHDADAFDETRYQTVYAKHAGAVAAPTAGLHFDQALLERLQQKGIGFAYVTLHVGAGTFQPVRSENLAEHKMHSEWYTISDATVEAVRAAKAAGGKVVAVGTTSLRALESASQSGALQAGSADTALFITPGYRFKAVDRLITNFHLPKSTLLMLVSAFAGYDRIRAAYAHAIAQHYRFFSYGDAMLLTYTV

SEQ ID NO: 65517 - protein, 339 aa, Collimonas sp.
  misc_feature (1)..(339): tr|A0A2A9KDB9|A0A2A9KDB9_9BURK S-adenosylmethionine:tRN A ribosyltransferase-isomerase OS=Collimonas sp. PA-H2 OX=1881062 GN=queA PE=3 SV=1
MHSLSDYDFDLPPELIAQTPLSERSASRLLHLDGEQLIDRQFTDIVEQLNAGDLLVFNDTRVLKARFFGIKETGGKVEVLVERVVDDRTVHAQVRASKSPPAGARIRLADAFDVTVGERVGEFYTLQFPADVFELIEAHGRLPLPPYIEHDADAFDETRYQTVYAKHAGAVAAPTAGLHFDQALLEQLRQKGIVFAYVTLHVGAGTFQPVRSENLAEHKMHSEWYTISQATVDAVRGTKAAGGKVVAVGTTSLRALESASQSGALQAGSADTALFITPGYRFKTVDRLITNFHLPKSTLLMLVSAFAGYDRIRAAYVHAIAQHYRFFSYGDAMLLTYTV

SEQ ID NO: 65518 - protein, 339 aa, Collimonas sp.
  misc_feature (1)..(339): tr|A0A1I1JFD3|A0A1I1JFD3_9BURK S-adenosylmethionine:tRN A ribosyltransferase-isomerase OS=Collimonas sp. OK412 OX=1801619 GN=queA PE=3 SV=1
MHSLSDYDFELPPELIAQTPLPQRSASRLLHIDGEQLVDRRFADIVDLLNPGDLLVFNDTRVLKARFFGVKETGGKVEVLVERVVDNRTVHAQVRASKSPPAGTRICLAEAFDVVVGERVGEFYTLVFPADVFELIEAHGRLPLPPYIEHDADAFDETRYQTVYAKHAGAVAAPTAGLHFDQALLQSLQQKGIGFAYVTLHVGAGTFQPVRSENLAEHKMHSEWYTIAEATVDAVRAAKAAGGKVVAVGTTSLRALESASQSGVLQAGSADTALFITPGYVFKTVDRLITNFHLPKSTLLMLVSAFAGYDCIRAAYAHAIAQRYRFFSYGDAMLLTYNV

SEQ ID NO: 65519 - protein, 403 aa, Collinsella aerofaciens
  misc_feature (1)..(403): tr|A4EAM0|A4EAM0_9ACTN S-adenosylmethionine:tRNA ribosy ltransferase-isomerase OS=Collinsella aerofaciens ATCC 25986 OX=411903 GN=queA PE=3 SV=1
MRTDDFDYNLPEELIAQAPAEPRDSCRLLVVDRKGSQAGTPLEHGGTVEHRIFRDIIDYIEPGDVLVINQTRVMPARLIGRKTGSGGVVETLLLKRREDVDPLGHVWECLVKPGKRLKPGAQIEYRAGGAHAPEGAPVVLTAEVVDFVTDSRGGRLVRFEPAGCNAAGDPRTLDEAIHAAGHVPLPPYITDYEGDPEKYQTVYAMKEEHSAAAPTAGLHFTPELMAAIEAKGAKFAAVELEVGIDTFRLVEEDDPTQHVMHTERYHVSQEVVDAVHKAKAEGHRVIAVGTTAVRSLESAFDTDAPVSDPAVTARYFEGREDGADTLGRGDIVVRESATTQLYLMPGSTYHVVDALITNFHVPRSTLMMLVSALATRDQIMDAYAAAIEERYRFFSFGDAMLIC

SEQ ID NO: 65520 - protein, 405 aa, Collinsella aerofaciens
  misc_feature (1)..(405): tr|A0A5K1JBN5|A0A5K1JBN5_9ACTN S-adenosylmethionine:tRN A ribosyltransferase-isomerase OS=Collinsella aerofacie ns OX=74426 GN=queA PE=4 SV=1
MSMRTDDFDYNLPEELIAQAPAEPRDSCRLLVVDRKGSETGTPLEHGGTVEHRIFRDIIDYIEPGDVLVINQTRVMPARLIGRKAGSGGVVETLLLKRREDVDPLGHVWECLVKPGKRLKPGAQIEYRAGGAHAPEGAPVVLTAEVVDFVTDSRGGRLVRFEPAGCNAAGDPRTLDEAIHAAGHVPLPPYITDYEGDPEKYQTVYAMKEEHSAAAPTAGLHFTPELMAAIEAKGAKFAAVELEVGIDTFRLVEEDDPTQHVMHTERYHVSQEVVDAVHKAKAEGHRVIAVGTTAVRSLESAFDTDAPVSDPAVTARYFEGREDGADTLGRGDIVVRENATTQLYLMPGSTYHVVDALITNFHVPRSTLMMLVSALATRDQIMDAYAAAIEERYRFFSFGDAMLIL

SEQ ID NO: 65521 - protein, 408 aa, Collinsella intestinalis
  misc_feature (1)..(408): tr|A0A414G0U7|A0A414G0U7_9ACTN S-adenosylmethionine:tRN A ribosyltransferase-isomerase OS=Collinsella intestina lis OX=147207 GN=queA PE=3 SV=1
MRTDDFDYNLPDELIAQAPAEPRDSCRLLVVNRELPGGPVRAADAVALEHGGSVEHRHFYDIVDYLEPGDLLVANQTRVMPARLIGKKPTGGVAETLLLRRREDVDPLGHVWECLVNPGKRLKPGNVVEYRAGGLLAPEGAPVVLTAEILDFIDDSKGGRLVRFEPVGENEGGVPRTLDEAIHAAGHVPLPPYITGYEGDPEKYQTVYAMSEEHSAAAPTAGLHFTPELIQRIKDKGCGWATVELEVGIDTFRLVEEDDPTEHVMHTERYHVPAEVVEAVHATKAAGHRVIAVGTTAVRSLESAWDASAPASDPAVTARGFEGREDGADVRGEGDITVREDATTNLYLMPGSTFHVVDALITNFHVPRSTLMMLVSALATRDQIIDAYEEAVREKYRFFSFGDAMLIE

SEQ ID NO: 65522 - protein, 408 aa, Collinsella intestinalis
  misc_feature (1)..(408): tr|A0A5K1IWN1|A0A5K1IWN1_9ACTN S-adenosylmethionine:tRN A ribosyltransferase-isomerase OS=Collinsella intestina lis OX=147207 GN=queA PE=4 SV=1
MRTDDFDYNLPDELIAQAPAEPRDSCRLLVVNRELPGGPVRAADAVALEHGGSVEHRHFYDIVDYLEPGDLLVANQTRVMPARLIGKKPTGGVAETLLLRRREDVDPLGHVWECLVNPGKRLKPGNVVEYRAGGLLAPEGAPVVLTAEILDFIDDSKGGRLVRFEPVGENEGGVPRTLDEAIHAAGHVPLPPYITGYEGDPEKYQTVYAMSEEHSAAAPTAGLHFTPELIQRIKDKGCGWATVELEVGIDTFRLVEEDDPTEHVMHTERYHVPAEVVEAVHATKAAGHRVIAVGTTAVRSLESAWDAAAPASDPAVTARGFEGREDGADVRGEGDITVREDATTNLYLMPGSTFHVVDALITNFHVPRSTLMMLVSALATRDQIIDAYEEAVREKYRFFSFGDAMLIE

SEQ ID NO: 65523 - protein, 403 aa, Collinsella sp.
  misc_feature (1)..(403): tr|A0A412T224|A0A412T224_9ACTN S-adenosylmethionine:tRN A ribosyltransferase-isomerase OS=Collinsella sp. AF16- 8 OX=2292215 GN=queA PE=3 SV=1
MRTDDFDYNLPEELIAQAPAEPRDSCRLLVVDRKGSQAGKPLEHGGTVEHRIFRDIIDYIEPGDVLVINKTRVMPARLIGRKAGSGGVVETLLLKRREDVDPLGHVWECLVKPGKRLKPGAQIEYRAGGAHAPEGAPVVLTAEVIDFVTDSRGGRLVRFEPAGCNAAGEPRTLDEAIHAAGHVPLPPYITDYEGDPEKYQTVYAMKEEHSAAAPTAGLHFTPELMAAIEAKGAKFAAVELEVGIDTFRLVEEDDPTQHVMHTERYHVSQEVVDAVHKAKAEGHRVIAVGTTAVRSLESAFDADAPVSDPAVTARYFEGREDGADTLGRGDIVVRENATTQLYLMPGSTYHVVDALITNFHVPRSTLMMLVSALATRDQIMDAYAAAIEERYRFFSFGDAMLIL

SEQ ID NO: 65524 - protein, 406 aa, Collinsella sp.
  misc_feature (1)..(406): tr|A0A1Y4E6Q9|A0A1Y4E6Q9_9ACTN S-adenosylmethionine:tRN A ribosyltransferase-isomerase OS=Collinsella sp. An268 OX=1965612 GN=queA PE=3 SV=1
MRTDDFDYELPDELIAQAPAEPRDSCRLLVLHRGEPVQTTGETVPLAHGGSVEHRHFYDVIDYIEPGDLLVINQTRVMPARLIGRKPTGGMAETLLLRRREDVDPLGHVWECLVNPGKRLKPGAVIEYRAGGPHAPADAPVVLTGEVLDFVPESRGGRLVRFAPEGADASGEPRTLDAAIHAAGHVPLPPYITQYEGDPEKYQTVYAMKEEHSAAAPTAGLHFTPELMRRIEEKGARFAAVELEVGIDTFRLVEEDDPTQHVMHTERYHVPAEVIDAVHETKRAGKRVIAVGTTAVRSLESAFDPEAPAADPALVARRFEGRADGADTRGRGDVVVRADATTNLYLMPGSTYHVVDALITNFHVPRSTLMMLVSAFATRDQIMDAYAEAVRERYRFFSFGDAMLIE

SEQ ID NO: 65525 - protein, 413 aa, Collinsella stercoris
  misc_feature (1)..(413): tr|B6GE52|B6GE52_9ACTN S-adenosylmethionine:tRNA ribosy ltransferase-isomerase OS=Collinsella stercoris DSM 132 79 OX=445975 GN=queA PE=3 SV=1
MKGGTMRTDDFDYNLPDELIAQAPAEPRDSCRLLVLNRELEGGPARAVDAVALAHGGSVEHRHFYDIIDYLEPGDLLVANQTRVMPARLIGKKPTGGVAETLLLRRREDIDALGHVWECLVNPGKRLKPGNVVEYRAGGLLAPEGSPVVLRAEIVDFVDDSKGGRLVRFEPVGANEQGEPRTLDEAIHAAGHVPLPPYITGYEGDPEKYQTVYAMSEEHSAAAPTAGLHFTPELIERIKAKGCGWATVELEVGIDTFRLVEEDDPTEHVMHTERYHVPAEVVEAVHAAKAAGRRVIAVGTTAVRSLESAWDANAAASVPPVTARGFEGREDGADMCGAGDIVTREDATTNLYLMPGSTYHVVDALITNFHVPRSTLMMLVSALATRDQVIDAYEEAVRERYRFFSFGDAMLIE

SEQ ID NO: 65526 - protein, 392 aa, Collinsella tanakaei
  misc_feature (1)..(392): tr|A0A3E4QPE1|A0A3E4QPE1_9ACTN S-adenosylmethionine:tRN A ribosyltransferase-isomerase OS=Collinsella tanakaei OX=626935 GN=queA PE=3 SV=1
MRTDDFDYDLPDELIAQAPAEPRDMCRMLVLHREDGSVEHRVFRDIIDYLEPGDVLVANQTRVMPARLIGRKPTGGVAETLLLRRREDVDPMGHVWECLVNPGKRLKPGAVVEYRAGGAHAPQNSPVVLRATVEDFVDDSRGGRLVRFEPCGENVAGDPRTLDEAIHAAGHVPLPPYITQYEGDPEKYQTVYAMKEEHSAAAPTAGLHFTPELIERIEEKGVKFVTVELEVGIDTFRLVEEDDPTQHVMHTERYHVPAEAVDAVRAAKAAGRRVIAVGTTAVRSLESAWEADAPAANPAVVARRFEDAPDSAAVSGRGDIVARENATTNLYLMPGSTFHVVDAMITNFHVPRSTLMMLVSAFATRDQIMAAYQAAVGERYRFFSFGDAMFIE

SEQ ID NO: 65527 - protein, 392 aa, Collinsella tanakaei
  misc_feature (1)..(392): tr|G1WJU5|G1WJU5_9ACTN S-adenosylmethionine:tRNA ribosy ltransferase-isomerase OS=Collinsella tanakaei YIT 1206 3 OX=742742 GN=queA PE=3 SV=1
MRTDDFDYDLPDELIAQAPAEPRDMCRMLVLHREDGSVEHKVFRDIIDYLEPGDVLVANQTRVMPARLIGRKPTGGAAETLLLRRREDVDPMGHVWECLVNPGKRLKPGAVVEYRAGGAHAPQNSPVVLRATVEDFVDDSRGGRLVRFEPCGENAAGVPRTLDEAIHAAGHVPLPPYITQYEGDPEKYQTVYAMKEEHSAAAPTAGLHFTPELIERIEEKGVKFVTVELEVGIDTFRLVEEDDPTQHVMHTERYHVPAEAVDAVRAAKAAGHRVIAVGTTAVRSLESAWEADAPAADPAVVARRFEDAPDSAAVSGRGDIVARENATTNLYLMPGSTFHVVDAMITNFHVPRSTLMMLVSAFATRDQIMAAYQAAVEERYRFFSFGDAMFIE

SEQ ID NO: 65528 - protein, 352 aa, Colwellia beringensis
  misc_feature (1)..(352): tr|A0A222GAB4|A0A222GAB4_9GAMM S-adenosylmethionine:tRN A ribosyltransferase-isomerase OS=Colwellia beringensis OX=1967665 GN=queA PE=3 SV=1
MRVADFSFELPEELIARYPKANRSASRLMTLNGNDGVRKDETFTDIIDHVKAGDLLVFNNTRVIPARMFGQKASGGKLEVLVERLLDEHRVLAHIRCSKSPKPGSEIVLEGKVKATMVARHDALFELEFHGEQSVLSILDEVGHMPLPPYIDRPDEDSDRERYQTVYNEKPGAVAAPTAGLHFDDELMAQLKAKGVDFAFVTLHVGAGTFQPVKVDEIADHIMHAEYVEVPPSVVAQIEQTKASGGKVIAVGTTSVRSLESAAKIAAEQGKSFSEFYGDTDIFITPGYEFKIVDALITNFHLSESTLLMLVSAFAGYDNIMAAYQHAVAQQYRFFSYGDAMLLTKKDLNTGQ

SEQ ID NO: 65529 - protein, 352 aa, Colwellia chukchiensis
  misc_feature (1)..(352): tr|A0A1H7G320|A0A1H7G320_9GAMM S-adenosylmethionine:tRN A ribosyltransferase-isomerase OS=Colwellia chukchiensi s OX=641665 GN=queA PE=3 SV=1
MRVADFSFDLPEELIARYPKANRSGSRLMTLDGNTGQRQDQQFTDLIQHISPGDLLVFNNTRVIPARMFGQKASGGKLEVLVERLLDEHRVLAHIRCSKSPKPGSEILLEGKVKATMVARHDALFELKFHAQQSVLSILDDIGHMPLPPYIDRPDEDSDRERYQTVYNEKPGAVAAPTAGLHFDDELMAQLKAKGVEFAFVTLHVGAGTFQPVKVDQIADHIMHAEYVEVPSQVVSQIKATKANGGKVIAVGTTSVRSLESAAKVAQTQGQVMSEFYGDTDIFITPGYQFQVVDALITNFHLSESTLLMLVSAFAGYDNIMAAYRHAVSQKYRFFSYGDAMFLTKQEIQTQA

SEQ ID NO: 65530 - protein, 360 aa, Colwellia demingiae
  misc_feature (1)..(360): tr|A0A5C6QMA9|A0A5C6QMA9_9GAMM S-adenosylmethionine:tRN A ribosyltransferase-isomerase OS=Colwellia demingiae O X=89401 GN=queA PE=3 SV=1
MRVSDFSFDLPEALIARYPKAERTASRLMTLNGNSGAITDGVFTDIVEQLNAGDLLVFNNTRVIPARMFGQKASGGKIEVLVERVVDQHTALAHIRASKSPKVGSELFLGNELGNEDSDVKVKATMVARHGALFELKFNSDESVLTILDKIGHMPLPPYIDRPDEDSDKERYQTVYNEKPGAVAAPTAGLHFDEALLEKIKAKGVELAFVTLHVGAGTFQPVKVDEIADHIMHAEYVEVSDEVVAQIAKTKAAGGRVVAVGTTSVRSLESAAKAAQDKNEPLSAFYGDTDIFITPGCQFQLIDALVTNFHLSESTLLMLVSAFSGYDHIMSAYQHAISQEYRFFSYGDAMFLTKQELNKS

SEQ ID NO: 65531 - protein, 350 aa, Colwellia hornerae
  misc_feature (1)..(350): tr|A0A5C6QEB5|A0A5C6QEB5_9GAMM S-adenosylmethionine:tRN A ribosyltransferase-isomerase OS=Colwellia hornerae OX =89402 GN=queA PE=3 SV=1
MRVADFSFDLPEELIARYPKADRTSSRLMSVNGNSGEILDLGFTDIIEQLNDGDLLIFNNTRVIPARMFGQKESGGKIEVLVERILDEKRFLAHIRASKSPKVGNKLILESKVSATMLGRHGALFELKIEGEQSVLSVLEEIGHMPLPPYIDRPDEDSDRERYQTVYNEKPGAVAAPTAGLHFDENLLEKIKAKGVDLAFITLHVGAGTFQPVKVDEIADHIMHAEYVEVSDEVVQQIALTKANGGRVIAVGTTSVRSIESAAKVAKEQALPLSAFYGDTDIFITPGYEFQVIDALITNFHLSESTLLMLVSAFSGYEHMMSAYQHAVHEKYRFFSYGDAMFLTKKDNKI

SEQ ID NO: 65532 - protein, 362 aa, Colwellia marinimaniae
  misc_feature (1)..(362): tr|A0A1Z5HZT1|A0A1Z5HZT1_9GAMM S-adenosylmethionine:tRN A ribosyltransferase-isomerase OS=Colwellia marinimania e OX=1513592 GN=queA PE=3 SV=1
MRVSDFSFKLPQALIARYPKAERSASRLMSLNGNTGVITDGVFTDIVAQLNPGDLLVFNNTRVIPARMFGQKASGGKIEVLVERIIDDNTALAHIRASKSPKVGSEIYLGNGEGQGKVKATMVARHGALFELKFTGEQSVLAILDDIGHMPLPPYIDRPDEDSDKERYQTVYNEKPGAVAAPTAGLHFDNALLDKIKAKGVELAFITLHVGAGTFQPVKVDEIADHIMHAEYVEVSDEVVAQITKTKAAGGRVVAVGTTSVRSLESAAKAAQDKGEALSAFYGDTDIFITPGYQFQLIDALVTNFHLSESTLLMLVSAFSGYEHIMPAYQHAIDKEYRFFSYGDAMFLTKQELTKKSKARAK

SEQ ID NO: 65533 - protein, 359 aa, Colwellia psychrerythraea
  misc_feature (1)..(359): sp|Q487A3|QUEA_COLP3 S-adenosylmethionine:tRNA ribosylt ransferase-isomerase OS=Colwellia psychrerythraea (stra in 34H / ATCC BAA-681) OX=167879 GN=queA PE=3 SV=1
MRVSDFSFDLPEALIARYPKAERTASRLMTLNGNSGAITDGVFTDIVAQLNSGDLLVFNNTRVIPARMFGQKASGGKIEVLVERVIDQNTALAHIRASKSPKVGNELFLGNEDSDVKVKATMVARHGALFELKFNSDESVLTILDKIGHMPLPPYIDRPDEDSDKERYQTVYNEKPGAVAAPTAGLHFDEALLERIKAKGVELAFVTLHVGAGTFQPVKVDEIADHIMHAEYVEVSDEVVAQIAKTKAAGGRVVAVGTTSVRSLESAAKAALDKNKPLSAFYGDTDIFITPGCQFQIIDALVTNFHLSESTLLMLVSAFSGYDHIMSAYQHAISQEYRFFSYGDAMFLTKQELIKQDTP

SEQ ID NO: 65534 - protein, 368 aa, Colwellia psychrerythraea
  misc_feature (1)..(368): tr|A0A099KGR5|A0A099KGR5_COLPS S-adenosylmethionine:tRN A ribosyltransferase-isomerase OS=Colwellia psychreryth raea OX=28229 GN=queA PE=3 SV=1
MRVSDFSFNLPEALIARYPKAERTASRLMALNGDSGAITDGVFTDIVGQLNPGDLLVFNNTRVIPARMFGQKASGGKIEVLIERIIDQNTALAHIRASKSPKVGNELFLRKEQGDELSDEENTIKATMVARHGALFELKFAKDQSVLQVLDQIGHMPLPPYIDRPDEDSDKERYQTVYNEKPGAVAAPTAGLHFDQALLEKIKAKGIELAFVTLHVGAGTFQPVKVDEIADHVMHAEYVEVSDEVVKQIIKTKAAGGRVVAVGTTSVRSLESAAKAATEKGEVLSAFYGDTDIFITPGCEFKIIDALVTNFHLSESTLLMLVSAFSGYENIMKAYQHAIDKEYRFFSYGDAMFLTKQALTKQVLSSST

SEQ ID NO: 65535 - protein, 350 aa, Colwellia sp.
  misc_feature (1)..(350): tr|A0A1D8RXY3|A0A1D8RXY3_9GAMM S-adenosylmethionine:tRN A ribosyltransferase-isomerase OS=Colwellia sp. PAMC 20 917 OX=1816218 GN=queA PE=3 SV=1
MRVADFSFDLPEELIARYPKADRTSSRLMSVNGNSGKILDLGFTDIIEQLNAGDLLIFNNTRVIPARMFGQKESGGKIEVLVERILDEKRFLAHIRASKSPKVGNKLILEGKVSATMLGRHGALFELEIQGDQSVLSVLEEIGHMPLPPYIDRPDEDSDRERYQTVYNEKPGAVAAPTAGLHFDENLLEKIKAKGVDLAFITLHVGAGTFQPVKVDEIADHIMHAEYVEVSDEVVQQIALTKANGGRVIAVGTTSVRSIESAAKVAKDKALPLSAFYGDTDIFITPGYEFQVIDALITNFHLSESTLLMLVSAFSGYEHMMSAYQHAVHEKYRFFSYGDAMFLTKKDYNI

SEQ ID NO: 65536 - protein, 343 aa, Colwellia sp.
  misc_feature (1)..(343): tr|A0A2G2EK70|A0A2G2EK70_COLSX S-adenosylmethionine:tRN A ribosyltransferase-isomerase OS=Colwellia sp. OX=5679 9 GN=queA PE=3 SV=1
MRVADFSFDLPDELIARFPKKDRTSSRLLSLDGPTGEISHKVFSDILELVNENDLLIFNNTRVIPARMFGQKASGGKVEVLVERVLDEHRVLAHVRASKSLKPGNEVILEGKAKATMIARHDTLFELEFDHSKNVLDTLNDIGHMPLPPYIDRPDDEADRERYQTVYGEKPGAVAAPTAGLHFDEPLMAALKNKGVKMAFVTLHVGAGTFQPVRVETIDEHVMHSEYIEVPQDVVDAVAQTKASGGRVIAVGTTSMRSLESAAKIHGGKLDTYFGDTDIFIFPGYQFNVVDAMVTNFHLPESTLIMLVSAFSGQDNIMGAYNTAIEQKYRFFSYGDAMFLTRK

SEQ ID NO: 65537 - protein, 348 aa, Colwelliaceae bacterium
  misc_feature (1)..(348): tr|A0A2D6RI16|A0A2D6RI16_9GAMM S-adenosylmethionine:tRN A ribosyltransferase-isomerase OS=Colwelliaceae bacteri um OX=2026726 GN=queA PE=3 SV=1
MRVSDFAFDLPEELIARYPKSDRTASRLMTVDGNTGAIDNGQFSDVLDKLNKGDLLIFNDTRVIPARMFGKKASGGKLEVLVERMLDEHRVLAHVRCSKSPKPGTEIILEDQVSATMVERHGALFELKFNSDEKVLDILERIGHMPLPPYIDRPDEDSDKERYQTVYNDKPGAVAAPTAGLHFDDALLEKIKAKGVELAFITLHVGAGTFQPVKVDDIADHVMHAEYVEVSQEVVDKIEQTKAAGGRVVAVGTTSMRSLESAAKAADEEGKLIIPFYQDTDIFITPGFNFKVVDCLITNFHLSESTLLMLVSAFAGYEHMMAAYEQAIEEKYRFFSYGDAMFLTRKQG

SEQ ID NO: 65538 - protein, 389 aa, Comamonadaceae bacterium
  misc_feature (1)..(389): tr|A0A2H0IYD2|A0A2H0IYD2_9BURK S-adenosylmethionine:tRN A ribosyltransferase-isomerase OS=Comamonadaceae bacter ium CG12_big_fil_rev_8_21_14_0_65_59_15 OX=1973952 GN=q ueA PE=3 SV=1
MHLDATDSARTFSLCDFDFALPPDLIAQHPAPQRSGSRLLDGTYATPVDRVFTDLPAQLRAGDLLVLNDTRVMHARLFGEKPTGGKCELLIERVLDGNQVAAHLRVSKKPAPGTTLRLVAAAGCDDHPRATVLGRWPDEHGALFRLALSNDAGDDPYTLMARHGHVPLPPYITHTDSPEDAQRYQTVFASKLGAVAAPTAALHFDEAVLAQLDTMGVQRAYVTLHVGAGTFQPVKTENLAEHQMHSEWYQVPAATQQAIADCRARGGRVVAAGTTSVRALESWALQANGVRAHNRCAVGDLTPLTQTPLTLAPFTGDTRIFITPGFEFKVVDLLLTNFHLPKSTLMMLVSAFAGYERVMALYQHAMTQRYRFFSYGDAMLLQRQKLANT

SEQ ID NO: 65539 - protein, 277 aa, Comamonadaceae bacterium
  misc_feature (1)..(277): tr|A0A2M8E529|A0A2M8E529_9BURK S-adenosylmethionine:tRN A ribosyltransferase-isomerase (Fragment) OS=Comamonada ceae bacterium CG_4_9_14_0_8_um_filter_60_18 OX=1973950 GN=queA PE=3 SV=1
MHHTVPGTSRPFALSDFDFCLPPELIAQHPASERSGSRLLDGTQSLPIDRTFTEVPDLLRAGDLMVFNDTRVMNARLFGEKPTGGKVELLVERVLDSNQVAAHMRVSKKPDVGTTIKLNAAAGCSDNPSATLLGRWPDAHGALFRLVLSNDAGDDPHALMARHGHVPLPPYITHSDSPEDVQRYQTVFAKNPGAVAAPTAALHFDGALLAKIDAMGVQRAHVTLHVGAGTFQPVKTENLAEHQMHSEWYNVPAATQQAVADCRARGGRVVAVGTTSV

SEQ ID NO: 65540 - protein, 362 aa, Comamonas aquatica
  misc_feature (1)..(362): tr|A0A014MP85|A0A014MP85_9BURK S-adenosylmethionine:tRN A ribosyltransferase-isomerase OS=Comamonas aquatica DA 1877 OX=1457173 GN=queA PE=3 SV=1
MSLSPRAHTLSDFDFVLPEHLIAQHPAAERSASRLLDARAPELVDRIFKDLPGLLHEGDLLVFNDTKVVKARVFGEKASGGKLELLIERVLQGNEVVAHMKVSKKPLPGARIHLCGGLQGGGFDAVLLGRWPDESGPLFRFALTGAHGETPWELMDQFGHLPLPPYIERQQNAEVDPDAAEDTERYQTVFASHPGAVAAPTAALHFDDQVLAALKAKGVETATVTLHVGAGTFQPVKTENLAEHQMHSEWYNIPFETLAALERCRQRRGRIIAVGTTSVRTLESWARTGQITGDTNIFITPGFEFRVVDALITNFHLPKSTLMMLVSAFAGYQHIMQVYQHAIAQGYRFFSYGDSMLLERRR

SEQ ID NO: 65541 - protein, 362 aa, Comamonas aquatica
  misc_feature (1)..(362): tr|A0A1B2D0P4|A0A1B2D0P4_9BURK S-adenosylmethionine:tRN A ribosyltransferase-isomerase OS=Comamonas aquatica OX =225991 GN=queA PE=3 SV=1
MSLSPRAHTLSDFDFVLPEHLIAQHPAAERSASRLLDARAPELVDRIFKDLPGLLHEGDLLVFNDTKVVKARVFGEKASGGKLELLIERVLQGNEVVAHMKVSKKPLPGARIHLCGGLQGGGFDAVLLGRWPDDNGPLFRFALTGARGETPWELMDQFGHLPLPPYIERQQNAEVDPDAAEDTERYQTVFASHPGAVAAPTAALHFDDQVLAALKAKGVETAAVTLHVGAGTFQPVKTENLAEHQMHSEWYNIPLETLAALERCRQRRGRIIAVGTTSVRTLESWARTGQITGDTNIFITPGFEFRVVDALITNFHLPKSTLMMLVSAFAGYQHIMQVYQHAIAQGYRFFSYGDSMLLERRR

SEQ ID NO: 65542 - protein, 363 aa, Comamonas kerstersii
  misc_feature (1)..(363): tr|A0A0W7YZE7|A0A0W7YZE7_9BURK S-adenosylmethionine:tRN A ribosyltransferase-isomerase OS=Comamonas kerstersii OX=225992 GN=queA PE=3 SV=1
MSSSHRAPHTLSDFDFVLPEHLIAQHPAAERSASRLLDARAPELVDRVFKDLPDLLHEGDLLIFNDTKVVKARIFGEKASGGKLELLIERVLQGNEVVAHMKVSKKPLPGARIHLCGGVKNGGFDAVLLGRWPDESGPLFRFALQGANNESPWELMDQFGHLPLPPYIERNQNAEEDPDEEEDSERYQTVFASHPGAVAAPTAALHFDEKVLAALKEKGVETAAVTLHVGAGTFQPVKVENIAEHQMHSEWYNIPLETLAALERCRQRRGRIIAVGTTSVRTLESWARTGQISGDTNIFITPGFEFRVVDCLITNFHLPKSTLMMLVSAFAGYKHIMDTYQHAIQNEYRFFSYGDSMILERRR

SEQ ID NO: 65543 - protein, 381 aa, Comamonas sp.
  misc_feature (1)..(381): tr|A0A363RM08|A0A363RM08_9BURK S-adenosylmethionine:tRN A ribosyltransferase-isomerase OS=Comamonas sp. JNW OX= 2170731 GN=queA PE=3 SV=1
MTAFSGARRTFQLSDFDFELPEALIAQHPAAERSGSRLLDAREPGLVDRRFHELPDLLQAGDLLVFNDTEVIKARIFGEKSSGGKIELLIERVLQDNEVVAHMKVSKKPAVGGVLHMMGGKKAGGFDATLLGRWPNEMGALFRLRLSGPNGESPWELMQQHGHIPLPPYIEREQQTGQDPNQAEDEQRYQTVFAKNPGAVAAPTAALHFDEKVLAALEAKGVERASVTLHVGAGTFQPVKTENLKDHQMHSEWYNIPLPTLAALERCRLRGGRVIAVGTTTVRTLESWARTGQLSDDTNIFITPGFPFRVVDMLVTNFHLPKSSLMMLVSAFAGYEHIMGLYQHAIAQQYRFFSYGDSMLLQRQKEPAAADAATEQLPAAF

SEQ ID NO: 65544 - protein, 365 aa, Comamonas sp.
  misc_feature (1)..(365): tr|A0A1D2UA15|A0A1D2UA15_9BURK S-adenosylmethionine:tRN A ribosyltransferase-isomerase OS=Comamonas sp. SCN 67- 35 OX=1660096 GN=queA PE=3 SV=1
MTALTDRAYTLSNFDFHLPAELIAQHPAARRSDSRLLDGRGPAPVDLIFRDLPRLLTPGDLMVFNDTRVVKARLFGEKSSGGHVELLIERVLTGAEVIAHLKVSKKPAPGAVLRFGGGRARGGFDAVLLSRWPDAQGALFRLRLEGAAGESPWELMQRHGHLPLPPYIRREQEGGHDAWEAEDNERYQTVFAHTPGAVAAPTAALHFDEGVLARLAERGVQTAHVTLHVGAGTFQPVKTEHIAEHHMHSEWYRIPAETLAAIEACRTRGGRVLAIGTTTVRTLESWARSGKTSDDTDIFITPGFEFRVVDLLVTNFHLPKSTLMMLVSAFAGYEHVMRLYHHAIAGRYRFFSYGDAMLLARASAA

SEQ ID NO: 65545 - protein, 362 aa, Comamonas terrigena
  misc_feature (1)..(362): tr|A0A2A7UQB7|A0A2A7UQB7_COMTR S-adenosylmethionine:tRN A ribosyltransferase-isomerase OS=Comamonas terrigena O X=32013 GN=queA PE=3 SV=1
MSFSPRPHTLSDFDFALPEHLIAQHPAAERSASRLLDGRQSPPVDRVFKELPDLLHEGDLLVFNDTKVVKARVFGEKASGGKLELLIERVLEGNEVVAHMKVSKKPLPGAKIHLHGGLGKGGFDATLLGRWPDESGPLFRFALQGAHNATPWDLMEQFGHLPLPPYIARNQNSDEDPDEAEDTERYQTVFASHPGAVAAPTAALHFDQGVLDALKERGVETASVTLHVGAGTFQPVKVENIAEHQMHSEWYNIPLGTLAALERCRQRRGRIIAVGTTSVRTLESWARTGQISGDTNIFITPGFEFRVVDCLITNFHLPKSTLMMLVSALAGYKHVMELYQHAVQNEYRFFSYGDSMLLERKR

SEQ ID NO: 65546 - protein, 362 aa, Comamonas testosteroni
  misc_feature (1)..(362): tr|A0A076PR99|A0A076PR99_COMTE S-adenosylmethionine:tRN A ribosyltransferase-isomerase OS=Comamonas testosteron i TK102 OX=1392005 GN=queA PE=3 SV=1
MSSSTREFTLSDFDFDLPESLIAQHPTAVRSASRLLDGRSLPATDRIFRELPDLLQPGDLLVFNDTKVIKARVFGEKASGGKIELLVERVLQNNEVVAHMRVSKKPLPGAKIHLCGGLRNGGFEATLLGRWPDENGPLFHLSFKGNQGESPYELLEQFGHLPLPPYIERQQNAEHDPDEKEDSERYQTVFAAHPGAVAAPTAALHFDETVLAALQAKGVERASVTLHVGAGTFQPVKTENLADHTMHSEWYDIPLPTLAAMERCRQRGGRIIAVGTTTVRTLESWAKYGNITGDTSIFITPGFQYQVVDMLITNFHLPKSTLMMLVSAFAGYEHIMAMYQHAIAQHYRFFSYGDSMLLERQR

SEQ ID NO: 65547 - protein, 362 aa, Comamonas testosteroni
  misc_feature (1)..(362): tr|A0A5A7MA49|A0A5A7MA49_COMTE S-adenosylmethionine:tRN A ribosyltransferase-isomerase OS=Comamonas testosteron i OX=285 GN=queA PE=3 SV=1
MSSCTREFTLSDFDFDLPESLIAQHPTAVRSASRLLDGRSLPATDRIFRELPDLLQPGDLLVFNDTKVIKARVFGEKASGGKIELLVERVLQNNEVVAHMRVSKKPLPGAKIHLCGGLRNGGFEATLLGRWPDENGPLFHLSFKGNQGESPYELLEQFGHLPLPPYIERQQNAEHDPDEKEDSERYQTVFAAHPGAVAAPTAALHFDETVLAALQAKGVERASVTLHVGAGTFQPVKTENLADHTMHSEWYDIPLPTLAAMERCRQRGGRIIAVGTTTVRTLESWAKYGNISGDTSIFITPGFQYQVVDMLITNFHLPKSTLMMLVSAFAGYEHIMGMYQHAIAQHYRFFSYGDSMLLERQR

SEQ ID NO: 65548 - protein, 362 aa, Comamonas thiooxydans
  misc_feature (1)..(362): tr|A0A0E3C0C0|A0A0E3C0C0_9BURK S-adenosylmethionine:tRN A ribosyltransferase-isomerase OS=Comamonas thiooxydans OX=363952 GN=queA PE=3 SV=1
MSSSTREFTLSDFDFDLPESLIAQHPTAVRSASRLLDGRSLPATDRIFRELPDLLQPGDLLVFNDTKVIKARVFGEKASGGKIELLVERVLQNNEVVAHMRVSKKPLPGAKIHLCGGLKNGGFEATLLGRWPDENGPLFHLSFKGNQGESPYELLEQFGHLPLPPYIERQQNAEHDPDEKEDSERYQTVFAAHPGAVAAPTAALHFDETVLAALQAKGVERASVTLHVGAGTFQPVKTENLADHTMHSEWYDIPLPTLAAMERCRQRGGRIIAVGTTTVRTLESWAKYGNISGDTSIFITPGFQYQVVDMLITNFHLPKSTLMMLVSAFAGYEHIMGMYQHAIAQHYRFFSYGDSMLLERRR

SEQ ID NO: 65549 - protein, 362 aa, Comamonas thiooxydans
  misc_feature (1)..(362): tr|A0A0E3BLY0|A0A0E3BLY0_9BURK S-adenosylmethionine:tRN A ribosyltransferase-isomerase OS=Comamonas thiooxydans OX=363952 GN=queA PE=3 SV=1
MSSCTREFTLSDFDFDLPESLIAQHPTAVRSASRLLDGRSLPATDRIFRELPDLLQPGDLLVFNDTKVIKARVFGEKASGGKIELLVERVLQNNEVVAHMRVSKKPLPGAKIHLCGGLKNGGFEATLLGRWPDENGPLFHLSFKGNQGESPYELLEQFGHLPLPPYIERQQNAEHDPDEKEDSERYQTVFAAHPGAVAAPTAALHFDETVLAALQAKGVERASVTLHVGAGTFQPVKTENLADHTMHSEWYDIPLPTLAAMERCRQRGGRIIAVGTTTVRTLESWAKYGNISGDTSIFITPGFQYQVVDMLITNFHLPKSTLMMLVSAFAGYEHIMGMYQHAIAQHYRFFSYGDSMLLERQR

SEQ ID NO: 65550 - protein, 349 aa, Commensalibacter intestini
  misc_feature (1)..(349): tr|G6F160|G6F160_9PROT S-adenosylmethionine:tRNA ribosy ltransferase-isomerase OS=Commensalibacter intestini A9 11 OX=1088868 GN=queA PE=3 SV=1
MTDQTADFDFDLPETCIAHQPMRPKDLAKLLYIPTGQALEDKIIRDLPSFFRKGDILVANDTKVIHAKLSAMRGAAHIGITLDRPMGDGRWHVLIKNSKRLKLGDKLDFPDGQVYATVDELEDGGSGFIRFSVEGDAFDQWLRDIGTLALPPYIERPTGPTEQDEKDYHTIFSHHPGAVAAPTAGLHFTDQLLAQLDEVGVERLTLTLHVGAGTFLPVRSDNISDHHMHAEYGIITPEVAERLNKAKAEKRRIIAVGTTSLRLLESAVDEHGVIHPFHKETSIFIRPGYRFKAVDMLMTNFHLPRSTLFMLVCAFGGTEKMRHAYEHAIKTGYRFYSYGDACLIEKASL

SEQ ID NO: 65551 - protein, 349 aa, Commensalibacter intestini; identical to SEQ ID NO: 65550
  misc_feature (1)..(349): tr|A0A251ZX19|A0A251ZX19_9PROT S-adenosylmethionine:tRN A ribosyltransferase-isomerase OS=Commensalibacter inte stini OX=479936 GN=queA PE=3 SV=1

SEQ ID NO: 65552 - protein, 349 aa, Commensalibacter sp.
  misc_feature (1)..(349): tr|W7DYM6|W7DYM6_9PROT S-adenosylmethionine:tRNA ribosy ltransferase-isomerase OS=Commensalibacter sp. MX01 OX= 1208583 GN=queA PE=3 SV=1
MTDQTADFDFDLPQSCIAHHPMRPKDMAKLLYIPTTGLPEDHIIRDLPSFFRKGDILVANDTKVIHAKLSAMRGAAHIGITLDRPMGDERWHVLIKNSKRLKQGDRLDFPDGKVYATIDELEVGGSGFIRFSIEGDAFDAWLRDIGKLALPPYIERPDGPTVEDEEDYHTIFSQFPGAVAAPTAGLHFTDQLLTQLDDIGVERLTLTLHVGAGTFLPVRSDNISDHHMHAEYGIITPAVATRLNQAKTEKRRIIAVGTTSLRLLESAVDENGVIHPFHKETSIFIRPGYKFKAVDMLMTNFHLPRSTLFMLVSAFGGAEKMRHAYQHAIQNGYRFYSYGDACLIEKAFM

SEQ ID NO: 65553 - protein, 350 aa, Commensalibacter sp.
  misc_feature (1)..(350): tr|A0A318N1K2|A0A318N1K2_9PROT S-adenosylmethionine:tRN A ribosyltransferase-isomerase OS=Commensalibacter sp. ESL0284 OX=2070537 GN=queA PE=3 SV=1
MTDLTADFDFKLPEHCIAQHPARPREAAKLLYIPSKSGKFQDKTIRDLPCYFQKGDILIANDTKVIPAKLFAQRGMAHIGITLDRPMGDGTWHVLIKNSKRLKKQDRLDFPDKKCFATVVKLETGGGAFIRFNLEGNEFDKWLNTSGQLALPPYIRRPYGPTERDELDYYTIFSQNPGAVAAPTAGLHFTEELLTQLDHKGVERLALTLHVGAGTFLPVRSENINDHHMHAEYGVLSPENAERLNQAKVEKRRIIAVGTTTLRLLESAIDQQGIFHPFQQETSIFIRPGHQFRSIDILMTNFHLPRSTLFMLVCAFGGTEKMRQAYEHAIRNNYRFYSYGDACIIEKEFL

SEQ ID NO: 65554 - protein, 340 aa, Conchiformibius steedae
  misc_feature (1)..(340): tr|A0A3P2A231|A0A3P2A231_9NEIS S-adenosylmethionine:tRN A ribosyltransferase-isomerase OS=Conchiformibius steed ae OX=153493 GN=queA PE=3 SV=1
MRLADFDFELPEQLIAQHPPAERGGSRLLAALPDMPLRDGVFADLPDFVAAGDLLVFNNTKVMKARLFGHKASGGKIEALVERVLDAHTALAHIRSSKSPKAGTELLFDGGIRAVMQERAGELFCLRFLGEQNVYELLEQNGKLPLPPYIVRAADDDDDARYQTVYAKYQGAVAAPTAGLHFTDDLLAQLKQKDVNMAEVTLHVGAGTFQPVRSDNIAEHKMHSEWFDVPQSVVEAVAETRQRGGKVWAVGTTSLRALESAARSGSLQAGTGDTDIFITPGYRFQVTDRLITNFHLPKSTLLMLVSALAGTEHIRAVYRHAVEQQYRFFSYGDAMLLGRN

SEQ ID NO: 65555 - protein, 349 aa, Confluentibacter sp.
  misc_feature (1)..(349): tr|A0A2N3HNQ5|A0A2N3HNQ5_9FLAO S-adenosylmethionine:tRN A ribosyltransferase-isomerase OS=Confluentibacter sp. 3B OX=1909700 GN=queA PE=3 SV=1
MKLSHFGFNLPDELLAEYPAENRDESRLMVLNRKTQTIEHKMFKDIMDYFDEGDVMIINNTKVFPARLYGNKEKTGARIEVFLLRELNEEQRLWDVLVDPARKIRIGNKLYFGDDDTLVAEVIDNTTSRGRTLRFLYDGSYKEFRNKLTELGETPLPKYIKREVQPEDEERYQTIFAKNEGAVAAPTAGLHFSKHLLKRLEIKGVNFAEVTLHVGLGTFNPVEVEDLSKHKMDSEELIINSKAVDIVNNGIKNKKRICAVGTTAMRAIESSVSSNGKLNEMEGWTNKFIFPPYDFSIANCMITNFHTPKSTLLMMASAFGGVDFVKKAYQEAIKEKYKFYSYGDAMLII

SEQ ID NO: 65556 - protein, 349 aa, Confluentimicrobium lipolyticum
  misc_feature (1)..(349): tr|A0A238KJ97|A0A238KJ97_9RHOB S-adenosylmethionine:tRN A ribosyltransferase-isomerase OS=Confluentimicrobium l ipolyticum OX=1524263 GN=queA PE=3 SV=1
MKLSDFDFDLPEELIATRPARPRTSARLLLAKGDQISDLHVHDLPGLLQAGDRLVLNNTKVIPARLFGRRQRQTPEGLVEAKVEITLLEPQPDGGWVALAKPLRKLKEGEEVVFSDALSARVAAKGDGDVTLSFNLTGDDFDAALADAGAMPLPPYIAAKRPADAQDKEDYQTVFARHSGAVAAPTASLHFDDALLDELRAKGVQFSEVTLHVGAGTFLPVKVEDVETHKMHAEWGQVTQKAADEMNQTRAEGGRIIPVGTTALRLIESAAQDDGTMVPWQGETDIFIRPGYRFKVTDALMTNFHLPKSTLLMLVSALMGQDRMRTVYDHAVTQKYRFFSYGDSSLLIP

SEQ ID NO: 65557 - protein, 356 aa, Confluentimicrobium sp.
  misc_feature (1)..(356): tr|A0A2D9VLK6|A0A2D9VLK6_9RHOB S-adenosylmethionine:tRN A ribosyltransferase-isomerase OS=Confluentimicrobium s p. OX=1931204 GN=queA PE=3 SV=1
MKLSDFDFDLPEDLIATRPARPRSSARLLVADGQVPGGPLRDAVVTDLPSFLRPGDRLILNNTRVIPARLSGLRHRDGAEGATAARIGITLLEPRGDGSWAALAKPAKKVRDGEDIVFAPGFSARVEGRAEGQVHLRFSVTGDDFDAALAQAGAMPLPPYIAAKRPADEADHTDYQTVFARHSGAVAAPTASLHFDQPLLERIAAMGVDFSEVTLHVGAGTFLPVKVDDVTTHRMHAEWGEVGAQAAAEINATRAAGGRIIPVGTTALRLIESAATPEGRMKPWDGETDIFIYPGYEFRIADGLMTNFHLPKSTLMMLVSALMGQARMREVYDHATAERYRFFSYGDSSLLLPGGV

SEQ ID NO: 65558 - protein, 349 aa, Confluentimicrobium sp.
  misc_feature (1)..(349): tr|A0A0N9NP84|A0A0N9NP84_9RHOB S-adenosylmethionine:tRN A ribosyltransferase-isomerase OS=Confluentimicrobium s p. EMB200-NS6 OX=1609966 GN=queA PE=3 SV=1
MKLSDFDFDLPEELIATRPARPRTAARMLVAEGDTLRDCHVYDLPSLLRAGDRLVLNNTKVIPARLFGRRLRHTPEGVVEAKVEITLLEPQPGGGWAALAKPLRKLKQGEEIVFSDALSARVTERREGDVVLGFNLAGDDFDAALAEAGAMPLPPYIAAKRPADAQDKTDYQTVFARHAGAVAAPTASLHFDAELLEKLRTIGVTFTEVTLHVGAGTFLPVKVEDVETHKMHAEWGEVTAQAAAEINATRAAGARIIPVGTTALRLIESAAQADGTMVPWRGETDIFIRPGYRFRVTGALMTNFHLPKSTLLMLVSALMGVERMRAVYAHAVAGRYRFFSYGDASLLIP

SEQ ID NO: 65559 - protein, 352 aa, Congregibacter litoralis
  misc_feature (1)..(352): tr|A4ADH1|A4ADH1_9GAMM S-adenosylmethionine:tRNA ribosy ltransferase-isomerase OS=Congregibacter litoralis KT71 OX=314285 GN=queA PE=3 SV=1
MQRSDFSYDLPQELIAQTPLAERSASRLLCVNGMQKSFEHKVFTDLPEQLNAGDLLVFNNTRVLPARLFGVKETGGRVEILIERLTGDCSALAHIRASKTPKPGMSIALAADVDSPATDVRLTVQGREGELFKITSAESLGPLLARIGHMPLPPYIDRADAAEDKERYQTVYAQRDGAVAAPTAGLHFDEALLKRLDALGVRRAEVTLHVGAGTFQPVRSDDIRDHEMHAEYLEVDQAVCDAVEATRARGGRVVAVGTTAVRSLETAAASGRLGPYVGDTQLFIYPGYRFHCVDAMVTNFHLPESTLLMLVSAFSGKDLMLAAYNEAVKERYRFFSYGDAMFLTPQTGVRDA

SEQ ID NO: 65560 - protein, 362 aa, Conservatibacter flavescens
  misc_feature (1)..(362): tr|A0A2M8S2Z4|A0A2M8S2Z4_9PAST S-adenosylmethionine:tRN A ribosyltransferase-isomerase OS=Conservatibacter flav escens OX=28161 GN=queA PE=3 SV=1
MLVSDFHFDLPDELIARYPTEKRTASRLLQLNGDTGAIKHGHFPDILDLIHDGDLLVFNNTRVIPARLFGRKATGGKIEVLIERVLTDDCILAHVRASKAPKAGAELILGEDKLGEGNGIKAQMIARQGALFEIKILQKHTALFELLQQIGHMPLPPYIDRPDEEADQERYQTVYNKVPGAVAAPTAGLHFDDALLAKLKAKGVNFAFVTLHVGAGTFQPVRVEKIEDHHMHAEYAEVPQDVVEAILSTKANGKRVIAVGTTSVRSIESAALASEERQTGNLLDPFFSDTSIFIYPGKQFRIIDGLITNFHLPESTLIMLVSAFAGYEHTMHAYQSAVENRYRFFSYGDSMFITKNHSTQRA

SEQ ID NO: 65561 - protein, 351 aa, Consotaella salsifontis
  misc_feature (1)..(351): tr|A0A1T4LU29|A0A1T4LU29_9RHIZ S-adenosylmethionine:tRN A ribosyltransferase-isomerase OS=Consotaella salsifont is OX=1365950 GN=queA PE=3 SV=1
MRVDLFDFELPEDRIALRPVVPREAARLLAVSRGGALADAHVGDLPDLLRSGDVLVFNDTRVIPARLFGVRRRGENAARVEATLHLRESPECWRAFLKPAKRVASGETLIFEGGGEVLMARIEEKGEGGEALLAFDRSGADLDAALAAVGLIPLPPYIAARRDIDEQDRADYQTIYARENGAVAAPTAGLHFTPDLLARLDARGIRHEFLTLHVGAGTFLPVKADETAGHKMHAEIGHLDAATAERLNRARVEGGRIVAVGTTSLRLLESAAREDGTIEAFTGSTSIFITPGYRFRTADLLMTNFHLPRSTLFMLVSAFSGLETMRAAYAHAIAGGYRFYSYGDACLLERV

SEQ ID NO: 65562 - protein, 353 aa, Convivina intestini
  misc_feature (1)..(353): tr|A0A2U1D981|A0A2U1D981_9LACT S-adenosylmethionine:tRN A ribosyltransferase-isomerase OS=Convivina intestini O X=1505726 GN=queA PE=3 SV=1
MTENKVYQLSDFDYHLPEELIAQTPLKQRDQSRLLVLNAKTGEYQDRHFYDVLDYLNPGDALVMNNSRVLPARLHGVRPETGGHAEVLLLRQDHGDVWETLVKPAKKSPIGSTIVFGNNPDHPLMTATVVGELEHGGRYVEFSYDGIFMELLEQLGEMPLPPYIKEKLSDQERYQTVYSKVEGSAAAPTAGLHWTPELLEKVRAKGVQTVELTLHVGLGTFRPVEEENIEDHKMHSEFYQLTQAAADTLNAVRAQGGKIVATGTTTIRTLETIGTKFNGQLQADSGWTDIFIKPGYQWQVVDAFITNFHLPKSTLIMLVAAFTGRENILAAYEHAVQAGYRFFSFGDAMYVHK

SEQ ID NO: 65563 - protein, 341 aa, Coprobacillus cateniformis
  misc_feature (1)..(341): tr|E7GAM3|E7GAM3_9FIRM S-adenosylmethionine:tRNA ribosy ltransferase-isomerase OS=Coprobacillus cateniformis OX =100884 GN=queA PE=3 SV=1
MKLSEFDYHLPEELIAQTPLKKRDTSRLMVLDRKNETIEDKHFYDILDYLYEGDILVRNNTKVIPARLYGTKEETNGHVEVLLLKDLGNDVWECLVGNARIVKIDTIITFGDGSLKAKCIHIGDEGIRHFEMIYEGIFYEILDTLGTMPLPPYIKEKLEDQERYQTVYAKIEGSAAAPTAGLHFTDDIIDKVKAKGVKILDVTLHVGLGTFRPVKVDDVLEHHMHSEFYMIDEDVAQQLNNAKANGQRIISVGTTSTRTLEANFKKYGQFKATQESTDIFIYPGYQFEAIDALITNFHLPKSTLVMLVSAFANKEFILKAYHHAVEEKYRFFSFGDCMFIQ

SEQ ID NO: 65564 - protein, 341 aa, Coprobacillus sp.
  misc_feature (1)..(341): tr|A0A416WHX5|A0A416WHX5_9FIRM S-adenosylmethionine:tRN A ribosyltransferase-isomerase OS=Coprobacillus sp. AF1 5-30 OX=2293061 GN=queA PE=3 SV=1
MKLSEFDFELPEELIAQHPVEKRDTSRLMVVNRENGNIEHRHFYDILDYLKPGDVLVRNNTKVIPARLFGIKEETNGHVEVLLLKELKKDTWECLCGNARIIKMNTVITFGEGLLKAKCIEIKDEGIRVFEMMYDGIFYEILDQLGTMPLPPYIKEKLEDKNRYQTVYAKIEGSAAAPTAGLHFTEEINQKIKDKGIEILDVCLHVGLGTFRPVKEENVLDHHMHSEFYMISEEVADKLNKAKANGQRIIAVGTTSTRTLEANMKKYGKFTATSENTDIFIYPGYKFEAIDCLITNFHLPKSTLLMLISAFASKELIFKAYKEAVKEKYRFFSFGDSMMIL

SEQ ID NO: 65565 - protein, 341 aa, Coprobacillus sp.; identical to SEQ ID NO: 65564
  misc_feature (1)..(341): tr|R5QMN1|R5QMN1_9FIRM S-adenosylmethionine:tRNA ribosy ltransferase-isomerase OS=Coprobacillus sp. CAG:235 OX= 1262854 GN=queA PE=3 SV=1

SEQ ID NO: 65566 - protein, 407 aa, Coprobacter fastidiosus
  misc_feature (1)..(407): tr|A0A495VQ59|A0A495VQ59_9BACT S-adenosylmethionine:tRN A ribosyltransferase-isomerase OS=Coprobacter fastidios us NSB1 OX=1349822 GN=queA PE=3 SV=1
MQKTRDIRIEEFNYPLPDERIAKFPLSQRDRSKLLLYRSGSVSESEFFHLPDLLPENSLLVFNNTKVIQARLHFRKETGALIEIFCLEPLSPNNYLLSFQSNRECVWACMVGNLKKWKSGTLSRTVIIEGKSVTLNADRLNAYGNSFEIRFSWDNPQISFAALLDAVGELPIPPYLNRETEESDKETYQTVYSKIEGSVAAPTAGLHFTEDVLAALKEKCIPCLELTLHVGAGTFKPVKSETIEGHEMHTEFISVERSLIVSLAETDRRIIAVGTTSVRTLESLYYIGRTLEYNPDAVPEELKVGQWQPYDDTVAEIDYRKALRNIVDYLDRKGLSRLVTATQIIIAPGYTFKIVRGMITNFHQPQSTLLLLVSAFVDGRWREIYDYALSHDFRFLSYGDSSLLLPD

SEQ ID NO: 65567 - protein, 349 aa, Coprobacter fastidiosus
  misc_feature (1)..(349): tr|A0A354M0A5|A0A354M0A5_9BACT S-adenosylmethionine:tRN A ribosyltransferase-isomerase OS=Coprobacter fastidios us OX=1099853 GN=queA PE=3 SV=1
MKLSQFKFKLTEEQIAKYPAKNRDESRLMVVHRNTGEIEHRIFKDILEYFDDKDVFVFNDTKVFPARLYGNKEKTGAKIEVFLLRELNEENRLWDVLVDPARKIRIGNKLYFGEDDSMVAEVIDNTTSRGRTLRFLFDGTHEEFKEALYKLGETPLPRYINRPAEPDDVDRYQNIFAKNEGAVVAPAAGLHFSRELLKRMEIKGIESGFLTLHSGLGNFREIDVEDLTKHKMDSEQMLVTPELVAFVNKAKDENRQVCAVGTSVMRAIESTVSTDGHMKPYSGWTNKFIFPPYDFTVATSLVSNFHMPLSTMLMMVAAFGGYDLVLDAYDKALKEGYRFGAYGDAMLII

SEQ ID NO: 65568 - protein, 351 aa, Coprobacter secundus
  misc_feature (1)..(351): tr|A0A0B2JP70|A0A0B2JP70_9BACT S-adenosylmethionine:tRN A ribosyltransferase-isomerase OS=Coprobacter secundus OX=1501392 GN=queA PE=3 SV=1
MKLSQFKFKLPEDQIAKYPAKNRDESRLMVLHRNTGKIEHRIFKEILEYYDDKDVFVFNDTKVFPARLYGNKEKTGAKIEVFLLRELNEENRLWDVLVDPARKIRIGNKLYFGEDDSMVAEVIDNTTSRGRTLRFLFDGTHEEFKDALYKLGETPLPRYINRPVEPDDELRYQNIFAKNEGAVVAPAAGLHFSRELLKRMEIKGIEYNFLTLHSGLGNFREIDVEDLTKHKMDSEQMLVTQQLVDFVNKAKDENRQVCAVGTSVMRAIESTVSTDGHMKTYSGWTNKFIFPPYDFTVATSLISNFHMPLSTMLMMVAAFGGYDLVLEAYDVALKEKYRFGAYGDAMLILDR

SEQ ID NO: 65569 - protein, 405 aa, Coprobacter secundus
  misc_feature (1)..(405): tr|A0A0B2JM58|A0A0B2JM58_9BACT S-adenosylmethionine:tRN A ribosyltransferase-isomerase OS=Coprobacter secundus OX=1501392 GN=queA PE=3 SV=1
MQKTQDIRIEDFNYPLPDERIAKFPLSKRDTSKLLLYRNGKISQTIFHNLPQILPEGSLLVFNNTRVIQARLHFRKKTGALIEIFCLEPLLPHDYALAFQSKGHCTWVCMIGNLKKWKEETLYRDLDFNGTSVRLSATKKNVHGNAFEIEFFWDNLELTFDTILEKIGELPIPPYLNRATEESDKETYQTVYAKVEGSVAAPTAGLHFTPEVLSELKNSGVPLLELTLHVGAGTFKPVKSETIEGHEMHTEFISVDISLIEQLARTTRKIIAVGTTSVRTLESLYYIGRTLEYHPEISPEELHVTQWRPYDSEIEIEPKKALENIVEYLHKHCSNRLVTSTQIIIAPGYTFKIVQGIITNFHQPKSTLLLLVSAFVDGHWREIYDYALANNFRFLSYGDSSLLLP

SEQ ID NO: 65570 - protein, 405 aa, Coprobacter sp.
  misc_feature (1)..(405): tr|A0A316SXY2|A0A316SXY2_9BACT S-adenosylmethionine:tRN A ribosyltransferase-isomerase OS=Coprobacter sp. OX=19 41478 GN=queA PE=3 SV=1
MQKTQDIRMDAYNYPLPDERIAKFPLPKRDMSKLLFYNGGTITERNFNELPDLLPDDALLVFNNTRVIQARLHFRKETGALIEVFCLEPFFPHDYLLSFQTTGECRWLCLVGNLKKWKEGALSRTLEIDGVPVTLNAVRGAAHGNSHEIIFTWDNPRITFAALLDAIGELPIPPYLNRETEESDKETYQTVYSKIEGSVAAPTAGLHFTPEVFNALKSNGVPCLELTLHVGAGTFKPVKSETIKGHEMHTEFISVERSLIERLARTEKRVIAVGTTSVRTLESLYYIGLTLEHRPDALPEELPVEQWQPYLQVASVSTSKALENILRWLDKRGSKRLVTATRIIIAPGYEFHVVKGMVTNFHQPQSTLLLLVSAFVNGNWREIYDYALEHDFRFLSYGDSSLLLP

SEQ ID NO: 65571 - protein, 349 aa, Coprobacter sp.
  misc_feature (1)..(349): tr|A0A316SRM7|A0A316SRM7_9BACT S-adenosylmethionine:tRN A ribosyltransferase-isomerase OS=Coprobacter sp. OX=19 41478 GN=queA PE=3 SV=1
MKLSQFKFKLPEDLIAKYPAKNRDESRLMVLHRKTGEIEHRIFKEVINYFDDKDIFVFNDTKVFPARLYGNKEKTGAKIEVFLLRELNEENRLWDVLVEPARKIRIGNKLYFGEDDSMVAEVIDNTTSRGRTLRFLFDGTHDEFKEALYKLGETPLPGYINRPVDEEDAERYQNIYAKNEGAVVTPAAGLHFSRELLKRMEIKGIEYGFLTLHSGLGNFREIDVEDLTKHKMDSEQMIVTPTLVEFVNHAKDTNHQVCAVGTSVMRAIESTVSTDGHMKAYNGWTNKFIFPPYDFTVATSLITNFHMPYSTMLMMAAAFGGYDAVMKAYDIALKEKYHFGAYGDAMLII

SEQ ID NO: 65572 - protein, 341 aa, Coprococcus catus
  misc_feature (1)..(341): tr|D4J8P0|D4J8P0_9FIRM S-adenosylmethionine:tRNA ribosy ltransferase-isomerase OS=Coprococcus catus GD/7 OX=717 962 GN=queA PE=3 SV=1
MKTSDFYYDLPEELIAQDPLEDRSSSRLMVLDRESGEISHHIFKDIIDYLNPEDCLVINDTKVIPARLYGVKEDTGAHIEILLLKRRENDVWETLVRPGKKAKPGTRLTFGDGRLKAEVIDVVEEGNRLIHFEYEGIFEEILDQLGEMPLPPYITHKLQDKNRYQTVYAKHEGSAAAPTAGLHFTPELLAAIEAKGIRIARVTLHVGLGTFRPVKVEDVTQHHMHSEYYQVTQEAADIINDTKKRGGRVIAVGTTSTRTLESVADEDGTMHAAGGWTEIFIYPGYKFKCIDALITNFHLPESTLLMLVSALAGKEHIMHAYETAVQERYRFFSFGDAMFIE

SEQ ID NO: 65573 - protein, 341 aa, Coprococcus catus
  misc_feature (1)..(341): tr|A0A3E2TRT5|A0A3E2TRT5_9FIRM S-adenosylmethionine:tRN A ribosyltransferase-isomerase OS=Coprococcus catus OX= 116085 GN=queA PE=3 SV=1
MKTSDFYYDLPEELIAQDPLEDRSSSRLMVLDRESGNISHHIFKDIIDYLNPEDCLVINDTKVIPARLYGVKEDTGAHIEILLLKRRENDVWETLVRPGKKAKPGTRLTFGDGRLKAEVIDVVEEGNRLIHFEYEGIFEEILDQLGEMPLPPYITHKLQDKNRYQTVYAKHEGSAAAPTAGLHFTPELLAAIEAKGIRIARVTLHVGLGTFRPVKVEDVTQHHMHSEYYQVTQEAADIINDTKKRGGRVIAVGTTSTRTLESVADEDGTMHAAGGWTEIFIYPGYKFKCIDALITNFHLPESTLLMLVSALAGKEHIMHAYETAVQERYRFFSFGDAMFIK

SEQ ID NO: 65574 - protein, 341 aa, Coprococcus comes
  misc_feature (1)..(341): tr|R6MFK5|R6MFK5_9FIRM S-adenosylmethionine:tRNA ribosy ltransferase-isomerase OS=Coprococcus comes CAG:19 OX=1 263070 GN=queA PE=3 SV=1
MKRQDFYFDLPEELIAQDPLEDRSSSRLLVLDKKTGATSHHIFREIKDYLKPGDCLVINDTKVIPARLIGEKEGTGGKVEVLLLKRKGNDVWETLVKPGKKMKPGARVSFGDGLLKGEVLEVVEEGNRLIHFEYEGIFEEILDQLGQMPLPPYITHQLEDKNRYQTVYAKHSGSAAAPTAGLHFTPELLEEIKAEGVEIAHVTLHVGLGTFRPVKADDILDHHMHSEFYRIEASEAEKINRAKESGHRVICVGTTSCRTVESAADENGKLKECSGWTEIFIYPGYKFKVLDCLITNFHLPESTLIMLVSALAGREHVLAAYEEAVKERYRFFSFGDAMFIE

SEQ ID NO: 65575 - protein, 341 aa, Coprococcus comes
  misc_feature (1)..(341): tr|A0A3E4GU69|A0A3E4GU69_9FIRM S-adenosylmethionine:tRN A ribosyltransferase-isomerase OS=Coprococcus comes OX= 410072 GN=queA PE=3 SV=1
MKRQDFYFDLPEELIAQDPLEDRSSSRLLVLDKKTGATSHHIFREIKDYLKPGDCLVINDTKVIPARLIGEKEGTGGKVEVLLLKRKGNDVWETLVKPGKKMKPGARVSFGDGLLKGEVLEVVEEGNRLIHFEYEGIFEEILDQLGQMPLPPYITHQLEDKNRYQTVYAKHSGSAAAPTAGLHFTPELLEEIKAEGVEIAHVTLHVGLGTFRPVKADDILDHHMHSEFYRIEASEAEKINRAKVSGHRVICVGTTSCRTVESAADENGKLKECSGWTEIFIYPGYKFKVLDCLITNFHLPESTLIMLVSALAGREHVLAAYEEAVKERYRFFSFGDAMFIE

SEQ ID NO: 65576 - protein, 355 aa, Coprococcus eutactus
  misc_feature (1)..(355): tr|A0A173WH55|A0A173WH55_9FIRM S-adenosylmethionine:tRN A ribosyltransferase-isomerase OS=Coprococcus eutactus OX=33043 GN=queA PE=3 SV=1
MMKLTDFYYDLPQELIAQDPLLKRSESRLMVLDRKDNTIEHKHFYDVIDYLNPGDCLVINDTRVLPARLMGVKKDTGASIEVLLLKRKDDCTWETLVKPGKKCKVGARIVFGSESNEPDPETGLIKGKLVGEVVDIVEEGNRLIRFEFDGIFEEILDELGQMPLPPYITHKLEDKNRYQTVYAEHDGSAAAPTAGLHFTTELLEQIKAKGIKIAHVTLHVGLGTFRPVKEENILDHHMHSEFCIIEQDAADMINETKAAGGRVVSVGTTSTRTLESMSDDDGTVHAGSKWTDIFIYPGYKFKVIDALITNFHLPESTLLMLVSALYDREHILEAYKVAVEEKYRFFSFGDAMLIK

SEQ ID NO: 65577 - protein, 355 aa, Coprococcus eutactus
  misc_feature (1)..(355): tr|A0A174DT67|A0A174DT67_9FIRM S-adenosylmethionine:tRN A ribosyltransferase-isomerase OS=Coprococcus eutactus OX=33043 GN=queA PE=3 SV=1
MMKLTDFYYDLPQELIAQDPLLKRSESRLMVLDRKDNTIEHKHFYDVIDYLNPGDCLVINDTRVLPARLMGVKEDTGASIEVLLLKRKDDCTWETLVKPGKKCKVGARIVFGSESNEPDPETGLIKGKLVGEVVDIVEEGNRLIRFEFDGIFEEILDELGQMPLPPYITHKLEDKNRYQTVYAEHDGSAAAPTAGLHFTTELLDQIKAKGIKIAHVTLHVGLGTFRPVKEENILDHHMHSEFCIIEQDAADMINETKAAGGRVVSVGTTSTRTLESMSDDDGTVHAGSKWTDIFIYPGYKFKVIDALITNFHLPESTLLMLVSALYDREHILEAYKVAVEEKYRFFSFGDAMLIK

SEQ ID NO: 65578 - protein, 341 aa, Coprococcus sp.
  misc_feature (1)..(341): tr|S2YMG4|S2YMG4_9FIRM S-adenosylmethionine:tRNA ribosy ltransferase-isomerase OS=Coprococcus sp. HPP0048 OX=10 78091 GN=queA PE=3 SV=1
MRKEDFNFDLPEELIAQDPLEDRSSSRLLVLDKETGKTEHHVFREIIDYLEVGDCLVINDTKVIPARLIGSKIGTDAKIEVLLLKRKENDVWETLVKPGKKAKIGTRISFGDGLLVGEVVDIVEEGNRLIHFEYEGIFEEILDRLGQMPLPPYITHQLEDKNRYQTVYAKHSGSAAAPTAGLHFTPELLKKIEEKGVQIARVTLHVGLGTFRPVKVDNILEHHMHSEFYQIEEEAAEKINTAKANGKRVIAVGTTSCRTIESAAKEDGTIAPVSGWTDIFIYPGYQFKVLDCLITNFHLPESTLVMLVSALAGREHVLNAYEEAIKERYRFFSFGDAMFIR

SEQ ID NO: 65579 - protein, 354 aa, Coprococcus sp.
  misc_feature (1)..(354): tr|A0A374K6L1|A0A374K6L1_9FIRM S-adenosylmethionine:tRN A ribosyltransferase-isomerase OS=Coprococcus sp. OM06- 34AC OX=2293095 GN=queA PE=3 SV=1
MKLTDFYYDLPQELIAQDPLLKRSESRLMVLDRKDNTIEHKHFYDVIDYLNPGDCLVINDTRVLPARLMGVKEDTGASIEVLLLKRKDDRTWETLVKPGKKCKVGARIVFGSESNEPDPETGLIKGKLVGEVVGIVEEGNRLIRFEFDGIFEEILDELGQMPLPPYITHKLEDKNRYQTVYAEHDGSAAAPTAGLHFTTELLDQIKAKGIKIAHVTLHVGLGTFRPVKEENILDHHMHSEFCIIEQDAADMINETKAAGGRVVSVGTTSTRTLESMSDDDGTVHAGSKWTDIFIYPGYKFKVIDALITNFHLPESTLLMLVSALYDREHILEAYKVAVEEKYRFFSFGDAMLIK

SEQ ID NO: 65580 - protein, 343 aa, Coprothermobacter proteolyticus
  misc_feature (1)..(343): tr|B5Y8Y4|B5Y8Y4_COPPD S-adenosylmethionine:tRNA ribosy ltransferase-isomerase OS=Coprothermobacter proteolytic us (strain ATCC 35245 / DSM 5265 / BT) OX=309798 GN=que A PE=3 SV=1
MKRLSALEELLNYELPKHLIAQKLSDPRDACRLLVVHRDTGTLEDKRFYQIKDYVKPGDVLVLNNTKVLKARIKGRRKTGGAVEILLVRPLRDNVWECLLKPLRKIKIGEVLLLNGGAEVKLLERTERTAIIELGMSAQELDSYLDDWGEVPTPPYIRRKVPAEEYQTVFASKPGAVAAPTAGLHFTENLLQDLKNMGVKISYVTLHVALGTFESLASDWQEKSELHQETFFVSAETTKTVNEAKESGHSVFAVGTTVVRSLESAACDDGKLNSVFSDTSLFIKPGYSWKVVDKLVTNFHLPQTSLLLLVSSFATPDLILKAYRHAIEEEYKFYSLGDAMLIL

SEQ ID NO: 65581 - protein, 343 aa, Coprothermobacter sp.
  misc_feature (1)..(343): tr|A0A348VDJ3|A0A348VDJ3_9BACT S-adenosylmethionine:tRN A ribosyltransferase-isomerase OS=Coprothermobacter sp. OX=55509 GN=queA PE=3 SV=1
MKRLSALEELLNYELPKHLIAQKLSDPRDACKLLVVHRDTGTLEDKCFYQIKEYVKPGDVLVLNNTKVLKARIKGRRKTGGAVEILLVRPLRDNVWECLLKPLRKIKTDEVLLLNGGAEVKLLERTERTAIVELGMSAQELDSYLDDWGEVPTPPYIRRKVPAEEYQTVFASKPGAVAAPTAGLHFTENLLQDLKNMGVKVTYVTLHVALGTFESLGSDWQEKSELHQETFFVSAETAKTVNEVKESGHSVFAVGTTVVRSLESAACDDGKLKAVFSDTSLFIKPGYNWKVVDKLVTNFHLPQTSLLLLVSSFATPELILKAYRHAIEEEYKFYSLGDAMLIL

SEQ ID NO: 65582 - protein, 361 aa, Coraliomargarita akajimensis
  misc_feature (1)..(361): tr|D5EK22|D5EK22_CORAD S-adenosylmethionine:tRNA ribosy ltransferase-isomerase OS=Coraliomargarita akajimensis (strain DSM 45221 / IAM 15411 / JCM 23193 / KCTC 12865 / 04OKA010-24) OX=583355 GN=queA PE=3 SV=1
MDASLFDFHLPNECIAQEPAATRDASRLMVINRSTREVNHVHFADIGGFLPTNARFFRNNAAVLKARIYGQRPSGGKVECLLLQPAEDALTWWCLLRPGKKAAQTGFEMDGEYRAEVLEAGSNGNYKVRFHLERNETVTDLSERLGIMPLPPYIAREQDDPRRAADNERYQTVYADYAKRVAVAAPTAGLHFTPELIDQLSQAGAEFHDLTLQVGIGTFHPIQVEQIEDHNIHHEWYEIPSAAFQSLQDSSSGPRVAVGTTSVRSIEDALSRTQQSPESCLTPTGSVQAEADIFIYPPAKFAAVDHMITNFHLPKSTLLCLVSAFLTPGSTDGIDWLKELYADAIARKYRFYSYGDAMLIL

SEQ ID NO: 65583 - protein, 363 aa, Coraliomargarita sp.
  misc_feature (1)..(363): tr|A0A317ZIS3|A0A317ZIS3_9BACT S-adenosylmethionine:tRN A ribosyltransferase-isomerase OS=Coraliomargarita sp. WN38 OX=2174842 GN=queA PE=3 SV=1
MGVKIDRFDYNLPKELIAQEPAAQRDASRLMVIDRATREVTHSTFAAIGDFLPAKSRFFRNNAAVLKARLYGQRPTGGKVECLLLQPAEDALSWWCLLKPGKKTLQAGQFGLDGEYTAEVLEVGANGNYKVRFQPVRDESVTALSERLGIMPLPPYIERSKDDPRRDSDNERYQTVYADYAKQLAVAAPTAGLHFTPELIAQLESSGASFYDLTLQVGIGTFHPVQTEHVEDHNIHHEWYEIPASALAELQSPDAGPRIAVGTTSVRSIEDALRRIPREPGCLTPGGDVQAEADIYIYPPSEFSGIDHMITNFHLPKSTLLCLVSAFLTPGSEEGIDWLKELYAEAIAKQYRFYSYGDAMLIL

SEQ ID NO: 65584 - protein, 361 aa, Coraliomargarita sp.
  misc_feature (1)..(361): tr|A0A2E0ND19|A0A2E0ND19_9BACT S-adenosylmethionine:tRN A ribosyltransferase-isomerase OS=Coraliomargarita sp. OX=2024828 GN=queA PE=3 SV=1
MDAALFDYPLPRKCIAQEPASSRDASRLMVVDRNNHSVKHTYFAKLGQYLPSNARFYRNNAAVLKARIYGYRSSGGKVECLLLQPAEDPLTWWCLLRPGKKVTRGGFGLEGEFRADVIEVGSNGRYRVRFHLLRKESVTDLAERLGIMPLPPYISRTEDDPRYAQDAVRYQTVYADPGKRVAVAAPTAGLHFTDTLIDELKNNGAHFYDLTLQVGIGTFHPILVDDITQHAIHHESYEMPRAVHDSLLKEKGGPRVAVGTTSVRSIEDIMRRSTQQVEACRTPSGSIQAEADIFIYPPATFAGVDHLITNFHLPKSTLLCLVSAFLTPGSKAGIDWLKQLYAEAIEQQYRFYSYGDAMLIL

SEQ ID NO: 65585 - protein, 348 aa, Corallincola sp.
  misc_feature (1)..(348): tr|A0A368NGD2|A0A368NGD2_9GAMM S-adenosylmethionine:tRN A ribosyltransferase-isomerase OS=Corallincola sp. C4 O X=2282215 GN=queA PE=3 SV=1
MQVSDFHFELPDELIARYPMADRTASRLLHLEGTDGAVHHRQFTDIESLVEPGDLVVFNNTRVIPARLHGCKSSGGKIEVLVERILDDHRVLAHVRSSKSPKAGAQLLLEDQIKVEMLGRDDALFELEFDPAKTVLEWLEQYGHMPLPPYIDRPDEGADRERYQTVYNQKPGAVAAPTAGLHFDDAILQRLQEKGVEQAFVTLHVGAGTFQPVRVDQVTEHKMHSEYAEVSDDVVAKILATKAAGKRVIAVGTTSVRSLESAAQASIAAGHEQLQPFAGETDIFIYPGYSFQIIDAMVTNFHLPESTLIMLVSAFAGYDAVMNAYAEAVAEKYRFFSYGDAMFVTRKP

SEQ ID NO: 65586 - protein, 362 aa, Corallococcus coralloides
  misc_feature (1)..(362): tr|A0A410RQL3|A0A410RQL3_CORCK S-adenosylmethionine:tRN A ribosyltransferase-isomerase OS=Corallococcus corallo ides OX=184914 GN=queA PE=3 SV=1
MSSLLSDYDFELPEAQIAQAPLPDRDASRLMVVSRATGAWSHQHFTGLADLLREGDLLVLNDARVIPARLLGQKSGTGGRVELLVVRPAAAATLTSAALGGAPESLEWVCLGQASKGLRPGQSVTFAGGLSAEVLEALGGGEYRVRFHAAPGASLASLLDAAGRLPLPPYITREPEAADAERYQTVYARASGAVAAPTAGLHFTQEVFAKLAAKGVQRAEVTLDVGPGTFLPVREEVLDKHHMHPERFTVPQATADAVNAAKAQGRRVVAVGTTVVRTLESATDPDTGKLRVGPGETAMFIRPGYVFRQVDVLLTNFHLPRSTLVMLVSALLGRERTLAAYQGAVRAGYRFFSYGDAMLVKE

SEQ ID NO: 65587 - protein, 362 aa, Corallococcus coralloides
  misc_feature (1)..(362): tr|H8MU07|H8MU07_CORCM S-adenosylmethionine:tRNA ribosy ltransferase-isomerase OS=Corallococcus coralloides (st rain ATCC 25202 / DSM 2259 / NBRC 100086 / M2) OX=11442 75 GN=queA PE=3 SV=1
MSSLLSDYDFELPEAQIAQAPLPNRDASRLMVVSRATGAWSHQHFTDLADLLREGDLLVLNDARVIPARLLGQKSGTGGRVELLVVRPAATATLTSAALGGAPESLEWVCLGQASKGLKPGQSVTFAGGLSAEILEALGGGEYRVRFHAAPGTSLASLLDAAGRLPLPPYITREPEAADAERYQTVYARASGAVAAPTAGLHFTQEVFAKLAAKGVQRAEVTLDVGPGTFLPVREEVLDKHHMHPERFTVPQATADAVNAAKAEGRRVVAVGTTVVRTLESATDPDTGRLRVGPGETAMFIRPGYVFRQVDVLLTNFHLPRSTLVMLVSALLGRERTLAAYQEAVRAGYRFFSYGDAMLVKE

SEQ ID NO: 65588 - protein, 344 aa, Corallococcus exiguus
  misc_feature (1)..(344): tr|A0A5C5DGU3|A0A5C5DGU3_9DELT S-adenosylmethionine:tRN A ribosyltransferase-isomerase OS=Corallococcus exiguus OX=83462 GN=FH620_39105 PE=3 SV=1
MGGRMNAARWPREHPDAARLLHVQPRRERFTDTVASELPNLLREGDLLVMNDAATLPGSLTGRTGSGAAIELRLLSHEPDDTWTAVLFGAGDWRRRTEDRTPPPELPVGARLEVGGLTARVVEVLPPSPRLLRVAFDLTGAALWQALYSAGRPVQYAYTAGPLALWHVQTLYASRPWAAEMPSAGLPLTASVLLRMKARGVRWASLTHAAGLSSTGDAALDAALPRPERSDIPERTVSLVEETRGQGGRVVAVGTTVVRALEGRVTQHGMLVPGEEVTDLLLGPGYVPRVVHGLLTGVHDPGSSHHALLQAFAPLPLLLRASAHAEAAGYLGHEFGDTSLILDA

SEQ ID NO: 65589 - protein, 362 aa, Corallococcus exiguus
  misc_feature (1)..(362): tr|A0A5C5DT60|A0A5C5DT60_9DELT S-adenosylmethionine:tRN A ribosyltransferase-isomerase OS=Corallococcus exiguus OX=83462 GN=queA PE=3 SV=1
MSSLLSDYDFELPEAQIAQAPLPNRDASRLMVVSRATGDWSHQHFTDLADLLREGDLLVLNDARVIPARLLGQKSGTGGRVELLVVRPAATATLTSAALGGAPESLEWVCLGQASKGLKPGQSVSFAGGLSAEVLEALGGGEYRVRFHAVPGASLASLLDAAGRLPLPPYITREPEAADAERYQTVYARASGAVAAPTAGLHFTEDVFAKLAAKGVRRAEVTLDVGPGTFLPVREEVLDKHHMHPERFTVPEATAAAVNATKAEGRRVVAVGTTVVRTLESATDPDTGRLRVGPGETAMFIRPGYAFRQVDVLLTNFHLPRSTLVMLVSALLGRERTLAAYQEAVRAGYRFFSYGDAMLVKE

SEQ ID NO: 65590 - protein, 344 aa, Corallococcus sp.
  misc_feature (1)..(344): tr|A0A3A8QN53|A0A3A8QN53_9DELT S-adenosylmethionine:tRN A ribosyltransferase-isomerase OS=Corallococcus sp. AB0 47A OX=2316720 GN=D7X96_13180 PE=3 SV=1
MGGRMNAARWPREHPDTARLLHVEPRRERISDTVASALPDLLREGDLLVMNDAATLPGSLMGRTHAGAAIELRLLSHEPDGTWTAVLFGAGDWRRRTEDRPPPPELPVGAHLVIGGLTARVVEVLPPSPRLLRVAFDLRGAALWQALYMAGRPVQYAYTAGPLALWHVQTLYASRPWAAEMPSAGLPLTASVLLRLKARGVRWASLTHAAGLSSTGDAVLDAALPRPERSDIPERTVSLVEETRKNGGRVVAVGTTVVRALEGRAVQHGALVPGEAVTDLLLGPGYVPRVVHGLLTGVHDPGSSHHALLQSFAPLALLHRASAHAEAAGYLGHEFGDTCLILDA

SEQ ID NO: 65591 - protein, 362 aa, Corallococcus sp.
  misc_feature (1)..(362): tr|A0A3A8JWT0|A0A3A8JWT0_9DELT S-adenosylmethionine:tRN A ribosyltransferase-isomerase OS=Corallococcus sp. CA0 53C OX=2316732 GN=queA PE=3 SV=1
MSSLLSDYDFELPEAQIAQAPLPHRDASRLMVVSRATGAWSHQRFTDLGDLLREGDLLVLNDARVIPARLLGQKAGTGGRVELLVVRPAATATLTSAALGGAPESLEWICLGQASKGLKPGQSVTFAGGLSAEVLEALGGGEYRVRFHAAPGASLASLLDAAGRLPLPPYITREPAAADAERYQTVYARASGAVAAPTAGLHFTDAVFSSLAARGISRVEVTLDVGPGTFLPVREEVLDKHHMHPERFTVPEATAAAVNAAKAEGRRVVAVGTTVVRTLESATDPQTGRLRPGPGETAMFIRPGYVFRQVDVLLTNFHLPRSTLVMLVSALLGRERTLAAYQEAVRAGYRFFSYGDAMLVKE

SEQ ID NO: 65592 - protein, 361 aa, Coriobacteriaceae bacterium
  misc_feature (1)..(361): tr|A0A0A8B265|A0A0A8B265_9ACTN S-adenosylmethionine:tRN A ribosyltransferase-isomerase OS=Coriobacteriaceae bac terium 68-1-3 OX=1531429 GN=queA PE=3 SV=1
MRTSDFDYNLPAELIAQEPAADRDGCRLLVMDRETGDLEDRIFRDIVDYLHPNDLLVVNETRVLPARLLGSKRGTGGAAEVFLLREVFDREPKTNKSALWEVLVRPGKRLKPGSGAVVDVRDADGNVALSAEIVDWVDGAGKGERIARLSTELPSLDEALHRVGHTPLPPYIKNYAGDEELYQTVYSKRESSAAAPTAGLHFTPELIERIKEKGARWETVELEVGLDTFRIVDEDDPADHEMHTEFYTVPEQTIRAIAETRAAKGRVIAVGTTSMRSLESCWDAQAQAPRARDREATSLFILPGYRFNVVDAIVTNFHVPRSTLMMLVSAFSTRDNVMRAYEHAIEQRYRLLSFGDAMFVR

SEQ ID NO: 65593 - protein, 344 aa, Coriobacteriaceae bacterium
  misc_feature (1)..(344): tr|A0A1V1RFZ6|A0A1V1RFZ6_9ACTN S-adenosylmethionine:tRN A ribosyltransferase-isomerase OS=Coriobacteriaceae bac terium EMTCatB1 OX=1927122 GN=queA PE=3 SV=1
MRTADFDYDLPTGLIAQHPAEPRDACRLMVVERGSGQIDHKTFRDLPEYLHEGDVLVVNETRVLPARLKGAKDETGGAVEVLLLRPRYGTTWECLVRPGRRLKPGAKVVFGDGLLTGLIVDVIEETGGRVVTFSVREGTFMEAVHALGEVPLPPYITATLDDPEKYQTVYAAQEHSVAAPTAGLHFTEELLEKIQRQGVHLAKVELDVGLDTFRPVTAEDPREHRMHAEHYRVPAWTADAVNDAHRRGSRVFAVGTTTVRALESAYNEETRLVEASEGVTDLFILPGFSFGAVDALVTNFHMPRSTLLMMVSAFAGRDLIMRAYETAKRERYRFLSFGDAMLIV

SEQ ID NO: 65594 - protein, 361 aa, Coriobacteriales bacterium
  misc_feature (1)..(361): tr|A0A133Z8R5|A0A133Z8R5_9ACTN S-adenosylmethionine:tRN A ribosyltransferase-isomerase OS=Coriobacteriales bact erium DNF00809 OX=1588753 GN=queA PE=3 SV=1
MKTDDFDYTLPPELIAQTPAEVRDACRLLVLNKRSGALQDCVFHDIGTFLHPGDLLVANETRVLPARMLGTKRGSGGSAEIFLLREIFNREPKTAHTALWEVLVRPGKRLKPQTGAVVDIPDAQGRVCLSIEVVDWAEKPSPGERIARLTTTLPSLDEALHACGHTPLPPYIKHYAGDEELYQTVYSKSEHSAAAPTAGLHFTPELIAALQEQGVGWETVDLEVGLDTFRLVDEDDPRNHVIHTETYSVPQKTIDAINRTKDAGGRVIAVGTTSMRSLESCYDEQAKCVKARTREHTSLYILPGYTFNVVDAMITNFHVPRSTLMMLVSALAGREHIMAAYQHAIHERYRFLSFGDAMFIQ

SEQ ID NO: 65595 - protein, 363 aa, Coriobacteriales bacterium
  misc_feature (1)..(363): tr|A0A437UWG9|A0A437UWG9_9ACTN S-adenosylmethionine:tRN A ribosyltransferase-isomerase OS=Coriobacteriales bact erium OH1046 OX=2491116 GN=queA PE=3 SV=1
MLTSDFDYPLPDELIAQAPAEPRDSCRLLVLHRSDGSLEHRVFADIAGYLHPGDLLVANRTRVLPARLMGRKHATGGVSETLLLARREDLDPYGSVWECLVNPGKRLKEGAVVEYRAGGIAAPADAPIVLTGEIIDFVEGSRGGRLVRFAPASGRSLDEAIHEAGRVPLPPYITSYGGDPEKYQTVYAMEEEHSAAAPTAGLHFTPELIERIKQRGVGWATVELEVGIDTFRLVTEEHAEDHAIHTERYHVPQETVDAIAAARAAGGRVIAVGTTSVRSLESAWDAEAGALAARENASTDLFLMPGSRFHVVDALITNFHVPKSTLMMLVSAFATREQIMAAYASAIDKRYRFLSFGDAMFIE

SEQ ID NO: 65596 - protein, 374 aa, Coriobacteriia bacterium
  misc_feature (1)..(374): tr|A0A2V2EBH1|A0A2V2EBH1_9ACTN S-adenosylmethionine:tRN A ribosyltransferase-isomerase OS=Coriobacteriia bacter ium OX=2052159 GN=queA PE=3 SV=1
MKTDDFDYDLPERCIAQEPAAVRDACKMLVMNRETGELEDRIFRDIIEYLEPGDVLVANETRVMPARLLGAKRGTGGQAEVFLLRQRMGTAADAYVATEGPDGALGSNQQAIWEVLVRPGKRLKPGSGAIVDFCDAEGNVALSAEIVDWGADSGRGERIARLTTTRPSLDEALHAVGHTPLPPYIKHYAGDEELYQTVYSRHESSAAAPTAGLHFTPELIERLRAKGIEWHTVELEVGLDTFRIVDEDDPEKHTIHTEFYTVPQETVDACDAAHARGNRVIAVGTTSVRSLESAYDRELGRLRARNREATSLYILPGYTFGVVDALVTNFHVPRSTLMMLVSAFSTRENIMAAYKHAIESDYRLLSFGDAMFIE

SEQ ID NO: 65597 - protein, 353 aa, Coriobacteriia bacterium
  misc_feature (1)..(353): tr|A0A316P185|A0A316P185_9ACTN S-adenosylmethionine:tRN A ribosyltransferase-isomerase OS=Coriobacteriia bacter ium OX=2052159 GN=queA PE=3 SV=1
MKTEDFDYELPEKFIAQQPAIPRDSCKLMVVSRDGILEHRVFRDIGEYLHPGDLLVVNETRVLPARLLGHKKGTGGAAEALLLDKVADAPDTADEQTWNCLVKPGKRLKTCARMEFEHDGEVVLEGEVMGIDEANGSRSVRFTTPGAMSVDEAIHLVGHTPLPPYIKEYAGDDEFYQTVYSTEERSAAAPTAGLHFTVGLLDELKTAGVDIASVHLEVGLDTFRIVSEDDPLDHEMHTELYTVPPKTVRAIKEAKARGGRVIAVGTTSVRSLESAAAGGALEPCTRAATSLYILPGYEFKVCDAIITNFHVPRSTLMMLVSAFSGRETIMDAYETAKTEGYRFFSFGDAMLLL

SEQ ID NO: 65598 - protein, 403 aa, Coriobacterium glomerans
  misc_feature (1)..(403): tr|F2N873|F2N873_CORGP S-adenosylmethionine:tRNA ribosy ltransferase-isomerase OS=Coriobacterium glomerans (str ain ATCC 49209 / DSM 20642 / JCM 10262 / PW2) OX=700015 GN=queA PE=3 SV=1
MRTDDFDYDLPEELIAQAPVEPRDSCRMLVMHRRVASAAAAADARGDIEHRRFSDIIDYLAPGDLLVANETRVMPARLVGTKRETGGVAETLLLKRREDLDALGSVWECLVSPGRRLRPGSVIEYRAGGLHAPVQAPPVLIGQIEAFVENSKGGRLVRFHPVGSEALDGPCTLDAAIHAAGHVPLPPYITSYEGDPENYQTVYSMREEHSAAAPTAGLHFTEELIDRLRAKGVGWKTVELEVGIDTFRLVQEDDPTDHVMHTERYHVSADVIEAVRATKAGGGRVVAVGTTAVRSLESAFDTMRPASQPPVVARLFENAPDSAAVCCAGDLVERRDATTSLYLMPGSTFHVVDALITNFHVPRSTLMMLVSAFASREQIMDAYAQAVRERYRFLSFGDAMFID

SEQ ID NO: 65599 - protein, 382 aa, Corticibacter populi
  misc_feature (1)..(382): tr|A0A3M6QHJ9|A0A3M6QHJ9_9BURK S-adenosylmethionine:tRN A ribosyltransferase-isomerase OS=Corticibacter populi OX=1550736 GN=queA PE=3 SV=1
MPDSAHRSPGEFCLSDFDYTLPPELIAQHPASERSASRLLDGRRLPPQDRHFHELPQLLRAGDLLVFNDTQVVKARIFGEKATGGKLEILIERVLQDGCVAAHMKVSKKPAAGAVLHLAGGLAAGGFDAELLGRWPDADGPLFLLRLHGAAGETPWSLMERFGHLPLPPYIERHQAEGDDADAEEDAERYQTVFARTPGAVAAPTAALHFDEKTLAALQAAGVERASITLHVGAGTFQPVKTEDLSQHRMHSEYYRIPPETVQAVEACRARGGRVVAVGTTSVRTLESWARTGQVQGDTQIFITPGFRFQVVDLLLTNFHLPKSTLMMLVSALAGYAHIRALYQHAVAGRYRFFSYGDCMLLERSDAASFVSNSASTALTSG

SEQ ID NO: 65600 - protein, 74 aa, Corynebacterium kefirresidentii
  misc_feature (1)..(74): tr|A0A243V812|A0A243V812_9CORY S-adenosylmethionine:tRN A ribosyltransferase-isomerase (Fragment) OS=Corynebact erium kefirresidentii OX=1979527 GN=CBI45_13470 PE=3 SV =1
VGLGTFRPVSVEDINDHEMHSEYYQMTQETANLLNQTKKEGHRIISVGTTSTRTLETIRRDYNEFVAVSGWTDI

SEQ ID NO: 65601 - protein, 357 aa, Cosenzaea myxofaciens
  misc_feature (1)..(357): tr|A0A198FNG6|A0A198FNG6_9GAMM S-adenosylmethionine:tRN A ribosyltransferase-isomerase OS=Cosenzaea myxofaciens ATCC 19692 OX=1354337 GN=queA PE=3 SV=1
MRVSDFSFELPEALIAHYPQPQRSGCRLLSLEGETGALSHGVFTDVLDKLNAGDLLVFNNTRVIPARVYGRKASGGKIEMLVERMLDEHRVLAHIRASKSPKEGASLIFGEDESVQATMVARHDTLFEIRFDDKRDVLTILNSIGHMPLPPYIDRPDEESDKELYQTVYNERPGAVAAPTAGLHFDEPLLEALKNKGVEMAFVTLHVGAGTFQPVRVDNIEEHTMHSEYAEVPQDVVDAVLACKARGNRVIAVGTTSVRSLESAANAVQNALIAPFFDDTQIFIYPGYQYQVIDALITNFHLPESTLIMLVSAFAGYKNTINAYKNAVEEKYRFFSYGDAMFITRNPLAINEKVGQE

SEQ ID NO: 65602 - protein, 343 aa, Coxiella burnetii
  misc_feature (1)..(343): sp|Q83CC6|QUEA_COXBU S-adenosylmethionine:tRNA ribosylt ransferase-isomerase OS=Coxiella burnetii (strain RSA 4 93 / Nine Mile phase I) OX=227377 GN=queA PE=3 SV=1
MKNQWKTSDFDYNLPVELIAQRPLADRSGSRLLYIDRSRRTVSHRQFNGFVEQVKPNDLVVLNDTKVIPARLFGHKQTGGKVECLVERILSKDRFLAHIRASKAPKLGSQIIIADNFKIIIEGRYNDLFECVLHSSASILDLLYQHGRIPLPPYIQREPDKDDQARYQTIFAERAGAVAAPTAGLHFNEETFDALRKKGAAITYVTLHVGAGTFQPVRADSLADHRMHHEWMEVSKAVCDAIAKCRKNNGRVIAVGTTVMRCLETATKNGECRPYAGETDLFIYPGFQFNCVDALLTNFHLPKSTLLMLVCAFGGYELVMEAYQKAVENRYRFFSYGDAMLIS

SEQ ID NO: 65603 - protein, 343 aa, Coxiella burnetii
  misc_feature (1)..(343): sp|A9NDS1|QUEA_COXBR S-adenosylmethionine:tRNA ribosylt ransferase-isomerase OS=Coxiella burnetii (strain RSA 3 31 / Henzerling II) OX=360115 GN=queA PE=3 SV=1
MKNQWKTSDFDYNLPVELIAQRPLADRSGSRLLYIDRSRRTVSHRQFNGFVEQVKPNDLVVLNDTKVIPARLFGHKQTGGKVECLVERILSKDRFLAHIRASKAPKLGSQIIIADNFKIIIEGRYNDLFECVLHSSASILDLLYQHGRIPLPPYIQREPDKDDQARYQTIFAERAGAVAAPTAGLHFNEETFDALRKKGAAITYVTLHVGAGTFQPVRADSLADHRMHHEWMEVSKAVCDAIAKCRKNNGRVIAVGTTVMRCLETATKNSECRPYAGETDLFIYPGFQFNCVDALLTNFHLPKSTLLMLVCAFGGYELVMEAYQKAVENRYRFFSYGDAMLIS

SEQ ID NO: 65604 - protein, 347 aa, Coxiella sp.
  misc_feature (1)..(347): tr|A0A2G1ZWL1|A0A2G1ZWL1_9COXI S-adenosylmethionine:tRN A ribosyltransferase-isomerase OS=Coxiella sp. (in: Bac teria) OX=59288 GN=queA PE=3 SV=1
MKTLETADFDYTLPQKLIAQYPLAERTASRLLVVNEDAYLHQHFGDILGHIRPDDLLVLNDTKVIPARLYGRKESGGKIECLIERVLSEHEALAHIRSSKSPKAGTQLILEDTMSAVVIGRDDALFHLRFDGETNLFDLLDQFGHMPLPPYIDRPDEINDRERYQTVFAKKRGAVAAPTASLHFSEALLEQIKAQGTHIANVTLHVGAGTFQPVRVDSIDDHKMHKEWIDVPQATVDAVHACRARGGRVIAIGTTAMRALESAAQSGTLQSYCGDTDIFIFPGFEFRCVDVLLTNFHLPKSTLLMLVSAFAGYKSTRAAYATAIEQSYRFFSYGDAMWVTKRCDMRL

SEQ ID NO: 65605 - protein, 346 aa, Coxiella sp.
  misc_feature (1)..(346): tr|A0A1F8VAF2|A0A1F8VAF2_9COXI S-adenosylmethionine:tRN A ribosyltransferase-isomerase OS=Coxiella sp. RIFCSPHI GHO2_12_FULL_44_14 OX=1797697 GN=queA PE=3 SV=1
MTTFWKTDDFDYHLPVELIAQHPSAQRSECRLLLLERSSGKIIHLNFNELTNFMDNRDLVIFNDTKVIPARLLGCKLETGGRVEGLVERILPEQKLLVHLRASKPPQVGTRIRWAEAFDTRVLVQHGEGVYELQLEESACSVLELLYRYGAIPLPPYIQRLPTEQDQERYQTVFARQVGAVAAPTAGLHFDEALLSQVQLQGVSLAYVTLHVGAGTFQPVRVEEVSHHRMHAEVMEMTATTCEAIQYCRARGGRVITVGTTVARCLESAVRQGKIQPFYGETNLFIYPGYQFQCVDALVTNFHSPRSSLLMLVSALGGYELVRKAYREAVQQRYRFLSYGDAMMVI

SEQ ID NO: 65606 - protein, 349 aa, Coxiellaceae bacterium
  misc_feature (1)..(349): tr|A0A2E9Z8V7|A0A2E9Z8V7_9COXI S-adenosylmethionine:tRN A ribosyltransferase-isomerase OS=Coxiellaceae bacteriu m OX=2026727 GN=queA PE=3 SV=1
MKLSHFNFDLPEDLLAEHPAEHRDESKLMVLHRETQTIEHKKFKDITEYFDEGDVMALNNTKVFPARLMGNKEKTGAKIEVFLLRELNKEQRLWDVLVDPARKIRIGNKLYFGIDESLVAEVIDNTTSRGRTLRFLFDGSYEEFRLKLKELGQTPLPKYIKRAEEDFDRERYQTIYAKHEGAVAAPTAGLHFSKHVLKRLEIKGVDLAELTLHVGLGTFNPVEVEDLSKHKMDSEELTIDVDAAAMVNKAKAAGHRICAIGTTSMRALESSVSSSGTLNPFQGWTHKFIFPPYDFKIGDAMVTNFHLPKSTLLMMVSAFAGHDFIKKAYDEAISHKYRFYSYGDAMLIL

SEQ ID NO: 65607 - protein, 348 aa, Coxiellaceae bacterium
  misc_feature (1)..(348): tr|A0A370CGA5|A0A370CGA5_9COXI S-adenosylmethionine:tRN A ribosyltransferase-isomerase OS=Coxiellaceae bacteriu m RA15029 OX=2016198 GN=queA PE=3 SV=1
MLNTTSSSYTRKDFSYLLPVKLIASYPSAQRTDSRMLCLDKSTGEIGHKKFKNILNFVNPGDLLVLNNTQVIPARLFAKKTTGGKVEILIERILDKKRVLAHLKSSKSLKIGTKLILENGISLEILARDESIFELYFLVEPPSILELLNKIGHIPLPPYLQRPDELFDWERYQTVFASSPGAVAAPTAGLHFDEVLLNALKSKGVNIAFITLHVGAGTFQPVRVERFEDHRMHREHVTVTEAVGEQIKKTKQENKRVIAVGTTVVRALETAALNGKIEVFAGDTDLFIYPGFRFRCVDALMTNFHLPESTLLILVSAFAGFKQVMAAYQSAMTFKYRFFSYGDAMWIS

SEQ ID NO: 65608 - protein, 341 aa, Crassaminicella sp.
  misc_feature (1)..(341): tr|A0A5C0SFF7|A0A5C0SFF7_9CLOT S-adenosylmethionine:tRN A ribosyltransferase-isomerase OS=Crassaminicella sp. S Y095 OX=2599308 GN=queA PE=3 SV=1
MKTSDFNFYLPEELIAQTPLENRDESRLMVLDKQTGEIQHKFFKNIIEYLKKGDCLVLNNTRVLPARLFGAKEHTGGKVEFLLLKRIDKDKWETLVKPGRKAKIGDRIVFGDGLLKAKIVDIGQEGSRIVEFEYNGIFEEILDKLGTMPLPPYIKETLKEKERYQTVYSKYEGSAAAPTAGLHFTNELLQQIEEKGIKIVYITLHVGLGTFRPVKSENILEHKMHSEFYMVSKEAAEVINNTKASGGRIISVGTTSTRTLESIADKKGFIHEGQGWTDIFIYPGYEFKVIDGLITNFHLPESTLIMLVSAFCGKDVTLNAYKEAVNNKYRFFSFGDAMFII

SEQ ID NO: 65609 - protein, 344 aa, Crenobacter cavernae
  misc_feature (1)..(344): tr|A0A4Q2J7G4|A0A4Q2J7G4_9NEIS S-adenosylmethionine:tRN A ribosyltransferase-isomerase OS=Crenobacter cavernae OX=2290923 GN=queA PE=3 SV=1
MQLSDFDYHLPENLIAQHPPAERGASRLLLVDGAQRTDSTFASFVCQTRAGDVLVFNDTRVIKARLFGEKASGGKVEALVERVLDAHTVLAHVRASKSPKPGGLITFAGRWQAEMVERDGELFKLRFLAQDNVFDILEASGRLPLPPYIERDTDRDDDSRYQTVYAREQGAVAAPTAGLHFTDETLAELRAKGVTLAYVTLHVGAGTFQPVRVENIAEHKMHSEIYEIPQTTVDAIARARQTGGRVTAIGTTSLRALESAAQGGELKAGRGETDIFITPGYQFKVVDRLLTNFHLPKSTLLMLVSAFAGYDNIRAAYDHAVKHEYRFFSYGDAMLLEREQGDAR

SEQ ID NO: 65610 - protein, 347 aa, Crenobacter cavernae
  misc_feature (1)..(347): tr|A0A345Y333|A0A345Y333_9NEIS S-adenosylmethionine:tRN A ribosyltransferase-isomerase OS=Crenobacter cavernae OX=2290923 GN=queA PE=3 SV=1
MQLSDFDYLLPENLIAQHPPAERGASRLLLVDGAQRTDSTFASFVDQTRAGDVLVFNDTRVIKARLFGEKASGGKVEALVERVLDAHTVLAHVRASKSPKPGGLITFAGRWQAEMVERDGELFKLRFLAQDNVFDILEASGRLPLPPYIERDTDLDDDARYQTVYAREQGAVAAPTAGLHFTDETLAELRAKGVTLAYVTLHVGAGTFQPVRVENIAEHKMHSEIYEIPQATVDAIAEAKAKGGRVMAIGTTSMRALESAAQQGELKAGRGETDIFITPGYRFRVVDRLLTNFHLPKSTLLMLVSAFAGYDNIRAAYQHAVKHEYRFFSYGDAMLLEREQGDARCPD

SEQ ID NO: 65611 - protein, 344 aa, Crenobacter luteus
  misc_feature (1)..(344): tr|A0A163C4P9|A0A163C4P9_9NEIS S-adenosylmethionine:tRN A ribosyltransferase-isomerase OS=Crenobacter luteus OX =1452487 GN=queA PE=3 SV=1
MQLSDFDYHLPEHLIAQHPPAERGASRLLLVDGPRLEDSVFASFAEQVSAGDVLVFNDTRVIKARLFGEKASGGKVEALVERVLDEHTVLAHVRASKSPKPGGRIVFAERWEAEMVERVGELFKLRFLAADNVFDILDASGKLPLPPYIERDTDADDDARYQTVYAREQGAVAAPTAGLHFTDAMLAELEARGVTLAYVTLHVGAGTFQPVRVDNIAEHKMHSEIYEIPAATVEAIASAKAQGGRVTAVGTTSMRALESAARGGSLAAGRGETDIFITPGFRFQVVDRLLTNFHLPKSTLMMLVSAFAGYEHIRAAYAHAVEREYRFFSYGDAMLLEREKDTQA

SEQ ID NO: 65612 - protein, 345 aa, Crenobacter sp.
  misc_feature (1)..(345): tr|A0A4T0UKK3|A0A4T0UKK3_9NEIS S-adenosylmethionine:tRN A ribosyltransferase-isomerase OS=Crenobacter sp. GY 70 310 OX=2563443 GN=queA PE=3 SV=1
MQLSDFDYHLPEHLIAQHPPKQRGGSRLLHVDGLHLEDRLFSDLPAFLQAGDVLVFNDTRVIKARLFGEKDSGGKVEALIERVENEHEALAHVRASKSPKPGTRILFAGRWQAEMVERVGELFRLRFLDDENLFDILEASGKLPLPPYIARDTEGDDDERYQTVYAREKGAVAAPTAGLHFTEDMLTMLEGAGVKLAYVTLHVGAGTFQPVRVDNIAEHKMHSERYEISQATVDVIEAAHAAGRRVVAVGTTSMRALESAARGGVLAAGRGETDIFITPGFRFNVVDRLLTNFHLPKSTLLMLVSAFAGYDEMRAAYAHAVAAEYRFFSYGDAMLLERKEAACQG

SEQ ID NO: 65613 - protein, 349 aa, Crenotalea thermophila
  misc_feature (1)..(349): tr|A0A1I7NFN9|A0A1I7NFN9_9BACT S-adenosylmethionine:tRN A ribosyltransferase-isomerase OS=Crenotalea thermophil a OX=1393122 GN=queA PE=3 SV=1
MKLSQFKFDLPLNLIAQNPAKNRDESRLMVVHRDTGKIEHRIFKDIIEYFDDKDVFIVNNTKVFPARLYGRKEKTGAKIEVFLLRELNKANRLWDVVVDPARKIRVGNKLYFGEDDELVAEVIDNTTSRGRTIRFLFDGTDEEFRQLLEKLGETPLPKYIKRKPTEEDKERYQTVYAKYEGAVAAPTAGLHFTKELIKRMEIKGIRFAEITLHTGLGTFKPIEVEDLSKHKMDAEYYRIDEYAAKLVNEAKLSGHKVCAVGTTSVRAVESSVTSQGLLRPGEGWTNLFIHPPYHFSIPDAMVTNFHLPKTSLIIMVCAFAGYDLIMEAYQVAIKEKYRFYSYGDAMLIL

SEQ ID NO: 65614 - protein, 339 aa, Crenothrix polyspora
  misc_feature (1)..(339): tr|A0A1R4HBD7|A0A1R4HBD7_9GAMM S-adenosylmethionine:tRN A ribosyltransferase-isomerase OS=Crenothrix polyspora OX=360316 GN=queA PE=3 SV=1
MKKSDFSYDLPDALIAQTPLIDRTASRLLVMNKKTGHCEDTQFNTFIDLLKTDDLLVFNNTKVIPARLFGKKPTGGHVEILIERVTGSHQALAHIRASKSPKVGTCIDLAEGHSCNVLARHDDLFELQFFGLPLLTLLEKIGHIPLPPYIKRADDAVDLIRYQTVFAQEAGAVAAPTAGLHFDVALLDKIKQKAIQTAYVTLHVGSGTFQPVRVDNLAEHIMHKEYFAVTQATVDAVLQTRARGGRVIAIGTTAVRALESASKSGTLSAGFGDTDLFITPGYQFKAVDALLTNFHLSESTLLMLVSAFADYEPVMCAYRHAIAASYRFFSYGDAMFIAD

SEQ ID NO: 65615 - protein, 339 aa, Crenothrix polyspora
  misc_feature (1)..(339): tr|A0A1R4HER7|A0A1R4HER7_9GAMM S-adenosylmethionine:tRN A ribosyltransferase-isomerase OS=Crenothrix polyspora OX=360316 GN=queA PE=3 SV=1
MKKSHFAYQLPDELIAQIPLSDRTASRLLLMNKTTGQLQDKQFADFIDALNENDLLVFNNTKVIPARLFGKKRTGGRVEILIERIIDDNKAIAHVRASKSPKLNTLIDLDTDYYCEVLARHDDLFELQFYGAPLSALLEQIGHIPLPPYIKRADDAADLIRYQTVFAKETGAVAAPTAGLHFDLPTLAKIKHNGIQTAFVTLHVGSGTFQPVRVENLSEHIMHKEYFAVSQEVVDAVFKTRARGGRVVAIGTTAVRALESASRQGTLTAGFGDTDLFITPGYRFKSVDAVLTNFHLPESTLLMLVSAFAGYEPVMHAYQHAIEQSYRFFSYGDAMFIAD

SEQ ID NO: 65616 - protein, 340 aa, Crenothrix sp.
  misc_feature (1)..(340): tr|A0A1Y2ZTC6|A0A1Y2ZTC6_9GAMM S-adenosylmethionine:tRN A ribosyltransferase-isomerase OS=Crenothrix sp. D3 OX= 1880899 GN=queA PE=3 SV=1
MKKSDFNYDLPEALIAQNPLPNRDASRLLCMNRDTGQIVDRQFTDFIDLINKDDLLVFNDTKVIPARLFGKKRSGGKVEILIERILDDHHAIAHVRASKSPKEGALIDLDKGYCCEVQGRADDLFKLEFKGESSLLSLLEQIGHIPLPPYITRADNVSDLTRYQTVFAKTAGAVAAPTAGLHFDENLLEKINTRGINTVFVTLHVGSGTFQPVRVENLADHLMHKEYFAVSAATVEAVQQTRARGGRVIAIGTTAVRALESASKNGQLTSGCGDTDLFITPSYQFKSVDAMLTNFHLPESTLLMLVSAFAGYQPIMEAYQHAIEQSYRFFSYGDAMFLSR

SEQ ID NO: 65617 - protein, 346 aa, Criblamydia sequanensis
  misc_feature (1)..(346): tr|A0A090D0L1|A0A090D0L1_9BACT S-adenosylmethionine:tRN A ribosyltransferase-isomerase OS=Criblamydia sequanens is CRIB-18 OX=1437425 GN=queA PE=3 SV=1
MNPNQILDLDAYDFSLPDDLIAKSPMSPRDHSRLLVIDRKSGQMTERKFFQIKDFFSKGDCLVTNNTKVIPARLIGAKETGSKAECLLLKALSPFSWEALVKPGKKITEGTRLIFSEGFEALVTAVLPSGNRVLEFRCDSMSIPEAIKKYGKIPLPSYINEGEAKEEDRITYQTVYAKEEGSAAAPTAGLHFTQNLLDDINKQGADLLSVTLHVGVGTFRPVKEKDIRNHLMHSESYMISTETASKINESKGNLFAVGTTSLRAIESNASLNGKLTGGSFDTSIFIYPGFQFKRVNHLITNFHLPKSSLLMLVSAFAGYDLIREAYQKAIKDRFRFYSYGDAMLII

SEQ ID NO: 65618 - protein, 361 aa, Cribrihabitans marinus
  misc_feature (1)..(361): tr|A0A1H6VEK3|A0A1H6VEK3_9RHOB S-adenosylmethionine:tRN A ribosyltransferase-isomerase OS=Cribrihabitans marinu s OX=1227549 GN=queA PE=3 SV=1
MKLSDFDFDLPDELIATRPARPRSSARMLVAEGDAIHDARVTDLPGWLRPGDRLVLNDTKVIPARLNGTRTRQSAQGEVRARIEATLLEPRADGCWAALVKPLKKLKPGEEIVFSDQLSAVLDRVEGGQALLRFNRTGEDFDAALAQAGAMPLPPYIAGKRPADARDKDDYQTVWARHAGAVAAPTASLHFDDDLLAALQARGVAFTHVTLHVGAGTFLPVKVEDVTTHRMHAEWGRVSPQAADEIAATRARGGRIIPVGTTALRLIESAARDGGIAPWEGETDIFIYPGFQFRVTDALMTNFHLPKSTLLMLVSALMGQDRMKRVYAHAVEARYRFFSYGDASLLLPGPSHATRAPDRMS

SEQ ID NO: 65619 - protein, 359 aa, Cricetibacter osteomyelitidis
  misc_feature (1)..(359): tr|A0A4R2T1T1|A0A4R2T1T1_9PAST S-adenosylmethionine:tRN A ribosyltransferase-isomerase OS=Cricetibacter osteomy elitidis OX=1521931 GN=queA PE=3 SV=1
MLVSDFHFDLPNELIACYPKTERKSSRLLQLNGENGEIFHRTFADVIDLINEGDLLIFNNTRVIPARMFGRKASGGKVEVLVERILSESRFLAHVRSSKAPKAGTALYLGEDKLGDGNGVKAVMIGRQDALFELEIAEKSTALLDVLQQIGHMPLPPYIDRPDEEADQERYQTVYSKVPGAVAAPTAGLHFDDELLAQLKTKGVNFAFVTLHVGAGTFQPVRVEKIEDHHMHAEYVEVSQDVADAVLATKAAGKRVIAVGTTSVRSIESAALASEQNRSGNLLDPYFSDTSIFIYPGKKFRVIDCLITNFHLPESTLIMLVSAFAGYQHTMNAYKSAVEKRYRFFSYGDAMFITKNTAL

SEQ ID NO: 65620 - protein, 340 aa, Criibacterium bergeronii
  misc_feature (1)..(340): tr|A0A552UVK0|A0A552UVK0_9FIRM S-adenosylmethionine:tRN A ribosyltransferase-isomerase OS=Criibacterium bergero nii OX=1871336 GN=queA PE=3 SV=1
MDTRDFDYYLPEELIAQEPLKDRSASRMMKLDKQTGEIKHESFKNIVNYLDENCVLVLNNTRVLPARLYGIKEETDAHIEILLLKRIDMYNWQILVKPAKRAKIGTVIRFSDRLSGTISKEEDEGIRYIKFDFDGVFEDIIYEIGSMPLPPYIHHKLDDKERYQTVYSKINGSSAAPTAGLHFTDEILGQIKNKGIEIEYVTLHVGLGTFRPVKVDKIEQHHMHSEYYNIDEDVAKRLNEARKNGKKIVAVGTTTVRTLESASNKDGELTKLSDNTNIFIFPPYKFKFVDSIITNFHLPMSTLIMMISAFAGKEKLFHAYEEAVKNKYRFFSFGDCMFID

SEQ ID NO: 65621 - protein, 340 aa, Criibacterium bergeronii
  misc_feature (1)..(340): tr|A0A371IIZ4|A0A371IIZ4_9FIRM S-adenosylmethionine:tRN A ribosyltransferase-isomerase OS=Criibacterium bergero nii OX=1871336 GN=queA PE=3 SV=1
MDTRDFDYYLPEELIAQEPLKDRSASRMMKLDKQTGEIKHESFKNIVNYLDENCVLVLNNTRVLPARLYGIKEETDAHIEILLLKRIDMYNWQILVKPAKRAKIGTVIRFSDRLSGTISKEEDEGIRYIKFDFDGVFEDIIYEIGSMPLPPYIHHKLDDKERYQTVYSKINGSSAAPTAGLHFTDEILGQIKNKGIEIEYVTLHVGLGTFRPVKVDKIEQHHMHSEYYNIDEDVAKRLNEARKNGKKIVAVGTTTVRTLESASNKDGELTKLSDNTNIFIFPPYKFKFVDSIITNFHLPMSTLIMMISAFAGKDKLFHAYEEAVKNKYRFFSFGDCMFID

SEQ ID NO: 65622 - protein, 374 aa, Crinalium epipsammum
  misc_feature (1)..(374): tr|K9VWL9|K9VWL9_9CYAN S-adenosylmethionine:tRNA ribosy ltransferase-isomerase OS=Crinalium epipsammum PCC 9333 OX=1173022 GN=queA PE=3 SV=1
MVQIELDRLLSSYDYELPEELIAQTPAVPRDSSRLLVVNSPQQHTHSIFSNLTDFLLPGDLLVLNNTRVIPARLYGKKSTGAPVEVLLLEEQDKNCWLALVKPGRRLQPGATIVFEANNSVNQDAISNLSDVAGVKIPSILTALVLAKDEATGGRLLQFDLPTEINFAEVLTLFGQLPLPPYITSSESEAEQYQTVYAHRSGAIAAPTAGLHFTTELMQQLKQHQIEQAYVTLHVGVGTFRPVEVEDITTHKMHQEWVEVPPSTVEKIRETKLNGGRIIAVGTTVARSLEAAAISGELQPFCGKTNLFIYPGYQLRVIEGLITNFHLPRSSLMMLVSALIGRRRLLDLYQEAIAQRYRFYSFGDAMLILPEARI

SEQ ID NO: 65623 - protein, 351 aa, Croceibacter atlanticus
  misc_feature (1)..(351): tr|A3UBA6|A3UBA6_CROAH S-adenosylmethionine:tRNA ribosy ltransferase-isomerase OS=Croceibacter atlanticus (stra in ATCC BAA-628 / HTCC2559 / KCTC 12090) OX=216432 GN=q ueA PE=3 SV=1
MGMKLSNFGFDLPENLLADRPAENRDEARLMVLNRKEQTIEHKQFKDLIDYFEPDDVLVLNNTKVFPARLYGNKEKTGARIEVFLLRELNPETRLWDVLVDPARKIRIGNKLYFGDDESLVAEVIDNTTSRGRTLRFLYDGSYEEFRKKLKDLGETPLPKYIKREVEPDDAERYQTIFAKEEGAVAAPTAGLHFSKHLLKRLEIKGINFAEVTLHVGLGTFNPVEVEDLSKHKMDSEEAYIAKPATEVVNKAISEKRRICAVGTTVMRTLESAVSSSGTLNEFGGWTNKFIFPPYDFSIANCMVTNFHTPKSTLLMMTAAFAGHEFTQRAYAEAVKEKYNFYTYGDAMLII

SEQ ID NO: 65624 - protein, 359 aa, Croceicoccus marinus
  misc_feature (1)..(359): tr|A0A1Z1FAT5|A0A1Z1FAT5_9SPHN S-adenosylmethionine:tRN A ribosyltransferase-isomerase OS=Croceicoccus marinus OX=450378 GN=queA PE=3 SV=1
MRVDAFDFDLPAERIALRPARPRDAARMLLVEGAEGRLIDRQVRDLPSLLSPGDVLVFNDTRVIPARLEGVRPPRQGENGEGARIGATLHKRIDLRRWQAFVRNGKRLRAGDTICFPADVAAKAEQRLADGSWTLAFQGEEPVELLLERAGQMPLPPYIAGKRETDEQDRSDYQTMFARQDGAVAAPTAALHFTPELIAALDKRGIARETLTLHVGAGTFLPVKAEDTEDHQMHAEWGTIDAATAERLNEVRKAGGRVIAVGTTVLRLLESAADENDVIQPFAGDTSIFITPGYRFRAIDGLMTNFHLPKSTLFMLVSALMGLDVMQSAYAHAIERGYRFYSYGDSSLLLPNRAMSAAS

SEQ ID NO: 65625 - protein, 344 aa, Croceicoccus naphthovorans
  misc_feature (1)..(344): tr|A0A0G3XGM6|A0A0G3XGM6_9SPHN S-adenosylmethionine:tRN A ribosyltransferase-isomerase OS=Croceicoccus naphthov orans OX=1348774 GN=queA PE=3 SV=1
MKVDLFDFELPPERIALRPARPRDSARMLVAAGDAPFADLTMRDLPQVLRAGDVLVFNDTRVIPAQLEGLRGEARIGATLHKRIDLRRWQAFIRNAKRLKEGDRIAFPADVSAIAEQRHADGSFTLAFEGEEPVEVLLERAGRMPLPPYIAGKRPTDEADRSDYQTMFAEKDGAVAAPTAALHFTPDLIAALDAAGIGRETLTLHVGAGTFLPVKADDTDDHAMHSEWGRMDKATADRLNAARAAGGRVISVGTTSLRVLESAADEDGVIHPFEGDTAIFITPGYRFRAIDGLMTNFHLPKSTLFMLVSALMGLDCMRSAYAHAIANEYRFYSYGDGSLLLPNG

SEQ ID NO: 65626 - protein, 347 aa, Croceicoccus ponticola
  misc_feature (1)..(347): tr|A0A437H0R2|A0A437H0R2_9SPHN S-adenosylmethionine:tRN A ribosyltransferase-isomerase OS=Croceicoccus ponticol a OX=2217664 GN=queA PE=3 SV=1
MRVDLFDFELPPERIALRPARPRDAARLLVVDGDAPFNDRVMRELPQVLRAGDVLVFNDTRVIPAQLEGTRGGHDGQGARIGATLHKRIDLRRWQAFIRNAKRLREGDRIDFPAQVTAIAEMRHADGSFTLAFEGDEPVEVLLERAGRMPLPPYIAGKRETDAADREDYQTMFAQHDGAVAAPTAALHFTPDLIAALDAAGVMRETLTLHVGAGTFLPVKAEDTADHAMHSEWGRMDAATAARLNAARARGNRVIAVGTTSLRVLESAADEYGTIQPFEGDTAIFITPGYRFRAIDGLMTNFHLPKSTLFMLVSALMGLDRMQATYAHAIEQGYRFYSYGDGSLLLP

SEQ ID NO: 65627 - protein, 355 aa, Croceicoccus sp.
  misc_feature (1)..(355): tr|A0A2D8D4I1|A0A2D8D4I1_9SPHN S-adenosylmethionine:tRN A ribosyltransferase-isomerase OS=Croceicoccus sp. OX=1 927144 GN=queA PE=3 SV=1
MRVDAFDFDLPNERIALRPARPRDAARMLVVEGSDARLTDRQVRDLPALLSPGDVLVFNDTRVIPAQLEGVRPPRGGEAGDGASIGATLHKRIDLRRWQAFVRNGKRLREGDRIQFPADVMAIAEGRLPDGSWTLHFGGEEPVEVLLERAGRMPLPPYIAGKRGTDEQDRTDYQTMFAERDGAVAAPTAALHFTPELIAALDQRGIARETLTLHVGAGTFLPVKADDTDDHAMHAEWGRIDAATADRLNEARKAGGRIVAVGTTVLRLLESAADENGVIQPFEGDTSIFITPGYRFRAIDALMTNFHLPKSTLFMLVSALMGLDVMQSAYAHAIAGEYRFYSYGDSSLLLPERGA

SEQ ID NO: 65628 - protein, 349 aa, Croceitalea dokdonensis
  misc_feature (1)..(349): tr|A0A0P7AG49|A0A0P7AG49_9FLAO S-adenosylmethionine:tRN A ribosyltransferase-isomerase OS=Croceitalea dokdonens is DOKDO 023 OX=1300341 GN=queA PE=3 SV=1
MKLSNFNFELPKELLAEYPAENRDESKLMVIHRETGKIEHKMFKDLINYFDEGDVMVLNNTKVFPARLFGNKEKTGARIEVFLLRELNEEQRLWDVLVDPARKIRIGNKLYFGDDEDLVAEVIDNTTSRGRTLRFLYDGSYTDFRRKLRQLGETPLPKYIKREVMPEDEERYQTIYAKHEGAVAAPTAGLHFSKHLLKRLEIKGIDFAEVTLHIGLGTFNPVEVEDLSKHKMDSEELTIEEKATEIVNNAKKNKKRICAVGTTVMRGLESAVSSDHQLNTFEGWTNKFIFPPYDFSIANCMVTNFHLPKSTLLMMISAFMGHDLMKKAYKQAILEQYRFYSYGDAMLIL

SEQ ID NO: 65629 - protein, 349 aa, Croceivirga radicis
  misc_feature (1)..(349): tr|A0A1V6LUQ1|A0A1V6LUQ1_9FLAO S-adenosylmethionine:tRN A ribosyltransferase-isomerase OS=Croceivirga radicis O X=1929488 GN=queA PE=3 SV=1
MKLSNFNFDLPKELLAEYPAENRDESKLMVIHRDTGKIEHRMFKDMIEYFDEGDVMVLNNTKVFPARLFGNKEKTGARIEVFLLRELNEEQRLWDVLVDPARKIRIGNKLYFGDDESLVAEVIDNTTSRGRTLRFLYDGSYTDFRRKLRELGETPLPKYIKREVTPEDEDRYQTIYAKHEGAVAAPTAGLHFSKHLLKRLEIKGVDFAEVTLHVGLGTFNPVEVEDLSKHKMDSEELVIDEKATEIVNNAKANKKKVCAVGTTVMRGLESAVSSERTLNTFEGWTNKFIFPPYDFSIADCMITNFHLPKSTLLMMISAFMGHDLMKKSYKQAILENYRFYSYGDAMLII

SEQ ID NO: 65630 - protein, 349 aa, Crocinitomicaceae bacterium
  misc_feature (1)..(349): tr|A0A2E0FJ40|A0A2E0FJ40_9FLAO S-adenosylmethionine:tRN A ribosyltransferase-isomerase OS=Crocinitomicaceae bac terium OX=2026728 GN=queA PE=3 SV=1
MKLSQFKYDLPEELIAQYPVENRDESRLLVVNRKEGKFEHKMFHEVIDYFDDGDAMVFNNTRVFPARMYGNKEKTGARIEVFLLRELNRESLLWDVLVDPARKIRIGNKLYFGEDESLVAEVIDNTTSRGRTLRFLYDGPYEDFKEAITALGETPIPKYIDRPVEPIDEERFQTIFAKEEGAVAAPTAGLHFSRELLKRLELKGLNFAELTLHVGLGTFRPVEVEDLTKHKMDSEQLRIPETAAFTVNHTKDAKKKVCAIGTTVMRSIETSVSTEGRLKPFDGWTNKFIFPPYDFRIADAMITNFHMPMSTLLMQVCAFGGYDLVIEAYQEAIKEKYRFYSYGDAMLIL

SEQ ID NO: 65631 - protein, 409 aa, Crocinitomicaceae bacterium
  misc_feature (1)..(409): tr|A0A2D7DG15|A0A2D7DG15_9FLAO S-adenosylmethionine:tRN A ribosyltransferase-isomerase OS=Crocinitomicaceae bac terium OX=2026728 GN=CL828_04400 PE=3 SV=1
MQTADYAYDLPESAIAIHPVTPRSGARLLTWRQGEVATHQRFTDLPVVLPQGTQLWVNNTRVIRARLLLQKPTGGRLEVFLLEPHERSMEQALASTQAVVWKCMVRGGKRWTAGEAGLQVEDTAGKWEIAAKRVGMDEGVRFIELRWTHRSAATGDVRKASFAELLEAMGKMPLPPYMHRPAQEQDAEDYQTVYAEVPGSVAAPTAGLHFDALLMADLSTSTSLHHVTLHVGAGTFKPLGEGDVTDHVMHGEHCSVSFDAIQALAAEGVHRVSTGTTSLRTLESLYWLAIKWKETGEQPVELYQWEWRHELGDAAEHLGWTMETAMQWCVNALDGADWHFRTSVMMVPPYRIRSVQGLITNFHLPNSTLLCLVASAIGDDWRSIYDRALAEGFRFLSYGDGSYLEWDPR

SEQ ID NO: 65632 - protein, 351 aa, Crocinitomix sp.
  misc_feature (1)..(351): tr|A0A2W1NAS4|A0A2W1NAS4_9FLAO S-adenosylmethionine:tRN A ribosyltransferase-isomerase OS=Crocinitomix sp. SM17 01 OX=2219161 GN=queA PE=3 SV=1
MKLSAFDFDLPDNLIAEHPVPNRDESRLMVLNREKQTIEHKVFKDVIDYFDDGDVMIMNNTKVFPARMYGNKEKTGARIEVFLLRELNRESLLWDVLVDPARKIRIGNKLYFTEDDSLVAEVIDNTTSRGRTIRFLFDGSYDEFKKKITELGETPIPPYIKGLRDVVPEDEERYQTIYAKEEGAVAAPTAGLHFSRELLKRLEIKGVQTADVTLHIGLGTFRNVEVEDLTKHKMDSEQCIILPEACDIVNNAKKKKKRICAVGTTAMRAIESSVSTSGMLNPYNGWTNKFIFPPYDFSIADSLITNFHTPQSTLLMMVSAFADYDFVKKAYAEAVKEKYRFFSYGDAMLII

SEQ ID NO: 65633 - protein, 360 aa, Crocosphaera chwakensis
  misc_feature (1)..(360): tr|A3IRC7|A3IRC7_9CHRO S-adenosylmethionine:tRNA ribosy ltransferase-isomerase OS=Crocosphaera chwakensis CCY01 10 OX=391612 GN=queA PE=3 SV=1
MSSDYLLSSYDYYLPPELIAQNPMTPRDESRLLVINSLRTHTHSIFRDLPEWLSPGDLLVFNNTRVIPARLYGKKATGAPVEILLLEEKEPLCWLALVKPGKRFKIGSEIYFYLDNNDCSQDNFLVATVVDRDEETGGRLLKFKVNSLDVFWKKIEELGQIPFPPYVTESKAAPSQYQTIYAQKPGAVAAPTAGLHFTDKLLENLQQKGINQAYITLHVGLGTFRPVDIENIKEHKMHQEWIELPEITVEKIKETKANGGRVIAVGTTVVRTLEGAAKAAEMEGKQGLIPYRDKTDIFIYPGYSWRVIDGLITNFHLPKSSLLMLVSALIGRERLLELYQIAIEEKYRFYSFGDGMLILL

SEQ ID NO: 65634 - protein, 361 aa, Crocosphaera subtropica
  misc_feature (1)..(361): tr|B1WNE7|B1WNE7_CROS5 S-adenosylmethionine:tRNA ribosy ltransferase-isomerase OS=Crocosphaera subtropica (stra in ATCC 51142 / BH68) OX=43989 GN=queA PE=3 SV=1
MSSDHLLSSYDYDLPPELIAQNPMIPRDHSRLLVINSPTTHIHSVFRDLPKWLLPGDLLVFNNTRVIPARLYGKKTTGAPVEILLLEEKEPFCWLALVKPGKRFKIGSEIHFPLDHNDDKEDMFLAATVLDRDEETGGRLLKFNVDSLDLFWKKIEEIGQIPFPPYVTESEADSSQYQTIYAQKPGAVAAPTAGLHFTDELLDNLQHKRINQAYITLHVGLGTFRPVDMENIKEHKMHQEWIEVPDVTVEKIKETKANGGRVIAVGTTVVRALEGAAKAAEMEGKKDLKAFRGKTDIFIYPGYSWRVIDGMITNFHLPKSSLLMLVSALIGRERLLDLYQIAIKEKYRFYSFGDGMLILLS

SEQ ID NO: 65635 - protein, 361 aa, Crocosphaera watsonii
  misc_feature (1)..(361): tr|T2IAE2|T2IAE2_CROWT S-adenosylmethionine:tRNA ribosy ltransferase-isomerase OS=Crocosphaera watsonii WH 8502 OX=423474 GN=queA PE=3 SV=1
MSSEHLLSSYDYYLPQELIAQNPVIPRDNSRLLVINSPENHIHSVFRDLPQWLLPGDLLVFNNTRVIPARLYGAKSTGAPVEILLLEEKEPFCWLALVKPGKRFKIGSEIYFRLDDDEDNFLVATVVDRDEETGGRLLKFQVDSLDLFWQKIEEIGQIPFPPYVTESDAKPSQYQTIYAQKPGAVAAPTAGLHFTEELLENLQQKGINQAYITLHVGLGTFRPVDIDNIKEHKMHQEWIEVPEIIVEKIKETKANGGRVIAVGTTVVRALEGTAKATEMAGKQELMEFRGKTDIFIYPGYSWCVIDGLITNFHLPKSSLLMLVSALIGRERLLELYQIAIEEKYRFYSFGDGMLILLESKN

SEQ ID NO: 65636 - protein, 361 aa, Crocosphaera watsonii; identical to SEQ ID NO: 65635
  misc_feature (1)..(361): tr|T2ILP4|T2ILP4_CROWT S-adenosylmethionine:tRNA ribosy ltransferase-isomerase OS=Crocosphaera watsonii WH 0005 OX=423472 GN=queA PE=3 SV=1

SEQ ID NO: 65637 - protein, 356 aa, Cronobacter condimenti
  misc_feature (1)..(356): tr|K8AJ82|K8AJ82_9ENTR S-adenosylmethionine:tRNA ribosy ltransferase-isomerase OS=Cronobacter condimenti 1330 O X=1073999 GN=queA PE=3 SV=1
MRLTDFSFELPESLIAHYPQAQRSACRLLSLDGPTGNLTHGTFTDLLDKLNPGDLLVFNNTRVIPARLFGRKASGGKIEVLVERMLDDHRVLAHIRASKAPKPGAELLLGDDESVNATMTARHDALFEVQFNDERPVLDILNSIGHMPLPPYIERPDEESDRELYQTVYSQKPGAVAAPTAGLHFDEPLLERLRAKGIEMAFVTLHVGAGTFQPVRAESIEDHVMHSEYAEVPQEVVDAVSAAKARGNKVVAVGTTSVRSLESAAQAAKDALIAPFFGDTQIFIYPGYQYKVIDALVTNFHLPESTLIMLVSAFAGYKHTMNAYREAVKAEYRFFSYGDAMYITYNPQAIHERPGA

SEQ ID NO: 65638 - protein, 356 aa, Cronobacter dublinensis
  misc_feature (1)..(356): tr|K8AL13|K8AL13_9ENTR S-adenosylmethionine:tRNA ribosy ltransferase-isomerase OS=Cronobacter dublinensis 1210 OX=1208656 GN=queA PE=3 SV=1
MRLTDFSFELPESLIAHYPQAQRSACRLLSLDGPTGDLTHGTFTDLLDKLNPGDLLVFNNTRVIPARLFGRKASGGKIEVLVERMLDDHRVLAHIRASKAPKPGAELLLGDDESVNATMTARHDALFEVQFNDERPVLDILNSIGHMPLPPYIERPDEASDRELYQTVYSEKPGAVAAPTAGLHFDEPLLARLREKGVEMAFVTLHVGAGTFQPVRVESIEDHVMHSEYAEVPQDVVDAVLAAKARGNKVVAVGTTSVRSLESAAQAATDAPIAPFFGDTQIFIYPGYQYQVIDALVTNFHLPESTLIMLVSAFAGYQHTMNAYREAVKAEYRFFSYGDAMYITYNPQAIFERPGE

SEQ ID NO: 65639 - protein, 356 aa, Cronobacter dublinensis; identical to SEQ ID NO: 65638
  misc_feature (1)..(356): tr|A0A0K2NZD4|A0A0K2NZD4_9ENTR S-adenosylmethionine:tRN A ribosyltransferase-isomerase OS=Cronobacter dublinens is subsp. dublinensis LMG 23823 OX=1159554 GN=queA PE=3 SV=1

SEQ ID NO: 65640 - protein, 356 aa, Cronobacter malonaticus
  misc_feature (1)..(356): tr|V5U223|V5U223_9ENTR S-adenosylmethionine:tRNA ribosy ltransferase-isomerase OS=Cronobacter malonaticus OX=41 3503 GN=queA PE=3 SV=1
MRLTDFSFELPESLIAHYPQAQRSACRLLSLDGPTGDLTHGTFTDLLDKLNPGDLLVFNNTRVIPARLFGRKASGGKIEVLVERMLDDHRVLAHIRASKAPKPGAELLLGDDESVNATMTARHDALFEVQFNDERPVLDILNSIGHMPLPPYIERPDEEADRELYQTVYSQKPGAVAAPTAGLHFDEPLLERLRAKGIEMAFVTLHVGAGTFQPVRVESIEDHVMHSEYAEVPQEVVDAVLAAKARGNKVVAVGTTSVRSLESAAQAVQDALIAPFFGDTQIFIYPGYQYKVIDALVTNFHLPESTLIMLVSAFAGYKHTMNAYREAVKAEYRFFSYGDAMYITYNPQAINERPGE

SEQ ID NO: 65641 - protein, 356 aa, Cronobacter malonaticus
  misc_feature (1)..(356): tr|A0A423Y4A6|A0A423Y4A6_9ENTR S-adenosylmethionine:tRN A ribosyltransferase-isomerase OS=Cronobacter malonatic us OX=413503 GN=queA PE=3 SV=1
MRLTDFSFELPESLIAHYPQAQRSACRLLSLDGPTGDLTHGTFTDLLDKLNPGDLLVFNNTRVIPARLFGRKASGGKIEVLVERMLDDHRVLAHIRASKAPKPGAELLLGDDESVNATMTARHDALFEVQFNDERPVLDILNSIGHMPLPPYIERPDEEADRELYQTVYSQKPGAVAAPTAGLHFDEPLLERLRAKGIEMAFVTLHVGAGTFQPVRVESIEDHVMHSEYAEVPQEVVDAVLAAKARGNKVVAVGTTSVRSLESAAQAAQDALIAPFFGDTQIFIYPGYQYKVIDALVTNFHLPESTLIMLVSAFAGYKHTMNAYREAVKAEYRFFSYGDAMYITYNPQAINERPGE

SEQ ID NO: 65642 - protein, 356 aa, Cronobacter muytjensii
  misc_feature (1)..(356): tr|A0A2T7AQG7|A0A2T7AQG7_9ENTR S-adenosylmethionine:tRN A ribosyltransferase-isomerase OS=Cronobacter muytjensi i OX=413501 GN=queA PE=3 SV=1
MRLTDFSFELPESLIAHYPQAQRSACRLLSLDGPTGDLTHGTFTDLLDKLNPGDLLVFNNTRVIPARLFGRKASGGKIEVLVERMLDDHRVLAHIRASKAPKPGAELLLGDDESVNATMTARHDALFEVQFNDERPVLDILNSIGHMPLPPYIERPDEESDRELYQTVYSEKPGAVAAPTAGLHFDEPLLARLREKGIEMAFVTLHVGAGTFQPVRVESIEDHVMHSEYAEVPQDVVDAVLAAKARGNKVVAVGTTSVRSLESAAQAAQDALIAPFFGDTQIFIYPGYQYKVIDALVTNFHLPESTLIMLVSAFAGYQHTMNAYREAVKAEYRFFSYGDAMYITYNPQAIFERPGE

SEQ ID NO: 65643 - protein, 356 aa, Cronobacter sakazakii
  misc_feature (1)..(356): sp|A7MEL5|QUEA_CROS8 S-adenosylmethionine:tRNA ribosylt ransferase-isomerase OS=Cronobacter sakazakii (strain A TCC BAA-894) OX=290339 GN=queA PE=3 SV=1
MRLTDFSFELPESLIAHYPQAQRSACRLLSLDGPTGDLTHGTFTDLLDKLNPGDLLVFNNTRVIPARLFGRKASGGKIEVLVERMLDDHRVLAHIRASKAPKPGAELLLGDDESVNATMTARHDALFEVQFNDARPVLDILNSIGHMPLPPYIERPDEEADRELYQTVYSQKPGAVAAPTAGLHFDEPLLERLRAKGIEMAFVTLHVGAGTFQPVRVESIEDHVMHSEYAEVPQEVVDAVLAAKARGNKVVAVGTTSVRSLESAAQAAQDALIAPFFGDTQIFIYPGYQYKVIDALVTNFHLPESTLIMLVSAFAGYKHTMNAYREAVKAEYRFFSYGDAMYITYNPQAINERPGE

SEQ ID NO: 65644 - protein, 356 aa, Cronobacter sakazakii
  misc_feature (1)..(356): tr|A0A3Q9CHZ9|A0A3Q9CHZ9_CROSK S-adenosylmethionine:tRN A ribosyltransferase-isomerase OS=Cronobacter sakazakii OX=28141 GN=queA PE=3 SV=1
MRLTDFSFELPESLIAHYPQAQRSACRLLSLDGPTGDLTHGTFTDLLDKLNPGDLLVFNNTRVIPARLFGRKASGGKVEVLVERMLDDHRVLAHIRASKAPKPGAELLLGDDESVNATMIARHDALFEVQFNDERPVLDILNSIGHMPLPPYIERPDEEADRELYQTVYSQKPGAVAAPTAGLHFDEPLLERLRAKGIEMAFVTLHVGAGTFQPVRVESIEDHVMHSEYAEVPQEVVDAVLAAKARGNKVVAVGTTSVRSLESAAQAAQDALIAPFFGDTQIFIYPGYQYKVIDALVTNFHLPESTLIMLVSAFAGYKHTMNAYREAVKAEYRFFSYGDAMYITYNPQAINERPGE

SEQ ID NO: 65645 - protein, 356 aa, Cronobacter turicensis
  misc_feature (1)..(356): tr|C9XX68|C9XX68_CROTZ S-adenosylmethionine:tRNA ribosy ltransferase-isomerase OS=Cronobacter turicensis (strai n DSM 18703 / LMG 23827 / z3032) OX=693216 GN=queA PE=3 SV=1
MRLTDFSFDLPESLIAHYPQAQRSACRLLSLDGPTGDLTHGTFTDLLDKLNPGDLLVFNNTRVIPARLFGRKASGGKIEVLVERMLDDHRVLAHIRASKAPKPGAELLLGDDESVNATMTARHDALFEVQFNDERPVLDILNSIGHMPLPPYIERPDEEADRELYQTVYSQKPGAVAAPTAGLHFDEPLLERLRAKGIEMAFVTLHVGAGTFQPVRVESIEDHVMHSEYAEVPQEVVDAVLAAKARGNKVVAVGTTSVRSLESAAQAAQDALIAPFFGDTQIFIYPGYQYQVIDALVTNFHLPESTLIMLVSAFAGYKHTMNAYREAVKAEYRFFSYGDAMYITYNPQAINERPGE

SEQ ID NO: 65646 - protein, 356 aa, Cronobacter turicensis
  misc_feature (1)..(356): tr|A0A2T7B991|A0A2T7B991_9ENTR S-adenosylmethionine:tRN A ribosyltransferase-isomerase OS=Cronobacter turicensi s OX=413502 GN=queA PE=3 SV=1
MRLTDFSFELPESLIAHYPQAQRSACRLLSLDGPTGDLTHGTFTDLLDKLNPGDLLVFNNTRVIPARLFGRKASGGKIEVLVERMLDDHRVLAHIRASKAPKPGAELLLGDDESVNATMTARHDALFEVQFNDERPVLDILNSIGHMPLPPYIERPDEEADRELYQTVYSQKPGAVAAPTAGLHFDEPLLERLRAKGIEMAFVTLHVGAGTFQPVRVESIEEHVMHSEYAEVPQEVVDAVLAAKARGNKVVAVGTTSVRSLESAAQAAQDALIAPFFGDTQIFIYPGYQYQVIDALVTNFHLPESTLIMLVSAFAGYKHTMNAYREAVKAEYRFFSYGDAMYITYNPQAINERPGE

SEQ ID NO: 65647 - protein, 356 aa, Cronobacter universalis
  misc_feature (1)..(356): tr|A0A376E3D1|A0A376E3D1_9ENTR S-adenosylmethionine:tRN A ribosyltransferase-isomerase OS=Cronobacter universal is NCTC 9529 OX=1074000 GN=queA PE=3 SV=1
MRLTDFSFELPESLIAHYPQAQRSACRLLSLDGPTGDLTHGTFTDLLDKLNPGDLLVFNNTRVIPARLFGRKASGGKVEVLVERMLDDHRVLAHIRASKAPKPGAELLLGDDESVNATMTARHDALFEVQFNDARPVLDILNSIGHMPLPPYIERPDEEADRELYQTVYSQKPGAVAAPTAGLHFDEPLLERLRAKGIEMAFVTLHVGAGTFQPVRVESIEDHVMHSEYAEVPQEVVDAVLAAKARGNKVVAVGTTSVRSLESAAQAAQDALIAPFFGDTQIFIYPGYQYKVIDALVTNFHLPESTLIMLVSAFAGYKHTMNAYREAVKAEYRFFSYGDAMYITYNPQAINERPGE

SEQ ID NO: 65648 - protein, 349 aa, Cruoricaptor ignavus
  misc_feature (1)..(349): tr|A0A1M6EAX4|A0A1M6EAX4_9FLAO S-adenosylmethionine:tRN A ribosyltransferase-isomerase OS=Cruoricaptor ignavus OX=1118202 GN=queA PE=3 SV=1
MKTSDFNFNLPDELLAEHPSEHRDEARLMVLDRKTETIEHKLFKDVIDYFDEGDLFIFNNTKVFPARLYGHKEKTGAKIEVFLLRELDSETRVWDVLVDPARKIRIGNKLFFTEDESLVAEVVDNTTSRGRTLRFLYDGSYEEFRQKLKDLGETPLPKYIKRPVEPEDAERYQTIYAKNEGAVAAPTAGLHFSKHLMKRMEIKGINFAEITLHVGLGTFNPIEVEDLSKHKMESEEVIITEEQAKIINNAVDENRRICAVGTTTMRALETSVSSNRKIGPYQGWTNKFIFPPHDFGVATSMITNFHTPKSTLIMMIAAFAGKDFVMHAYEEAIKEKYKFYSYGDAMLIL

SEQ ID NO: 65649 - protein, 83 aa, Cryomorphaceae bacterium
  misc_feature (1)..(83): tr|A0A353FE32|A0A353FE32_9FLAO S-adenosylmethionine:tRN A ribosyltransferase-isomerase (Fragment) OS=Cryomorpha ceae bacterium OX=1898111 GN=DDW81_11770 PE=3 SV=1
MKLSHFNYKLPKELIAERPTTHRDESRLMILNRKEGTIEHKMFKDVVDIFEDGDTLVLNNTKVFPARMYGNKEKTGARIEVFL

SEQ ID NO: 65650 - protein, 351 aa, Cryomorphaceae bacterium
  misc_feature (1)..(351): tr|A0A0R2V3I6|A0A0R2V3I6_9FLAO S-adenosylmethionine:tRN A ribosyltransferase-isomerase OS=Cryomorphaceae bacter ium BACL18 MAG-120507-bin74 OX=1655627 GN=queA PE=3 SV= 1
MKMKLSHFGYELPEAHIAQHPVDFRDDARLMVVNRESGSIEHHYFRDLANFFDPRDLLVINNTKVFPARMWGNKEKTGALIEVFLLRELNAESRLWDVLVDPARKIRIGNKLYFGDDDSLVAEVIDNTTSRGRTLRFLFDGSYEEFRLMLKEMGETPLPKYITRPLEDADAERYQSIFAKVEGAVAAPVASLHFSKNLMKKLEIKGIDTVEMTMHVGLGTFRQVEVEDLSKHKMESEQYWIYPNTAERVNQAKAERRKVCAVGTSVIRSLESASITDHRIKSGNGWTSKFIFPPHEFKVVNSLITNFHAPQSTMLMLTAAFAGYELTMDIYNTAVKENYRFLSYGDALMFV

SEQ ID NO: 65651 - protein, 358 aa, Cryptobacterium curtum
  misc_feature (1)..(358): tr|C7MKZ8|C7MKZ8_CRYCD S-adenosylmethionine:tRNA ribosy ltransferase-isomerase OS=Cryptobacterium curtum (strai n ATCC 700683 / DSM 15641 / 12-3) OX=469378 GN=queA PE= 3 SV=1
MKTSDFDYDLPEERIAQEPAPIRDKCKMLVMDRITGALEDKIFCDIIDYINPGDVLVANETRVLPARLLGAKRTTGGAAEVFLLRPLPHGQQNNTQSDWEVLVRPGKRLKPGAIIDFPSTNGSTALTAEIVGFVESGKGERIARLSTEAYSTLDEALHAVGHTPLPPYIKQYVGDEEMYQTVYSNRETSAAAPTAGLHFTPELIEAIKAKGARWETVELQVGIDTFRIVDEDDPRNHAMHTETYTVPQRVVDACNEAHQRGGRVIAVGTTSTRSLESAWDVETHQLVARDQAQTALFLLPGSNFHVIDALITNFHVPRSTLMMLVSAFSSRDAIMAAYRHAIDNKYRMLSFGDAMFIH

SEQ ID NO: 65652 - protein, 655 aa, Cryptobacterium sp.
  misc_feature (1)..(655): tr|R7CJI7|R7CJI7_9ACTN Multifunctional fusion protein O S=Cryptobacterium sp. CAG:338 OX=1262868 GN=queA PE=3 S V=1
MKLLLHACCGPCSLEPVRLLKEEGHDIAIAYMNSNIAPASEYQHRLSTLLDWAKAQDIPVIEGPYEPTRWQEAIRNAWHPHSSNSDSTQTSAHTKQTSAHTNHEASAPRASFPLEASSAFVTSSELDASPASEANSQTITPSFNTGIDPEFDPARNPKFAHLYHDRENRCRACYRIRLEELARFAHEHGFEGIGTTLTVSPYQYTAIIQEELQRVAKPYQGLSVVFRDYRPYYPEATKRSRDLGMYRQNYCGCAYSDKEAAAEREARKAARKKKKAEERRAKLQALTTDDFDYELPEELIAQEPAPIRDECRLLVMKRDTGTLEDKIFRDIIDYLQPGDLLVANETRVMPARLIGHKRETGGTAEVFLLREAKQDANRSNQSATWEALVRPGKRLKPGAIVDFVASSEEDNESSNENSNEEVVLSAEVIDWVEGAQKGERLVRLTTCLPSLDEALHAVGHTPLPPYIKNYAGDEELYQTVYSHEERSAAAPTAGLHFTPELIECIKEKGIGWETVHLEVGLDTFRIVEEDNPRDHQIHTERYTVPQQTVDAIKRTKEQGGRVIAVGTTSVRSLESAWDAERGLIARDREATSLYILPGYEFKVVDALITNFHVPRSTLMMLVSAFSTRDNIMKAYHHAIKRKYRMLSFGDAMFIR

SEQ ID NO: 65653 - protein, 343 aa, Cryptosporangium arvum
  misc_feature (1)..(343): tr|A0A010ZNL9|A0A010ZNL9_9ACTN S-adenosylmethionine:tRN A ribosyltransferase-isomerase OS=Cryptosporangium arvu m DSM 44712 OX=927661 GN=CryarDRAFT_1325 PE=3 SV=1
MKPSTVFTLPADADAHEPPEARGSARDEVRLLVASPSGLTSTRFGRLPAYLEPGDLVVVNTSATLPAAVDGHRPDGTPVVIHFSAPRGAGWVVEVRVPDGSGPVLDGVSGERIAVPGGAGLTLREPADERAHGVRLWTADVALEGPVEAWLNRHGRPITYSYLHGRWPLSDYQPVFAREPGSAEMASAGRPFTDRLVTDLVTRGVAVAPVLLHTGVSSPEAGEGPQTEWFRVPAATARLVRSTRDAGGRVVAVGTTVTRALESAVDETGRVRAAEGWTDLVIGPDHPPRVVNGLVTGWHTPEASHLLLLEAVAGPGLVQAAYRAAVAERYRWHEFGDSCLLLP

SEQ ID NO: 65654 - protein, 345 aa, Cryptosporangium aurantiacum
  misc_feature (1)..(345): tr|A0A1M7QBD0|A0A1M7QBD0_9ACTN S-adenosylmethionine:tRN A ribosyltransferase-isomerase OS=Cryptosporangium aura ntiacum OX=134849 GN=SAMN05443668_104398 PE=3 SV=1
MKPRTVFTLPTDAEATVPPEARGLSRDGVRLLVATPSGLTSTRFAALPEFLRPGDLVVVNTSGTLPAAVDGRRPDGTPVVVHFSAPRATGGGWIVELRVPDGSGPVLDARPGERITVPDDARLTLRAPADAHPAGVRLWAADVVLEGPVEAWLNRHGRPITYGYLHGRWPLAEYQPVFAREPGSAEMASAGRPFTDRMVTDLVTRGIGVAPVLLHTGVSSQEFGEGPQTERFRVPPATARQVESVRQAGGRVVAVGTTVTRALESAVDEGGRVVATEGWTDLVIGPDHPARVVNGLVTGWHTPEASHLLLLEAVAGPALVQAAYRAAVAEGYRWHEFGDSCLLLP

SEQ ID NO: 65655 - protein, 408 aa, Culturomica sp.
  misc_feature (1)..(408): tr|A0A356DHX9|A0A356DHX9_9BACT S-adenosylmethionine:tRN A ribosyltransferase-isomerase OS=Culturomica sp. OX=19 26652 GN=queA PE=3 SV=1
MNTIELTALKNIKIEDYTYDLPEEKIAKFPLADREASRLLIYDRGVVSETFFSQVPALLKSGQTLIFNNTKVIYARLFFQKETGAHIEIFCLEPLVPADYARNFESNYYCEWSCMVGNLKKWRDGAIFCRFKRGQDEVVLKAEKLGQTGGEVHVRFSWNKELSFSEVLEYCGKIPIPPYLNRESEDSDKIRYQTVYSREEGSVAAPTAGLHFTRNILSVLEKQGVHIDELTLHVGAGTFRPVKAERIGGHDMHTEHIVISRKLVDDLSRKQGEVIAVGTTSVRTLESLYWMGVKRLMGEEEFYSLSQWEAYTLPVGYSLQEAMAALVDWFDRSGEELLKARTTIIIVPGYRFQVIDAMFTNFHQPQSTLLLLVGAAVGEDWRKIYAYALSHHFRFLSYGDSSFLKVRK

SEQ ID NO: 65656 - protein, 349 aa, Culturomica sp.
  misc_feature (1)..(349): tr|A0A356DJH7|A0A356DJH7_9BACT S-adenosylmethionine:tRN A ribosyltransferase-isomerase OS=Culturomica sp. OX=19 26652 GN=queA PE=3 SV=1
MKLSKFKYRLPQELIALHPAQNRDECRLMVLNKKTGEIEHKVFKDLIDYFDEKDVFVFNDTKVFPARLYGNKEKTGAEIEVFLLRELNRDLRIWDVLVDPARKIRIGNKLYFGEDDSLVAEVIDNTTSRGRTLRFLFDGEYEEFKKLLYGLGETPLPKFIDRKVEPEDAENYQTIFASHEGAVAAPTAGLHFSRELMKRMEIKGINFAYITLHVGLGNFREVDVEDLTKHKMDSEQIIVNPETVSIVNEAKDEKHKICAVGTTVVRTLESCVTTKGRLTEFEGWTNKFIFPPYDFSVPDAFISNFHLPYSTLLMMVAAFGGYEHVMNAYEVAVKEKYKFGTYGDAMLII

SEQ ID NO: 65657 - protein, 342 aa, Cuneatibacter caecimuris
  misc_feature (1)..(342): tr|A0A4Q7PPB9|A0A4Q7PPB9_9FIRM S-adenosylmethionine:tRN A ribosyltransferase-isomerase OS=Cuneatibacter caecimu ris OX=1796618 GN=queA PE=3 SV=1
MDVKDFDYELPQELIAQDPIEKRDASRLLVLDKKTGGTSHHIFHEIVDMLEPGDCLVINDTKVIPARLFGVKEDTGAHVEVLLLKRKEDHVWETLVRPGKKLRPGARLSFGDGKLKAEVMEVVEEGNRLVRFEYEGIFEEILDELGQMPLPPYITHELKDKNRYQTVYAKHEGSAAAPTAGLHFTEALLDEIVKKGVKIARVCLHVGLGTFRPVKAEHVQDHHMHSEFYRIEEDAAEIINETKASGGRVIAVGTTSCRTLEAAADPATGLLKACSGWTEIFIYPGYRFKCIDALITNFHLPQSTLLMLVSALAGREHILEAYREAVEERYRFFSFGDAMLIV

SEQ ID NO: 65658 - protein, 356 aa, Cupriavidus alkaliphilus
  misc_feature (1)..(356): tr|A0A2W7NZG0|A0A2W7NZG0_9BURK S-adenosylmethionine:tRN A ribosyltransferase-isomerase OS=Cupriavidus alkaliphi lus OX=942866 GN=queA PE=3 SV=1
MLTLSDFDFPLPPELIAQSALPDRSASRLLVVERLAPGDTADAVRMADRAFSDIVDYLRPDDLLVFNDTRVIKARFFGHKPSGGKVEVLVERVLDTHTVLAQVRASKTPAEGSALHLADDAFAVTVGPRVDQFFTLRFPEPALDLIERYGRLPLPPYITHDPDAYDETRYQTVYARSPGAVAAPTAGLHFDDALFARLDAAGVRRAFLTLHVGAGTFQPVRTENLAEHKMHSEWYAISEDLAQAVRDARARGGRVIAVGTTSLRALESAAQPDGTLAAGSSDTDIFITPGYRFRLVDALITNFHLPKSTLLMLVSALAGVQAIRAAYRHAVEQRYRFFSYGDAMLLTRQPDAAAAA

SEQ ID NO: 65659 - protein, 356 aa, Cupriavidus alkaliphilus
  misc_feature (1)..(356): tr|A0A329AW63|A0A329AW63_9BURK S-adenosylmethionine:tRN A ribosyltransferase-isomerase OS=Cupriavidus alkaliphi lus OX=942866 GN=queA PE=3 SV=1
MLTLSDFDFPLPPELIAQSALPDRSASRLLVVERLAPGDTAEAVRMVDRAFSDIVDYLRPDDLLVFNDTRVIKARFFGHKPSGGKVEVLVERVVDAHTVLAQVRASKTPAEGSALHLADGAFAVTVGPRVDQFFTLRFPEPALDLIERYGRLPLPPYITHDPDAYDETRYQTVYARSPGAVAAPTAGLHFDDALFARLDAAGVRRAFLTLHVGAGTFQPVRTENLAEHKMHSEWYAISEDLAQAVRDTRARGGRVIAVGTTSLRALESAAQPDGTLAAGSGDTDIFITPGYRFRLVDALITNFHLPKSTLLMLVSALAGVQAIRAAYRHAVEQRYRFFSYGDAMLLTRQPDAAAKA

SEQ ID NO: 65660 - protein, 351 aa, Cupriavidus basilensis
  misc_feature (1)..(351): tr|A0A0C4Y658|A0A0C4Y658_9BURK S-adenosylmethionine:tRN A ribosyltransferase-isomerase OS=Cupriavidus basilensi s OX=68895 GN=queA PE=3 SV=1
MMLTLSDFDFTLPPELIAQTALPERGASRLLVVDTDAPGGTTRLADRAFTDIVDYLRPNDLLVFNDTRVIKARFFGQKGSGGKVEVLVERVLDSHTVLAQVRASKTPPVGSLLRLADAFDVTVGPRVDQFFTLTFPEPALDLIERHGRLPLPPYITHDPDAFDETRYQTVYARAPGAVAAPTAGLHFDEALFARLDALGVRRGFLTLHVGAGTFQPVRTENLAEHKMHAEWYEVSDALAQAVRETRAAGGRVIAVGTTSLRALESAGATDGTLAAGRGDTEIFITPGYRFRVVDALITNFHLPKSTLLMLVSALAGVEPIRAAYRHAVAERYRFFSYGDAMLLTRQPQPQP

SEQ ID NO: 65661 - protein, 348 aa, Cupriavidus basilensis
  misc_feature (1)..(348): tr|H1S2E6|H1S2E6_9BURK S-adenosylmethionine:tRNA ribosy ltransferase-isomerase OS=Cupriavidus basilensis OR16 O X=1127483 GN=queA PE=3 SV=1
MLTLSDFDFALPPELIAQTALPERGASRLLVVDADAREGTTRLTDRAFTDIVDYLRPNDLLVFNDTRVIKARFFGQKGSGGKVEVLVERVLDSHTVLAQVRASKTPPVGSLLRLADAFDVTVGPRVDQFFTLTFPEPALDLIERHGRLPLPPYITHDPDAFDETRYQTVYARAPGAVAAPTAGLHFDEALFARLDAMGVRRGFLTLHVGAGTFQPVRTENLAEHKMHAEWYEVSDALAQAVRDTRAAGGRVIAVGTTSLRALESAGAADGTLAAGRGDTEIFITPGYRFRVVDALITNFHLPKSTLLMLVSALAGVEPIRAAYRHAVAERYRFFSYGDAMLLTRQPQP

SEQ ID NO: 65662 - protein, 350 aa, Cupriavidus campinensis
  misc_feature (1)..(350): tr|A0A556UIA6|A0A556UIA6_9BURK S-adenosylmethionine:tRN A ribosyltransferase-isomerase OS=Cupriavidus campinens is OX=151783 GN=queA PE=3 SV=1
MLTLSDFDFPLPPELIAQSALPDRSASRLLVVERTAPEDRADAVRLVDRAFCDILDYLGPNDLLVFNDTRVIKARFFGQKPSGGRVEVLVERVVDSHTVLAQVRASKTPAEGSRLHLADDAFAVTVGPRVDQFFTLRFPEPALDLIEQYGRLPLPPYITHDPDAYDETRYQTVYARNPGAVAAPTAGLHFDDALFARLDAKGVRRAFLTLHVGAGTFQPVRTENLAEHKMHAEWYAISPELADAVRETRARGGRVIAVGTTSLRALESAAAADGTLAAHSGDTDIFITPGYRFRLVDALITNFHLPKSTLLMLVSALAGVEAIRATYRHAVEQRYRFFSYGDAMLLTRLD

SEQ ID NO: 65663 - protein, 345 aa, Cupriavidus gilardii
  misc_feature (1)..(345): tr|A0A0M4KVR4|A0A0M4KVR4_9BURK S-adenosylmethionine:tRN A ribosyltransferase-isomerase OS=Cupriavidus gilardii CR3 OX=1267562 GN=queA PE=3 SV=1
MLTLSDFDFPLPPELIAQTALPDRSASRLLVVRTGADGATELDDRAFADLTDYLRPNDLLVFNDTRVIKARFFGQKASGGKVEVLVERVLDQDTVLAQVRASKTPAEGSTLRLADAFDVTVGPRVDQFFTLRFPEPALDLIERFGRLPLPPYITHDPDAYDETRYQTVYARHPGAVAAPTAGLHFDDALFARLDAHGVRRAFLTLHVGAGTFQPVRTENLAEHKMHSEWYAISEELAQAVRDTRAAGGRVIAVGTTSLRALESAATPEGELVAGSGDTDIFITPGYRFRLVDALITNFHLPKSTLLMLVSALAGIEPIRIAYRHAVEQRYRFFSYGDAMLLQRQR

SEQ ID NO: 65664 - protein, 345 aa, Cupriavidus gilardii
  misc_feature (1)..(345): tr|A0A5A8EVQ1|A0A5A8EVQ1_9BURK S-adenosylmethionine:tRN A ribosyltransferase-isomerase OS=Cupriavidus gilardii OX=82541 GN=queA PE=3 SV=1
MLTLSDFDFPLPPELIAQTALPDRSASRLLVVRTGADGATELDDRAFADLTDYLRPNDLLVFNDTRVIKARFFGQKASGGKVEVLVERVLDADTVLAQVRASKTPAEGSTLRLADAFDVTVGPRVDQFFTLRFPEPALDLIERFGRLPLPPYITHDPDAYDESRYQTVYARHPGAVAAPTAGLHFDDALFARLDAHGVQRAFLTLHVGAGTFQPVRTENLAEHKMHSEWYAISEELAQAVRDTRAAGGRVIAVGTTSLRALESAATPEGELRAGSGDTDIFITPGYRFRLVDALITNFHLPKSTLLMLVSALAGIEPIRIAYRHAVEQRYRFFSYGDAMLLQRQP

SEQ ID NO: 65665 - protein, 353 aa, Cupriavidus metallidurans
  misc_feature (1)..(353): sp|Q1LJ60|QUEA_CUPMC S-adenosylmethionine:tRNA ribosylt ransferase-isomerase OS=Cupriavidus metallidurans (stra in ATCC 43123 / DSM 2839 / NBRC 102507 / CH34) OX=26626 4 GN=queA PE=3 SV=1
MLTLSDFDFPLPPELIAQSALPDRSASRLLVVERTAPEDTSEAVRLVDRAFSDILEYLNPDDLLVFNDTRVIKARFFGHKPSGGRIEVLVERVVDTHTVLAQVRASKTPVEGSLLHLADDAFAVTVGPRVDQFFTLRFPEPALDLIERYGRLPLPPYITHDPDAYDETRYQTVYARNPGAVAAPTAGLHFDDALFARLDAAGIRRAFLTLHVGAGTFQPVRTENLSEHKMHSEWYAISPELADAVRETRARGGRVIAVGTTSLRALESAAAEDGTLEAGSGDTDIFITPGYAFRIVDALITNFHLPKSTLLMLVSALAGVEAIRDAYRHAVDARYRFFSYGDAMLLTRRDRRA

SEQ ID NO: 65666 - protein, 353 aa, Cupriavidus metallidurans
  misc_feature (1)..(353): tr|A0A2L0XA25|A0A2L0XA25_9BURK S-adenosylmethionine:tRN A ribosyltransferase-isomerase OS=Cupriavidus metallidu rans OX=119219 GN=queA PE=3 SV=1
MLTLSDFDFPLPPELIAQSALPDRSASRLLVVERTAPEDTSEAVRLVDRAFSDILEYLNPDDLLVFNDTRVIKARFFGHKPSGGRIEVLVERVVDTHTVLAQVRASKTPAEGSLLHLADDAFAVTVGPRVDQFFTLRFPEPALDLIERYGRLPLPPYITHDPDAYDETRYQTVYARNPGAVAAPTAGLHFDDALFARLDAAGIRRAFLTLHVGAGTFQPVRTENLSEHKMHSEWYAISPELADAVRETRARGGRVIAVGTTSLRALESAAAEDGTLEAGSGDTDIFITPGYAFRIVDALITNFHLPKSTLLMLVSALAGVEAIRDAYRHAVDARYRFFSYGDAMLLTRRDRRD

SEQ ID NO: 65667 - protein, 358 aa, Cupriavidus nantongensis
  misc_feature (1)..(358): tr|A0A142JQN0|A0A142JQN0_9BURK S-adenosylmethionine:tRN A ribosyltransferase-isomerase OS=Cupriavidus nantongen sis OX=1796606 GN=queA PE=3 SV=1
MLTLSDFDFPLPPELIAQSALPDRSASRLLVVERLAPEDTADAVRMADRAFSDIVDYLRPEDLLVFNDTRVIKARFFGHKPSGGKVEVLVERVIDTHTVLAQVRASKTPAEGSALHLADDAFAVTVGPRVDQFFTLRFPEPALDLIERYGRPPLPPYITHDPDAYDETRYQTVYARSPGAVAAPTAGLHFDDALFARLDAAGVRRAFLTLHVGAGTFQPVRTENLAEHKMHSEWYAISEELAQAVRDTRARGGRVIAVGTTSLRALESAAQPDGTLAAGSGDTDIFITPGYRFRLVDALITNFHLPKSTLLMLVSALAGVQAIRAAYRHAVEQRYRFFSYGDAMLLTRQPDAAAAAAA

SEQ ID NO: 65668 - protein, 356 aa, Cupriavidus necator
  misc_feature (1)..(356): tr|A0A1U9UTC8|A0A1U9UTC8_CUPNE S-adenosylmethionine:tRN A ribosyltransferase-isomerase OS=Cupriavidus necator O X=106590 GN=queA PE=3 SV=1
MLTLSDFDFPLPPELIAQSALPDRSASRLLVVERLAPADTVDAVRMVDRAFSDIVDYLRPDDLLVFNDTRVIKARFFGHKPSGGKIEVLVERVVDTHTVLAQVRASKTPAEGSTLHLADGAFAVTVGPRVDQFFTLRFPEPALDLIERYGRLPLPPYITHDPDAYDETRYQTVYARSPGAVAAPTAGLHFDDALFARLDAAGVRRAFLTLHVGAGTFQPVRTENLAEHKMHSEWYAVSEELAQAVRDTRARGGRVVAVGTTSLRALESAAQADGTLAAGSGDTDIFITPGYRFRLIDALITNFHLPKSTLLMLVSALAGVEAIRAAYRHAVDQRYRFFSYGDAMLLTRQPAADTKA

SEQ ID NO: 65669 - protein, 352 aa, Cupriavidus necator
  misc_feature (1)..(352): sp|Q0K734|QUEA_CUPNH S-adenosylmethionine:tRNA ribosylt ransferase-isomerase OS=Cupriavidus necator (strain ATC C 17699 / H16 / DSM 428 / Stanier 337) OX=381666 GN=que A PE=3 SV=1
MLTLSDFDFPLPPELIAQSALPDRSASRLLVVERLAPADTADAVRMVDRAFSDIVDYLRPDDLLVFNDTRVIKARFFGHKPSGGKIEVLVERVVDSHTVLAQVRASKTPTEGSILHLADGAFAVTVGPRVDQFFTLRFPEPALDLIERYGRLPLPPYIRHDPDAYDETRYQTVYARSPGAVAAPTAGLHFDDALFARLNAAGVRRAFLTLHVGAGTFQPVRTENLAEHKMHSEWYAVSADLAQAVRDTRARGGRVIAVGTTSLRALESAAQADGTLAAGSGDTDIFITPGYRFRLVDALITNFHLPKSTLLMLVSALAGVEAIRAAYRHAVEQRYRFFSYGDAMLLTRQPGA

SEQ ID NO: 65670 - protein, 362 aa, Cupriavidus oxalaticus
  misc_feature (1)..(362): tr|A0A4P7LEW7|A0A4P7LEW7_9BURK S-adenosylmethionine:tRN A ribosyltransferase-isomerase OS=Cupriavidus oxalaticu s OX=96344 GN=queA PE=3 SV=1
MLTLSDFDFPLPPELIAQSALPDRSASRLLVVERLAPADTADAVRLVDRAFSDIVDYLRREDLLVFNDTRVIKARFFGHKPSGGKVEVLVERVLDSHTVLAQVRASKTPGEGSALHLAQDAFTVTVGPRVDQFFTLRFPEPALDLIERYGRLPLPPYITHDPDAYDETRYQTVYARNPGAVAAPTAGLHFDDALFARLDAAGVRRAFLTLHVGAGTFQPVRTENLAEHKMHSEWYAVSEELAQAVRETRARGGRVIAVGTTSLRALESAAQPDGTLTAGSGDTDIFITPGYRFRLVDALITNFHLPKSTLLMLVSALAGVEAIRATYRHAVEQRYRFFSYGDAMLLTRRNDADTAEPAETAA

SEQ ID NO: 65671 - protein, 362 aa, Cupriavidus oxalaticus
  misc_feature (1)..(362): tr|A0A375G7U4|A0A375G7U4_9BURK S-adenosylmethionine:tRN A ribosyltransferase-isomerase OS=Cupriavidus oxalaticu s OX=96344 GN=queA PE=3 SV=1
MLTLSDFDFPLPPELIAQSALPDRSASRLLVVERVAPADTADAVRLVDRAFSDIVDYLRPEDLLVFNDTRVIKARFFGHKPSGGKVEVLVERVLDSHTVLAQVRASKTPAEGSALHLAEDAFAVTVGPRVDQFFTLRFPEPALDLIERYGRLPLPPYITHDPDAYDETRYQTVYARNPGAVAAPTAGLHFDDALFARLDAAGVRRAFLTLHVGAGTFQPVRTENLAEHKMHSEWYAVSEELAQAVRETRARGGRVIAVGTTSLRALESAAQPDGTLAAGSGDTDIFITPGYRFRLVDALITNFHLPRSTLLMLVSALAGVEAIRATYRHAVEQRYRFFSYGDAMLLTRRNGADTADTADTAA

SEQ ID NO: 65672 - protein, 350 aa, Cupriavidus pauculus
  misc_feature (1)..(350): tr|A0A3G8H1U9|A0A3G8H1U9_9BURK S-adenosylmethionine:tRN A ribosyltransferase-isomerase OS=Cupriavidus pauculus OX=82633 GN=queA PE=3 SV=1
MLTLSDFDFPLPPELIAQSALPDRSASRLLVVERTAPADTADAVRLVDRAFSDILDYLRPEDLLVFNDTRVIKARFFGQKPSGGRVEVLVERVVDTHTVLAQVRASKTPAEGSQLLLADDAFAVTVGPRVDQFFTLHFPEPALDLIERYGRLPLPPYITHDPDAYDETRYQTVYARNPGAVAAPTAGLHFDDALFARLDAAGIRRAFLTLHVGAGTFQPVRTENLAEHKMHSEWYRITPELADAVRETRARGGRVIAVGTTSLRALESAAAPDGTLHAGHGDTDIFITPGYRFRAVDALITNFHLPKSTLLMLVSALAGVEAIRAAYRHAVAQRYRFFSYGDAMLLTRRD

SEQ ID NO: 65673 - protein, 350 aa, Cupriavidus pauculus
  misc_feature (1)..(350): tr|A0A2N5CGM4|A0A2N5CGM4_9BURK S-adenosylmethionine:tRN A ribosyltransferase-isomerase OS=Cupriavidus pauculus OX=82633 GN=queA PE=3 SV=1
MLTLSDFDFPLPPDLIAQSALPDRSASRLLVVERTAPEDTADAVRLVDRAFSDILEYLSSNDLLVFNDTRVIKARFFGQKPSGGRIEVLVERVVDSHTVLAQVRASKTPAEGSPLHLADGAFTVTVGPRVDQFFTLRFPEPALDLIERYGRLPLPPYITHDPDAYDETRYQTVYARNPGAVAAPTAGLHFDDALFARLDATGIRRAFLTLHVGAGTFQPVRTEDLSDHKMHSEWYAVTPELADAVRDTRARGGRVIAVGTTSLRALESAADADGTLRAGTGDTDIFITPGYRFRAVDALITNFHLPKSTLLMLVSALAGVEAIRAAYRHAVAQRYRFFSYGDAMLLTRRD

SEQ ID NO: 65674 - protein, 349 aa, Cupriavidus pinatubonensis
  misc_feature (1)..(349): sp|Q46XG5|QUEA_CUPPJ S-adenosylmethionine:tRNA ribosylt ransferase-isomerase OS=Cupriavidus pinatubonensis (str ain JMP 134 / LMG 1197) OX=264198 GN=queA PE=3 SV=1
MLTLSDFDFPLPPELIAQSALPDRSASRLLVVERLAPGEQPDAIRLVDRAFSDIIGYLKPEDLLVFNDTRVIKARFFGQKPSGGKVEVLVERVLDTHTVLAQVRASKTPAEGSLLHLAEDAFAVTVGPRVDQFFTLRFPAPALDLIEQYGRLPLPPYITHDPDAYDETRYQTVYARNPGAVAAPTAGLHFDDALFARLDAAGVRRAFLTLHVGAGTFQPVRTENIAEHKMHSEWYAISPELADAVRETRKRGGRVIAVGTTSLRALESAAKPDGTLEAGNGDTDIFITPGYQFRLVDALITNFHLPKSTLLMLVSALAGVEAIRAAYRHAVEARYRFFSYGDAMLLTRQ

SEQ ID NO: 65675 - protein, 353 aa, Cupriavidus plantarum
  misc_feature (1)..(353): tr|A0A316EWT1|A0A316EWT1_9BURK S-adenosylmethionine:tRN A ribosyltransferase-isomerase OS=Cupriavidus plantarum OX=942865 GN=queA PE=3 SV=1
MPTSLTLSDFDFPLPPELIAQSALPDRSASRLLVVDRTAPEDTAEAVRMLDRAFSDIVEYLRPDDLLVFNDTRVIKARFFGQKPSGGKVEVLVERVVDTDTVLAQVRASKTPAEGSTLELADGAFTVTVGPRVDQFFTLRFPAPALDLIEQYGRLPLPPYITHDPDAYDESRYQTVYARNPGAVAAPTAGLHFDDALFARLDAHGVRRAFLTLHVGAGTFQPVRTENLAEHKMHAEWYAISEELAQAVRETRARGGRVIAVGTTSLRALEAATAEDGTLAAGSGDTDIFITPGYRFRMIDALITNFHLPKSTLLMLVSALAGVEAIRAAYRHAVDARYRFFSYGDAMLLTRRP

SEQ ID NO: 65676 - protein, 356 aa, Cupriavidus sp.
  misc_feature (1)..(356): tr|A0A370P3C6|A0A370P3C6_9BURK S-adenosylmethionine:tRN A ribosyltransferase-isomerase OS=Cupriavidus sp. S23 O X=2219262 GN=queA PE=3 SV=1
MLTLSDFDFPLPPELIAQSALPDRSASRLLVVERLAPADTADAVRMVDRAFSDIVDYLRPDDLLVFNDTRVIKARFFGHKPSGGKIEVLVERVVDTHTVLAQVRASKTPAEGSTLHLADDAFAVTVGPRVDQFFTLRFPEPALDLIERYGRLPLPPYITHDPDAYDETRYQTVYARSPGAVAAPTAGLHFDDALFARLDAAGVRRAFLTLHVGAGTFQPVRTENLAEHKMHSEWYAVSEELAQAVRDTRARGGRVIAVGTTSLRALESAAQADGTLAAGSGDTDIFITPGYRFRLIDALITNFHLPKSTLLMLVSALAGVEAIRAAYRHAVDQRYRFFSYGDAMLLTRQPAADTKA

SEQ ID NO: 65677 - protein, 345 aa, Cupriavidus sp.
  misc_feature (1)..(345): tr|V2J0E0|V2J0E0_9BURK S-adenosylmethionine:tRNA ribosy ltransferase-isomerase OS=Cupriavidus sp. HPC(L) OX=121 7418 GN=queA PE=3 SV=1
MLTLSDFDFPLPPELIAQTALPDRSASRLLVVRTGADGATELDDRAFADLTDYLRPNDLLVFNDTRVIKARFFGQKASGGKVEVLVERVLDNDTVLAQVRASKTPAEGSTLRLADAFDVTVGPRVDQFFTLRFPEPALDLIERFGRLPLPPYITHDPDAYDETRYQTVYARHPGAVAAPTAGLHFDDALFARLDAHGVRRAFLTLHVGAGTFQPVRTENLAEHKMHSEWYAISEELAQAVRDTRAAGGRVIAVGTTSLRALESAATPEGELVAGSGDTDIFITPGYRFRLVDALITNFHLPKSTLLMLVSALAGIEPIRVAYRHAVEQRYRFFSYGDAMLLQRQR

SEQ ID NO: 65678 - protein, 355 aa, Cupriavidus taiwanensis
  misc_feature (1)..(355): sp|B3R6J3|QUEA_CUPTR S-adenosylmethionine:tRNA ribosylt ransferase-isomerase OS=Cupriavidus taiwanensis (strain DSM 17343 / BCRC 17206 / CIP 107171 / LMG 19424 / R1) OX=977880 GN=queA PE=3 SV=1
MLTLSDFDFPLPPELIAQSALPDRSASRLLVVERLAPGDTADAVHMADRAFSDIVDYLRPDDLLVFNDTRVIKARFFGHKPSGGKVEVLVERVLDTHTVLAQVRASKTPVEGSALHLADDAFAVTVGPRVDQFFTLRFPEPALDLIERYGRLPLPPYITHDPDAYDETRYQTVYARSPGAVAAPTAGLHFDDALFARLDAAGVRRAFLTLHVGAGTFQPVRTENLAEHKMHSEWYAISEDLAQAVRETRARGGRVIAVGTTSLRALESAAQPDGTLAAGSGDTDIFITPGYRFRLVDALITNFHLPKSTLLMLVSALAGVQAIRAAYRHAVEQRYRFFSYGDAMLLTRQPDAAAA

SEQ ID NO: 65679 - protein, 356 aa, Cupriavidus taiwanensis; identical to SEQ ID NO: 65658
  misc_feature (1)..(356): tr|A0A375BZK3|A0A375BZK3_9BURK S-adenosylmethionine:tRN A ribosyltransferase-isomerase OS=Cupriavidus taiwanens is OX=164546 GN=queA PE=3 SV=1

SEQ ID NO: 65680 - protein, 358 aa, Curvibacter putative
  misc_feature (1)..(358): tr|C9YEZ1|C9YEZ1_9BURK S-adenosylmethionine:tRNA ribosy ltransferase-isomerase OS=Curvibacter putative symbiont of Hydra magnipapillata OX=667019 GN=queA PE=3 SV=1
MPSPDAQRVFTLSDFDFELPEALIAQHPAAERSASRLLDGTGEVSVDRIFKDLPGLLRAGDLLVFNDTKVINARLFGEKTTGGKVELLIERVLGGNQVAAHMRVSKKPEVGATIKMTCAPGHEDGLCATLLGRWPNVDGPIYRFVLSNDRGDDPYTLMERHGHVPLPPYITHSDSPEDVQRYQTVFAKNPGAVAAPTAALHFDEAVFAQLDAIGVQRAHVTLHVGAGTFQPVKTENIAEHQMHSEWYNVPLETQEAIAACKARGGRIVAVGTTSVRTLESWAKTGIASGDTNIFITPGFDFKLVDVLVTNFHLPKSSLMMLVSAFTGYGHVMGLYRDAIARGYRFFSYGDSMLLTRRT

SEQ ID NO: 65681 - protein, 350 aa, Curvibacter sp.
  misc_feature (1)..(350): tr|A0A1F8VI00|A0A1F8VI00_9BURK S-adenosylmethionine:tRN A ribosyltransferase-isomerase OS=Curvibacter sp. GWA2_ 64_110 OX=1797747 GN=queA PE=3 SV=1
MHHVSPDATRVHTLSDFDFELPPELIAQHPASERSASRLLDGRSAQPVDRIFRELPGLLQPGDLLVFNDTKVVKARLFGEKPTGGKLELLIERVLPGFEVVAHMKVSKKPPVGMVLQMVGGYTAELLGRWPDEEGQLFRLRFSEEPHLMMEQHGHVPLPPYIEHGDSAEDVARYQTVFAAKPGAAAAPTAALHFDEGVLAALEARGIRRANVTLHVGAGTFSPVKTENLAEHRMHREWYEVPAATQAAIAETKAKGGRIVAVGTTTIRTLESWAKTGQASGDTEIFITPGFQFQVADLLVTNFHLPKSTLMMLVSAFAGYEHVMGLYRHAIAQRYRFFSYGDAMLLERCQ

SEQ ID NO: 65682 - protein, 113 aa, Curvibacter sp.
  misc_feature (1)..(113): tr|A0A433BQQ5|A0A433BQQ5_9BURK S-adenosylmethionine:tRN A ribosyltransferase-isomerase (Fragment) OS=Curvibacte r sp. OX=1888168 GN=EKK45_12180 PE=3 SV=1
MTLHPASRPFTLADFDFELPPELIAQHPAAERSASRLLDGTGPSAIDRIFKDLPNLLRAGDLLVFNDTQVIKARLFGEKSTGGKVELLVERVLQDHEVVAHMKVSKKPPVGST

SEQ ID NO: 65683 - protein, 364 aa, Cuspidothrix issatschenkoi
  misc_feature (1)..(364): tr|A0A2S6CQY4|A0A2S6CQY4_9CYAN S-adenosylmethionine:tRN A ribosyltransferase-isomerase OS=Cuspidothrix issatsch enkoi CHARLIE-1 OX=2052836 GN=queA PE=3 SV=1
MDLDRSLSGYDYELPPGLIAQNPAVPRDSSRLLVVNSPETGTSVSPLHRIFRDLPELLQPGDLLVMNNTKVIPARLYGSKSTGADVEVLLLEERRHNCWLALVKPGKRFKIGTEIIFTSSGQNSQKILKATVMESDPETGGRLLQFDLPEDVPLVQVLAEFGQIPLPPYITASSAADEQYQTVYAQEQGAIAAPTAGLHFTPELLEKLRHCGINQAFITLHVGVGTFRPVEVEDVTTHAMHEEWIEVPSDTVEQIRATQVAGGRIIAVGTTVVRALEGAAQLGNLQPFVGKTNLFIYPGYKWRVVEGLITNFHLPRSSLLMLVSALIGRIRLLDIYQEAIASKYRFYSFGDAMVILPEGKSIKL

SEQ ID NO: 65684 - protein, 351 aa, Cyanobacteria bacterium
  misc_feature (1)..(351): tr|A0A1Q7UPF6|A0A1Q7UPF6_9CYAN S-adenosylmethionine:tRN A ribosyltransferase-isomerase OS=Cyanobacteria bacteri um 13_1_40CM_2_61_4 OX=1805101 GN=AUI36_43175 PE=3 SV=1
MTAPFTFTLPPELSAKEPPERRGIRRDQVRLLVIDRAAGHIEHTRFDKIGDYLRAGDLLVFNSSRTLPAALRGCECSAAHGPCMEVRLAERLPDDSWLALLLCEQGDPFGCGLREGTQIEFAEGLAATVLEHDANIPRLWKLHFSVSGTQLVDLIYRLGKPIRYEYISAPWDLDYYQTVYAKEPGSAEMPSAGRAFTWKLLLDLKRRGIETAYIILHTGLSSYMDDELDRAYPASEEEYFVSQITAEKVNSARENGGRVIAVGTTVVRALESVADSDGCVNEKQGYTRLTINSQHRLKAVDGLLTGLHEPEASHLDLLSAFLSAEKIRAAYEEAIARKYLWHEFGDLNLIL

SEQ ID NO: 65685 - protein, 376 aa, Cyanobacteria bacterium
  misc_feature (1)..(376): tr|A0A353QUB1|A0A353QUB1_9CYAN S-adenosylmethionine:tRN A ribosyltransferase-isomerase OS=Cyanobacteria bacteri um UBA9971 OX=2055776 GN=queA PE=3 SV=1
MLSSEFDYNLPEELIAQFPCEKRDGSSLMVLDKQTKAVSHKKFFDIVDFIDENDVLVLNNTRVIPARLFGKKSTGARIEIFLLSHCEQGTHQPLINEWIAFPTSLRSSGQALQAPRNDKIWEVLIKPSKRVKSGTIIEFTEELKAKILERLPNDKWLVEFIYEGVFNEILEKVGNIPLPPYIERKLSDETIKKLDFERYQTVYAQNPGSVAAPTAGLHFTEEILDKLKQKGVEVCYVTLNVGLGTFRPVKAENILDHQMDREFYEIPEITAEIINKAKLQGKNIVAVGTTTVRTLESAFEANNKISATSAWSQMFIYPGYKFSVIDKLITNFHLPKSTLLMLVSALAGKDFVFEAYREAIEKKYRFYSYGDCMLIK

SEQ ID NO: 65686 - protein, 348 aa, Cyanobacterium aponinum
  misc_feature (1)..(348): tr|K9Z0V9|K9Z0V9_CYAAP S-adenosylmethionine:tRNA ribosy ltransferase-isomerase OS=Cyanobacterium aponinum (stra in PCC 10605) OX=755178 GN=queA PE=3 SV=1
MSPDQQLSSYDYYLPSELIAQNPVTPRDSSRLLVIEGENSPKHQIFADLPQFLSAGDLLVVNNTRVIPARLYGEKSTGAQVEVLLVEETRDNCWLALVKPGKRFSVGSEIYFGDGLLKATVVDKDEATGGRYLEFSWQEGESFWHLLEKVGNIPFPPYVTESSANPSQYQTVYAQKQGAIAAPTAGLHFTDRLFEQLKAEGINKTEVTLHVGIGTFRPVEVEDIVNHDMHQEWIEIDEATVNLIRATKARGNKVIAVGTTVVRTLEGVCKECGDLQAFEGKTNLFIYPGYEFKVIDGLITNFHLPKSSLLMLVSALIGRERLMMVYEEAIREKYRFYSFGDAMLIKDC

SEQ ID NO: 65687 - protein, 348 aa, Cyanobacterium aponinum
  misc_feature (1)..(348): tr|A0A2G3PDT1|A0A2G3PDT1_9CHRO S-adenosylmethionine:tRN A ribosyltransferase-isomerase OS=Cyanobacterium aponin um IPPAS B-1201 OX=2047986 GN=queA PE=3 SV=1
MSPDQQLSSYDYYLPSELIAQNPVTPRDSSRLLVIEGENSPKHQIFADLPQFLSAGDLLVVNNTRVIPARLYGEKSTGAQVEVLLVEETRDNCWLALVKPGKRFSVGSEIYFGDGLLKATVVDKDEATGGRYLEFSWQEGESFWHLLEKVGNIPFPPYVTESSANPSQYQTVYAQKQGAIAAPTAGLHFTDRLFEQLKAEGINKAEVTLHVGIGTFRPVEVEDIVNHDMHQEWIEIDEATVNLIRATKARGNKVIAVGTTVVRTLEGVCKECGDLQAFEGKTNLFIYPGYEFKVIDGLITNFHLPKSSLLMLVSALIGRERLMMVYQEAIREKYRFYSFGDAMLIKDC

SEQ ID NO: 65688 - protein, 368 aa, Unknown
  misc_feature (1)..(368): tr|A0A0R2U2X5|A0A0R2U2X5_9CYAN S-adenosylmethionine:tRN A ribosyltransferase-isomerase OS=cyanobacterium BACL30 MAG-120619-bin27 OX=1655601 GN=queA PE=3 SV=1
MGGAPEQLDLRLSSYDFHLPEERIAQRPVEPRHAARLLVVELQARHLSVWDLQHELRPGDLLVVNNTRVLRARLEARRPSGGAVELLVLEPWHGGPGQWLCLAKPAKKLKSGDWLEVVAEGQPPLPLQVLGSDPATGGRILQFPPGCAEAAALEPLLVQYGAIPLPPYIHEHDASDNERYQTRYAAKPGAVAAPTAGLHLSDELLAAIRARGVELATTTLHVGLGTFRPVETEDLSQLQLHSEWVEVTPELVAAVAACRARGGRVIAIGTTSVRSLEAVAQLHGGELRPHTGPVNLVIQPGYRFAVVQGLLTNFHLPKSSLLLLVSALLGREHLLALYSEAIEHQYRFFSYGDAMWIAPEVVLSSARP

SEQ ID NO: 65689 - protein, 375 aa, Rhopalodia gibberula
  misc_feature (1)..(375): tr|A0A2Z5T3X5|A0A2Z5T3X5_9CYAN S-adenosylmethionine:tRN A ribosyltransferase-isomerase OS=cyanobacterium endosy mbiont of Rhopalodia gibberula OX=1763363 GN=queA PE=3 SV=1
MGETTQFLQIFVFPMTDDCLLSSYDYQLPPELIAQKPVTPRDSSRLLVVNCLTTQVHSVFRELPQWLLPGDLLVLNDTRVIRARLYGHKQTGAPVEILLLEEKAPLCWLALVKPGKRFKVGSEIWFPDSPEGKIKSPVYLKAKVLKVDSATGGRLLQFEKSSPDLFWQAIKHLGKIPLPPYITGFEDNCALYQTVYAQKPGAVAAPTAGLHFTPELLQRLTDKGIAQAYVTLHVGIGTFRPVEAEDITQHDMHSEWVEVPQTTVEMIAQTKKNGGRVIAVGTTVVRSLEGAVQIAKTQGKRGLVPFQGKTNLFIYPGYSWQVVDGMITNFHLPRSSLLMLVSALIGRERLMNLYQEAIEQRYRFYSFGDGMLIII

SEQ ID NO: 65690 - protein, 394 aa, Epithemia turgida
  misc_feature (1)..(394): tr|A0A077JG18|A0A077JG18_9CYAN S-adenosylmethionine:tRN A ribosyltransferase-isomerase OS=cyanobacterium endosy mbiont of Epithemia turgida isolate EtSB Lake Yunoko OX =1228987 GN=queA PE=3 SV=1
MTIIQPIFIGDSPPILDVLQWGESPHLQIFVFPMTDDYLLSSYDYQLPPELIAQKPVTPRDSSRLLVVNCLTTQVHSVFRELPQWLLPGDLLVLNDTRVIRARLYGHKPTGAPVEILLLEEKAPFCWLALVKPGKCFKVGSEIWFPDSPERNTKSPVYLKAKVLKVDSATGGRLLQFERSSPDLFWQVIEHLGTIPLPPYITRFEDNFDLYQTVYAQKLGAVAAPTAGLHFTPELLQRLTDKGIAQAYVTLHVGVGTFRPVEVEDISQHNMHSEWVEVPQITVDMIAKTKKNGGRVIAVGTTVVRSLEGAVQIAKTQGKQELVAFQGKTNLFIYPGYSWQVIDGMITNFHLPRSSLLMLVSALIGRERLMNLYQEAIEQRYRFYSFGDGILIII

SEQ ID NO: 65691 - protein, 353 aa, Cyanobacterium sp.
  misc_feature (1)..(353): tr|A0A2K8WMA8|A0A2K8WMA8_9CHRO S-adenosylmethionine:tRN A ribosyltransferase-isomerase OS=Cyanobacterium sp. HL -69 OX=2054282 GN=queA PE=3 SV=1
MDPNLKLSSYDYFLPQELIAQNPVIPRDSSRLLVVKPEEGIDHKIFSSLPDLLLPGDLLVLNNTRVIPARLYGKKSTGAMVEVLLVEEKSPLCWLALVKPGKRFSMGAEIVFEDEATGAYLKATVVDKDEATGGRILEFTVGNGASFWDVLDKLGNIPFPPYVTDSEALPSQYQTIYAQKQGAIAAPTAGLHFTEDVFNNLAQKQVAIAHITLHVGIGTFRPVETEDILNHDMHQEWIEVNEETIHKIKETKSRGGRVISVGTTVVRALEGTFAHHNALMPYRGKTNLFIYPGYEFKVIDGLITNFHLPKSSLLMLVGALIGRERLLSIYQRAIEEKYRFYSFGDAMFIAPKR

SEQ ID NO: 65692 - protein, 353 aa, Cyanobacterium sp.
  misc_feature (1)..(353): tr|A0A1E5QYE7|A0A1E5QYE7_9CHRO S-adenosylmethionine:tRN A ribosyltransferase-isomerase OS=Cyanobacterium sp. IP PAS B-1200 OX=1562720 GN=queA PE=3 SV=1
MDPNLKLSSYDYFLPQELIAQNPVIPRDSSRLLVVKPEEGIDHKIFSSLPDLLLPGDLLVLNNTRVIPARLYGKKSTGAMVEVLLVEEKYPLCWLALVKPGKRFSMGAEIVFEDEATGAYLKATVVDKDEATGGRIVEFTVGNRVSFWDVLDKLGNIPFPPYVTQSEALPSQYQTIYAQKQGAIAAPTAGLHFTEDVFNRLAEKQVAIAHITLHVGIGTFRPVEVEDILNHEMHQEWIEVNQETIDKIKETKSRGGRVISVGTTVVRALEGTFAHHNALMPYRGKTNLFIYPGYEFKVIDGLITNFHLPKSSLLMLVGALIGRERLLSIYQRAIEEKYRFYSFGDAMFIAPKR

SEQ ID NO: 65693 - protein, 357 aa, Cyanobacterium stanieri
  misc_feature (1)..(357): tr|K9YPA7|K9YPA7_CYASC S-adenosylmethionine:tRNA ribosy ltransferase-isomerase OS=Cyanobacterium stanieri (stra in ATCC 29140 / PCC 7202) OX=292563 GN=queA PE=3 SV=1
MDPNLKLSSYDYFLPPELIAQNPVTPRDSSRLLVVKPEGVVDHQIFANLPDLLSPGDLLVLNNTRVIPARLYGKKSTGAMVEVLLVEEKSPLCWLALVKPGKRFGLGAQIIFEDEVTGDYLTATVIDKDEATGGRILQFSAPKGLSFWDLLERLGNIPFPPYVTESEALPSQYQTIYAEKQGAIAAPTAGLHFTEDVFNSLAQKQVAIAHITLHVGIGTFRPVEVEDILNHEMHQEWIEVDKVTIDKIKETKSRGGRVISVGTTVVRALEGTFAHHNGLMPYRGKTDLFIYPGYDFKVIDGLITNFHLPKSSLLMLVGALIGRERLLSIYQGAIEEKYRFYSFGDAMFIEPKRGLNN

SEQ ID NO: 65694 - protein, 373 aa, Ornithocercus magnificus
  misc_feature (1)..(373): tr|A0A4Y3FUD5|A0A4Y3FUD5_9CYAN S-adenosylmethionine:tRN A ribosyltransferase-isomerase OS=cyanobiont of Ornitho cercus magnificus OX=2496102 GN=queA PE=3 SV=1
MTDPRDLLLSSYDYDLPPEQIAQAPVNPRHDAKLLTVPAFGSNLQSGLARVWDWPQWLHPNDLVVLNNTRVLKARLHVRHSSGSSVELLVLEPRGEGRWLCLGRPAKKLRPGDKLWLEAIGQPPLLVDVLWIDVTKGGRVIQFPTNYHDTASIEELLDRYGEMPLPPYIQQSGFSTAGDYQTCYASRPGAVAAPTAGLHLSNELLATLNRRGIEIAYVTLHVGLGTFRPLESEDLRELRLHSEWVEVDANVVDAVNACHARGGRVIAVGTTSVRALEGAAAISGQLRPLRGPVDLVIKPGYRFSVIQGLLTNFHLPRSSLLLLVSALISRERLLDLYCQAVRYGLRFYSYGDAMWVLPEAVLPSARPRAGLIG

SEQ ID NO: 65695 - protein, 380 aa, Cyanobium gracile
  misc_feature (1)..(380): tr|K9P7C6|K9P7C6_CYAGP S-adenosylmethionine:tRNA ribosy ltransferase-isomerase OS=Cyanobium gracile (strain ATC C 27147 / PCC 6307) OX=292564 GN=queA PE=3 SV=1
MTDPADLRLSSYDFALPQERIAQRPVEPRHAARLLVVDPAGAGPAPHARHLSAWDLQHELRSGDLLVVNDTRVLRARLEARRPGGGAVELLVLEPWLGGPGQRLGGAGQWLCLARPAKKLRPGDRLEVVAKGQPPLTVAVVGSDPSTGGRIVQFPPDCADAAALEPLLLQYGAIPLPPYIHEHDASDNERYQTRYAARPGAVAAPTAGLHLSDELLAAIREREVGVATTTLHVGLGTFRPIETEDLSALELHSEWVEVSPALVEAVAACRAAGGRVIAIGTTSVRSLEAVAQLHGGELRPHTGPVNLVIQPGYRFAVVQGLLTNFHLPRSSLLLLVSALIGRERLLALYGEAIERHYRFFSYGDAMWIAPEAVLAGARPA

SEQ ID NO: 65696 - protein, 383 aa, Cyanobium sp.
  misc_feature (1)..(383): tr|A0A081GNZ7|A0A081GNZ7_9CYAN S-adenosylmethionine:tRN A ribosyltransferase-isomerase OS=Cyanobium sp. CACIAM 14 OX=1496688 GN=queA PE=3 SV=1
MPPTPDPADGLLSSYAFELPDDLIAQEPAEPRHAARLLVLDAPAADPAAAAARHRRVWDLQEELRPGDLLVVNDTRVLRARLAARRASGGAVELLLLEPRGEGLWLCLARPAKRLRSGEILTVEAEGEPDLPVVVEAADPASGGRLVRFPKGCADAVAIEPLLERYGSMPLPPYIEAREGRDDSRYQTRYAARPGAVAAPTAGLHLSDELLEALAARGVHLATVTLHVGLGTFRPVETEDLSRLALHSEWVEVSPVLAEAVEDCRARGGRVIAVGTTSVRSLEGVAALNGGRLAPHAGPVNLVIQPGFRFAVVEGLLTNFHLPRSSLLLLVSALVGRRRLLALYAEAIAHRYRFFSYGDAMWIPPEAVLDAARADDAAPGGMA

SEQ ID NO: 65697 - protein, 414 aa, Cyanobium sp.
  misc_feature (1)..(414): tr|A0A182AS61|A0A182AS61_9CYAN S-adenosylmethionine:tRN A ribosyltransferase-isomerase OS=Cyanobium sp. NIES-98 1 OX=1851505 GN=queA PE=3 SV=1
MSSACDQVPAAVQGVDPDDLRLSSYDFLLPQERIAQRPVEPRHAARLLAVGAEPGTEAGPPGLRHLRVWDLQHQLRPGDLLVVNDTRVLRARLEARRASGGRVELLVLEPWQPSAAALTASLPVPAPAAGPGRWLCLAKPAKRLHPDDTLEVVAPGQEPLAVTICGRDPQTGGCIVQFPAACTDAASLEPLLVQYGAIPLPPYIHEHDASDNDRYQTRYAARPGAVAAPTAGLHLSDGLLAAIRARGVAIATTTLHVGLGTFRPVETEDLRGLELHSEWVEVSEALVAAVQACRARGGRVIAIGTTSVRSLEGVAALHGGVLRPHTGPVNLVIQPGFRFAVVQGLLTNFHLPKSSLLLLVSALIGRRRLLELYAEAIAQHYRFFSYGDAMWIAPEAVLPQALASGAPGHPGAAA

SEQ ID NO: 65698 - protein, 372 aa, Cyanobium usitatum
  misc_feature (1)..(372): tr|A0A2P7MYE5|A0A2P7MYE5_9CYAN S-adenosylmethionine:tRN A ribosyltransferase-isomerase OS=Cyanobium usitatum st r. Tous OX=2116684 GN=queA PE=3 SV=1
MSDSADLRLSSYDFHLPEERIAQRPVEPRHAARLLAVEAAGVGPAPHARHLSVWDLQQELRQGDLLVVNNTRVLRARLEARRPSGGSVELLVLEPWHGGLGQWLCLAKPAKKLKPGDWIEVVAEGQTPLPLQVLGSDPDTGGRIVQFPLECADAAALEPLLVQYGAIPLPPYIHEHDESDNERYQTRYAAKPGAVAAPTAGLHLSDELLAAIRARGVELATTTLHVGLGTFRPVETEDLSQLQLHSEWVEVTPELVAAVAACRARGGRVIAIGTTSVRSLEAVAQLHGGELRPHTGPVNLVIQPGYRFAVVQGLLTNFHLPKSSLLLLVSALLGRERLLALYAEAIERQYRFFSYGDAMWIAPEVVLSSARP

SEQ ID NO: 65699 - protein, 434 aa, Cyanosarcina cf.; identical to SEQ ID NO: 65236
  misc_feature (1)..(434): tr|A0A2T1FEP5|A0A2T1FEP5_9CHRO S-adenosylmethionine:tRN A ribosyltransferase-isomerase OS=Cyanosarcina cf. burm ensis CCALA 770 OX=2107697 GN=queA PE=3 SV=1

SEQ ID NO: 65700 - protein, 381 aa, Cyanothece sp.
  misc_feature (1)..(381): tr|B8HRF4|B8HRF4_CYAP4 S-adenosylmethionine:tRNA ribosy ltransferase-isomerase OS=Cyanothece sp. (strain PCC 74 25 / ATCC 29141) OX=395961 GN=queA PE=3 SV=1
MESKDKPEITNNVQPPAPNPTDPDQWLSSYDYLLPDALIAQAPVVPRDCSRLLVVQQEDHCHRLFQDLPQLLRSGDLLVMNNTRVIPARLIGSKLGGQSPLEVEALLLEEKDDRHWLALVKPGRRLKPGSQIQFGDLQATVLEIDPATRGRILAFDLAEGERLEQRLADLGKIPLPPYIKDSPAAPEQYQTVYNDRPGAVAAPTAGLHFTPELLDKLATQGIDHCFLTLHVGVGTFRPVEADHIQDHTMHQEWLEIPPETVEKIQQTQAAGGRIIAVGTTVVRALEGAAQEGSLKPFRGKTNLFIYPGYQWRVVEGLITNFHLPKSSLMMLVSALIGRQRLLDLYQAAIAAQYRFYSFGDAMLILPEARMGRGEPWLSPVD

SEQ ID NO: 65701 - protein, 366 aa, Cyanothece sp.
  misc_feature (1)..(366): tr|A0A3B8Y2Z4|A0A3B8Y2Z4_9CYAN S-adenosylmethionine:tRN A ribosyltransferase-isomerase OS=Cyanothece sp. UBA123 06 OX=2055757 GN=queA PE=3 SV=1
MTDDFLLASYDYQLPPELIAQNPVIPRHNSRLLVINSLTTEIDSIFRELPQWLLPGDLLVLNNTRVIPARLYGSKTTGAPVEILLLEEKTPLCWLALVKPGKRVKQGSQICFGNASDRTIPSSINLKATVVGVDQETGGRLLQFEVSSSDSFWSAIEQLGNIPLPPYVTSSEAQPDQYQTIYAKKPGAVAAPTAGLHFTEELLQSLTNKGIAQADVTLHVGVGTFRPVEVGDITQHSMHSEWVEVPPTTVEMINQTKAQGGRIIAVGTTVVRSLEGAAQQAKIEGKSQLMPFRGKTDLFIYPGYSWQVIDGMITNFHLPRSSLLMLVSALIGRKRLMSLYQEAIEKRYRFYSFGDGMLILPDAVIN

SEQ ID NO: 65702 - protein, 407 aa, Cyclobacteriaceae bacterium
  misc_feature (1)..(407): tr|A0A3N4H2F1|A0A3N4H2F1_9BACT S-adenosylmethionine:tRN A ribosyltransferase-isomerase OS=Cyclobacteriaceae bac terium YHN15 OX=2487897 GN=queA PE=3 SV=1
MQKLSSIEEIRLSDYEYTLPEERIAKFPLEKRDESKLIQFKNNQISHHRFFELPDLIPSGSMMVFNNTKVIPARLIFQRESGAKIEIFLLKPISPSSVINEVMLNTTSVVWETMIGNLKKWKEGEILQGTLFFQEQEYILSAKLTDRERKTVEFKWPGEKIPFVSIVEASGEVPLPPYLNRKATAEDKPRYQTVYSKKEGAVAAPTAGLHFTDETFKNLKENKIKHVFLTLHVSAGTFQPIKNENVMDHDMHSEQVVIDLETIQQLTEQEGKIIAVGTTSMRTLESVYWFGVKLLSSEDTQFLIPKLYPYGFKEGLPSKKESLNAVKKFMVESQLHEITGSTEIFIMPGYDFRVCDGLVTNFHQPSSTLILLVSAFTKGEWRKIYNEALQNGYRFLSYGDSNLLWKP

SEQ ID NO: 65703 - protein, 182 aa, Cyclobacteriaceae bacterium
  misc_feature (1)..(182): tr|A0A5C7Z431|A0A5C7Z431_9BACT S-adenosylmethionine:tRN A ribosyltransferase-isomerase (Fragment) OS=Cyclobacte riaceae bacterium OX=2099675 GN=E6Q41_04170 PE=3 SV=1
DKDRFQTIFAKNKGAVSAPTAGLHFTKQLVKRLQIKGVDMSFITLHIGLGTFRQVDVEDLTKHKMDSENFIVGPEVVEKVNKALDNKNRVCAIGTTSMRALESSVSAGNRLKVKEGWTDKFIFPPYVLKICNAMSPNFHMPESTLLMMAAAFGGFDFVMEAYKVAKKEKYKFLTYGDAMLIL

SEQ ID NO: 65704 - protein, 349 aa, Cyclobacterium amurskyense
  misc_feature (1)..(349): tr|A0A0H4PNT7|A0A0H4PNT7_9BACT S-adenosylmethionine:tRN A ribosyltransferase-isomerase OS=Cyclobacterium amursk yense OX=320787 GN=queA PE=3 SV=1
MKLSDFKFEIPKKLIALHPPENRDESRLMVIHKDTGKIEHKVFKDVIDYFDTGDVFVTNNTKVFPARLYGNKEKTGAKIEVFLLRELNQELRLWDVLVDPARKIRVGNKLYFGDSDLVAEVIDNTTSRGRTIRFLFDGTDEEFYKTIDTLGETPILKDFIERDVVDADRERYQTIFAQHVGAVAAPTAGLHFTPHLMKRLEIKGVEVSPITLHIGLGTFRQVDVEDLTKHKMDSENYDIPQETVDLVNTALDQKKRVVSVGTTSLKTIESSVTANGRLKSSSGWTDKFIIPPYEFKIANGLITNFHLPESTLLMTASAFGGYDLIMKAYQEGIKENYKFFSYGDAMLII

SEQ ID NO: 65705 - protein, 407 aa, Cyclobacterium amurskyense
  misc_feature (1)..(407): tr|A0A0H4PLY8|A0A0H4PLY8_9BACT S-adenosylmethionine:tRN A ribosyltransferase-isomerase OS=Cyclobacterium amursk yense OX=320787 GN=queA PE=3 SV=1
MCIKSAPKLQDYFYELPDEFIAKYPLEHRDSSKLLHYENGSILHKQFTNIAELIPESSHLVFNNTKVIPARLHFRKPTGAKIEIFLLNPLLPSTLIQQSMESKGPLTWKCMIGNLKRWKENEQLSCEIDLNETTYSIQAKLINRENREVELSWSPDDISFAELVEASGEVPLPPYLNREAEEDDKLRYQTVYSDKEGAVAAPTAGLHFTDKTFEELKSNGISVEYLTLHTGAGTFQPIKHNNVIEHPMHSEQMVFSKQNILNLISAKGNIIAVGTTSMRSLESLYWFGVYLINGYSDTFRIEKLAPYQEYAKLPGKVESLEAVLQWMEKNNMGQLIGTTEIFIFPGYQFKLCNGLITNFHQPGSTLILLVAAFTHGNWKEIYKEAVNNKYRFLSYGDSSLLWNNKLT

SEQ ID NO: 65706 - protein, 349 aa, Cyclobacterium halophilum
  misc_feature (1)..(349): tr|A0A1H7A2S5|A0A1H7A2S5_9BACT S-adenosylmethionine:tRN A ribosyltransferase-isomerase OS=Cyclobacterium haloph ilum OX=1416801 GN=queA PE=3 SV=1
MKLSDFKFEIPKKLISLYPPENRDESRLMVIHRDTGKIEHRVFKDIIEYFGEGDVFVTNNTKVFPARLYGNKEKTGAKIEVFLLRELNQELRLWDVLVDPARKIRVGNKLYFGDSDLVAEVIDNTTSRGRTIRFLFDGTDEEFYKTIDTLGETPILKEFIERDVVDSDRERYQTIFAKHVGAVAAPTAGLHFTPHLLKRLEIKGVEVSPITLHIGLGTFRQVDVEDLTKHKMDSENYDIPQETVNLVNKALDAKKRVVAVGTTSLKTIESSVTANGRLKSSSGWTDKFIIPPYEFKIANALITNFHLPESTLLMTASAFGGYDLIMKAYQEGIKENYKFFSYGDAMLIL

SEQ ID NO: 65707 - protein, 406 aa, Cyclobacterium halophilum
  misc_feature (1)..(406): tr|A0A1H7BVP4|A0A1H7BVP4_9BACT S-adenosylmethionine:tRN A ribosyltransferase-isomerase OS=Cyclobacterium haloph ilum OX=1416801 GN=queA PE=3 SV=1
MENTPQLNEYHYELPEDSIAKFPLEKRDASKLLHFENGAVEHFKFSDLPKLLPQNSHLVFNDTRVIPARMHFRKATGAAIELFLLNPVAPSTLIQQSMQSQGPVTWKCMIGNLKRWKAGEELENEIHLEGVHYRLRARLLSRETKEVAFSWDPAEVSFAALVEAAGEVPLPPYLNRKAEEADKLRYQTVYSKINGAVAAPTAGLHFTEQTLEEIREKGIPLHYLTLHVGAGTFLPIKHDTITEHPMHREQMVFSKEAVSKLCQATGNIVAVGTTSMRSLESLYWYGVKLLSNPNAEFFVEKLEPYAASKTTFTWEQSFEAVKNLMERTNTQYLVGATEIFIFPGYRFRVCNGLITNFHQPASTLILLIAAFTNQQWRKIYEEALAKRYRFLSYGDSSLLWNQKIIG

SEQ ID NO: 65708 - protein, 349 aa, Cyclobacterium lianum
  misc_feature (1)..(349): tr|A0A1M7PX18|A0A1M7PX18_9BACT S-adenosylmethionine:tRN A ribosyltransferase-isomerase OS=Cyclobacterium lianum OX=388280 GN=queA PE=3 SV=1
MKLSDFKFEIPKKLVSLYPPENRDESRLMVVHRDTGKIEHRVFKDIIEYFGEGDVFVTNNTKVFPARLYGNKEKTGAKIEVFLLRELNQDLRLWDVLVDPARKIRVGNKLYFGDSDLVAEVIDNTTSRGRTIRFLFDGTDEEFYKTIDTLGETPLLKEFIERDVVDADRERYQTIFAQHVGAVAAPTAGLHFTQHLLKRLEIKGVEVCPITLHIGLGTFRQVDVEDLTKHKMDSENYDIPQSTVELVNKALDNKKKVVSVGTTSLKTIESSVTANGRLKASSGWTDKFIIPPYEFKIANALITNFHLPESTLLMTASAFGGYDLIMKAYQEGIKENYKFFSYGDAMLIL

SEQ ID NO: 65709 - protein, 411 aa, Cyclobacterium lianum
  misc_feature (1)..(411): tr|A0A1M7MNN9|A0A1M7MNN9_9BACT S-adenosylmethionine:tRN A ribosyltransferase-isomerase OS=Cyclobacterium lianum OX=388280 GN=queA PE=3 SV=1
MPLDHSPKLQDYFYDLPEEFIAKFPLEKRDASRLLHFEENSLSHHQFSALPSLLPPNSHLFFNDTKVIPARIFFKKATGALIELFLLDPVRPSIQIQQCMESTGPVLWHCLIGNLKKWKQDEVLITEISVGNQDYRLEAILADRDKKYVQLSWSPGGLPFASLVEACGEVPLPPYLKRRALPSDKTRYQTIYSRMDGAVAAPTAGLHFTDKTIGEIREKGILINYLTLHVGAGTFQPVKHGNVLDHPMHREQMIFTRENIENLLSASGNIVAVGTTSMRSLESLYWFGVKLLKNESAEFFIDKLYPYQQQTHLPDRHQSVEAVLKYLDKSGMNQLSGATEIFIFPGYDFKICNGLITNFHQPGSTLMLLVAAFTKNRWRQIYQEAINEKYRFLSYGDSSLLWYDKINNPSL

SEQ ID NO: 65710 - protein, 349 aa, Cyclobacterium marinum
  misc_feature (1)..(349): tr|G0IWS8|G0IWS8_CYCMS S-adenosylmethionine:tRNA ribosy ltransferase-isomerase OS=Cyclobacterium marinum (strai n ATCC 25205 / DSM 745) OX=880070 GN=queA PE=3 SV=1
MKLSDFKFEIPKKLIALHPPENRDESRLMVIHKDTGKIEHKVFKDVIDYFDTGDVFVTNNTKVFPARLYGNKEKTGAKIEVFLLRELNQELRLWDVLVDPARKIRVGNKLYFGDSDLVAEVIDNTTSRGRTIRFLFDGTDEEFYKTIDTLGETPILKDFIERDVVDADRERYQTIFAQHVGAVAAPTAGLHFTPHLMKRLEIKGVEVSPITLHIGLGTFRQVDVEDLTKHKMDSENYDIPQGTVDLVNTALDEKKRVVSVGTTSLKTIESSVTANGRLKASSGWTDKFIIPPYEFKIANALITNFHLPESTLLMTASAFGGYDLIMKAYQEGIKEGYKFFSYGDAMLII

SEQ ID NO: 65711 - protein, 407 aa, Cyclobacterium marinum
  misc_feature (1)..(407): tr|A0A5D9BB90|A0A5D9BB90_9BACT S-adenosylmethionine:tRN A ribosyltransferase-isomerase OS=Cyclobacterium marinu m OX=104 GN=FY028_06160 PE=3 SV=1
MPIESVPKLKDYFYDLPDQFIAKHPLEFRDKSKLLHFENGKIKHEKFSNISGLIPANSHLVFNNTKVIPARLHFQKPTGAKIEIFLLNPILPATVIQLSMESTGPVTWKCMIGNLKRWKENEELSSQIVIDSVCYSLKAKLVNRENREVELSWSPDDKSFASIVEASGEVPLPPYLNRAAEDADKVRYQTVYSDKEGAVAAPTAGLHFTDQTLFDLKAKGISIEYLTLHTGAGTFQPIKHDSIIEHPMHSEQMVFTIENIVNLIAAKGNIIAVGTTSMRSLESLYWFGVNLLLGKSNEFHIEKLTPYQEYARLPNKEESLEAILQWMQANQLKQLMGSTEIFIFPGYEFKLCNGLVTNFHQPGSTLILLVAAFTHGKWREIYREALENNYRFLSYGDSSLLWNNKLD

SEQ ID NO: 65712 - protein, 407 aa, Cyclobacterium qasimii
  misc_feature (1)..(407): tr|A0A512C866|A0A512C866_9BACT S-adenosylmethionine:tRN A ribosyltransferase-isomerase OS=Cyclobacterium qasimi i OX=1350429 GN=queA_1 PE=3 SV=1
MRIESAPKLQDYYYELPEEFIAKYPLEQRDKSKLLYYENGTIRHEKFSGIAGLIPENSQLVFNNTKVIPARLHFQKATGARIEIFLLNPILPSSLIQQSMESTGPVTWKCMIGNLKRWKENELLTSQIEIDSITYNLEAKLIDRENRAVELNWNPKDKSFASIVEASGEVPLPPYLNRAAEEGDKLRYQTVYSDKEGAVAAPTAGLHFTDKTLTVLTSKGISLEYLTLHTGAGTFQPIKHDNVIEHPMHSEQMVFSKQNIQNLIAAKGNIIAVGTTSMRSLESLYWFGVNLLLGKSDKFHIEKLDPYHEYSSLPDKNESLKAILDWMEKNELVQLIGTTEIFIFPGYQFKLCNGLVTNFHQPGSTLILLVAAFTHGNWKEIYQEAITNKYRFLSYGDSSLLWNNKLK

SEQ ID NO: 65713 - protein, 407 aa, Cyclobacterium qasimii; identical to SEQ ID NO: 65712
  misc_feature (1)..(407): tr|S7VE50|S7VE50_9BACT S-adenosylmethionine:tRNA ribosy ltransferase-isomerase OS=Cyclobacterium qasimii M12-11 B OX=641524 GN=queA PE=3 SV=1

SEQ ID NO: 65714 - protein, 342 aa, Cycloclasticus sp.
  misc_feature (1)..(342): tr|A0A1M6JM17|A0A1M6JM17_9GAMM S-adenosylmethionine:tRN A ribosyltransferase-isomerase OS=Cycloclasticus sp. DS M 27168 OX=1884353 GN=queA PE=3 SV=1
MKKSDFNYDLPNELIARYPLEKRVDSRLLVVGENDFSDKVFADLPTLLREGDLLVFNNTRVIAARLFGHKETGGKLEILIERVMGDKTALAHVRCSKSPKAGTHIILNDGYKCLVDGREGDLFQLTFDDSIDTVLKAIGHMPLPPYIDRDDETLDIERYQTVFGRKPGAVAAPTAGLHFDERLLDDIKSLGVNFAYVTLHVGSGTFQPVREENLADHIMHKEWLTVDEQTVQQIEATKKNGGRVIAVGTTAMRSLESAAKEGAIKPFTGDTDLFITPGYHFNVVDAMVTNFHLPESTLLMLVSAFSGYQRMKLAYQHAIAQRYRFFSYGDAMFLTKMSDTTE

SEQ ID NO: 65715 - protein, 341 aa, Cycloclasticus sp.
  misc_feature (1)..(341): tr|A0A2G2QFL9|A0A2G2QFL9_9GAMM S-adenosylmethionine:tRN A ribosyltransferase-isomerase OS=Cycloclasticus sp. OX =2024830 GN=queA PE=3 SV=1
MKKSDFNYQLPDELIASYPLDKRTDSQLLVVGEEQLLDKIFSDLPSLLKAGDLLVFNNTRVIAARMFGHKTTGGKLEILLERVLDETLALAHIRCSKSPKYGAKILLDDGYECSVEGRDGDLFKLKFMDPIDTVLDSIGHIPLPPYIDREDESLDVERYQTVFSQTPGAVAAPTAGLHFDQTLLDEMSVLGVDFTYVTLHVGSGTFQPVREENLDDHIMHKEWLTVDDSVVRKIKATKQAGGRVIAVGTTAMRSLESAAKAGKLKPYTGDTDLFIRPGYQFNVVDAMVTNFHLPESTLLMLVSAFSGCQRIKDVYQHAIKQEYRFFSYGDAMFLSRMDDRE

SEQ ID NO: 65716 - protein, 342 aa, Cycloclasticus zancles
  misc_feature (1)..(342): tr|S5T7E0|S5T7E0_9GAMM S-adenosylmethionine:tRNA ribosy ltransferase-isomerase OS=Cycloclasticus zancles 78-ME OX=1198232 GN=queA PE=3 SV=1
MKKSDFNYDLPNELIARYPLEKRVDSRLLVVGENDFSDKVFADLPMLLREGDLLVFNNTRVIAARLFGHKETGGKLEILIERVMGDKTALAHVRCSKSPKAGTHIILNDGYKCLVDGREGDLFQLTFDDSIDTVLKAIGHMPLPPYIDRDDETLDIERYQTVFGRKPGAVAAPTAGLHFDERLLDDIKSLGVNFAYVTLHVGSGTFQPVREENLADHIMHKEWLTVDEQTVQQIEATKKNGGRVIAVGTTAMRSLESAAKEGAIKPFTGDTDLFITPGYHFNVVDAMVTNFHLPESTLLMLVSAFSGYQRMKLAYQHAIAQRYRFFSYGDAMFLTKMSDTTE

SEQ ID NO: 65717 - protein, 370 aa, Cylindrospermopsis raciborskii
  misc_feature (1)..(370): tr|A0A1S1ZWT4|A0A1S1ZWT4_9CYAN S-adenosylmethionine:tRN A ribosyltransferase-isomerase OS=Cylindrospermopsis ra ciborskii MVCC14 OX=940191 GN=queA PE=3 SV=1
MQNSDLDISLSGYDYELPPELIAQNPVVPRDSSRLMVINSPAGTLTPPLDHIFRDLPELLKPGDLLVMNNTRVIPARLYGRKSTGARVEVLLLEEKQHNCWLALVKPGKYFNIGTEIIFDDQGLSSVDKLIPQLTATVIERDENTGGRLLRFDLPINVSLLHFLHKLGEIPLPPYINNSHALEEQYQTVYAKHDGAVAAPTAGLHFTPELLVKLRESGIQQEFLTLHVGVGTFRPVEVEDVTTHQMHEEWIEVSGDLVEKIYATKNAGGRIIAVGTTVVRALEGAAQSGSLQPYTGKVNLFIYPGYQWRVVEGLITNFHLPRSSLLMLVSSLIGRERLLDVYNQAIASRYRFYSFGDAMLILPEARICCS

SEQ ID NO: 65718 - protein, 370 aa, Cylindrospermopsis raciborskii; identical to SEQ ID NO: 65717
  misc_feature (1)..(370): tr|A0A1X4G2R5|A0A1X4G2R5_9CYAN S-adenosylmethionine:tRN A ribosyltransferase-isomerase OS=Cylindrospermopsis ra ciborskii CENA303 OX=1170769 GN=queA PE=3 SV=1

SEQ ID NO: 65719 - protein, 371 aa, Cylindrospermopsis sp.
  misc_feature (1)..(371): tr|A0A0R0M440|A0A0R0M440_9CYAN S-adenosylmethionine:tRN A ribosyltransferase-isomerase OS=Cylindrospermopsis sp . CR12 OX=1747196 GN=queA PE=3 SV=1
MQNSDLDISLSGYDYELPPELIAQNPVVPRDSSRLMVINSPNTGTSTPPLDHIFRDLPELLKPGDLLVMNNTRVIPARLYGRKSTGARVEVLLLEEKQHNCWLALVKPGKYFNVGTEIIFDDQGLSSADKLIPQFTARVIERDENTGGRLLQFDLPINVSLLHLLHKLGEVPLPPYINNSHALEEQYQTVYAKYDGAVAAPTAGLHFTPELLVKLRERGIEQEFLTLHVGVGTFRPVEVEDVTTHQMHEEWIEVSGDLVEKIYSTKNAGGRIIAVGTTVVRALEGSAQTGSLQPYTGKVNLFIYPGYQWRVVEGLITNFHLPRSSLLMLVSSLIGRERLLGIYKQAIASRYRFYSFGDAMLILPEARICCS

SEQ ID NO: 65720 - protein, 440 aa, Cylindrospermum sp.
  misc_feature (1)..(440): tr|A0A1Z4QRI0|A0A1Z4QRI0_9NOST S-adenosylmethionine:tRN A ribosyltransferase-isomerase OS=Cylindrospermum sp. N IES-4074 OX=2005457 GN=queA PE=3 SV=1
MTDSLRQAHLNEISSSEAEDFQLDCSLAGYDYELPPELIAQNPAVPRDSSRLLVVNSPSTGQETLPLHHIFRDLPDLLQSGDLLVMNNTRVMPARLYGHKSTGAEIEVLLLEERQHNCWLALVKPGKRFKLGTKIVFDAKRVGEYGGDGGDGGDGGDGGNGGKEEFISSALSTQHSALSTPHSALSTQHSTLSTQHSALHTQLTATVLETDAATGGRLLQFDLPPGTSLVHLLDQFGEVPLPPYITASAADDEQYQTVYAKQLGAIAAPTAGLHFTPELLQKLRDRQINQAFVTLHVGVGTFRPVEVEDVTTHQMHKEWIEVPAATVEQIRATKAAGGRIIAVGTTAVRALEGAAHLGDLQPFVGKTDLFIYPGYQWRVVDGLITNFHLPRSSLLMLVSALIGRKRLLKIYQEAIASRYRFYSFGDAMLILPEATLRQEF

SEQ ID NO: 65721 - protein, 392 aa, Cylindrospermum stagnale
  misc_feature (1)..(392): tr|K9WZT8|K9WZT8_9NOST S-adenosylmethionine:tRNA ribosy ltransferase-isomerase OS=Cylindrospermum stagnale PCC 7417 OX=56107 GN=queA PE=3 SV=1
MEQQITQANLNETSGSMAEDVKLNYSLAGYDYELPPELIAQNPAFPRDSSRLLVVNSPGTGQDLPPLHHIFRDLPQLLQPGDLLVMNNTKVIPARLYGHKSTGAEIEVLLLEERQHNCWLALVKPGKRFKLGAKIVFAPRGDGGELTTQLTATVLATDAATLGRLLQFDLPAGMSVVQMLDRFGEVPLPPYITASTAEDEQYQTVYAKTPGAIAAPTAGLHFTPELLQQLSDRGINQAFVTLHVGVGTFRPVEVADVTTHQMHEEWIEVPAATVEQIRATKAAGGRIIAVGTTAVRALEGAAKSGDLQPYVGKTDLFIYPGYQWRVVDGLITNFHLPRSSLLMLVSAFIGRQRLLNLYQEAIANLYRFYSFGDAMLVLPEATKSAEAEKFEF

SEQ ID NO: 65722 - protein, 361 aa, Cystobacter ferrugineus
  misc_feature (1)..(361): tr|A0A1L9AUZ4|A0A1L9AUZ4_9DELT S-adenosylmethionine:tRN A ribosyltransferase-isomerase OS=Cystobacter ferrugine us OX=83449 GN=queA PE=3 SV=1
MSSLLSDYDFALPEAQIAQAPLAARDASRLMVVSRASGAWSHRRFVELPELLREGDLLVVNDARVIPARLLGSKVGTGGRVELLVVRPAAATLTSQALGAAPEALEWICLGQASKGLKPGARVSFTGGLEAEVLEALGGGEYRVRFHAAPGASLARLLDAAGRLPLPPYITRPPEDADAERYQTVYARASGAVAAPTAGLHFTEATFAALAARGVQRVEVTLDVGPGTFLPVREENLEKHHMHPERYTVPEATARAVNAARAEGRRVVAVGTTVVRTLESAWDSASGGLRAGPGETSIFIRPGFTFRAVDVLLTNFHLPRSTLVVLVSALLGRERTLAAYREAVAAGYRFFSYGDAMLVTE

SEQ ID NO: 65723 - protein, 361 aa, Cystobacter fuscus
  misc_feature (1)..(361): tr|A0A250JBX2|A0A250JBX2_9DELT S-adenosylmethionine:tRN A ribosyltransferase-isomerase OS=Cystobacter fuscus OX =43 GN=queA PE=3 SV=1
MSSQLSDYDFALPEAQIAQAPLATRDASRLMVVSRATGAWSHRHFAELPELLREGDLLVVNDARVIPARLLGSKVGTGGRVELLVVRPAAATLTSQALGGAPEALEWICLGQASKGLKPGARVSFAGGLEAEVLEALGGGEYRVRFHAAPGTSLARLLDTAGRLPLPPYITRPPEDADAERYQTVYARASGAVAAPTAGLHFTQATFEALAARGIQRVEVTLDVGPGTFLPVREENLEKHHMHPERYTVPEATARAVNAAKAEGRRVVAVGTTVVRTLESAWEPESGGLRAGPGETSIFIRPGFTFRAVDVLVTNFHLPRSTLVVLVSALLGRERTLAAYREAVAAGYRFFSYGDAMLVTE

SEQ ID NO: 65724 - protein, 361 aa, Cystobacter fuscus
  misc_feature (1)..(361): tr|S9PN79|S9PN79_9DELT S-adenosylmethionine:tRNA ribosy ltransferase-isomerase OS=Cystobacter fuscus DSM 2262 O X=1242864 GN=queA PE=3 SV=1
MSSLLSDYDFALPEAQIAQAPLAARDASRLMVVSRASGAWSHRHFAELPELLREGDLLVVNDARVIPARLLGSKVGTGGRVELLVVRPAAATLTSQALGGAPEALEWICLGQASKGLKPGARVSFTGGLEAEVLEALGGGEYRVRFHAARGASLARLLDTAGRLPLPPYITRPPEDADAERYQTVYARASGAVAAPTAGLHFTEATFAALAARGIQRVEVTLDVGPGTFLPVREENLEKHHMHPERYTVPEATARAVNAAKAEGRRVVAVGTTVVRTLESAWDAASASLRVGPGETSIFIRPGFTFRAVDVLVTNFHLPRSTLVVLVSALLGRERTLAAYREAVAAGYRFFSYGDAMLVTE

SEQ ID NO: 65725 - protein, 413 aa, Cytophaga hutchinsonii
  misc_feature (1)..(413): tr|Q11QR4|Q11QR4_CYTH3 S-adenosylmethionine:tRNA ribosy ltransferase-isomerase OS=Cytophaga hutchinsonii (strai n ATCC 33406 / NCIMB 9469) OX=269798 GN=queA PE=3 SV=1
MKIDTDNIETYNYDLPVERIAEYPLAERDQSKLLVYKDDHISDKTFSSIVDELPRNTLLVFNNTRVVQARFLFQTPTGATVEIFSLEPAEGHGGPAESMSARGKVIWKCFVGNAKRWKQPELIREVQLENGSMLSFHARQIEQKADYYLIGFSWNLEDITFSEIFSLLGDLPLPPYMKRKTEASDKERYQTVYAKHEGSVAAPTAGLHFTDAIMQRLAEKGIQKQEVTLHVGAGTFKPVKTDSIKEHTMHSEYIHVNRATVELLKNADNLQVTPVGTTSMRTLESLYWLGCKLCSKAALTGKLLELTQWDAYELPALSLREAMEELLKYINTSSDKNALSAKTALLIKPGYEFKVCDAIITNFHQPKSTLLCLVSAFIGIESMNKVYHFALENDYRFLSYGDSSLLFKHPHCS

SEQ ID NO: 65726 - protein, 348 aa, Cytophaga hutchinsonii
  misc_feature (1)..(348): sp|Q11QL8|QUEA_CYTH3 S-adenosylmethionine:tRNA ribosylt ransferase-isomerase OS=Cytophaga hutchinsonii (strain ATCC 33406 / NCIMB 9469) OX=269798 GN=queA PE=3 SV=1
MKLSEFKFALPAELVAQHPAANRDEAKMMVINRATGTIEHKIFKDIINYFDEGDIMVMNNTKVFPARLYGNKEKTGAKIEVFLLRELNAELHLWDVLVDPARKIRVGNKLYFGESDLVAEVVDNTTSRGRTIRFLFDGNSEDFSKIIETIGETPLPRYIKRPIEEADKDRYQTIFAENKGAVAAPTAGLHFTKQVMKRMEIKGVNFAPLTLHVGLGSFRTVDVEDLTKHKMDSENFIIESTTADVVNKALDNKKRVCAIGTTSMRALESSVSANNRLKQNAGWTDRFIFPPYDFKIANCMLTNFHMPESTLYMMACAFGGYELMTKAYKTAIKEKYNFLSYGDVMLII

SEQ ID NO: 65727 - protein, 349 aa, Cytophaga sp.
  misc_feature (1)..(349): tr|A0A4R4KD75|A0A4R4KD75_9BACT S-adenosylmethionine:tRN A ribosyltransferase-isomerase OS=Cytophaga sp. DMA-K-7 a OX=2070510 GN=queA PE=3 SV=1
MKLSEFKFDLPQSLIALHPADRGEARLMVVHRKTGEIEHKTFGDIVNYFDDGDVMVINNTKVFPARLFGQKEKTGAKIEVFLLRELNREMRLWDVLVDPARKIRVGNKLYFGDSDLVAEVIDNTTSRGRTIRFLYDGSHDEFMKLVDQLGETPLPTEIISRRKVENADRERFQTIFAEHVGAVAAPTAGTHFTKSIMKRLEIKGIGFAPVTLHVGLGTFRSVDVEDLTKHKTDSENYQILQESVDIVNQALDNGKRVCAVGTTSLKAIESSVSANGHLKSVEGWTDKFIFPPYEFKIGNAMITNFQLPESILLMSACAFGGYDLITKAYQIAIKEKYKFFTYGDVMLII

SEQ ID NO: 65728 - protein, 413 aa, Cytophaga sp.
  misc_feature (1)..(413): tr|A0A4R4KQA3|A0A4R4KQA3_9BACT S-adenosylmethionine:tRN A ribosyltransferase-isomerase OS=Cytophaga sp. DMA-K-7 a OX=2070510 GN=queA PE=3 SV=1
MQENWQSQADALLLSEFTYDLPDERIARYPVSPRHDSRLLIYEQSNIEHTHFHQLTNYLPAQSLLVFNDTRVIPARVYFQKSTGATIEVLLLNPEAPTTNINEAMLAKQASVWTCMIGNKKRWKLADTLSKILTINNQSVLLRAAYANYEQNQVELSWDTDATFLEIVQALGEIPLPPYLNRNTEERDLDTYQTVYARQEGAVAAPTAGLHFTETVLNQLEAKGIKRSFLTLHVGAGTFQPIKVENVINHSMHSEQIVFTRAFIEQLLVQNGPIVAVGTTSMRSLESLYWFGVKLYRKESTTFWIEKLYPYSISESDAPSLTQSLEAILEQMMLENKDEVTGQTEIFIFPGYSFKVCDGLITNYHQPGSTLILLVAAFVGQNWKQIYEAAYLHGYRFLSYGDSSLLWRNQRSV

SEQ ID NO: 65729 - protein, 349 aa, Cytophaga xylanolytica
  misc_feature (1)..(349): tr|A0A2W7P7W6|A0A2W7P7W6_9BACT S-adenosylmethionine:tRN A ribosyltransferase-isomerase OS=Cytophaga xylanolytic a OX=990 GN=queA PE=3 SV=1
MKLSKFKYKLPEELIALHPVDNRDESRMMVVDREKKTIEHKIFKDLIDYFDDQDVMVFNNTKVFPARLYGNKEKTGAEIEVFLLRELNSEMRLWDVLVDPARKIRIGNKLYFGEDDSLVAEVIDNTTSRGRTLRFLFDGSHEEFKKTLYGLGETPLPKFIKRDVVPEDRERYQTIFAKHEGAVAAPTAGMHFSRELLKRLEIKGLHFAEVTLHVGLGNFRAVDVEDLTKHKMDSEQIMITQEATEIINKGKDDRRKVCAVGTTVMRTLESSVSTFGHVKPFEGWTNKFIFPPYDFNVANCMITNFHLPLSTLMMMTSAFAGYDLLMDAYKEAVKEKYRFGTYGDAMLIL

SEQ ID NO: 65730 - protein, 401 aa, Cytophaga xylanolytica
  misc_feature (1)..(401): tr|A0A2W7N877|A0A2W7N877_9BACT S-adenosylmethionine:tRN A ribosyltransferase-isomerase OS=Cytophaga xylanolytic a OX=990 GN=LX69_02420 PE=3 SV=1
MIPSLSIDSFNYHLPDDKIAKYPLAERDNSKLLVYRNNTIHESCFKSITDHLPPHTQMVFNNTKVIRARMEFTKQTGARVEIFCLEPTAHTEMQTVFAATQKTQWNCIVGNLKKWKTGALHKELVINGQPITLTANKLQSLADSHVIEFSWNGDVTFSEVLDAAGNTPIPPYLNRQSESIDTQRYQTVYSEHQGSVAAPTAGLHFTPMIIQQMHDKGISTRFVTLHVGAGTFKPVKSPTIDGHEMHVELFTVDRGTLAGLTQHQGPRIAVGTTSVRTLESLYWIGVKLSQGDHSLVVNQWDAYQLKAHLSYSEAIQQIVDHLDARQANHLTAHTGIMIAPGYQFKSIDGMVTNFHQPQSTLLLLLSAFVGDAWRDIYNYALTHDFRFLSYGDSSLLLKPGH

SEQ ID NO: 65731 - protein, 411 aa, Cytophagaceae bacterium
  misc_feature (1)..(411): tr|A0A4Q5RHV8|A0A4Q5RHV8_9BACT S-adenosylmethionine:tRN A ribosyltransferase-isomerase OS=Cytophagaceae bacteri um OX=2026729 GN=queA PE=3 SV=1
MSPSTASPHQLRIQDFHYELPAARIAPEPLPDRAASRLLVSQAGVITDKVFRDLPGELPPGALLIFNDTQVVRARLLAHRPTGGAVELFCLEPVAPHRALELALQQTGAATWRCLVGNGRRWKSGPVTLDFSFAGQPATLWAERQAAEAGESLIDFRWEPSSLPFAEVLRAAGHLPLPPYLHRPDTAVDAVRYQTVYAAHEGAVAAPTAGLHFTPELLAELTQRGVATGRVTLHVGAGTFQPVKATTMADHPMHAEPIIVQASLLRQLLAHRPRPVIAVGTTSLRTLESLYWLGAALVRQPAPAALTVAQWQPYEETEPIIGPEMALEALLAHLDASGTDTLEASTRLLIAPGYRFRLVQGLITNFHQPESTLLLLVAALLGPSWRAVYDHALAHGYRFLSYGDSSLLLPD

SEQ ID NO: 65732 - protein, 349 aa, Cytophagaceae bacterium
  misc_feature (1)..(349): tr|A0A1E4A8I3|A0A1E4A8I3_9BACT S-adenosylmethionine:tRN A ribosyltransferase-isomerase OS=Cytophagaceae bacteri um SCN 52-12 OX=1660162 GN=queA PE=3 SV=1
MKLSEFKFDLPQSLIALHPKERGEARMMVVHRKSGAIEHKSFSDIIDYFEDGDVMVVNDTKVFPARLYGQKEKTGAKIEVFLLRELNREMRLWDVLVDPARKIRVGNKLYFGDSELVAEVIDNTTSRGRTIRFLYDGTYDDFMNMVNELGETPLPPEIISRRAVTAEDRELFQTIFADKLGAVAAPMAGMHFTKVISKRLELKGVNFAPLTLHVGLGTFRNVDVEDLTKHKTDSENFAITEKTAKIINAGLDAGKKVCAVGTTSLKAIESSVSASGHVKPVEGWTDRFIFPPYDFKIGSALLTNFHLPESILLMNACAFGGYDLIMKAYETALKEKYRFFTYGDVMLIL

SEQ ID NO: 65733 - protein, 400 aa, Cytophagales bacterium
  misc_feature (1)..(400): tr|A0A286INC7|A0A286INC7_9BACT S-adenosylmethionine:tRN A ribosyltransferase-isomerase OS=Cytophagales bacteriu m TFI 002 OX=1945892 GN=queA PE=3 SV=1
MKTQAIAISDYDYHLPEERIAKFPLEKRDDSKLLVLKGNEITDRSFNEISDILPAKSLLVFNNTKVIPARLFFRRASGALIQVFLLNPTSHDGIITKVMEEENSCQWDCMIGNKKKWKGEELLASINIENKDITLRARLVDASTNEVNFSWDGAVSFAELVKAFGEIPLPPYLNRNTEENDKETYQTVYSKNDGAVAAPTAGLHFTDAVLEGLNQKGFKQSFLTLHVGAGTFQPVKVENAMEHHMHSEQIVVSKNFIIDIISHEDKIIPVGTTSMRSLESLYWYGVMLSLDHNAVFKVEKLFPYNYTGPDISRKAAFENILHFLEKEEKETLIGSTEIFIFPGYKMRVCDGIITNFHQPKSTLLLLISALVGEKWREVYAHAMSNNYRFLSYGDSSLLLG

SEQ ID NO: 65734 - protein, 348 aa, Cytophagales bacterium
  misc_feature (1)..(348): tr|A0A2M6GMD6|A0A2M6GMD6_9BACT S-adenosylmethionine:tRN A ribosyltransferase-isomerase OS=Cytophagales bacteriu m CG18_big_fil_WC_8_21_14_2_50_42_9 OX=1973956 GN=queA PE=3 SV=1
MKLSEFRFDLPANLMATHPAKNRDEARMMVIHRNTGKIEHRIFKDILEYFDDGDVMVLNDTKVFPARLYGNKEKTGAKIEVFLLRELNKEHHLWDVLVDPARKIRVGNKLYFGDSDLVAEVIDNTTSRGRTIKFLFDGSDDDFYKTINDLGETPLPKYLKREAEPDDRERYQTVYAKHVGAVAAPTAGLHFTREVLKRLELNGVDIVPLTLHVGLGTFRPVDVEDLTKHKMDSEHFIVPEETAQTVNKALDIKKRVCAVGTTTMRGLESSVSANSRLKPTEGWTDKFIFPPHDFRIPNALITNFHMPESTLLMMTCAFGGYDLIMDAYKVAVKEKYNFFSYGDVMLIL

SEQ ID NO: 65735 - protein, 348 aa, Cytophagia bacterium
  misc_feature (1)..(348): tr|A0A2E9WIV9|A0A2E9WIV9_9BACT S-adenosylmethionine:tRN A ribosyltransferase-isomerase OS=Cytophagia bacterium OX=2026730 GN=queA PE=3 SV=1
MKLSQFDFKLASTRTAIHPSENRDESKLMVVHKKTGKIEHKQFKDIIKYFNEDDVLVLNDTKVFPARLYGQKEKTGAKIEVFLLRELNPELNLWDVLVDPARKIRVGNKLYFGDGELVAEVIDNTTSRGRTIRFIPEDSEKNFYDIIHEFGETPLPKEIKRKVDKKDEERFQTVYAKKIGAVAAPAAGLHFTEILLKKLELKGVKIVNITSHTGLGTFKDIDVEDLTKHKMDSENYSVPIETEIAVNNALKNNNRIFAVGTSSMKTLETAVNANDTLKANSGWTDKFIFPPYEFKICSGMITNFHSPKSTLLMMATAYGGFDTIMKAYKVAIKEKYMFHTYGDALLIV

SEQ ID NO: 65736 - protein, 391 aa, Cytophagia bacterium
  misc_feature (1)..(391): tr|A0A2E5GTN8|A0A2E5GTN8_9BACT S-adenosylmethionine:tRN A ribosyltransferase-isomerase OS=Cytophagia bacterium OX=2026730 GN=CL871_00350 PE=3 SV=1
MNLDDYNYSYDKSIIASYPLKRRDESKLLVYNKDKIIDSKFYNITNYLPSDTILFFNDTKVIKGRIKIKKDTGAKIELLLINRINDTYSLKFKKIYKNNIAFESLIGNSKKWKLNSEIILKKKNKIRLIKVESNKVLFSWNENILWSDIINNIGEMPIPPYLNRNSQKIDNKVYQTIYSKKEGAIASPTAGLHFTKKTFKEINKKNINIDYLTLHVGMGTFKPIISKNIHEHNMHTEEVFFTKKNLKNILNHNSITAVGTTSIRILESIYWFGVKLLKKRNIEEFCVKSFEPYEKHKFLPTKNESICKVIDYMNKKNINTIRGKTSIFIFPGYKFMICNQLITNFHLPKSTLILLIAAFIGDDWKKVYKFAIKNNYRFFSYGDSSLLYKKD

SEQ ID NO: 65737 - protein, 360 aa, Dactylococcopsis salina
  misc_feature (1)..(360): tr|K9YSS6|K9YSS6_DACSA S-adenosylmethionine:tRNA ribosy ltransferase-isomerase OS=Dactylococcopsis salina PCC 8 305 OX=13035 GN=queA PE=3 SV=1
MEMKPDSSPFDRKLSSYDYDLPESYIAQTPVTPRDHSRLLVVDSPTHHQHQHFYDLPQWLQAGDLLVVNNTKVIPARMYGYKTTGATVEVLLLEEKSPNCWLALVKPGKRLQIGAKIQFYPRQDEQLPILEATVMAKDTATGGRLLAFDLGETSLVSVLDAYGEIPFPPYVTEKKAQPEQYQTVYAEELGAVAAPTAGLHFTDRLLRELQEKGVNQTEVTLHVGVGTFRPVETETITDHQMHEEWINVPSEAVKRVQETKAQGGRVVAVGTTVVRALEGAVAAEGHLKAYCGKTDLFIYPGYELQVVAGLITNFHLPRSSLLMLVSAFIGRERLLSLYQSAIEHQYRFYSFGDAMLIINN

SEQ ID NO: 65738 - protein, 380 aa, Dankookia rubra
  misc_feature (1)..(380): tr|A0A4R5QAK9|A0A4R5QAK9_9PROT S-adenosylmethionine:tRN A ribosyltransferase-isomerase OS=Dankookia rubra OX=14 42381 GN=queA PE=3 SV=1
MPDTPARSSPLGPPALRTEDFDFALPARLVAQAPARPRDAARLLVVDPAGLRDQGMRDLPGLLGPGDVMVVNDTRVIPARLRGRRGEAAIEIMLNRADPDGSWEALVRNARRLRPGDSIVIEGAPGLPCRVLARDGGTARLDFGPDPAALAAALDRAGEIPLPPYIARPEGPRPEDREDYQTLFAARPGAVAAPTASLHFTPDLVAALEARGVRRATVTLHVGAGTFLPMRAEDPRAHRLHAEWGEVTEDAAALINAARPAGGRIVAIGTTALRLLETAALGGGDDLRPVRPFRGLTDIFLLPGHRFRAADLLLTNFHLPKSTLFMLVSAFAGTARMRAAYQHAIAQGYRFYSYGDGSLLHRAEEALADPRVGEGKGQAA

SEQ ID NO: 65739 - protein, 352 aa, Dechloromonas aromatica
  misc_feature (1)..(352): sp|Q47AX4|QUEA_DECAR S-adenosylmethionine:tRNA ribosylt ransferase-isomerase OS=Dechloromonas aromatica (strain RCB) OX=159087 GN=queA PE=3 SV=1
MSLTVDDFDFPLPPELIAQHPAAERRGSRLLHVCGEQLVDRRFADLPTLLKAGDLLVFNDTRVIKARFFGQKDTGGQVEIMLERIVDATHAICQVRASKAPKAGSTMRLADAFTVKMTGRAGADGDFFALELAEPGDFWELSERYGKLPLPPYIEHPAEGTDETRYQTVYAREPGAVAAPTAGLHFDEDMLATLQAQGINTAFLTLHVGAGTYRPMRVEKIADHRMHSERFEIPPATADAITTTRAAGGQVIAVGTTSLRALESAGNEDGTVQVGGAETSIFITPGYRFQVVDRLITNFHLPKSTLLMLVSAFAGYDHIRAAYAHAVAERYRFFSYGDAMLLERTGQPSDAI

SEQ ID NO: 65740 - protein, 348 aa, Dechloromonas denitrificans
  misc_feature (1)..(348): tr|A0A133XHK9|A0A133XHK9_9RHOO S-adenosylmethionine:tRN A ribosyltransferase-isomerase OS=Dechloromonas denitri ficans OX=281362 GN=queA PE=3 SV=1
MSLTVDDFDFPLPPELIAQHPAPERRGSRLLHVCGQQRFDRKFDDLPSLLRTGDLLVFNDTRVIKARFFGVKDSGGRVEIMLERIVDARHAVCQIRASKAPKPGCNLRLADAFTVRMTGRTGADDDFFALELVDEGDFWDLSERYGKLPLPPYIEHPAEDADETRYQTVYARAPGAVAAPTAGLHFDEAMLATLQAQGINTAFVTLHVGAGTYRPVRVEKITDHRMHSERYAVPQATADAIAATRAAGGRVIAIGTTSLRTLESAARDDGTVRVGEGETDIFITPGYRFKVVDRLFTNFHLPKSTLLMLVSAFAGYDNIRAAYAHAVADRYRFFSYGDAMLLEKSDAV

SEQ ID NO: 65741 - protein, 348 aa, Dechloromonas sp.
  misc_feature (1)..(348): tr|A0A3B7A6W9|A0A3B7A6W9_9RHOO S-adenosylmethionine:tRN A ribosyltransferase-isomerase OS=Dechloromonas sp. HYN 0024 OX=2231055 GN=queA PE=3 SV=1
MSLTVDDFDFPLPPELIAQHPAAERRGSRLLHVCAGQTVDRKFADLPGLLKAGDLLVFNDTRVIKARFFGQKDTGGQVEIMLERIVDATHAICQIRASKAPKTGCKMRLADAFDVCMTGRAGTDGDFFALELVDAGDFWELAEQYGKLPLPPYIEHPAEGADETRYQTVYARQPGAVAAPTAGLHFDEAMLEALRAQGVKTAFLTLHVGAGTYRPMRVEKIADHRMHSERFEIPAATAAAIAATHAAGGRVIAVGTTSLRALESAGNDDGTVRSGGAETSIFITPGYRFKVVDRLITNFHLPKSTLLMLVSAFAGYDHIRAAYAHAVADRYRFFSYGDAMLLEKTDAI

SEQ ID NO: 65742 - protein, 341 aa, Deferribacter autotrophicus
  misc_feature (1)..(341): tr|A0A5A8F8D4|A0A5A8F8D4_9BACT S-adenosylmethionine:tRN A ribosyltransferase-isomerase OS=Deferribacter autotro phicus OX=500465 GN=queA PE=3 SV=1
MGKTSIERYNFNLDESLIAQFPADKRGESRLLVVNRASATFNDMKFKDIVSLIDSDSFLVVNNTKVLKARLFGKKKSGGRIEVLLLEQLDNKKFRAMIGGKWKREDEIYIDEFKIAATGRDAEGLVIVDFLENDPFMVMEQKGHIPLPPYIKRSDTEIDQERYNTVYSKNYGSVAAPTAGLHFTNEILKALKEKGVEILEITLNVGLGTFRPIKTEFIEDHQMHSENFTIDSDVATRINKLKNEGKKLIAVGTTVVRALESAASDDGVVREAKNQSTNLFIKEGYRFKIVDKLITNFHLPKSTLFILVTAFGGYDLIMNAYKHAMKNRYRFFSYGDAMFVE

SEQ ID NO: 65743 - protein, 341 aa, Deferribacter desulfuricans
  misc_feature (1)..(341): tr|D3PAI0|D3PAI0_DEFDS S-adenosylmethionine:tRNA ribosy ltransferase-isomerase OS=Deferribacter desulfuricans ( strain DSM 14783 / JCM 11476 / NBRC 101012 / SSM1) OX=6 39282 GN=queA PE=3 SV=1
MSKTSINRYDFEFDENLIAQYPEKKRDESRLLVVNRQTNKLLDKRFKDIVDFFDDNMFLVLNNTKVLNARLFAKKESGGEVEIFLLEQLDGKRFKALLGGKWKSEGYLYINEYKLFVSKRDDEGIVTVDFIDANPFEIMDKYGHVPLPPYIKREDNELDRERYNTVFSKKIGSVAAPTAGLHFTEEIFDKLKEKGVEIFEITLNVGLGTFRPVKTEFIEDHKMHKESFSIEKSVADKINKLKKDGKKLVAVGTTVVRALESAASQFGEITPCENAYTDLFIREGYQFKVVDKMITNFHLPKSTLFILVCAFGGYDLMKKAYAHAVKDRYRFFSYGDAMFII

SEQ ID NO: 65744 - protein, 332 aa, Deferribacteraceae bacterium
  misc_feature (1)..(332): tr|A0A3C1BUD4|A0A3C1BUD4_9BACT S-adenosylmethionine:tRN A ribosyltransferase-isomerase OS=Deferribacteraceae ba cterium OX=2053543 GN=queA PE=3 SV=1
  misc_feature (111)..(111): Xaa can be any naturally occurring amino acid
MKTPAELFDFPLPEELIAQYPSETRGGSRLLLADRKGLIKDLMFSGITELIDDEYFLVINNTRVMNARLEGFKSTGGQVEVFLLNKLSSDSFTALTGGKVKEGTEVTVGDXFLDDGLRMVRFLTHTPEEVMERWGHVPLPPYIRRDDSAEDKIRYQTVYAKEAKSVAAPTAGLHFTEDTLGALKSKGVEVLEVSLDVGIGTFRPMKSEHLEDHHMHSEQYNVSGETADKINSLKKDGRKLICVGTTAMRTMESATDEKGITRSGSGSTDIFIRPGYEFRAADALITNFHLPKSTLFVLVCAFAGREFMLETYAHAVREKYRFFSYGDAMFIR

SEQ ID NO: 65745 - protein, 84 aa, Defluviimonas alba
  misc_feature (1)..(84): tr|A0A159Z4C7|A0A159Z4C7_9RHOB S-adenosylmethionine:tRN A ribosyltransferase-isomerase OS=Defluviimonas alba OX =1335048 GN=AKL17_2799 PE=3 SV=1
MKLSDFDFYLPEALIATRPARPRSSARLLLATGNGIADRSVADLPDILRPGDRLVLNNTRVIPARLSGTRTRAVSQAAGAQGEG

SEQ ID NO: 65746 - protein, 276 aa, Defluviimonas alba
  misc_feature (1)..(276): tr|A0A159Z4G3|A0A159Z4G3_9RHOB S-adenosylmethionine:tRN A ribosyltransferase-isomerase OS=Defluviimonas alba OX =1335048 GN=AKL17_2798 PE=3 SV=1
MLEPLPGGAWSALARPLRKLKPGEVIRFSDALSAEVTGIADGRLTLAFDSAGPAFDAALAEAGQMPLPPYIAALRAPDAQDDDDYQPVFARHSGAVAAPTASLHFDAPLLEALRARGVEFTEVTLHVGAGTFLPVKVDDVATHKMHAEWGEVTPEAAAAINATRAAGGRIIPVGTTALRLIESAADAKGVLHPWQGSTDIFIYPGYRFRVTDALMTNFHLPKSTLLMLVSALMGQERIRRIYEHATNSGYRFFSYGDASLLIPEAPQGIRDSVDGT

SEQ ID NO: 65747 - protein, 362 aa, Defluviimonas aquaemixtae
  misc_feature (1)..(362): tr|A0A2R8B541|A0A2R8B541_9RHOB S-adenosylmethionine:tRN A ribosyltransferase-isomerase OS=Defluviimonas aquaemi xtae OX=1542388 GN=queA PE=3 SV=1
MKLSDFDFDLPEGLIATRPARPRSAARLLVAEGDAIHDLHVRDLPDLLGPGDRLVLNDTKVIPARLSGTRRRETGQGEVVARIEVTLLEPRPEGRWAALVKPLKKLKEGETIRFSERLSADVVRIAEGQAELFFNLTGTEFDEALAEAGDMPLPPYIAALRPPDSRDREDYQTVFARRSGAVAAPTASLHFDDALLQRLADRGVAFTHVTLHVGAGTFLPVKVEDVTTHRMHPEWGEVTDEAAAEINATRDAGGRVIPVGTTALRLLESAVDSAGRMRAWRGATDIFIYPGYEFRATDGLMTNFHLPKSTLLMLVSAFMGVVRMRRVYAHAVAESYRFFSYGDASLLLPKGRNPAAPSRRRD

SEQ ID NO: 65748 - protein, 362 aa, Defluviimonas denitrificans
  misc_feature (1)..(362): tr|A0A2S8SA32|A0A2S8SA32_9RHOB S-adenosylmethionine:tRN A ribosyltransferase-isomerase OS=Defluviimonas denitri ficans OX=404881 GN=queA PE=3 SV=1
MKLSDFDFDLPEGLIATRPARPRSAARLLLAEGDGMRDLHVRDLVDLLGPGDRLVLNNTRVIPARLQGLRRRMTPQGEAVAKIEVTLTEPRAQGGWAALVKPLRKLKEGEEIAFAGGLSARVAGIADGQAALVFNLEGAAFDAALAKAGDMPLPPYIAALRAPDAQDRDDYQTVFARHAGAVAAPTASLHFDDDLLAALRDKGVAFTEVTLHVGAGTFLPVKVEDVTTHRMHAEWGEVTESAAAEINATRAAGGRVIPVGTTALRLIESAAGEDGQMRPWRGATDIFIYPGYRFRVTDGLMTNFHLPKSTLLMLVSALMGVGRMRRVYAHAVASGYRFFSYGDASLLLPSRRDEGTESRREA

SEQ ID NO: 65749 - protein, 350 aa, Defluviimonas sp.
  misc_feature (1)..(350): tr|A0A059IID2|A0A059IID2_9RHOB S-adenosylmethionine:tRN A ribosyltransferase-isomerase OS=Defluviimonas sp. 20V 17 OX=1417296 GN=queA PE=3 SV=1
MKLSDFDFDLPEALIATRPARPRSSARLLVAEGGAIRDLHVRDLPDLLGPGDRLVLNNTKVIPARLSGTRAREAAAPGEGVAQIEATLLEPRPGGAWLALAKPARKLRPGDEIRFSEVLSARVESRAGGEVVLAFNLTGEDFDAALAEAGAMPLPPYIAARRAADEQDRDDYQTVFARHAGAVAAPTASLHFDAPLLQALRDRGVAFTEVTLHVGAGTFLPVKVEDVTTHRMHSEWGEVTEAAAAQINATRAAGGRVIPVGTTALRLIESAADPEGRMQPWRGSTDIFIYPGYRFRVTDALMTNFPLPKSTLMMLVSALIGKPEIDRIYAHAVAQRYRFFSYGDASLLIP

SEQ ID NO: 65750 - protein, 342 aa, Defluviitoga tunisiensis
  misc_feature (1)..(342): tr|A0A0C7NSP8|A0A0C7NSP8_DEFTU S-adenosylmethionine:tRN A ribosyltransferase-isomerase OS=Defluviitoga tunisien sis OX=1006576 GN=queA PE=3 SV=1
MSENIFNLEKYDYQLPEELIAQEPVEPRDMCRLMVLDRAKRSIDHKIFKDIKNYLQPGDLLVINNTKVIPARLLGKKETGANVEVLLLERNGSQNIWKALVKPGSKIKKGNILLFPDNIVCEVLEHLEDGTRILEFKDSNFYSKIYKIGQIPLPPYIKKHLDDPNQYQTEYAKYEGAVAAPTAGLHFTQDLLEELQGKNGVNIAEITLHVGLGTFRPVKENDIRQYNIHEEYYSVSKDVLEKIARTKAKGKKVIAVGTTVVRTLESIALEPDKLVGKTKLYIYPPFEFRIVDSLITNFHLPKSSLLFLVSAFAGYDYIMNAYKVAIEKRYRFFSFGDAMFII

SEQ ID NO: 65751 - protein, 346 aa, Dehalobacter sp.
  misc_feature (1)..(346): tr|A0A1C2XYJ5|A0A1C2XYJ5_9FIRM S-adenosylmethionine:tRN A ribosyltransferase-isomerase OS=Dehalobacter sp. TeCB 1 OX=1843715 GN=queA PE=3 SV=1
MRLEDFDYDLPERLIAQTPAEPRDSSRLMLVDKAKGEIFHYLFQDIVQFFNAGDVLVLNKTRVIPARLIGQKEGTGAKIEVLLLKRIDRDRWEVLVKPGKRLKQGQTVVFGGGLLRGELIGILDDGNRIIHFTYSGLFEEVLDSLGEMPLPPYITAKLNDKERYQTVYAKENGSAAAPTAGLHFTEELLQRIRDNGVEVLEVLLHVGLGTFRPVKTEEITEHQMHTEYFSIDSETAAKISLAKKEGRRVIAVGTTVVRTLESAAGLCQDASGNVLSETEGWTDIFIYPGYQFKIVDALITNFHFPRSTLLMLVSAFAGREMILEAYQTAVREKYRFFSFGDAMFLV

SEQ ID NO: 65752 - protein, 346 aa, Dehalobacter sp.
  misc_feature (1)..(346): tr|A0A4R4CY80|A0A4R4CY80_9FIRM S-adenosylmethionine:tRN A ribosyltransferase-isomerase OS=Dehalobacter sp. 12DC B1 OX=2070364 GN=queA PE=3 SV=1
MRLEDFEYDLPERLIAQTPAEPRDSSRLMLVDKAKGEIFHYLFQDIVQFFNAGDVLVLNKTRVIPARLIGEKEGTGAKIEVLLLKRIDRDRWEVLVRPGKRLKPGQNVIFGGGLLYGELIEILDDGNRIIRFTYSGLFEEVLDSLGEMPLPPYITAKLNDKERYQTVYAKENGSAAAPTAGLHFTEELLHRIRDNGVEVLEVLLHVGLGTFRPVKTEEITEHQMHTEYFSIDSETAARISLAKKEGRRVIAVGTTVVRTLESAAGLCQDASRNVLSETEGWTDIFIYPGYQFKIVDALITNFHFPRSTLLMLVSAFAGRELILKAYQTAVREEYRFFSFGDAMFLV

SEQ ID NO: 65753 - protein, 346 aa, Dehalococcoidales bacterium
  misc_feature (1)..(346): tr|A0A2D6LGR9|A0A2D6LGR9_9CHLR S-adenosylmethionine:tRN A ribosyltransferase-isomerase OS=Dehalococcoidales bac terium OX=2026733 GN=queA PE=3 SV=1
MKTSNFDYSLPPELIAQTPVEPRDQSRLMVLDRGDGTITHRRFFELIDYLRDGDVLVFNDSRVIPARLDGRKADGGGRVEILLLRRLETNVWEALGRPARQLRAGAKVILTSDSVEDNRPEVTGEVIQTGRGGLKTVRFSEERRLAELGQIPLPPYIHAPLTHPERYQTVYARVAGSVAATTAGLHFTPELIKRIAQKGVRCLFVTLHIGLDTFSPVREDDPQEHPIHSEYGVMSPTTADRLSQAKREGRRIICVGTTTVRIVEQVTRMSRPLQLQPFEDWVNLFILPGYQFRLVDALITNFHLPRSTLLMLVTAFAGKEHISQAYQEAIASGYRFYSFGDAMLVL

SEQ ID NO: 65754 - protein, 348 aa, Dehalococcoidales bacterium
  misc_feature (1)..(348): tr|A0A2E9M6G6|A0A2E9M6G6_9CHLR S-adenosylmethionine:tRN A ribosyltransferase-isomerase OS=Dehalococcoidales bac terium OX=2026733 GN=queA PE=3 SV=1
MKTSDFDYILPPEFIAQTPIEPRDHSRLMVLDRNNGSLKHHRFFEIIDYLRAGDILVLNNSRVIPARLSARKVDGGSHLEVLLLRRLCPNIWETLVRPANRVRIGTKIEIANDSMTDDKPGLPVTAKVIGSNECGKRVLSFSDETRLLELGQIPLPPYIQIPLPNPERYQTVYAQVAGSIAAPTAGLHFTPELMTKTEKKKVRCLSVTLHIGLDTFRPVRVENPMEHPIHQEYGIISQEVAEELAQAKAEGRRIICVGTTTVRLVEAAAQASNPARVAPFADWVSLLIVPGHRFHIVDAMITNFHLPRSTTLMMATAFAGRDLIHQAYQEAITQQYRFYSFGDAMLIF

SEQ ID NO: 65755 - protein, 343 aa, Dehalococcoides mccartyi
  misc_feature (1)..(343): sp|Q3Z8C1|QUEA_DEHM1 S-adenosylmethionine:tRNA ribosylt ransferase-isomerase OS=Dehalococcoides mccartyi (strai n ATCC BAA-2266 / KCTC 15142 / 195) OX=243164 GN=queA P E=3 SV=1
MKTSDFDYNLPQEYIAQKPAEPRDSSRLLVLNRQSGELKSCIFRDITGYFQPGDVLVMNNSRVLPARIKGIKQDTSAKIEILLLKSDGNGCWEALLKPGKRTKPGTIIDIRKQDGQIHIQAEVLADKEDGIKLLRFSDETLLMKLGEVPLPPYIHTPVSDPERYQTVYALTNGSVAAPTAGLHFTPELLERLGDMGVICTYVTLHIGLDTFRPVKEEDPSDHIIHREYGILSAETAAAICQAKANGKRVFCVGTSATRLVEQASSLSQNGIIELYSGWADLFILPGYKFKVADCFITNFHLPRSTPLMLTAAFAGWPLLQKAYEKAINEHYRFYSFGDAMLVL

SEQ ID NO: 65756 - protein, 343 aa, Dehalococcoides mccartyi
  misc_feature (1)..(343): sp|Q3ZXG6|QUEA_DEHMC S-adenosylmethionine:tRNA ribosylt ransferase-isomerase OS=Dehalococcoides mccartyi (strai n CBDB1) OX=255470 GN=queA PE=3 SV=1
MKTSDFDYNLPQEYIAQKPVEPRDSSRLLVLNRQSGELTNRIFGEITDYFKPGDVLVMNDSRVLPARIKGIKQDTSAKIEILLLKRDGEGCWEALLKPGKRTKPGTIIDIHQKGGVVSIQAEVLADKEDGIKLLRFSDETHLMKLGEVPLPPYIHTPVADPERYQTVYALTNGSVAAPTAGLHFTPELLKRLTEMGVICTYVTLHIGLDTFRPVKEEDPKDHKIHREYGILSKETASAICCAKETGKRVFCVGTSATRLVEQASHLSQTSLITSYSGWADLFILPGYKFRVADCFITNFHLPRSTPLMLTSAFAGWPFLRKAYEKAISEHYRFYSFGDAMLIL

SEQ ID NO: 65757 - protein, 343 aa, Dehalococcoides sp.
  misc_feature (1)..(343): tr|A0A0C6EP21|A0A0C6EP21_9CHLR S-adenosylmethionine:tRN A ribosyltransferase-isomerase OS=Dehalococcoides sp. U CH007 OX=1522671 GN=queA PE=3 SV=1
MKTSDFDYNLPQEYIAQKPAEPRDSSRLLVLNRQRGELTSRIFGEITEYFKPGDVLVMNNSRVLPARIKGIKRDTAAKIEILLLKRDGDNCWEALLKPGKRTKPGTIIDIHQHGEETSTQAEVLADKDDGIKLLRFSDETHLMKLGEVPLPPYIHTPVSDPERYQTVYALTNGSVAAPTAGLHFTTDLLKCLSEIGVICTYVTLHIGLDTFRPVKEEDPNDHIIHREYGILSAETAATICQAKANGKRVFCVGTSATRLVEQASSLSQNGIIEPYSGWADLFILPGYKFRVVDCFITNFHLPRSTPLMLTAAFAGWPFLKKAYEKAIHEHYRFYSFGDAMLVL

SEQ ID NO: 65758 - protein, 188 aa, Dehalococcoidia bacterium
  misc_feature (1)..(188): tr|A0A0S8C9G3|A0A0S8C9G3_9CHLR S-adenosylmethionine:tRN A ribosyltransferase-isomerase (Fragment) OS=Dehalococc oidia bacterium SG8_51_3 OX=1703394 GN=AMJ70_08905 PE=3 SV=1
MKTSDFDYILPQELIAQSPIEPRDNSRLMVVNRIDGSIAHRCFRDIADYLRDGDVLVFNESLVISARLYGRKADGGGWVEILLLRRLEEGTWEALVRRGKRLRAGSSVVITNGMKKDTPSDITAEVIGQGEGGIKVLRFSDETLLAEMGHVPLPPYINAPLSRPERYQTVYARVAGSVAAPTAGLHFT

SEQ ID NO: 65759 - protein, 337 aa, Dehalococcoidia bacterium
  misc_feature (1)..(337): tr|A0A2E5LYA9|A0A2E5LYA9_9CHLR S-adenosylmethionine:tRN A ribosyltransferase-isomerase OS=Dehalococcoidia bacte rium OX=2026734 GN=queA PE=3 SV=1
MRTSDFDYDLPPSLIAQQPVEPRDAARLLVVSRGSGLLAHHHVRDLPDLLNRGDLLVLNDTRVMAGRLRGFRADTGGQVEFLLLFEHDNGSWSALVRPARGAIPGRQYRLEGSDGPLTGTVLHREDEIATVAFDRPIDPASVGTVPLPPYIRDFVGDPERYQTVYAREARSAAAPTAGLHFSEELFSRLTTVGVDHTFLTLEVGAGTFRPVRAEDPAEHVLGPERFSLPSGAAKAIRSARADGRRVIAIGTTVVRTLEHAFADQDAVLEGETDLFIRPGYTFSTVDALLTNFHLPRSTLLMLVSAFGGYDLIRSAYAEAIRESYRFYSFGDAMLLLP

SEQ ID NO: 65760 - protein, 348 aa, Dehalogenimonas alkenigignens
  misc_feature (1)..(348): tr|A0A0W0GJJ5|A0A0W0GJJ5_9CHLR S-adenosylmethionine:tRN A ribosyltransferase-isomerase OS=Dehalogenimonas alken igignens OX=1217799 GN=queA PE=3 SV=1
MTALRTSDFDYHLPSESIAQTPAEPRDSSRLLVLDRLSGAIQHRRFMDIIDYLQPGDALVFNDSRVIPARLFGRKKDTGARVEALLLLRRAPGEWQALIKPARRLGIGAVVELYDRSGIAAGATLELLDKAEDGTATVRISDETRLDELGILALPPYIRHQLSGSEAERYQTVYSRVAGSVAAPTAGLHFTPSLLAAIEAKGVKLLFVTLHIGLDTFRPVKEEDPSKHPIHREYAVLPPETAAAITEVKASGGRVFGVGTSAVRTLEWAAGQNGLPLKPFEGWVELFILPGFEFRVVDRLVTNFHLPRGTPLMLAAAFTGWDSLKAAYDTAVAGKYRFYSFGDGMLII

SEQ ID NO: 65761 - protein, 345 aa, Dehalogenimonas formicexedens
  misc_feature (1)..(345): tr|A0A1P8F7J7|A0A1P8F7J7_9CHLR S-adenosylmethionine:tRN A ribosyltransferase-isomerase OS=Dehalogenimonas formi cexedens OX=1839801 GN=queA PE=3 SV=1
MKTSDFDYELPPELIAQTPAEPRDASRLLVLDRKGGKIEHRRFFDIIGYLHPGDALVFNDSRVIPARLFGLKKSTGARVEALLLLRRGFGEWQALLKPAQRLGVGAIVDLYDRSGSPSGQTLEVLSKSEDGTAVVRLSDENRLTELGILALPPYIHHQLSESEAERYQTVYSRIAGSVAAPTAGLHFTPELLKAIESKGVRLLFVTLNIGLDTFRPVKEEDPALHPIHREYAVLSAETAEAINQVKASGGRVFGVGTSAVRTLEWAAKNQGLPLKPFEGWVELFILPGFKFQVIDNLITNFHLPRGTPLMLAAAFAGWETLKQGYRNAVDERYRFYSFGDSMLIL

SEQ ID NO: 65762 - protein, 343 aa, Dehalogenimonas lykanthroporepellens
  misc_feature (1)..(343): tr|D8K000|D8K000_DEHLB S-adenosylmethionine:tRNA ribosy ltransferase-isomerase OS=Dehalogenimonas lykanthropore pellens (strain ATCC BAA-1523 / JCM 15061 / BL-DC-9) OX =552811 GN=queA PE=3 SV=1
MKTADFNYHLPENLIAQTPAEPRDSSRLLVLNRDTGSIEHRRFRDIIDYLEPGDALVFNDSRVIPARLYGHKFGTGAKIEALLLTRKAGNEWQALLKPSKKLSPGTKVELHDQSGQDSGVTFEVLSKSEDGIADIRISDENRLQDLGILALPPYIHHRLDEPERYQTVYSRINGSVAAPTAGLHFTPELLKTIESKGIKLLFVTLHIGLDTFRPVKEENPANHPIHREFAILTKETAEAINEVKAKGGRVYGVGTSAVRTLEWAAKNYGLPLQPFEGWVELFILPGFEYRVIDRLITNFHLPCGTPLMLTAAFAGWDNVKRAYEAAVVEEYRFFSFGDSMVVV

SEQ ID NO: 65763 - protein, 345 aa, Dehalogenimonas sp.
  misc_feature (1)..(345): tr|A0A0F7GDQ6|A0A0F7GDQ6_9CHLR S-adenosylmethionine:tRN A ribosyltransferase-isomerase OS=Dehalogenimonas sp. W BC-2 OX=943347 GN=queA PE=3 SV=1
MKTADFDYNLPEELIAQTPAKPRDSSRLLVLNRGTGTIEHCRFVDIIKYLQPGDALVFNDSRVIPARLFGRKLNTGAHVEVLLLLRRQRNEWQALIKPAKRLSAGTIVELFDKHGVNSGVTLQVMQKDEDGTASILISNEDRLAQLGILALPPYIHHQLSETEEERYQTVYSRVSGSVAAPTAGLHFTPELLKKIENKGIKLLFVTLHIGLDTFRPVKEEDPALHLIHKEYAVLSAETAASINEVKVSGGRVFGVGTSAVRTLEWAALTKGMPLKPFMGWVELFILPGFKYQVIDRLITNFHLPRGTPLMLTAAFAGWDGLKVAYDQAIDEGYRFYSFGDAMLIN

SEQ ID NO: 65764 - protein, 345 aa, Dehalogenimonas sp.
  misc_feature (1)..(345): tr|A0A2P5P965|A0A2P5P965_9CHLR S-adenosylmethionine:tRN A ribosyltransferase-isomerase OS=Dehalogenimonas sp. G P OX=1536648 GN=queA PE=3 SV=1
MKTSDFDYNLPLELIAQTPVDPRDSSKLLVLDRFRRGIEHRCFSDIIDYLRPGDALVFNDSRVIPARLFGIKKGTGAHVEALLLLRRAYGEWQALIKPAKRLNIGTVVNLCDRSGNPTSSTFEIISKSDDGTALIRLTDEEHLTDLGILALPPYIHHQLTESEAERYQTVYSRVAGSVAAPTAGLHFTPELLKAIEKKGVKLLFVTLHIGLDTFRPVKEEDPAFHPIHREYAILPSETAQAINDVKASSGRVFGVGTSTVRTLEWAAMTQGLPLKEFEGWVELFILPGFHFQVIDHLITNFHLPRGTPLMLASAFVGRETLKQAYQEAVDEQYRFYSFGDSMLIH

SEQ ID NO: 65765 - protein, 372 aa, Deinococcus actinosclerus
  misc_feature (1)..(372): tr|A0A0U4B8B6|A0A0U4B8B6_9DEIO S-adenosylmethionine:tRN A ribosyltransferase-isomerase OS=Deinococcus actinoscl erus OX=1768108 GN=queA PE=3 SV=1
MTDATPHAGADAVLHRLNFHLPEDRVAQTGAEPRDASRLMIVGEALEHRVFRDLPEFLRAGDLLVFNQSKVIPARVMARKPVDAHGHGGGSVEVMLLRTEERPELGRHVWSAYLKPARRAGFELWLGGLEHEGGHRAQVVGELEDGARLLRFDHDILPHLDDIGRLPLPPYIDAGDSDETWRDRYQTVYAREPGSVAAPTAGLHFTPDLLARLAAMGVQTAHVTLHVGAGTFRPISGSVADHVMHAERWHVTPETAQAINAARAEGRRVIAVGTTTVRTLESAWDGTQVQPGEGDTQIFITPGRPVNVPDLLITNLHLPGSTLLLLVAAFAGEDRIRAAYDAALDGEYRFYSLGDAMLLTNVRGARSGVSGE

SEQ ID NO: 65766 - protein, 373 aa, Deinococcus actinosclerus
  misc_feature (1)..(373): tr|A0A2Z3Z079|A0A2Z3Z079_9DEIO S-adenosylmethionine:tRN A ribosyltransferase-isomerase OS=Deinococcus actinoscl erus OX=1768108 GN=queA PE=3 SV=1
MTDATPHAGADAVLHRLNFDLPEDRVAQTGAEPRDASRLMIVGEAIEHRVFRDLPEFLRAGDLLVFNQSKVIPARVMARKPVDAHGHGGGSVEVMLLRAEERPELGRHVWSAYLKPARRAGNELWLGGLAHEGGHRAQVVGELEDGARLLRFDHDILPHLDDIGRLPLPPYIDAGDSDETWRDRYQTVYAREPGSVAAPTAGLHFTPELLARLAEMGVQTAHVTLHVGAGTFRPISGSVADHVMHAERWHVTPETAQAINAARAEGRRVIAVGTTTVRTLESAWDGTQVQPGEGDTQIFITPGIPVNVPNLLITNLHLPGSTLLLLVAAFAGEDRIRAAYDAALAGDYRFYSLGDAMLLTNVRGQPEAGSSLE

SEQ ID NO: 65767 - protein, 362 aa, Deinococcus aerius
  misc_feature (1)..(362): tr|A0A2I9CUD0|A0A2I9CUD0_9DEIO S-adenosylmethionine:tRN A ribosyltransferase-isomerase OS=Deinococcus aerius OX =200253 GN=queA PE=3 SV=1
MSDVAETVRPDADAVLARLAFDLPPERIAQTGAEPRDSSRLMVVGERIEHRIFRELPDLLRPGDVLIFNESRVIPARVMARKPVVNGQGGGQVEVLLLREEEANVWSAYLKPAKRAGKELWLGQPGGTQHRAEVVGALPDGARLLRFDHDIRPHLDEIGRLPLPPYIHAGDSDETWRERYQTVYAREPGSVAAPTAGLHFTPELLARLDEAGVERHAITLHVGAGTFRPITGSVAEHVMHAERYAISEGTAGAINQAKAEGRRVVAVGTTTVRALESSANEDGTVRPGEGDTRIFITPGTPVRVPDLLITNLHLPGSTLMLLVAAFAGEARIRAAYDAALAGGYRFYSLGDAMLLERAVGSG

SEQ ID NO: 65768 - protein, 344 aa, Deinococcus cellulosilyticus
  misc_feature (1)..(344): tr|A0A511N156|A0A511N156_9DEIO S-adenosylmethionine:tRN A ribosyltransferase-isomerase OS=Deinococcus cellulosi lyticus NBRC 106333 = KACC 11606 OX=1223518 GN=queA PE= 3 SV=1
MNMLDFELPEDLIAQTGVEPRDHSRLMVTRPDGTLEHRIFRDLLEYLKPGDVMVFNESRVIPARLFAKKATGGTIEVLLLREREHKVWSAYLKPARKATGTLFFGTGDIQAEVTGVLEDGARLLTFNEDIKPRLTELGTLPLPPYIQKSTIGERYQTVYAKTEGSVAAPTAGLHFTPELLAQIDALGVERHHLTLHVGAGTFKPISGSITEHVMHEEQFSISEETASAINRAKQEGRRVIAVGTTTVRALESAAQNGQVQAGEGETRIFIHPPYAFQVPDLLITNFHLPHSTLLLLVGAFAGEETIAHAYQTAIQERYRFYSLGDAMLLYRQQQDQHRGAEGAV

SEQ ID NO: 65769 - protein, 353 aa, Deinococcus deserti
  misc_feature (1)..(353): tr|C1CW83|C1CW83_DEIDV S-adenosylmethionine:tRNA ribosy ltransferase-isomerase OS=Deinococcus deserti (strain V CD115 / DSM 17065 / LMG 22923) OX=546414 GN=queA PE=3 S V=1
MTPDSADAALARLNFDLPDNRIAQTGAEPRDSSRLMVVGETLAHRVFHELPELLQPGDLLVFNESRVIPARVMARKPLVNGLGGGQVEVLLLREEETLDLGPHVWSAYLKPARRAGNELWLGEHRAEVVGQLEDGARLLRFGYDIKPHLDEIGRLPLPPYIDAGSSDEVWRERYQTVYAREPGSVAAPTAGLHFTPELLSRLDARGVERVSVTLHVGAGTFKPITGSVADHVMHAERYMVSDQAADAINRARREGRRVVAVGTTTVRTLESAWDGNAVRAGEGETRIFITPGRPVNVPDLLITNLHLPGSTLLLLVAAFAGEERIRAAYDAALSEGYRFYSLGDAMLLENLRG

SEQ ID NO: 65770 - protein, 350 aa, Deinococcus ficus
  misc_feature (1)..(350): tr|A0A221SXL7|A0A221SXL7_9DEIO S-adenosylmethionine:tRN A ribosyltransferase-isomerase OS=Deinococcus ficus OX= 317577 GN=queA PE=3 SV=1
MNPDPRTADEILAALHFHLPEHRIAQTGAEPRDTSRLMHVGKQITHHTFRDLPALLRPGDLLVFNESRVIPARVMARKPVINGYGGGQVEVLLLREEEHNTWSAYLKPARRAGHELWLGEHRAEIIGQLDDGARLLRFDHDIKPHLDDIGRLPLPPYINAGDDDHHWRQRYQTVYARTPGSVAAPTAGLHFTPELLEQLDAIGVERTHVTLHVGAGTFKPITGSVNDHVMHAERYAVSEQAAHAINTARAQHRRIIAVGTTTVRTLESAWNGSQVQPGEGDTRIFITPGTPVHVPDLLITNLHLPGSTLLLLVAAFAGVDRIQAAYQAALDEDYRFYSLGDAMLLENTRE

SEQ ID NO: 65771 - protein, 366 aa, Deinococcus geothermalis
  misc_feature (1)..(366): tr|Q1IZT7|Q1IZT7_DEIGD S-adenosylmethionine:tRNA ribosy ltransferase-isomerase OS=Deinococcus geothermalis (str ain DSM 11300) OX=319795 GN=queA PE=3 SV=1
MTHEETAAAVPLEPRPDPDAVLARLAFDLPPERIAQTGAEPRDASRLMVVGREHIAHRIFRELPELLRAGDVLVFNESRVIPARVLARKPVTEGGFGGGQIEVLLLREEEQNVWSAYLKPAKRAGKELWLGQHRAEVTGVLPDGARLLRFDHDIKPHLDEIGRLPLPPYIQAGDSDERWRERYQTVYAREPGSVAAPTAGLHFTPELLARLDALGVERHALTLHVGAGTFRPITGSVADHVMHAERYAISETVAAAINRAKVEGRRVIAVGTTTVRALESSANADGTVNPGEGETRIFILPGVPVRVPDLLITNLHLPGSTLLLLVAAFAGEERIRAAYDAALVGDYRFYSLGDAMLLERAGGPGL

SEQ ID NO: 65772 - protein, 317 aa, Deinococcus gobiensis
  misc_feature (1)..(317): tr|H8GXB7|H8GXB7_DEIGI S-adenosylmethionine:tRNA ribosy ltransferase-isomerase OS=Deinococcus gobiensis (strain DSM 21396 / JCM 16679 / CGMCC 1.7299 / I-0) OX=745776 GN=DGo_CA1919 PE=3 SV=1
MVVGAEITHRVFRELPDLLRPGDLLVFNESRVIPARVMARKPVDAGGFGGGQVEVLLLREEEANVWSAYLKPARRAGNVLLLGPQGEHRAEVVGVLDDGARLLRFDHDLKPHLDEIGRLPLPPYIEAGDDEAHWRERYQTVYAQTPGSVAAPTAGLHFTPELLARLDARGIERASVTLHVGAGTFKPISGPVAEHVMHAERYAVSEATAGAIGRARAEGRRVVAVGTTTVRTLESAWDGEAVRAGEGDTRIFITPGTPVNVPDLLITNLHLPGSTLLLLVSAFAGEERIRAAYAAALAQDYRFYSLGDAMLLENVRD

SEQ ID NO: 65773 - protein, 368 aa, Deinococcus grandis
  misc_feature (1)..(368): tr|A0A117DQK1|A0A117DQK1_9DEIO S-adenosylmethionine:tRN A ribosyltransferase-isomerase OS=Deinococcus grandis O X=57498 GN=queA PE=3 SV=1
MTDATPHAGADAVLHRLNFHLPEDRVAQTGAEPRDASRLMIVGEAIEHRVFRDLPDELRAGDLLVFNQSKVIPARVMARKPVDAHGHGGGSVEVMLLRAEERPELGRHVWSAYLKPARRAGFELWLGGLEHEGGHRAQIVGELEDGARLLRFDHDILPHLDDIGRLPLPPYIDAGDSDETWRDRYQTVYAREPGSVAAPTAGLHFTPDLLARLAGLGVQTAHVTLHVGAGTFRPISGSVADHVMHAERWHVTPDTAQAINAARAEGRRIIAVGTTTVRTLESAWDGTQVQPGEGDTQIFITPGRPVNVPDLLITNLHLPGSTLLLLVAAFAGEDRIRAAYDAALNGDYRFYSLGDAMLLTNQAVGRGL

SEQ ID NO: 65774 - protein, 365 aa, Deinococcus hopiensis
  misc_feature (1)..(365): tr|A0A1W1VKR0|A0A1W1VKR0_9DEIO S-adenosylmethionine:tRN A ribosyltransferase-isomerase OS=Deinococcus hopiensis KR-140 OX=695939 GN=queA PE=3 SV=1
MPDPRTEADAVLARLAFELPPERIAQTGAEPRDASRLMVVGREGLEHRIFHDLPELLRAGDVLVFNESRVIPARVMARKPVENGFGGGQVEVLLLREEAVPELGCSVWSAYLKPARRAGKELWLGEGEARHRAEVVGTLPGGARLLRFERDIKPHLDEIGRLPLPPYIDAGDSDETWRERYQTVYAREPGSVAAPTAGLHFTPELLAHLGALGVERRAITLHVGAGTFRPISGSVSEHVMHAERYAISASTASAINRAKAEGRRVVAVGTTTVRALESSANEDGTVREGEGDTAIFIVPGVPVRVPDLLITNLHLPGSTLMLLVAAFAGEDRIRGAYDAALAEGYRFYSLGDAMLLERESLSGQR

SEQ ID NO: 65775 - protein, 376 aa, Deinococcus indicus
  misc_feature (1)..(376): tr|A0A246BS22|A0A246BS22_9DEIO S-adenosylmethionine:tRN A ribosyltransferase-isomerase OS=Deinococcus indicus O X=223556 GN=queA PE=3 SV=1
MSPVTTLSAEQAAHADATLARLNFDLPPERIAQTGAEPRDTSRLMLVGQTVTHHIFRDLPGLLRPGDLLVFNESRVIPARVMARKPVDAAGHGGGQVEVLLLREEDLPDLSAHHGPHLWSAYLKPARRAGNELWLGDGEHRQRARVVGQLEDGARILAFDHDIKPHLDDIGRLPLPPYIDPGSSDDTWRERYQTVYARAPGSVAAPTAGLHFTPDLLAALDAAGVERTTVTLHVGAGTFKPVTGPVAEHTMHAERYSVTPEAAQAINHARAAGRRVIAVGTTTVRTLESAWDGTQVRAGEGDTRIFITPGTPVNVPDLLITNLHLPGSTLLLLVTAFAGEDRIQAAYDAALHGDYRFYSLGDAMLLTNARAASPAD

SEQ ID NO: 65776 - protein, 352 aa, Deinococcus irradiatisoli
  misc_feature (1)..(352): tr|A0A2Z3JN48|A0A2Z3JN48_9DEIO S-adenosylmethionine:tRN A ribosyltransferase-isomerase OS=Deinococcus irradiati soli OX=2202254 GN=queA PE=3 SV=1
MTPHDADAVLARLNFELPADRIAQVGAEPRDSSQLMVVGEPVEHRIFSELPELLRSGDLLVFNESRVIPARVMARKPLVDGRGGGTIEVLLLREEETNLWSAYLKPARRAGKELWLGTQRAEVVGQLDDGARLLRFDSDLKPHLEEIGRLPLPPYIEAGDDDRVWRERYQTVYARENGSVAAPTAGLHFTPELLGRLEESGVERCAVTLHVGAGTFKPIQGSVAEHTMHAERYRVSPETAGAINRARREGRRVVAVGTTTVRTLESAWNGSEVRAGEGETRIFITPGTPVQVPDLLITNLHLPGSTLMLLVAAFAGEARIRAAYDAALAGNYRFYSLGDAMLLKNRRASRPA

SEQ ID NO: 65777 - protein, 365 aa, Deinococcus koreensis
  misc_feature (1)..(365): tr|A0A2K3V070|A0A2K3V070_9DEIO S-adenosylmethionine:tRN A ribosyltransferase-isomerase OS=Deinococcus koreensis OX=2054903 GN=queA PE=3 SV=1
MSPPPELDAVNVPGTDPDAVLARLNFELPAGRIAQTGAEPRDASRLMVVGESVDHRIFRDLPELLRRGDLLVFNESRVIPARVLARKPRTPDGHGGGQVEVMLLREEEPNLWSAYLKPAKRAGKELLLGGPGEHEHRAEVVGVQADGARLLRFDHDIGPHLDDIGRLPLPPYIDAGDSDETWRERYQTVYARTPGSVAAPTAGLHFTPGLLARLDELAVERAHVTLHVGAGTFKPISGPVSEHVMHAERYSVSPQTAAAINRARAEGRRVVAVGTTTVRTLESAWDGAEVQPGEGDTSIFITPGKPVNVPDVLITNLHLPGSTLMLLVAAFAGVERIRAAYDAALSEGYRFYSLGDAMWLENASR

SEQ ID NO: 65778 - protein, 354 aa, Deinococcus maricopensis
  misc_feature (1)..(354): tr|E8U9H5|E8U9H5_DEIML S-adenosylmethionine:tRNA ribosy ltransferase-isomerase OS=Deinococcus maricopensis (str ain DSM 21211 / LMG 22137 / NRRL B-23946 / LB-34) OX=70 9986 GN=queA PE=3 SV=1
MSDTPHPITEHANPGADEALARLNFDLPPERIAQTGAEPRDTSRLMVVGESGIDHRIFRDLPDLLRTGDLLVFNESRVIPARIIARKPTGGAVETLLLREEEANVWSAYLKGAKRAGRDLLFGSVHAEVIGTLEDGARLLRFSEDIKPHLDALGRLPLPPYIDAGEDDAVWQDRYQTVYARTAGSVAAPTAGLHFTPELLARLQAMGVGTAFVTLHVGAGTFKPISGSVAEHTMHAERYTVTSDTADAINAARREGRRVIAVGTTTVRALESAADVNGTVHPGDGDTRIFITPGHAWRVPDLLITNLHLPNSTLLLLVAAFAGEDRIRAAYQAALDHPYRFYSLGDAMLLQRAP

SEQ ID NO: 65779 - protein, 359 aa, Deinococcus marmoris
  misc_feature (1)..(359): tr|A0A1U7NVR8|A0A1U7NVR8_9DEIO S-adenosylmethionine:tRN A ribosyltransferase-isomerase OS=Deinococcus marmoris OX=249408 GN=queA PE=3 SV=1
MPDSNLYDADAVLARLNFDLPPERIAQTGAEPRDSSRLMVVGQGEISHRVFSDLPTLLRPSDLLVSNQSRVIPARVMARKPVTPEGHGGGVVEVMLLREEENNVWSAYLKPAKRAGKELWLGQADGEQHRAEVVGILEDGARLLRFEHDLKPHLDEIGRLPLPPYIDAGDDDEVWRERYQTVYARDPGSVAAPTAGLHFTPELLARLDSRGVERCAVTLHVGAGTFRPIQGSVADHTMHAERYSVSEATAQAINRARAEGRRVVAVGTTTVRTLESAWDGQMVQAGEGDTRIFITPGTPVHVPDLLITNLHLPGSTLLLLVSAFAGEERIQAAYDAALAGDYRFYSLGDAMLLENRREG

SEQ ID NO: 65780 - protein, 347 aa, Deinococcus metallilatus
  misc_feature (1)..(347): tr|A0A4Q0W742|A0A4Q0W742_9DEIO S-adenosylmethionine:tRN A ribosyltransferase-isomerase OS=Deinococcus metallila tus OX=1211322 GN=queA PE=3 SV=1
MNPDAVLARLAFDLPPERIAQTGAEPRDSSRLMVVGEAGLAHRVFRDLPELLRAGDVLVFNESRVIPARVMARKPVTPGGFGGGQVEVLLLREEEQHVWSAYLKPAKRAGKELWLGQHRAEVVGVLPDGARLLRFERDIKPHLDEIGRLPLPPYIDAGDSDETWRERYQTVYARTPGSVAAPTAGLHFTPELLARLDALGVERHALTLHVGAGTFRPITGSVADHVMHAERYAISEGAARAINRAKAEGRRVVAVGTTTVRALESSANEDGTVNPGEGDTSIFITPGTPVRVPDLLVTNLHLPGSTLLLLVAAFAGEARIKAAYDAALAEGYRFYSLGDAMLLERGL

SEQ ID NO: 65781 - protein, 358 aa, Deinococcus metallilatus
  misc_feature (1)..(358): tr|A0A4Q0W0F0|A0A4Q0W0F0_9DEIO S-adenosylmethionine:tRN A ribosyltransferase-isomerase OS=Deinococcus metallila tus OX=1211322 GN=ERJ73_19355 PE=3 SV=1
MTAAMNGPLEFTLPAHLEAHEPPEARGLPRDGVRLLVSRVADDVVQHATFRDLPAFLREGDALVINTSGTLPAALPARRADGTALELHLSTHLPADLWTVELRRPAGTATLPERHAHAGETLRLPDGGQVTLLTPYSTDRNREEQREGVRLWVAALHLPQPVLVYLAAHGKPIRYGYVPRDWPLQTYQTVFATEPGSAEMPSAGRPFTPELLTRLMAQGVRVAPLVLHTGVASLEDHEPPYEEAYRVPAATAHAVNEARAAGGRVIAVGTTVVRALETVTDERGITHPGSGWTREVITPERGTRAVHGLITGWHEPRASHLLMLEAIAGRRHLEVAYAAALAAGYLWHEFGDLHLILP

SEQ ID NO: 65782 - protein, 338 aa, Deinococcus peraridilitoris
  misc_feature (1)..(338): tr|L0A4F1|L0A4F1_DEIPD S-adenosylmethionine:tRNA ribosy ltransferase-isomerase OS=Deinococcus peraridilitoris ( strain DSM 19664 / LMG 22246 / CIP 109416 / KR-200) OX= 937777 GN=queA PE=3 SV=1
MSTLLDFELPGELIAQRGAEPRDASRLMIVGETLQHRIFRELPDFLREGDVLVFNESKVIPARLEARKPTGGRIEVLLLREESPLTWSAMLRGARRAGSQLLFGDLQAEVVGQLPDGARLLRFSQDVKPHLDRLGRLPLPPYIHGDVGERYQTVYARAPGSVAAPTAGLHFTPELLSRIDAMGVERVQITLHVGAGTFRPISGAIEEHVMHAESYEVPPATAEAVNRARREGRRVVAVGTTTVRALESAWCDGALQAGTAETRIFIRPGDKLNVPDLLITNFHLPNSTLLLLVAAFAGAPLIEAAYREAISQRYRFYSLGDAMLLYRMSPGSEHAPLR

SEQ ID NO: 65783 - protein, 366 aa, Deinococcus phoenicis
  misc_feature (1)..(366): tr|A0A016QQJ7|A0A016QQJ7_9DEIO S-adenosylmethionine:tRN A ribosyltransferase-isomerase OS=Deinococcus phoenicis OX=1476583 GN=queA PE=3 SV=1
MSTEEPRIQDADAVLARLAFDLPQARIAQTGAEPRDSARLMVVTQGGLTHRVFRDLPELLRAGDVLVFNESRVIPARVLARKPVTGDGLGGGQVEVLLLREEEQNVWSAYLKPAKRAGKELWLGQTGGVQHRAEVVGVLEDGARLLRFDHDIKPHLDEIGRLPLPPYIDAGASDETWRERYQTVYARDPGSVAAPTAGLHFTPELLARLDALGVERHAVTLHVGAGTFRPITGSVADHVMHAERYAISAGAAGAINRAKAEGRRVVAVGTTTVRALESSADEDGTVKPGEGDTRIFITPGTPVRVPDLLITNLHLPGSTLLLLVAAFAGEGRIRAAYDAALAGGYRFYSLGDAMLLERQGASAARP

SEQ ID NO: 65784 - protein, 358 aa, Deinococcus proteolyticus
  misc_feature (1)..(358): tr|F0RN92|F0RN92_DEIPM S-adenosylmethionine:tRNA ribosy ltransferase-isomerase OS=Deinococcus proteolyticus (st rain ATCC 35074 / DSM 20540 / JCM 6276 / NBRC 101906 / NCIMB 13154 / VKM Ac-1939 / CCM 2703 / MRP) OX=6
MTLSPDAALAALHFELPPGRIAQTGAEPRDSSRLMRVPRAGEVQHHIFRELPELLRAGDVLVFNQSRVIPARVMARKPKVGGQGGGQIEVMLLREEENNVWSAYLKPARRAGNELWLGDPAGVQHRAEVVGVQEDGARLLRFDHDIKPHLDDIGRLPLPPYIEAGEDDTVWCERYQTVYARENGSVAAPTAGLHFTPELLERLRALGVEQHAVTLHVGAGTFKPVQGAVSEHVMHAEQYHIPPATADAINRARAEGRRVVAVGTTTVRALESSVDGGGEVRAGKGDTRIFITPGQAVQVPDLLITNLHLPDSTLMLLVAAFAGVERIQTAYAEALRHDYRFYSLGDAMLLDNTSRDRP

SEQ ID NO: 65785 - protein, 360 aa, Deinococcus puniceus
  misc_feature (1)..(360): tr|A0A172T9P0|A0A172T9P0_9DEIO S-adenosylmethionine:tRN A ribosyltransferase-isomerase OS=Deinococcus puniceus OX=1182568 GN=queA PE=3 SV=1
MPDSHLNPDAVLAQLAFMLPPERIAQLGAEPRDSSRLMVVGNEIAHLTFRDLPSLLRPGDLLVFNESRVIPARVMARKPVQNGFGGGQVEVMLLREEYGTDLGAHLWSAYLKPAKRAGPELLLGPPDAPHRAEIVGQLDDGARLLRFEYDIKPHLDTIGRLPLPPYIDAGDNDERWRERYQTVYACEPGSVAAPTAGLHFTPELLAELEAMGVQRTAITLHVGAGTFRPISGSVADHVMHAERYSISAATAEAINTARAEGRRIVAVGTTTVRALESAVDRAGQVQAGEGDTQIFITPGTPVRVPDLLITNLHLPGSTLLLLVAAFAGVDRIQAAYAAALEGDYRFYSLGDAMILERGEL

SEQ ID NO: 65786 - protein, 362 aa, Deinococcus radiodurans
  misc_feature (1)..(362): sp|Q9RU19|QUEA_DEIRA S-adenosylmethionine:tRNA ribosylt ransferase-isomerase OS=Deinococcus radiodurans (strain ATCC 13939 / DSM 20539 / JCM 16871 / LMG 4051 / NBRC 1 5346 / NCIMB 9279 / R1 / VKM B-1422) OX=243230 G
MPDSTADPSTADEVLARLHFDLPEDRIAQTGAEPRDTSRLMVVGEQIKHRMFRDLPDLLRPSDLLVFNESRVIPARVLARKPVVNGFGGGQVEVLLLREEFDVGANVWSAYLKPAKRAGHELWLGENEATGHRAEVVGVLDDGARLLRFDHDIKPHLDEIGRLPLPPYINAGDSDETWRERYQTVYAKTPGSVAAPTAGLHFTPELLARLDEMGVERASVTLHVGAGTFKPIQGPVADHVMHAERYEVSETNAAAITRAKAEGRRVVAVGTTTVRTLESAWDGAAVRAGAGETRIFITPGTRVEVPDLLITNLHLPGSTLLLLVAAFAGEDRIRAAYDAALSQDYRFYSLGDAMLLERLTSA

SEQ ID NO: 65787 - protein, 362 aa, Deinococcus radiodurans; identical to SEQ ID NO: 65786
  misc_feature (1)..(362): tr|A0A5C1MK90|A0A5C1MK90_DEIRD S-adenosylmethionine:tRN A ribosyltransferase-isomerase OS=Deinococcus radiodura ns OX=1299 GN=queA PE=3 SV=1

SEQ ID NO: 65788 - protein, 359 aa, Deinococcus radiophilus
  misc_feature (1)..(359): tr|A0A431W5F9|A0A431W5F9_9DEIO S-adenosylmethionine:tRN A ribosyltransferase-isomerase OS=Deinococcus radiophil us OX=32062 GN=queA PE=3 SV=1
MIDASLNVPDPDDILAALHFELPPERIAQSGAEPRDSARLLVAGEQPEHRIFRELPDLLRRGDLLVFNQSRVIPARVMARKPKVGDMGGGQVEVLLLREEEANVWSAYLKPARRAGNELWLGGPEGEGHRAEVVGVQEDGARLLRFAYDIKPHLEDIGRLPLPPYIDAGDSDERWRERYQTVYAREDGSVAAPTAGLHFTPELLARLDDLGVERCAVTLHVGAGTFRPIQGRVADHVMHAERYHISPETAAAINQAKAEGRRVVAVGTTTVRALESSVDAAGQVVSGEGDTQIFITPGQSVYVPDLLITNLHLPGSTLLLLVAAFAGTETIRAAYAEALREDYRFYSLGDAMLLHNIRP

SEQ ID NO: 65789 - protein, 357 aa, Deinococcus radiopugnans
  misc_feature (1)..(357): tr|A0A5C4Y741|A0A5C4Y741_9DEIO S-adenosylmethionine:tRN A ribosyltransferase-isomerase OS=Deinococcus radiopugn ans ATCC 19172 OX=585398 GN=queA PE=3 SV=1
MPDPNLHDADAVLARLNFTLPPERIAQTGAEPRDSSRLMVVGPHEISPHVFSDLPTLLRPGDLLVFNQSRVIPARVMARKPVTPEGHGGGAVEVMLLREEENNVWSAYLKPARRAGKELWLGEHRAEVVGILEDGARLLRFEHDLKPHLDEIGRLPLPPYIDAGDDDEVWRERYQTVYARDPGSVAAPTAGLHFTPNLLSTLDAMGVERCAVTLHVGAGTFRPITGSVADHTMHAERYVVSEATAKAINRARAQGRRVVAVGTTTVRTLESAWDGTAVQAGEGDTRIFITPGTQVRVPDLLLTNLHLPGSTLLLLVAAFAGEDRIRAAYDAALAGDYRFYSLGDAMLLENRRGDTSG

SEQ ID NO: 65790 - protein, 351 aa, Deinococcus reticulitermitis
  misc_feature (1)..(351): tr|A0A1H6V8L8|A0A1H6V8L8_9DEIO S-adenosylmethionine:tRN A ribosyltransferase-isomerase OS=Deinococcus reticulit ermitis OX=856736 GN=queA PE=3 SV=1
MTTDDLLAQLHFDLPESRIAQTGAEPRDASRLMVVGEEIRHQRFHELPALLRPGDLLVFNESRVIPARVMARKPVTPGGFGGGQVEVLLLREEEPRVWSAYLKPARRAGKELWLGPPGGVQHRAEVIGVLEDGARLLRFGHDLLPHLDEIGRLPLPPYIDAGDSDERWRERYQTVYARAPGSVAAPTAGLHFTPELLARLDARGVERVSVTLHVGAGTFKPITGPVAEHVMHAERYEVSAAAAAAINRAKAEGRRVVAVGTTTVRTLESAWDGAAVRAGAGETRIFITPGTPVRVPDLLITNLHLPGSTLLLLVAAFAGVERIQAAYAAALAGDYRFYSLGDAMLLEKASS

SEQ ID NO: 65791 - protein, 373 aa, Deinococcus soli
  misc_feature (1)..(373): tr|A0A0F7JJJ8|A0A0F7JJJ8_9DEIO S-adenosylmethionine:tRN A ribosyltransferase-isomerase OS=Deinococcus soli Cha et al. 2016 OX=1309411 GN=queA PE=3 SV=1
MTDATPHAGADAVLHRLNFHLPEDRVAQTGAEPRDASRLMIVGEAIEHRVFRDLPAFLRAGDLLVFNQSKVIPARVMARKPVDAHGHGGGSVEVMLLRAEERPELGRHVWSAYLKPARRAGNELWLGGLAHEGGHRAQVVGELEDGARLLRFDHDILPHLDDIGRLPLPPYIDAGDSDETWRERYQTVYAREPGSVAAPTAGLHFTPELLVRLAELGVQTAHVTLHVGAGTFRPISGSVADHVMHAERWHVTPDTAQAINAARAEGRRVIAVGTTTVRTLESAWDGTQVQPGEDDTQIFITPGRPVNVPDLLITNLHLPGSTLLLLVAAFAGEDRIRAAYDAALNGEYRFYSLGDAMLLTNVRGEPEAGSSPE

SEQ ID NO: 65792 - protein, 372 aa, Deinococcus sp.
  misc_feature (1)..(372): tr|A0A418QDS6|A0A418QDS6_9DEIO S-adenosylmethionine:tRN A ribosyltransferase-isomerase OS=Deinococcus sp. RM OX =2316359 GN=queA PE=3 SV=1
MTDATPHAGADAVLHRLNFHLPEDRIAQTGAEPRDASRLMIVGEAIQHRVFRDLPEFLRAGDLLVFNQSRVIPARVMARKPVDAHGHGGGSVEVMLLRAEERPELGRHVWSAYLKPARRAGNELWLGGLEHEGGHRAQMVGELEDGARLLRFDHDILPHLDDIGRLPLPPYIDAGDSDETWRDRYQTVYAREPGSVAAPTAGLHFTPDLLARLAEMGVQTAHVTLHVGAGTFRPISGSVADHVMHAERWHVTPETAQAINAARAEGRRIIAVGTTTVRTLESAWDGTQVQPGEGDTQIFITPGRPVNVPDLLITNLHLPGSTLLLLVAAFAGEDRIRAAYDAALDGDYRFYSLGDAMLLTNVRGARSEVSEE

SEQ ID NO: 65793 - protein, 349 aa, Deinococcus sp.
  misc_feature (1)..(349): tr|A0A553UWQ6|A0A553UWQ6_9DEIO S-adenosylmethionine:tRN A ribosyltransferase-isomerase OS=Deinococcus sp. H1 OX =2592048 GN=queA PE=3 SV=1
MVSTLRDADAVLARLNFDLPPERIAQTGAEPRDSSKLMVVGAEIQHCIFSELPDLLRSGDVLVFNQSRVIPARVMARKPVVNGQGGGQIEVLLLREEETNLWSAYLKPARRAGNELYLGEHRAEVVGVLDDGARLLRFESDLKPHLDEIGRLPLPPYIHAGEDDSVWRERYQTVYARVNGSVAAPTAGLHFTPELLARLDERGIERAYVTLHVGAGTFKPIQGSVADHTMHAERYSVSTETAQIINRAKAGGQRVVAVGTTTVRTLESAWDGQQVQPGEGDTRIFITPGTPVNVPDLLITNLHLPGSTLLLLVSAFAGEQRIKAAYDAALAGDYRFYSLGDAMLLENQR

SEQ ID NO: 65794 - protein, 357 aa, Deinococcus swuensis
  misc_feature (1)..(357): tr|A0A0A7KEQ9|A0A0A7KEQ9_9DEIO S-adenosylmethionine:tRN A ribosyltransferase-isomerase OS=Deinococcus swuensis OX=1182571 GN=queA PE=3 SV=1
MPDPNLHDADAVLARLNFTLPPERIAQTGAEPRDSSRLMVVGPHEISPHVFSDLPTLLRPGDLLVFNQSRVIPARVMARKPVTPEGHGGGTVEVMLLREEENNVWSAYLKPARRAGKELWLGEHRAEVVGILEDGARLLRFEHDLKPHLDEIGRLPLPPYIDAGDDDEVWRERYQTVYARDPGSVAAPTAGLHFTPDLLSTLDAMGVERCAVTLHVGAGTFRPITGSVADHTMHAERYVVSEATAQAINHARAQGRRVVAVGTTTVRTLESAWDGTAVQAGEGDTRIFITPGTQVRVPDLLLTNLHLPGSTLLLLVAAFAGEDRIRAAYDAALAGDYRFYSLGDAMLLENRRGDTSG

SEQ ID NO: 65795 - protein, 350 aa, Deinococcus wulumuqiensis
  misc_feature (1)..(350): tr|A0A345IF52|A0A345IF52_9DEIO S-adenosylmethionine:tRN A ribosyltransferase-isomerase OS=Deinococcus wulumuqie nsis OX=980427 GN=queA PE=3 SV=1
MAAPATADEVLARLHFELPGSRIAQTGAEPRDTSRLMVVGEKVQHRVFRELPDLLRPGDLLVFNESRVIPARVLARKPVVNGFGGGTVEVLLLREEFDQGANVWSAYLRPARRAGNELFLGDHRAEVVGVLDDGARLLRFDHDIKPHLDEIGRLPLPPYIDAGESDETWRERYQTVYARTPGSVAAPTAGLHFTPELLARLSEMGVERATVTLHVGAGTFKPIQGSVADHVMHAERYEVSAETAAAITRARAEGRRVVAVGTTTVRTLESAWDGEQVRAGAGETRIFITPGTPVQVPDLLITNLHLPGSTLLLLVAAFAGEHRIRAAYDEALARGYRFYSLGDAMLLEKE

SEQ ID NO: 65796 - protein, 363 aa, Deinococcus yavapaiensis
  misc_feature (1)..(363): tr|A0A318RZK3|A0A318RZK3_9DEIO S-adenosylmethionine:tRN A ribosyltransferase-isomerase OS=Deinococcus yavapaien sis KR-236 OX=694435 GN=DES52_12414 PE=3 SV=1
MTHILPTATLDFTLPPDLEAHEPPEARGLARDDVRLLVSRVRDDTVTHAHFRDLPNFLTSDDLLVLNTSGTLPAALRADRADGTPLVVHLSTHLPADLWTVEVRLPTDIATAPFRHAHAGETLTLPGGGGVTLLAPYSLDRAAPPSRDGTRLWIAALHLPCAPHTYLATYLAAHGRPIRYGYVPRDWPLEAYQTVYATESGSAEMPSAGRAFTPDLLTRLVAKGVRVAPLVLHTGVASLEDHEPPYEEFYRVPDSTARAVNETRANGGRVLAVGTTVVRALETVTDARGTAHPGEGWTREVITPQRGVRAVNGLLTGWHEPRASHLLMLAALAGERHLRAAYEAALQGRYLWHEFGDLHLIVP

SEQ ID NO: 65797 - protein, 350 aa, Deinococcus yavapaiensis
  misc_feature (1)..(350): tr|A0A318S8M4|A0A318S8M4_9DEIO S-adenosylmethionine:tRN A ribosyltransferase-isomerase OS=Deinococcus yavapaien sis KR-236 OX=694435 GN=queA PE=3 SV=1
MTAFESARLASGDDVLAYLDFHLPEDRIAQTGAEPRDASRLMIVGEEIRHRIFRDLLEYLEAGDVLVFNESKVIPARLEARKPTGGKIEVLLLREERPNTWSAMLKPAKRAGDVLHFDDLRAEIVGQTLDGARLLKFDTDVKPHLDRLGSLPLPPYIHENVGDRYQTVYARVPGSVAAPTAGLHFTPELLAALEAKGVRRAHLNLHVGAGTFKPVAGSVEQHVMHEETFEVPRATADLVNEAKRSGRRVVAVGTTVVRALESVWDGREVRASAGETGIFIKPGHTFGAPDMLVTNFHLPKSTLLLLVAAFAGVERIKAAYEAGLRDGYRFYSLGDAMLLERQNVKRSAGG

SEQ ID NO: 65798 - protein, 336 aa, Unknown
  misc_feature (1)..(336): tr|A0A3M2F0V6|A0A3M2F0V6_9DEIN S-adenosylmethionine:tRN A ribosyltransferase-isomerase OS=Deinococcus-Thermus b acterium OX=1913990 GN=queA PE=3 SV=1
MNLEDFDYPLPPELIAQKGAEPRDASRLMVVHRQSGRLEHRVFRDLPHYLRPGDVLVLNESKVIPARIFGKNPHGTSIEVLLVREKPDRPGCWEALLKPARRVKVGQTLSFPDGLSATLEGLEPDGSRVLRFHGNVREHLERIGQPPLPPYIRAPVAPERYQTVYARTPGSVAAPTAGLHFTPELLEQIQKMGVEVNYVTLHVGPGTFKPVQGPLEQHTLHQEPYEVPIKTAWAINQAKAEGRRVVAVGTTVVRTLETAWREGELQPGRGETQLFIRPGFHYRVVDALITNFHLPRSTLLMLVSAFMGHELMKRAYQVAVEERYRFYSLGDAMLIL

SEQ ID NO: 65799 - protein, 366 aa, Delftia acidovorans
  misc_feature (1)..(366): tr|A0A2W5IN67|A0A2W5IN67_DELAC S-adenosylmethionine:tRN A ribosyltransferase-isomerase OS=Delftia acidovorans O X=80866 GN=queA PE=3 SV=1
MSSLSRVFSLSDFDFELPEKLIAQHPAAQRSASRLLDGRDDANPPADRIFHELPDLLQPGDLLVFNDTRVIKARIFGEKASGGRLELLVERVLEGNDVVAHMRVSKKPLPGSRIHLCGGKNGGGFDAVLRGRWPDENGPLFHLSFEGPRGETPHELMERFGHLPLPPYIERHQETGNDPDAAEDSERYQTVFAARPGAVAAPTAALHFDDAVLARLAERGIERASVTLHVGAGTFQPVKTENLADHQMHSEWYEIPLATLAALERCRQRGGRIIAVGTTTVRTLESWAQTGNFSGDTRIFITPGFEYQVVDLLITNFHLPKSTLMMLVSAFAGYEQVMALYRHAIAQEYRFFSYGDSMLLKKKSTP

SEQ ID NO: 65800 - protein, 366 aa, Delftia acidovorans
  misc_feature (1)..(366): tr|A0A2M9PJA6|A0A2M9PJA6_DELAC S-adenosylmethionine:tRN A ribosyltransferase-isomerase OS=Delftia acidovorans O X=80866 GN=queA PE=3 SV=1
MSSLSRVFSLSDFDFELPENLIAQHPAAQRSASRLLDGRDNATPPTDRIFHELPDLLQPGDLLVFNDTRVLKARIFGEKASGGRLELLVERVLEGNDVVAHMRVSKKPLPGSRIHLCGGKNRGGFDAVLRGRWPDENGPLFHLSFEGPRGETPHELMERFGHLPLPPYIERHQDTGNDPDAAEDSERYQTVFAARPGAVAAPTAALHFDDAVLARLAERGIERASVTLHVGAGTFQPVKTENLADHQMHSEWYEIPLATLAALERCRQRGGRVVAVGTTTVRTLESWAQTGQFSGDTRIFITPGFEYQVVDLLITNFHLPKSTLMMLVSAFAGYEQVMALYRHAIAQEYRFFSYGDSMLLKKKSTP

SEQ ID NO: 65801 - protein, 366 aa, Delftia lacustris
  misc_feature (1)..(366): tr|A0A1H3EY16|A0A1H3EY16_9BURK S-adenosylmethionine:tRN A ribosyltransferase-isomerase OS=Delftia lacustris OX= 558537 GN=queA PE=3 SV=1
MSSLSRVFSLSDFDFELPEKLIAQHPAAQRSASRLLDGRDDANPPADRIFHELPDLLQPGDLLVFNDTRVIKARIFGEKASGGRLELLVERVLEGNDVVAHMRVSKKPLPGSRIHLCGGKNGGGFDAVLRGRWPDENGSLFHLSFEGPRGETPHELMERFGHLPLPPYIERHQETGNDPDAAEDSERYQTVFAARPGAVAAPTAALHFDDAVLARLAERGIERASVTLHVGAGTFQPVKTENLADHQMHSEWYEIPLATLAALERCRQRGGRIIAVGTTTVRTLESWAQTGNFSGDTRIFITPGFEYQVVDLLITNFHLPKSTLMMLVSAFAGYEQVMALYRHAIAQEYRFFSYGDSMLLKKKSTP

SEQ ID NO: 65802 - protein, 366 aa, Delftia sp.
  misc_feature (1)..(366): tr|A0A543BGS0|A0A543BGS0_9BURK S-adenosylmethionine:tRN A ribosyltransferase-isomerase OS=Delftia sp. HK171 OX= 1920191 GN=queA PE=3 SV=1
MSSLSRVFSLSDFDFELPENLIAQHPAAQRSASRLLDGRDDATPPTDRIFHELPDLLQPGDLLVFNDTRVLKARIFGEKASGGRLELLVERVLEGNDVVAHMRVSKKPLPGSRIHLCGGKNRGGFDAVLRGRWPDENGPLFHLSFEGPRGETPHELMERFGHLPLPPYIERHQDTGNDPDAAEDSERYQTVFAARPGAVAAPTAALHFDDAVLARLAERGIERASVTLHVGAGTFQPVKTENLADHQMHSEWYEIPLATLAALERCRQRGGRVVAVGTTTVRTLESWAQTGQFSGDTRIFITPGFEYQVVDLLITNFHLPKSTLMMLVSAFAGYEQVMALYRHAIAQEYRFFSYGDSMLLKKKSTP

SEQ ID NO: 65803 - protein, 366 aa, Delftia sp.; identical to SEQ ID NO: 65802
  misc_feature (1)..(366): tr|A0A1C7LEU2|A0A1C7LEU2_9BURK S-adenosylmethionine:tRN A ribosyltransferase-isomerase OS=Delftia sp. JD2 OX=46 9553 GN=queA PE=3 SV=1

SEQ ID NO: 65804 - protein, 366 aa, Delftia tsuruhatensis; identical to SEQ ID NO: 65799
  misc_feature (1)..(366): tr|A0A1D8J3U9|A0A1D8J3U9_9BURK S-adenosylmethionine:tRN A ribosyltransferase-isomerase OS=Delftia tsuruhatensis OX=180282 GN=queA PE=3 SV=1

SEQ ID NO: 65805 - protein, 366 aa, Delftia tsuruhatensis
  misc_feature (1)..(366): tr|A0A4R5GMZ9|A0A4R5GMZ9_9BURK S-adenosylmethionine:tRN A ribosyltransferase-isomerase OS=Delftia tsuruhatensis OX=180282 GN=queA PE=3 SV=1
MSSLSRVFSLSDFDFELPEKLIAQHPAAQRSASRLLDGRDDANPPTDRIFHELPDLLQPGDLLVFNDTRVIKARIFGEKASGGRLELLVERVLEGNDVVAHMRVSKKPLPGSRIHLCGGKNGGGFDAVLRGRWPDENGPLFHLSFEGPRGETPHELMERFGHLPLPPYIERHQETGNDPDAAEDSERYQTVFAARPGAVAAPTAALHFDDAVLARLAERGIERASVTLHVGAGTFQPVKTENLADHQMHSEWYEIPLATLAALERCRQRGGRIIAVGTTTVRTLESWAQTGNFSGDTRIFITPGFEYQVVDLLITNFHLPKSTLMMLVSAFAGYEQVMALYRHAIAQEYRFFSYGDSMLLKKKSTP

SEQ ID NO: 65806 - protein, 342 aa, Unknown
  misc_feature (1)..(342): tr|A0A1V4MNW2|A0A1V4MNW2_9DELT S-adenosylmethionine:tRN A ribosyltransferase-isomerase OS=delta proteobacterium MLS_D OX=1775673 GN=queA PE=3 SV=1
MKTRDFTYDLPEDRIAQEPAASRDQSRMMVVDRRSGSMESLRFSELPGFIRDGDVMVVNDSRVIPARLKGEKATGGRIDILLLERLEQSNRWLVMLRPAKRVKQGTRIFFGVDGFADVMERYDEKKWLLEFTLNDSFESFLAARGTAPLPPYIKRRPGDDRTDRDMERYQTVYAAVPGSIAAPTAGLHFSENILKKLRERGVPVVPVTLHVGLGTFVPIETENVEEHPMEKERYIISSEAARMINGAGRVVAVGTTSVRTMESAARNNGSVQSGAGETNLFIYPGFEFKVTGSLLTNFHLPASSLFLLVCAFAGTDLMKKAYRKAIDEGFRFYSYGDCMLIL

SEQ ID NO: 65807 - protein, 370 aa, Unknown
  misc_feature (1)..(370): tr|Q1NLG1|Q1NLG1_9DELT S-adenosylmethionine:tRNA ribosy ltransferase-isomerase OS=delta proteobacterium MLMS-1 OX=262489 GN=queA PE=3 SV=1
MVVSGDFPYSLSDYDYHLPPELIAQQPAARRDASRLLVCDCRDGGLADRHFPELLDLLSPGDLLVFNDTRVFPARLLGHKSSGGRGELLLLEYPVAQAAADVGSAEGGESSFHAWALCKTSKGVKEGLKLLFGDDLQAEVVELGEGGRARVRLQVAAGQTLDGCLARHGRMPLPPYIRRSETETPEDRQRYQTVYAAVTGAVAAPTAGLHFTPELLAAIAAKGVRQARVTLHVGYGTFSPVRVRDIREHAIHGEYYAITPENAALVEQTRAAGGRIWAVGTTAVRALETAADAAGRLTPGSGICELYIYPGYRFKVVDNLLTNFHLPRSSLLFLVSALAGRRRILAAYNHAVARGYRFFSYGDAMAIINK

SEQ ID NO: 65808 - protein, 341 aa, Deltaproteobacteria bacterium
  misc_feature (1)..(341): tr|A0A3M1X3D9|A0A3M1X3D9_9DELT S-adenosylmethionine:tRN A ribosyltransferase-isomerase OS=Deltaproteobacteria b acterium OX=2026735 GN=queA PE=3 SV=1
MDTKILDYHLPEELIAQYPSPRRDESRLLVFERKTGEIRHRLFRDIVDELTENDLLVLNDTRVIRARVLFRKPTGGRVEVFFLHQVEGTLWECLVRPAGRMREGAEYKVSDKLRVRFVRRTGPGSWLVDAETAGDIFDVLDEIGLVPLPPYIRREAEEVDGERYQTVFAEKRGSVAAPTAGLHFTEELLGALNRKGVEIVRVTLNVGYGTFAPIKTERVEDHDIHPEKYAVSEESAASLIEAKEKGKRIVAVGTTVVRVLETVFRGTEVVNSLEGETRLFIYPGYRFGFVDALITNFHLPRSSLLALVMAFAGVDETMRCYETAIRERYRFFSYGDAMFIR

SEQ ID NO: 65809 - protein, 77 aa, Deltaproteobacteria bacterium
  misc_feature (1)..(77): tr|A0A2N2HG25|A0A2N2HG25_9DELT S-adenosylmethionine:tRN A ribosyltransferase-isomerase (Fragment) OS=Deltaprote obacteria bacterium HGW-Deltaproteobacteria-20 OX=20137 48 GN=CVU63_22895 PE=3 SV=1
MRIDAFDFDLPPERIAQHPVEPRDASKLLVLDPPTDSLFDRHAYDLPDLLPSGAVVIVNDTRVIRARLIGRKAETGG

SEQ ID NO: 65810 - protein, 339 aa, Dendrosporobacter quercicolus
  misc_feature (1)..(339): tr|A0A1G9KPG3|A0A1G9KPG3_9FIRM S-adenosylmethionine:tRN A ribosyltransferase-isomerase OS=Dendrosporobacter que rcicolus OX=146817 GN=queA PE=3 SV=1
MLLADFDYELPEELIAQRPHEPRDGSRLIVLNKETGKLAHRHFYDVPGFLESGDTLIFNDTKVLPARLIGIKRETGAKIEVFLLNRKNGDDWEVLVKPGKRVRPGAVIRFSDELSCEIIAATDFGGRIARFSYQGIFEELLDRLGDTPLPPYIKEKLADKDRYQTVYARFSGSAAAPTAGLHFTPELMQEIADKGVHLGYVTLHVGLGTFRPVNVEQITEHVMHSEYYSVPEATAQLINRTRERGKRVIAVGTTAIRTLETAGAGGKVAAGSGWTNIFIYPGYQFNMIDGLITNFHLPKSTLLMLVSAFAGRDAVMDAYREAIERRYRFFSFGDAMLII

SEQ ID NO: 65811 - protein, 356 aa, Denitratisoma sp.
  misc_feature (1)..(356): tr|A0A518UD87|A0A518UD87_9PROT S-adenosylmethionine:tRN A ribosyltransferase-isomerase OS=Denitratisoma sp. DHT 3 OX=1981880 GN=queA PE=3 SV=1
MPTLDDFDYPLPPERIAQAPLAERAASRLLVMEGRRLRDRAIRDLPDLLLPGDLLVMNDTRVIHARLLGRKIGAVPEGNPAEVNLGGAVEVLLERPLADATEVLAQVRASKSPKPGSRLLLEDALTVEVLGREGEFYRLRFPGDALALAERHGRLPLPPYIERAAGDADESRYQTVFARERGSVAAPTAGLHFDQTLLESLRARGVETAHVTLHVGAGTFQPVRVQQLSEHRMHRERWQLPQATVDAIAACRARGGRVVAVGTTSLRTLESAALAGELKAGGGETDLFVTPGFRFRVVDLLLTNFHLPRSTLLMLVSAFGGMDHIRAAYRHAIEHEYRFFSYGDAMLIHRNPDDAI

SEQ ID NO: 65812 - protein, 358 aa, Denitrobacterium detoxificans
  misc_feature (1)..(358): tr|A0A172RW83|A0A172RW83_9ACTN S-adenosylmethionine:tRN A ribosyltransferase-isomerase OS=Denitrobacterium deto xificans OX=79604 GN=queA PE=3 SV=1
MKTSDFDYELPEECIAQAPWPVRDECRMLVMDRKTGELQDRIFRDIYEYAQPGDVFVANETRVMPARLLGAKRGTGGAAEVFLLRPHAGKIATNVSSAWEALVRPGKRLKPGAIVDFTDAEGKVILSAEVIDFKEDGKGERIVNLTTEAFPTLDEAVHAVGHTPLPPYIKGYEGDEEMYQTVYSRRESSAAAPTAGLHFTPELIERLKQKGVRWETVELQVGIDTFRIVEEEDPTTHAMHTETYTVPQHVVDACNEAHANGHRVIAVGTTSVRSLESAWDAEAGELKARDAAHTSLFLLPGSTFHVVDAMVTNFHVPRSTLMMLVSAFSSRDYIMNAYKHAIDSEYRMLSFGDAMFIQ

SEQ ID NO: 65813 - protein, 343 aa, Denitromonas halophilus
  misc_feature (1)..(343): tr|A0A557QX25|A0A557QX25_9RHOO S-adenosylmethionine:tRN A ribosyltransferase-isomerase OS=Denitromonas halophil us OX=1629404 GN=queA PE=3 SV=1
MTLTLDDFDYALPDALIAQAPLAERSASRLLVVGDDALSDRGITDLPELLGADDLLVFNDTRVIHARLFGQKATGGQVEVLIERPVGEHEAIAQVRASKSPKAGSTLRLADAFDVEVLGRVGDFFHLRFPADATVIDYTERYGALPLPPYITRAAGEADEARYQTVFARHPGSVAAPTAGLHFDDALLARIRDKGVRTAAVTLHVGAGTYQPVRVQNLAEHQMHREQYIVPAETVAAIEATRARGGRVVAVGTTSLRALESAAQSGLLVAGSGETELFIMPGYRFHVVDALVTNFHLPKSTLLMLVSALAGMGRIRAAYAHAVAQRYRFFSYGDAMFLSRRAS

SEQ ID NO: 65814 - protein, 343 aa, Denitromonas halophilus
  misc_feature (1)..(343): tr|A0A558CG44|A0A558CG44_9RHOO S-adenosylmethionine:tRN A ribosyltransferase-isomerase OS=Denitromonas halophil us OX=1629404 GN=queA PE=3 SV=1
MTLTLDDFDYALPDALIAQAPLAERSASRLLVVGSDALSDHGITDLPELLGADDLLVFNDTRVIHARLFGQKATGGQVEVLIERPVGEHEAIAQVRASKSPKAGSTLRLADAFDVEVLGRVGDFFHLRFPADATVIDYTERYGALPLPPYITRAAGEADEARYQTVFARHPGSVAAPTAGLHFDEALLARIRERGVRTAAVTLHVGAGTYQPVRVQNLAEHQMHREQYIVPAETVAAIEATRARGGRVVAVGTTSLRALESAAQSGLLVAGSGETELFIMPGYRFHVVDALVTNFHLPKSTLLMLVSALAGMDSIRAAYAHAVAQQYRFFSYGDAMFLSRRAS

SEQ ID NO: 65815 - protein, 341 aa, Denitrovibrio acetiphilus
  misc_feature (1)..(341): tr|D4H486|D4H486_DENA2 S-adenosylmethionine:tRNA ribosy ltransferase-isomerase OS=Denitrovibrio acetiphilus (st rain DSM 12809 / N2460) OX=522772 GN=queA PE=3 SV=1
MSEKRTPISDYDFDLPEELIAQYPAEKRGTSKLLVVNGEALYDKIFTDIVDLIDENSFLVINTTKVMKARLYGTKPTGGQVEILVLEKTSERICTAITKGKVKEGTVVNIPPFRAVITEILDDGSRVIEFDTDVSDVMDKCGHMPLPPYITREDTKKDTDRYQTIYSKDEGSVAAPTAGLHFTPEIMNALKAKGIEVLEVTLNIGIGTFRPVKADYLEDHDMHTEKYYISEETSDRINSLLKEGKKLVAVGTTAVRALESAAENGEVQAGYGETKLFIKPGYDFKVISSLITNFHLPKSTLFVLVSQLAGRRNMLNAYEHAKANGYKFFSYGDAMFISTKL

SEQ ID NO: 65816 - protein, 346 aa, Denitrovibrio sp.
  misc_feature (1)..(346): tr|A0A2N6D784|A0A2N6D784_9BACT S-adenosylmethionine:tRN A ribosyltransferase-isomerase OS=Denitrovibrio sp. OX= 2053308 GN=queA PE=3 SV=1
MSDIKTSIHDYDFELADEHIAQYPAEKRGASRLLVIDSCHPEQSERPVFDDKSFDDIVDMIDSDSFLVVNSTKVMKARMYGKKPSGGKVEILVLEKIDDNTCMAITKGKVKQGTKVEVGGHRALVTEILDDGSRIIVFDDNLNEVMDECGHMPLPPYIDREDTETDAERYQTIYSKEEGSVAAPTAGLHFTPEMFEALKTKGVEILEVTLSIGIGTFRPVKADYLEDHDMHTEKYFISKETSDEINRLKSIGKKLIAVGTTAVRTLESATVDGLVQAGYGETNLFIKPGYSFRVIDSLITNFHLPKSTLFVLVSQLAGRQKMLDAYEHAKENGYKFFSYGDATYIK

SEQ ID NO: 65817 - protein, 339 aa, Denitrovibrio sp.
  misc_feature (1)..(339): tr|A0A2N6DHX0|A0A2N6DHX0_9BACT S-adenosylmethionine:tRN A ribosyltransferase-isomerase OS=Denitrovibrio sp. OX= 2053308 GN=queA PE=3 SV=1
MSEIKTPISDYDFHMPEELIAQFPAKKRGESKLLVTRPDGTLEDKEFSDINYIVAKNSFMVINTTKVMKARILGSKDTGGQVEILVLEKLTDNTCVAITKGKVKLGTVVNVGKHHAVVKEILEDSSRVVEFDITVSEAMELYGHMPLPPYIRRGDAESDAERYQTVYSKDDGSVAAPTAGLHFTPKILDKLKKKGIPILEISLSIGIGTFRPVKVDFLEDHEMHTEKYFISEEVAAEINKFKSEGKKLVAVGTTAVRALESATEDNGVKAGYGETNLFIKPGYKFKMVDELVTNFHLPKSTLFVLVSELAGRERMIEAYNHAKKNKYRFFSYGDAMYIK

SEQ ID NO: 65818 - protein, 372 aa, Dermacoccaceae bacterium
  misc_feature (1)..(372): tr|A0A563DWA5|A0A563DWA5_9MICO S-adenosylmethionine:tRN A ribosyltransferase-isomerase OS=Dermacoccaceae bacter ium C5-26 OX=1660198 GN=FGL98_16870 PE=3 SV=1
MKTLSSTPTTHFPQPDLSIAPAPAEQRGLARDEVRLLVATPAGITHARFRDLPDQLVPGDLVVVNNSATVAGEIDARMDAGGRAGTKIVLHVAGQLDDGGWVVELRTWPDASAAILGAEPDVHLEIGDLTLTLLAPYPGEGSTPTGHGNRLWRATVDGNLRRALDEGGRPIAYGYLDRRYPLSAYQSVFATVPGSAEMPSAGRPFSQAVITRLVAAGVSIAPVTLHTGVSSQEAGEAPQTEWFEVPSWSAALLNATRAAGGRVIAVGTTVTRALESAVGADGSVHEARGWTDRVVSPQDPARVVDGLITGWHDPQASHLLLVESVAGSELTQAAYDAAVAQGYLWHEFGDSALLLRGASQSTLSGCDLGHRA

SEQ ID NO: 65819 - protein, 343 aa, Desemzia incerta
  misc_feature (1)..(343): tr|A0A1I5W142|A0A1I5W142_9LACT S-adenosylmethionine:tRN A ribosyltransferase-isomerase OS=Desemzia incerta OX=8 2801 GN=queA PE=3 SV=1
MLTTEDFDFDLPEELIAQTPLADRSSSKLLVLDKETGKMKDTHFTSIIDELNPGDALVMNDTRVLPARLYGVKPDTGGHLEVLLLKNIEGDQWETLIKSAKKAKKGTIIHFGDGRLKAEVKEELEHGGRIVEFSYEGIFLEVLESLGEMPLPPYIKEKLEDKERYQTVYAKENGSAAAPTAGLHFTPELLEQIKAKGVELVFLTLHVGLGTFRPVSVDNIEEHKMHAEFYRLTQEAADKLNQVRANGGRIVAVGTTSIRTLETIGTKFDGEIKADSGWTDIFIAPGYQFKVVEAFSTNFHLPKSTLVMLVSAFAGRDHVLSAYEHAVNEKYRFFSFGDAMFVK

SEQ ID NO: 65820 - protein, 387 aa, Desertifilum sp.
  misc_feature (1)..(387): tr|A0A1E5QFS4|A0A1E5QFS4_9CYAN S-adenosylmethionine:tRN A ribosyltransferase-isomerase OS=Desertifilum sp. IPPA S B-1220 OX=1781255 GN=queA PE=3 SV=1
MCPVDFDSAPSFSTDPNSGEIDRNLNAYDYELPLERIAQNPVNPRDRSRLLVVDSPTQHQHRLFCDLPELLQPGDLLVLNNTRVLPARLYGCKSTGAPVEVLLLERQQNRTWLALVKPGRRVKIGAQLIFHPLDSDGGDPLCAKVIARDDATGGRLLEFDIPEGESLEARLDRYGRVPLPPYITESEALPEQYQTVYAQQPGSAAAPTAGLHFTPELLQRLQERQIETAYVTLHVGVGTFRPVEVEDITQHTMHSEWLEVSPEVVEKIQQTQAKGGRVIAVGTTAVRALEGTAAVAQQQGESTPLVAHEGKTNLFIYPGYQWQVVDGLITNFHLPRSSLLMLVSALIGRQRLLDLYAEAIAQEYRFYSFGDAMLILPDARQYWGKTD

SEQ ID NO: 65821 - protein, 343 aa, Desmospora activa
  misc_feature (1)..(343): tr|A0A2T4Z8U9|A0A2T4Z8U9_9BACL S-adenosylmethionine:tRN A ribosyltransferase-isomerase OS=Desmospora activa DSM 45169 OX=1121389 GN=queA PE=3 SV=1
MDVSQFDYHLPEELIAQTPAEERSGSRLMVLHRKDGRIEHRRFPDWLDYVQAGDVWVVNDTRVRPARLIGVKEDTGAQIELLLLKPMGEGRWEALVKPAKRVKEGTVISFGDGLLRAEAQEKAEIAGGRVFKLLHGEEELEPLFERLGEMPLPPYIRERLDQPERYQTVYAREVGSAAAPTAGLHFTPALLEEAKKRGVHIVPITLHVGLGTFRPVTVERVEEHRMHAEYFEVSEESAHMIREAKQKGKRICAVGTTSVRTLESVVQKYGEIQAAQGWTDIFIHPGYSFQVVDGLLTNFHLPRSTLMMLISAFAGRENVLAAYREAVQERYRFFSFGDAMLIV

SEQ ID NO: 65822 - protein, 311 aa, Desmospora sp.
  misc_feature (1)..(311): tr|F5SAR7|F5SAR7_9BACL S-adenosylmethionine:tRNA ribosy ltransferase-isomerase (Fragment) OS=Desmospora sp. 843 7 OX=997346 GN=queA PE=3 SV=1
REDQTVEHRRFPDLLEYLHPGDVLVLNDTRVRPARLVGVKEGTGARIELLLLNPLGGDRWEALVKPAKRVKEGTVVRFGDGKLQAVAQEMTEAAGGRVFQLQYQEQDLEILLERLGEMPLPPYIHRRLDEPERYQTVYSRAVGSAAAPTAGLHFTEDLLNRAKEKGVKIVTITLHVGLGTFRPVTAESIEEHQMHAEFYEVSEEAAEQIRVAKAKGNRVVAVGTTSVRTLETVARDHGEIRAARGWTDIFIYPGFPFRVTDALLTNFHLPKSTLLMLVSAFSSRELMLQAYRTAVREKYRFFSFGDAMLIL

SEQ ID NO: 65823 - protein, 351 aa, Desulfacinum hydrothermale
  misc_feature (1)..(351): tr|A0A1W1X9C5|A0A1W1X9C5_9DELT S-adenosylmethionine:tRN A ribosyltransferase-isomerase OS=Desulfacinum hydrothe rmale DSM 13146 OX=1121390 GN=queA PE=3 SV=1
MAYNLDDYDYALPQHLVAQHPDASRDACRLLVLHRTTGAVEHRSFSDVKDYLRPGDLLVVNDTQVVPARLLGRKETGGRVELLVLDPYQDPEAGRREGYTCLVKASKPPRKGMRLRLEETLQVTVLSDPVDGRARVLFHCDDLLDALEKWGRVPLPPYIERDNRAQLHEDRHRYQTVYAHRPGAVAAPTAGLHFTEELLRDLEGAGVRTARLTLHVGYGTFAPIRVRDIREHTMHAEYAEISSQAAEAVRSAQLEGRRVVAVGTTVVRTLEWVAARCGEVRAWSGLCRHYIYPGYRFRVVDAMITNFHLPKTSLILLVSAFAGRERILAAYRQAVERRYRFFSYGDAMLIL

SEQ ID NO: 65824 - protein, 351 aa, Desulfacinum infernum
  misc_feature (1)..(351): tr|A0A1M4VF11|A0A1M4VF11_9DELT S-adenosylmethionine:tRN A ribosyltransferase-isomerase OS=Desulfacinum infernum DSM 9756 OX=1121391 GN=queA PE=3 SV=1
MVYNLEDYDYELPQELVAQHPDPNRDACRLLVLNRRTGTVEHRLFSDLKEYLRPGDLLVVNDTRVVPARLLGRKETGGRVELLVLDPYKDPETGMREGYACLVKASKPPRKGMRLLLEDALEATIASDPVDGQAQVLFRCPDLLDALEKWGRIPLPPYIQRENHVQREEDRRDYQTVYARRPGAVAAPTAGLHFTEDLLRDLESRGVLTARLTLHVGYGTFAPIRVRDIRRHTMHAEYAEISPEAAEAVASAKSQGRRVVAVGTTVVRTLEWVAEQCGGIRAWAGLCRHYIYPGYRFRVVDALITNFHLPKTSLILLVSAFAGREKILDAYRQAVERRYRFFSYGDAMLIF

SEQ ID NO: 65825 - protein, 340 aa, Desulfallas geothermicus
  misc_feature (1)..(340): tr|A0A1I6EBJ8|A0A1I6EBJ8_9FIRM S-adenosylmethionine:tRN A ribosyltransferase-isomerase OS=Desulfallas geothermi cus DSM 3669 OX=1121426 GN=queA PE=3 SV=1
MQIKDFDYYLPEELIAQEPEPRRDESRLMVLPKNGGAPEHKLFKDIVEYIDARDVLVINNTRVIPARLWGEKEGTGTTIEVLLLTRRGEHTWEVLVRPGRRVPPGTGIIFGEELRGTVEAVADEGCRIIKFQYEGIFEQILDRLGVMPLPPYIKKQPADPNRYQTVYARRPGSAAAPTAGLHFTPELLKTIKDNGTQIVTVLLHVGLGTFRPVKVDDITRHRMHAEYFEITPETARVINETRGRGGRVIAVGTTTTRCLETAGREDGTVQPGSGWTDIFIYPGYTFRVIDGLITNFHLPRSTLLMMVSALAGRERMLEAYAEAVRKRYRFFSFGDAMLII

SEQ ID NO: 65826 - protein, 340 aa, Desulfallas gibsoniae
  misc_feature (1)..(340): tr|R4KDH9|R4KDH9_9FIRM S-adenosylmethionine:tRNA ribosy ltransferase-isomerase OS=Desulfallas gibsoniae DSM 721 3 OX=767817 GN=queA PE=3 SV=1
MRVADFDYYLPDELIAQEPAPVRDESRLMVLHKNGGEPEHRLFKDIVEYLEPRDLLVVNDTKVIPARLWGKKEGTGTTIEVLLLTRRDEHTWETLVRPGRRVPPGTNIIFGDAMTGTVMAVVDEGCRLIKFHHQGVFEELLDRLGVMPLPPYIKKQPADPGRYQTVYARDPGSAAAPTAGLHFTPELLQKIREKGISIVPVLLHVGLGTFRPVKVDEVTSHQMHAEYYSVPEETARVINETKARGGRVIAVGTTTTRCLETAARDDGNVNSGAGWTEIFIYPGYNFKAIDGLVTNFHLPRSTLLMMVSALVDRERLLDAYARAVRMRYRFFSFGDAMLII

SEQ ID NO: 65827 - protein, 390 aa, Desulfamplus magnetovallimortis
  misc_feature (1)..(390): tr|A0A1W1HA08|A0A1W1HA08_9DELT S-adenosylmethionine:tRN A ribosyltransferase-isomerase OS=Desulfamplus magnetov allimortis OX=1246637 GN=queA PE=3 SV=1
MYLLSNYSYSLPEELIAQYPVAQRDSSRMMHLDRKNGRTSHHSFREIELMLRDGDLVVVNNTKVIPARLKGVKQSGGKVEVLLLDYAGGVRMQEEKGIFQCECMIRASKSPKAGTFLFLYSNVENAIGSGDGCIRARVEENLGAVFMVSFFCKGDFTEELAKYGQIPLPPYIRRDGQKRELQERDRLNYQTVYASKEGAVAAPTAGLHFTDGLIGRLKKRGIRFAEITLHVGYGTFSPVRVKDIREHQIHSEFFSISEECARAINSAKKEGRRVIAVGTTSVRTLEYAALQAETLQHSLDDHCYQSDASERKSLLTDAVKSGSGTCDLFIYPGYQFRVVDAMVTNFHLPESTLLMLVSAFCDRKMILGAYQEAVEKKYRFFSYGDAMFIE

SEQ ID NO: 65828 - protein, 365 aa, Desulfarculus baarsii
  misc_feature (1)..(365): tr|E1QIL5|E1QIL5_DESB2 S-adenosylmethionine:tRNA ribosy ltransferase-isomerase OS=Desulfarculus baarsii (strain ATCC 33931 / DSM 2075 / VKM B-1802 / 2st14) OX=644282 GN=queA PE=3 SV=1
MTPLPASPQSPQRLDPLADYDYDLPPELVAQKPAPRRVQARLMALGRDGGPARHLRVAHLCKLLRPGDILVLNDTKVVPARLLVGKESGGRAEVFLLNPALPLERLVDGRERHQALVRAHRPVRPGQRLSLAGADGPWIFVLERGQRGQAVVELPSGALGLAQRFGQAPLPPYIRRPNGPSDDDVRRYQTVYAAKAGAVAAPTAGLHLSHELLAALQRRGVNIARLTLHVGYGTFAEPAPEDLARGRLHAEWVEIDEAACQAVATARAAGGRVIAVGTTSMRALEWLAGPGGAPRPRRGWCDILIQPGHRFRAADGLLTNFHLPRTTLLMLVAALIGRERVLAAYAEAVRQRYRFYSFGDGMLIV

SEQ ID NO: 65829 - protein, 363 aa, Desulfarculus sp.
  misc_feature (1)..(363): tr|A0A3A6P789|A0A3A6P789_9DELT S-adenosylmethionine:tRN A ribosyltransferase-isomerase OS=Desulfarculus sp. OX= 2093367 GN=queA PE=3 SV=1
MILASPKSEQGCDPLAAYDYHLPPGLIAQGPARRRVQARLMLLGKNGGGAVHEKVARLTRLLRPGDLLVLNQTQVVPARLLAYKPSGGRVEVLLLSPAQPLERLAGGGELHQCLLRSHRPLGPGARLLLRGQPELWLEVRERRARGQAVVEFPGPALAVAQERGQTPLPPYIKRPLGPGPQDRERYQTVYAACPGAVAAPTAGLHLSRELLAALGRRGVEMAALTLHVGYGTFAEPSAADLAAGRLHAEWVETAPALSQAVARTKARGGRVIAVGTTSLRALEWRVGPGGVPQPGQGWCDLLIAPGHEFRVTDGLLTNFHLPRTTLLMLVAALAGRERVLEAYAEAVTRRYRFYSFGDAMLII

SEQ ID NO: 65830 - protein, 359 aa, Desulfatibacillum aliphaticivorans
  misc_feature (1)..(359): tr|B8FI52|B8FI52_DESAL S-adenosylmethionine:tRNA ribosy ltransferase-isomerase OS=Desulfatibacillum aliphaticiv orans OX=218208 GN=queA PE=3 SV=1
MTEPTQDFYSLASYDYELPEELIAQAPAEKRDASRLLKLDKNTGQTAHLQFAQAADLLQPGDLMVVNDTKVTPVRLFGKKETGGKVEALIIDYRPVAQAGPGEPFACECLVKASKRPKPGSRLFFDKGLKAKVLKAEDRICLLEFTCPTEPGAVLDDIAAIPLPPYIRRGGDAPPCNDRERYQTTYARHKGAVAAPTAGLHFTPELLDFIQAKGVEFVRITLHVGYGTFMPVRVDDVRKHKMHSEFYEISPEAAQAINHAKDQGRRVVAVGTTSVRTLEYSSREEGRVAAGSGMCDLFIMPGFRFNIVDALITNFHLPQSTLLMLVSALAGRENILAAYQEAVAEKYRFFSYGDAMFIE

SEQ ID NO: 65831 - protein, 359 aa, Desulfatibacillum alkenivorans
  misc_feature (1)..(359): tr|A0A1M6HVJ8|A0A1M6HVJ8_9DELT S-adenosylmethionine:tRN A ribosyltransferase-isomerase OS=Desulfatibacillum alk enivorans DSM 16219 OX=1121393 GN=queA PE=3 SV=1
MTEPTQDFYSLASYDYELPEELIAQAPAEKRDASRLLRLDKNTGQTAHLQFAQAADLLQPGDLMVVNDTKVTPVRLFGKKETGGKVEALIIDYRPVAQAGPGEPFACECLVKASKRPKPGSRLFFDKGLKAKVLTAEDRICLLEFTCSTDPDAVLDEIAAIPLPPYIRRDGDAPPCNDRERYQTTYARHKGAVAAPTAGLHFTPELLDSIKAKGVEFVRITLHVGYGTFMPVRVDDVRKHKMHSEFYEISPDAALAINQAKDQGRRVVAVGTTSVRTLEYSSREEGRVVAGSGMCDLFIMPGFRFNIVDALITNFHLPQSTLLMLVSALAGRESILAAYKQAVENKYRFFSYGDAMFIE

SEQ ID NO: 65832 - protein, 337 aa, Desulfatitalea sp.
  misc_feature (1)..(337): tr|A0A0F2R3X1|A0A0F2R3X1_9DELT S-adenosylmethionine:tRN A ribosyltransferase-isomerase OS=Desulfatitalea sp. BR H_c12 OX=1629708 GN=queA PE=3 SV=1
MPEAAIAQQPAAVRDHSRLLHLERTSGRLAHHRFGDVGGLLRAGDVLVLNNTEVIPGRLLGCKHSGGKVEALILDYAQGAAQKKFTCLVKASKRPRPGARLIFGEALEATVVAVQERTCTLAFECDQDFSQVLQRIGHVPLPPYIRRSDTLEDQHTYQTVYAAHKGAIAAPTAGLHFTRPLLAQLAEQGVQIVYLTLHVGYGTFLPVESDDIRQHRMHSEWFTVPEQTSAVVNAAKANGGRVVAVGTTSVRTLEYCTGADGRLTPQSGQCDLFMYPGYTFKLVDGMVTNFHLPKSTLLMLVSAFAGREKILEAYAEAIRKGYRFYSYGDAMIIINEV

SEQ ID NO: 65833 - protein, 340 aa, Desulfitibacter sp.
  misc_feature (1)..(340): tr|A0A101V9Q1|A0A101V9Q1_9FIRM S-adenosylmethionine:tRN A ribosyltransferase-isomerase OS=Desulfitibacter sp. B RH_c19 OX=1734395 GN=queA PE=3 SV=1
MKVSEFDFHLPTHLIAQEPINQRDMSRLIVLHRAGQSIEHKSFHQLPEYIEEGDLLVLNQTKVLPARLLGTKDTGANVELLLLKRLEGDNWDCLVRPGKKLKPGIKIYFGNGDLEGEIIDYTDSGGRIVRFYYQGIFEEVLDRLGEMPLPPYIQKELKDKNRYQTVYAKEQGSAAAPTAGLHFTEDLFKRIEDKGIQTAFLTLHVGLGTFRPLKTENVEEHTMHSEYFSISQETADLINVTKNSGKKVFAVGTTSIRTLETVADSKGQVHGTSGWTDIFIYPGYRFKVVDGIITNFHLPKSSLIMLISAFAGTDFIKEAYQKAIEEQYRFYSFGDAMLII

SEQ ID NO: 65834 - protein, 341 aa, Desulfitobacterium chlororespirans
  misc_feature (1)..(341): tr|A0A1M7U7N9|A0A1M7U7N9_9FIRM S-adenosylmethionine:tRN A ribosyltransferase-isomerase OS=Desulfitobacterium ch lororespirans DSM 11544 OX=1121395 GN=queA PE=3 SV=1
MKLEDFDFELPEDRIAQHPVEPRDSSRLMVMNPSTGEIEHRVFRELPELLQAGDVLVVNNTRVIPARLIGEKEGTQAKIECLLLTRRDKDVWETLIKPGKRLKAGQTVVFGDGLLRGELLEILPDGNRLVRFDYQGIFEEVLDRLGNMPLPPYITEQLKDKERYQTIYAKESGSAAAPTAGLHFTPELLERLQDKGVEIVEILLHVGLGTFRPVKVDNVEEHTMHSEYYRVAPEAAERINRAKSQGRRVIAVGTTAARTLESVAEENGRIAGKEGWTDIYIYPGYTFKILDGMITNFHFPKSTLVMLVSALAGRDQILKAYQIAIAEGYRFYSFGDAMMIL

SEQ ID NO: 65835 - protein, 341 aa, Desulfitobacterium dehalogenans
  misc_feature (1)..(341): tr|I4ABK2|I4ABK2_DESDJ S-adenosylmethionine:tRNA ribosy ltransferase-isomerase OS=Desulfitobacterium dehalogena ns (strain ATCC 51507 / DSM 9161 / JW/IU-DC1) OX=756499 GN=queA PE=3 SV=1
MKLEDFDFDLPVDRIAQHPVEPRDSSRLMVMNRSTGEIEHHVFRELPELLQAGDVLVVNNTRVIPARLIGEKEDTQAKIECLLLTRREKDVWETLIKPGKRLKAGQTVVFGEGLLRGELMEILPDGNRLVRFDYEGVFESVLDQLGNMPLPPYITEQLEEKERYQTVYAKESGSAAAPTAGLHFTPELLERLKDKGVEIVEILLHVGLGTFRPVKVDNVEEHAMHSEYYRVSHEAAERINRAKGQGRRVIAVGTTASRTLESVTKENGRVEGKEGWTDIYIYPGYTFKILDGLITNFHFPKSTLVMLVSAFAGREEILRAYHIAIEGGYRFYSFGDAMMIL

SEQ ID NO: 65836 - protein, 341 aa, Desulfitobacterium dichloroeliminans
  misc_feature (1)..(341): tr|L0FBB3|L0FBB3_DESDL S-adenosylmethionine:tRNA ribosy ltransferase-isomerase OS=Desulfitobacterium dichloroel iminans (strain LMG P-21439 / DCA1) OX=871963 GN=queA P E=3 SV=1
MKVDDFDFDLPEELIAQHPLEPRDASRLMRVNRSSGGIDHLVFHDLPDLLRAGDVLVVNNTKVIPARLIGEKEDTQAKIECLLLTRREKDIWETLIKPGKRLKMGQTVVFGNGLLRGKLLEILPDGNRVMQFSYEGVFEAVLDALGNMPLPPYITEQLEDKDRYQTVYAKESGSAAAPTAGLHFTPELIEQLRAKGVEIVEILLHVGLGTFRPVKADVLEEHEMHSEYYRVSGVAAEQINQAKAQGRRVIAVGTTAARTLESVAKENGLITAQEGWTDIFIYPGYTFKVLDGLITNFHFPKSTLIMLVSALAGRERILDAYHLAVQERYRFYSFGDAMLIL

SEQ ID NO: 65837 - protein, 341 aa, Desulfitobacterium hafniense
  misc_feature (1)..(341): sp|Q24UN9|QUEA_DESHY S-adenosylmethionine:tRNA ribosylt ransferase-isomerase OS=Desulfitobacterium hafniense (s train Y51) OX=138119 GN=queA PE=3 SV=1
MKLEDFDFELPEDRIAQHPVEPRDSSRLMVMNRWTGEIEHRVFRELPELLQAGDVLVVNNTRVIPARLIGEKEGTQAKIECLLLTRRDKDVWETLIKPGKRLKAGQTVVFGDGLLRGELLEILPDGNRLVRFNYQGIFEEVLDQLGNMPLPPYITEQLQDKERYQTIYAKESGSAAAPTAGLHFTPELLERLQDKGVEIVEILLHVGLGTFRPVKVENVEEHTMHSEYYRVTPDAAERINRAKSQGRRVIAVGTTASRTLESVAGENGRIEGKEGWTDIYIYPGYTFKILDGLITNFHFPKSTLVMLVSALAGRDQILKAYQIAIAEGYRFYSFGDAMMIL

SEQ ID NO: 65838 - protein, 341 aa, Desulfitobacterium hafniense; identical to SEQ ID NO: 65837
  misc_feature (1)..(341): sp|B8FQV3|QUEA_DESHD S-adenosylmethionine:tRNA ribosylt ransferase-isomerase OS=Desulfitobacterium hafniense (s train DCB-2 / DSM 10664) OX=272564 GN=queA PE=3 SV=1

SEQ ID NO: 65839 - protein, 341 aa, Desulfitobacterium metallireducens
  misc_feature (1)..(341): tr|W0EE44|W0EE44_9FIRM S-adenosylmethionine:tRNA ribosy ltransferase-isomerase OS=Desulfitobacterium metallired ucens DSM 15288 OX=871968 GN=queA PE=3 SV=1
MELSEFDFYLPQELIAQHPVEPRDSSRLMAVNRTSGEIEHHIFHELPDLLQPGDVLVVNNTRVIPARLIGEKEGTGAHIECLLLKRIERDVWEVLIKPGKRLKEGQKVSFGGGKLIGELLEILPDGNRIIRFSYEGIFEAVLDELGNMPLPPYITEKLENKERYQTVYAKESGSAAAPTAGLHFTRELMDQLRQKGIEIVEILLHVGLGTFRPVKVEKIEEHEMHSEYYRVSPEVAERINRAKQEGRRVIAVGTTASRTLESVGQENGLIRAGEGWTNIFIYPGYSFKVVDALITNFHFPKSTLVMLVSALAGRDLIMKAYELAVQERYRFYSFGDAMLIL

SEQ ID NO: 65840 - protein, 341 aa, Desulfitobacterium sp.; identical to SEQ ID NO: 65837
  misc_feature (1)..(341): tr|A0A562HP74|A0A562HP74_9FIRM S-adenosylmethionine:tRN A ribosyltransferase-isomerase OS=Desulfitobacterium sp . LBE OX=884086 GN=queA PE=3 SV=1

SEQ ID NO: 65841 - protein, 353 aa, Desulfobacca acetoxidans
  misc_feature (1)..(353): tr|F2NDW7|F2NDW7_DESAR S-adenosylmethionine:tRNA ribosy ltransferase-isomerase OS=Desulfobacca acetoxidans (str ain ATCC 700848 / DSM 11109 / ASRB2) OX=880072 GN=queA PE=3 SV=1
MKMYSINDYDYHLPPQLIAQEPLPQRDQARMLVLERAAGVIRHCRFTQLPEFLSDRDVLVVNNTQVFPARLRGCKASGGRVEVLLLQPPTPEGNGDVPRQARVPAWYRASKPPKVGQMLNFGLELEGEITAVGPAGEITLLLQSQGRDIRQVVAEAGAMPLPPYIRRLAGPEDTLRYQTIFAHRLGAIAAPTAGLHFTPALLHQLEAGGVEVVSLTLHVGPGTFQPVREEDYSRHRLAPEYFLLSAESAAAINRARAGGKHIVAVGTTTVRVLESQYCQGQVFAGEGYCDLFIYPRYRFNVVDRLITNFHLPKSTLLLLVSAFAGREFVLRAYQEAIAARYRFYSYGDCMLII

SEQ ID NO: 65842 - protein, 352 aa, Desulfobacca sp.
  misc_feature (1)..(352): tr|A0A1V4QL59|A0A1V4QL59_9DELT S-adenosylmethionine:tRN A ribosyltransferase-isomerase OS=Desulfobacca sp. 4484 _104 OX=1940691 GN=queA PE=3 SV=1
MEHSIHSFDYQLPPALVAQYPQSRRDQSRLLVLVRNPGRWHHTRFSDLPAWLDDRDLLVVNDTQVFPARLRGRKNSGGQVELLLLGLPVIQENGSNSQIAQGRGWYRASRRLKVGQRLEFGDDLHAEVIAGNGSREIEVRFWTDKLDILQALSAAGEVPLPPYIRRAPESQDGERYQTIFATRPGAVAAPTAGLHFTPEILAALKRRGVEVVSLTLHVGPGTFQPVQEENYTRHRLAPEYYQLSVESAARINRARASGKRIVAVGTTTVRVLESQGDEGVVRPGEGQCDLFIYPGYRFKVVDRLLTNFHLPRSTLLLLVSALAGRELVLQAYQEAVAQQYRFYSYGDCMLII

SEQ ID NO: 65843 - protein, 363 aa, Desulfobacter hydrogenophilus
  misc_feature (1)..(363): tr|A0A328FED3|A0A328FED3_9DELT S-adenosylmethionine:tRN A ribosyltransferase-isomerase OS=Desulfobacter hydroge nophilus OX=2291 GN=queA PE=3 SV=1
MYNLSDYCYNLPDSLIAQAPCEHRSLSRLMYLDRKNHGISHRRFFDIADLLRPGDLLVVNDTRVVPARLLGHKPTGGRVEVLIIDYAAGMKHLAETGSFQCDCLIRASRRPEPGTVLDLGQDIKATVMEHRDRISVVSFGGGHHFLSQLKKTGKMPLPPYIKRNQNPGPGEGIPAHMDEHRDRHDYQTVYANAEGAVAAPTAGLHFTKELLATLSEKGVDVARITLHVGYGTFVPVRVKDIRDHQIHSEYFIIDDQTAETINRARSDGRRVIAVGTTSVRTLEFCTNERGRISAGQGRCDLFIYPGYRFKCVDAMITNFHLPESTLLMLISAFYDRERILDAYKVAVAEKYRFFSYGDAMFIE

SEQ ID NO: 65844 - protein, 363 aa, Desulfobacter postgatei
  misc_feature (1)..(363): tr|I5B5B3|I5B5B3_9DELT S-adenosylmethionine:tRNA ribosy ltransferase-isomerase OS=Desulfobacter postgatei 2ac9 OX=879212 GN=queA PE=3 SV=1
MYNLSDYRYNLPESLIAQTPCEHRSLSRLMHLDRRSHDISHRRFLDIADLLRPGDLLVVNDTRVVPARLLGHKPTGGRVEVLIIDYAAGMKHLADTGRFQCDCLIRASRRPEPGTVLELGQDITATVIEHRDRISVVCFNGGNDFLFRLKKSGKMPLPPYIKRDQNPGQGAGTPAQMDEQKDRQDYQTVYATAEGAVAAPTAGLHFTEDLLAALSAKGVDVVRITLHVGYGTFVPVRVKDIRDHQIHSEYFIVDEQAAEKINRARGAGCRVIAVGTTAVRTLEFCTDACGRISAGQGRCDLFIYPGYRFKCVDAIITNFHLPESTLLMLISAFYDRERILDAYKVAVDEKYRFFSYGDAMFIE

SEQ ID NO: 65845 - protein, 363 aa, Desulfobacter sp.; identical to SEQ ID NO: 65844
  misc_feature (1)..(363): tr|A0A348UVH6|A0A348UVH6_9DELT S-adenosylmethionine:tRN A ribosyltransferase-isomerase OS=Desulfobacter sp. OX= 2294 GN=queA PE=3 SV=1

SEQ ID NO: 65846 - protein, 363 aa, Desulfobacter sp.
  misc_feature (1)..(363): tr|A0A357YV10|A0A357YV10_9DELT S-adenosylmethionine:tRN A ribosyltransferase-isomerase OS=Desulfobacter sp. OX= 2294 GN=queA PE=3 SV=1
MYNLSDYRYNLPESLIAQTPCEHRSLSRLMHLDRRSHDISHRRFLDLADLLRPGDLLVVNDTRVVPARLLGHKPTGGRVEVLIIDYAAGMKHLADRGRFQCDCLIRASRRPEPGTVLELGQDITATVIEHRDRISVVCFNGGNDFLFRLKKSGKMPLPPYIKRDQNPGQGAGTPAQMDEQKDRQDYQTVYATAEGAVAAPTAGLHFTEDLLAALSAKGVDVVRITLHVGYGTFVPVRVKDIRDHQIHSEYFIVDEQAAEKINRARGAGCRVIAVGTTAVRTLEFCTDACGRISAGQGRCDLFIYPGYRFKCVDAIITNFHLPESTLLMLISAFYDRERILDAYKVAVDEKYRFFSYGDAMFIE

SEQ ID NO: 65847 - protein, 341 aa, Desulfobacteraceae bacterium
  misc_feature (1)..(341): tr|A0A1W9LG85|A0A1W9LG85_9DELT S-adenosylmethionine:tRN A ribosyltransferase-isomerase (Fragment) OS=Desulfobac teraceae bacterium A6 OX=1934249 GN=BWK74_07465 PE=3 SV =1
MFYLSDYDYELPEESIAQKPAFCRDRSKLLLLDKNTGKTFHHEFFELFDFISSKYLLVINNTRVIPGRLFGNKDTGGKAEVLILDFAGGIRDEADKGAFTCECLVKTSKPPRPGSLIFFDKELKAEVINAKEGIYLLKFSSPADFEDVINEIGDVPLPPYIKRNNGGNESWDDKTSYQTVYAAHKGAVAAPTAGLHFSKELLERIKSKGVRIAEITLHVGYGTFLPVRVSDIREHKIHSERFEISGDAAGAINKTRAEGGRVVAVGTTCVRTLEYASDSKGKVIAGSAQCDLFIYPGYRFKTVDAMITNFHLPKSTLLMLVSAFAGRERVLSAYREAIYKG

SEQ ID NO: 65848 - protein, 205 aa, Desulfobacteraceae bacterium
  misc_feature (1)..(205): tr|A0A3A4ZBS2|A0A3A4ZBS2_9DELT S-adenosylmethionine:tRN A ribosyltransferase-isomerase (Fragment) OS=Desulfobac teraceae bacterium OX=2049433 GN=C4582_05245 PE=3 SV=1
EEMGQVPLPRYIRRDKDDPGRELDRDRYQTVYARVPGAVAAPTAGLHFTGELLGRIKEKGILVCPITLHVGYGTFQPVRVNDIRLHRLATERYRIEKDSAEKITEARKQGRRVVAVGTTVVRALESSALRTGEVTAGEGETDLLIFPGFSFSVVDSLVTNFHLPRSSLLFLVAAFAGFDFIMEAYRYAVRQRFRFFSYGDAMLII

SEQ ID NO: 65849 - protein, 354 aa, Desulfobacterales bacterium
  misc_feature (1)..(354): tr|A0A1E7GI52|A0A1E7GI52_9DELT S-adenosylmethionine:tRN A ribosyltransferase-isomerase OS=Desulfobacterales bac terium S3730MH5 OX=1869298 GN=queA PE=3 SV=1
MHLLNDYNYSLPPEIIAQAPASRRDESRLMVLEKKSRGISHYRFSDIARLLCPGDVLVVNDTSVIPARLIGSKETGGRVEVLLLDNPGQSAGSQDRGHLTCECLVKTSKRPGIGSKFHFNEGLQAVVLGRANGLCKLEFRFKGDFDTLLNKIGLVPLPPYIKRDKTKPSPCDDQACYQTVYAKKRGAVAAPTAGLHFSRELLNDLAEKGVEIVPITLHVGYGTFLPVRVMDIRKHRMHPEVYDLTLSAAKAINKARDEGRRIIAVGTTAVRVLEFASDPGGRVLAGSGECDLFIHSGFRFRVIDALITNFHLPETTLLMLVAAFAGREFILNAYQTAIRRKYRFYSYGDAMLIW

SEQ ID NO: 65850 - protein, 353 aa, Desulfobacterales bacterium
  misc_feature (1)..(353): tr|A0A2M6ZCX3|A0A2M6ZCX3_9DELT S-adenosylmethionine:tRN A ribosyltransferase-isomerase OS=Desulfobacterales bac terium CG07_land_8_20_14_0_80_52_14 OX=1973982 GN=queA PE=3 SV=1
MYRRKDYQYDLPEERVAQVPTRPRDRSKLLVLERQTGETAHYHFFDLPDLLSSGDLLVINNTEVIPARLFGKKETGGKAEVLILDYPEAGDGIDGGEAMVCRCLVKSAKRPRPGMSIEFDGPLTGKVIEGKDGIYSIRFTFEGEFMDVLGRLGRIPLPPYIRRESGILSPEDARDYQTVYARQKGAIAAPTAGLHFTPALLESLKKRGILITEITLHVGYGTFLPVRCVDIREHRMHAEGYTVSDETAAMVNSARSKGSRIVAVGTTCVRTLEFISDEKGRVTSGIGRCDLFIYPGYPFKIVDAMITNFHLPQSTLLMLVSAFAGRKRILDAYQEAIRLGYRFYSFGDAMLIL

SEQ ID NO: 65851 - protein, 352 aa, Desulfobacterium autotrophicum
  misc_feature (1)..(352): tr|C0QKY3|C0QKY3_DESAH S-adenosylmethionine:tRNA ribosy ltransferase-isomerase OS=Desulfobacterium autotrophicu m (strain ATCC 43914 / DSM 3382 / HRM2) OX=177437 GN=qu eA PE=3 SV=1
MYRLSDYCYNLPQERIAQTPCQQRDGSRLLRLDRKSGDVTHHGFQDLVTLLNPDDLLVINNTRVVPARLMGKKTTGGVIEVMIVDYAAGLNCLAGNGYFQCDCLVRASKSPKIGAVLELGDEITARVQARKGGLFELKFSCAGDVVQAIKRHGQLPLPPYIHRTNGLEPGDETDYQTVYAANEGAVAAPTAGLHFTDTLMETLRAKGIEFCEITLHVGYGTFVPVRVDDIREHQIHRESFEISEAAAAAVNRAKKAGRRVVAVGTTSVRTLEYGADETGLIHPGSGVCDLFIYPGYRFKLIDAMITNFHLPESTLLMLVSAFAGKDPIFRAYGAAIQSNYRFFSYGDAMLID

SEQ ID NO: 65852 - protein, 360 aa, Desulfobacterium sp.
  misc_feature (1)..(360): tr|A0A1W9U387|A0A1W9U387_9DELT S-adenosylmethionine:tRN A ribosyltransferase-isomerase OS=Desulfobacterium sp. 4572_20 OX=1971621 GN=queA PE=3 SV=1
MKRENNTQIYDLENYTYDLPNELIAQKPASQRDGSRLLCIKRATGDISDSYFFDLPSLLREGDLLVVNDARVTPARLYGQKETGGRVEILVLDHPARPPKNGQETRWCLVKASKRPKTGGILLFPDGLIAVVKRLGEHGMVQLRFEGKHSLNYVLKKRGCLPLPPYIKRDNNNTQSDEDRERYQTIFSRFSGAIAAPTAGLHFTHELLKSLQSLGVNIVNVTLLVGHDTFKPVRVRDIRDHRLGKEAYFVGHHSANSIDNAKKEGRRIIAVGTTVVRTLETIFKRKGKIATDSGTTDLLIYPGFKFQVIDALITNFHLPRSSLFFMVAAFAGLDLTKRAYRWAVESRYRFYSYGDAMLIN

SEQ ID NO: 65853 - protein, 353 aa, Desulfobacterium vacuolatum
  misc_feature (1)..(353): tr|A0A1W2C374|A0A1W2C374_9DELT S-adenosylmethionine:tRN A ribosyltransferase-isomerase OS=Desulfobacterium vacu olatum DSM 3385 OX=1121400 GN=queA PE=3 SV=1
MYLISDYTYHLPQEQIAQQPMDHRGASKLLHLNRSTGEMSHYSFDHLLSILRPDDLLVINDTRVIPARLKGVKETGGKVEVLIIDYNAGMDCLEENGYFQCECMIRASKSPRRGTRLFLGAGITARVEGADAGLFMVRFFCDTDFRTALDAAGEIPLPPYILRNDTTDHDRDRKNYQTVYAAREGAVAAPTAGLHFTRELMEGLEKKGVEFAKITLHVGHGTFAPVRVEDIRDHQIHSEFFSITRETARRINRAKDENRRIIAVGTTSVRTLEFSAKETGQVTPGSGMCDLYIYPGYQFRVVDAMVTNFHLPESTLLMLVSAFAGRETILKAYREAVEQKYRFFSYGDAMLLE

SEQ ID NO: 65854 - protein, 353 aa, Desulfobacula phenolica
  misc_feature (1)..(353): tr|A0A1H2HHD2|A0A1H2HHD2_9DELT S-adenosylmethionine:tRN A ribosyltransferase-isomerase OS=Desulfobacula phenoli ca OX=90732 GN=queA PE=3 SV=1
MFQLSDYAYDLPPQKIAQTPCKNRSNSRLLHLDRNSGIVAHHQFDDILTLLKDDDLLVINNTKVVPARLFGQKETGGKIEVLIIDYAAGMKHLEKTGFFQCDCLVKASKSPKKGARLYLADTVEARVEQVKGNVFEIRFLNGDKFSDFLKKSGKIPLPPYIKREDPSSGQTDPDDYQTVYASNEGAVAAPTAGLHFTNSLMADLKKKGIEFAPITLHVGYGTFVPVRVQDIREHQIHSEYFSLSKDSSDKINRAKHQNRRIVAVGTTSVRTLEFLSDETGFVTAQTGQCDLFIYPGYTFKCVDAMITNFHLPESTLLMLISAFYSREHILDAYQEAINKDYRFFSYGDAMLIE

SEQ ID NO: 65855 - protein, 199 aa, Desulfobacula sp.
  misc_feature (1)..(199): tr|A0A1F9S005|A0A1F9S005_9DELT S-adenosylmethionine:tRN A ribosyltransferase-isomerase (Fragment) OS=Desulfobac ula sp. RIFOXYB2_FULL_45_6 OX=1797912 GN=A3J80_08845 PE =3 SV=1
IPLPPYIKREEKNERMDDRANYQTVYASSEGAVAAPTAGLHFTGELMARLRDKGIEFAPLTLHVGYGTFVPVKTDDIRQHQIHSEYFSLSKETADQINIARQNSRRIVAVGTTSVRVLEFVSDDQGRVRAETGLCNLFIYPGYRYKCVDAVITNFHLPESTLLMLVSAFYDREKILTAYKDAIKKDYRFFSYGDAMLIE

SEQ ID NO: 65856 - protein, 353 aa, Desulfobacula toluolica
  misc_feature (1)..(353): tr|K0NBA5|K0NBA5_DESTT S-adenosylmethionine:tRNA ribosy ltransferase-isomerase OS=Desulfobacula toluolica (stra in DSM 7467 / Tol2) OX=651182 GN=queA PE=3 SV=1
MFQLSDYAYDLPPQKIAQTPCKNRSNSRLLHLDRNSGIVAHHQFDDILTLLKDDDLLVINNTKVVPARLFGQKETGGKIEVLIIDYAAGMKHLEKTGFFQCDCLVKASKSPKKGARLYLADTVEARVEQVKGNVFEIRFLNGDKFSDFLKKSGKIPLPPYIKREDPSSGQTDPDDYQTIYASNEGAVAAPTAGLHFTNSLMADLKKKGIEFAPITLHVGYGTFVPVRVQDIREHQIHSEYFSLSKDSADKINRAKHQNRRIVAVGTTSVRTLEFLSDETGFVTAQTGQCDLFIYPGYTFKCVDAMITNFHLPESTLLMLISAFYSREHILDAYQEAINKDYRFFSYGDAMLIE

SEQ ID NO: 65857 - protein, 352 aa, Desulfobotulus alkaliphilus
  misc_feature (1)..(352): tr|A0A562S2Q2|A0A562S2Q2_9DELT S-adenosylmethionine:tRN A ribosyltransferase-isomerase OS=Desulfobotulus alkali philus OX=622671 GN=queA PE=3 SV=1
MFSLSDYGYDLPAELIADRPVPERDTSRLLVLDRRKGDVAHRHFKDIKNIFQPGDLLVVNDTRVIPARLHGVKATGGRVEILLLDYVGGCLCLEREGVFQCSCLVKASKRPAVGSELFIGDRIRVRVESLERDGSAILSFHTEDPMPHALLDAGSLPLPPYIERKEENPDDAIHYQTVYASRQGAVAAPTAGLHFTDALLGELRTKGVELRHLTLHVGYGTFAPVRVEDIRSHSMHSERFEISEETAEAIYRAKAEKRRVIAVGTTCVRTLEYAAIQEGGLKPGAGFCDLFIYPGFEFRVVDAMLTNFHLPETTLMMLVSAFGGYDHIRKAYQEAIAERYRFFSYGDAMLML

SEQ ID NO: 65858 - protein, 367 aa, Desulfobulbaceae bacterium
  misc_feature (1)..(367): tr|A0A1Q6DMQ3|A0A1Q6DMQ3_9DELT S-adenosylmethionine:tRN A ribosyltransferase-isomerase OS=Desulfobulbaceae bact erium DB1 OX=1920419 GN=queA PE=3 SV=1
MPDKIPLDYDIDSYRYELPPEKIAQHPVSRRDCSKLLALTRPTGAIHDHVFTDIVDFFSPGDLLVVNNTRVFPARLLGNKESGGRVELLVLHYPKEMSLPEDGSGNCRGRAEVVGLLRSSKRCRPAQRIIFADDFSAEVVELLADGKALVELHYSGDLALLLEQYGRLPLPPYIKRKKGEEGRDRERYQTVFAARTGAIAAPTAGLHFTDDLLAAIADKGVERESVTLHVGYGTFAPVRVRDIRDHQVHSEFLTVSQKTADKINEVGLRGNRIWAVGTTTVRALEFAADASGMMHAAEGWCSLYIKPGYRFKLVKNVITNFHLPGSSLLFMVSALVGREQLLSCYRHALEHDYRFFSYGDAMIIQGE

SEQ ID NO: 65859 - protein, 362 aa, Desulfobulbaceae bacterium
  misc_feature (1)..(362): tr|A0A0F2N4Z9|A0A0F2N4Z9_9DELT S-adenosylmethionine:tRN A ribosyltransferase-isomerase OS=Desulfobulbaceae bact erium BRH_c16a OX=1629713 GN=queA PE=3 SV=1
MQEDHLLSAYTYHLPEKLIAQHPADKRDNSRLMVVNTVKNNTLSHHRFSNIADYIGKKDMLVVNNTRVFPARLLGRKETGGKAEVFLLELPVVENAAEGTAVAQALIKSSKRPRPGTKITLAERFSGTIVEDLGGGKIKLKLKFDPATGLTETLRLSGQVPLPPYIARQDGCTPEDVHRYQTVYASRPGAVAAPTAGLHFTEELLRNIAGKGTQLGQVTLHVGYGTFSPVREEDITRHQIHHEYLSISQETVDAIEGTKARGGKIWAVGTTTVRALEYAAKGKDRLQAIDGWCDLYIYPGFQFKIVDNLITNFHLPDSSLMFLVSALCSRKTLLDCYDLAIREGYRFFSYGDAMAVITGQSE

SEQ ID NO: 65860 - protein, 388 aa, Desulfobulbus oralis
  misc_feature (1)..(388): tr|A0A2L1GP23|A0A2L1GP23_9DELT S-adenosylmethionine:tRN A ribosyltransferase-isomerase OS=Desulfobulbus oralis OX=1986146 GN=queA PE=3 SV=1
MACQNTLKRWLRQAHSSAAMYADFAYSLDDYDYVLPPELIAQEPAPARDGSRLLVLNTCGAGPEHRRFHDLPRLFRAGDVLALNNTRVFPARLLGSKASGGRIELFLLGFPETEEASGQSEHCATARALLKSSKRARIGARLSFGPALQAEVTALHQDGTAGVRLWFPAGKRLEEVLADCGRMPLPPYITRTDESHRQQDSERYQTCYARYTGSVAAPTAGLHFTPELLAELERMGVIMAPLTLHVGYGTFAPVRTADIRAHPIHSEWVSVPAASAEAVNAAKKAGRRVWAVGTTSTRTLEFAAARGCGAEGPVAAFAGLCNLYIYPGFRFQVVDNLVTNFHLPKSSLLFLVAALAGRERTLAAYETAVRLRYRFFSYGDAMAIVTKS

SEQ ID NO: 65861 - protein, 357 aa, Desulfobulbus propionicus
  misc_feature (1)..(357): tr|A0A2G6M6V5|A0A2G6M6V5_9DELT S-adenosylmethionine:tRN A ribosyltransferase-isomerase OS=Desulfobulbus propion icus OX=894 GN=queA PE=3 SV=1
MLIDHLLESYKYHLPLGQIAQAPVNERDNSRLMVLEPAPSPFKHLLFHNIVDLLQPGDLLVTNNSKVFPARLFGYKQSGGRVEVLLLNYPEPQKNQEGARALALIKSSKRPKPESIIKIAEDLHIRVEQILEHGQVKIRLLFRGDNPAPFLERHGQMPLPPYINRAAAANDNRRYQTRYAENIGSVAAPTAGLHFSDRLLAAIEERGIQRVNITLHVGYGTFAPVRQEDIRKHKIHREEVEISERTAEIINHTRDTGGRIWAVGTTTVRTLEYVGKETGRLSGFRGRCGLYIYPGYRFSVVDNLITNFHLPQSSLLFLVSALIGRDRILAAYQNAVAKGYRFFSYGDAMAIITRPVT

SEQ ID NO: 65862 - protein, 367 aa, Desulfobulbus sp.
  misc_feature (1)..(367): tr|A0A0A2HXF3|A0A0A2HXF3_9DELT S-adenosylmethionine:tRN A ribosyltransferase-isomerase OS=Desulfobulbus sp. Tol -SR OX=1536652 GN=queA PE=3 SV=1
MQQDFILSAYDYHLPAERIAQHPADRRDNSRLLVLDNESKAISHRRFADIVDLMNDGDMLVVNDTRVFPARLQGRKDSGGKIEVFLLEFPARVDGSSAGPARATALLRCSKRPQPGSRLLLDGGPVCTVIELLADGKARLEMQFGEGEDIAQALSACGQVPLPPYILRQEGTTAADRERYQTVYAHRPGAVAAPTAGLHFTEALLQRLKDKGVQLATITLHVGYGTFAPVRTEEIRDHRIHAEYIEVPAATMAMIATTRQNGGRIWAVGTTTVRALEFAARQCHGTPAAVEGWCDLYIYPGFAFKVVDCLITNFHLPNSSLMFLVAALCGRETLLLCYETAVREGYRFYSYGDAMAVVTAKATASAG

SEQ ID NO: 65863 - protein, 64 aa, Desulfobulbus sp.
  misc_feature (1)..(64): tr|A0A432Q3J9|A0A432Q3J9_9DELT S-adenosylmethionine:tRN A ribosyltransferase-isomerase (Fragment) OS=Desulfobul bus sp. OX=895 GN=DSY50_07775 PE=3 SV=1
IYPGYRFGVVDNLITNFHLPQSSLLFLVSALAGKQQILESYKEAVQEGYRFFSYGDAMAIITRA

SEQ ID NO: 65864 - protein, 361 aa, Desulfocapsa sp.
  misc_feature (1)..(361): tr|A0A432QWK5|A0A432QWK5_9DELT S-adenosylmethionine:tRN A ribosyltransferase-isomerase OS=Desulfocapsa sp. OX=2 066021 GN=queA PE=3 SV=1
MDNNQYQLSAYDYVLPEERIAQQPTEQREQSRLLVLDCVNDQLSHRRFTDITELLRPDDLLVVNNTKVFPARLVGQKETGGRVELLLLHFPEIGKHTPPGRAHALCLIKCSKRPQPGSLLYFPGKIRARVKQLRPDGKVEVTLLYPVSADLGVLLDKHGWIPLPPYISRPEGSTRSDVQRYQTRYARHTGSVAAPTAGLHFSDQLIHTLEARGIQQVAVTLHVGYGTFAPVRSKDIRNHEIHEEFVQVSEETARAVNRTKAASGRIWAVGTTTARTLEFAADSNGRVQPLQKLCGLYIYPDYQFKVINNLITNFHLPKSSLLFLVSALAGRKKILRSYNEAIQRSYRFFSYGDAMAILTKK

SEQ ID NO: 65865 - protein, 360 aa, Desulfocapsa sp.
  misc_feature (1)..(360): tr|A0A432QRT3|A0A432QRT3_9DELT S-adenosylmethionine:tRN A ribosyltransferase-isomerase OS=Desulfocapsa sp. OX=2 066021 GN=queA PE=3 SV=1
MQQDFSLQAYNYTLPPENIAQHPADARENSRLLILNRNTHEQRHGSFRDIVELFQPGDLLVLNNTKVFPARLYGRKESGGKVEVFLLAYPVESLSPDSSTKTAEVTCLIKSSKRPKPGSTLLLGPELKATVSELLADGKVQIKLRYKASQDLAAILSNYGQVPLPPYISRNEGITEEDRKRYQTVYAKEPGAVAAPTAGLHFSKKLLHAIHEKGVQSTEITLHVGHGTFAPVRCADIREHQIHEEYIAVSKESCDKINATRKKGGKIWAVGTTTVRTIEFMADSKGNVQAGNGWCDLYILPGYAFKTVDNLITNFHLPESSLLFLVSAIYGREALMEVYQQAIAAGYRFYSYGDAMVIYV

SEQ ID NO: 65866 - protein, 359 aa, Desulfocapsa sulfexigens
  misc_feature (1)..(359): tr|M1PQK7|M1PQK7_DESSD S-adenosylmethionine:tRNA ribosy ltransferase-isomerase OS=Desulfocapsa sulfexigens (str ain DSM 10523 / SB164P1) OX=1167006 GN=queA PE=3 SV=1
MQQEFTLQAYNYTLPPENIAQHPADAREDSRLLILNRHTGKQEHGKFHQIIDLLNPGDLLVVNNTKVFPARLHGHKKSGGKVEVFLLSYPVVSEGHNGKKHAEVTTLIKSSKRPKPGSLLLLGPDLEARVLELLDGGKVTVELSYSSDKELSTILEKYGQVPLPPYISRKEGSTDEDRKRYQTVYAQNPGAVAAPTAGLHFSENLLEAIRNKGVEFTEITLHVGHGTFAPVRCEDIRKHRIHQEYVSVSQASADKINAVRKAGGKIWAVGTTTVRTLEFMTDPDGRVQAGEDWCGLYIMPGYRFKVVDNLITNFHLPESSLLFLVSALCGREHLMDSYREAIKKGYRFYSYGDAMAIHD

SEQ ID NO: 65867 - protein, 364 aa, Desulfocarbo indianensis
  misc_feature (1)..(364): tr|A0A0K9IA45|A0A0K9IA45_9DELT S-adenosylmethionine:tRN A ribosyltransferase-isomerase OS=Desulfocarbo indianen sis OX=1348163 GN=queA PE=3 SV=1
MLPADQQAAGGGSPLAVYDYSLPPDRIASHPAKRRVQARLLVLHGREGMAHEKVANLTRWLKPGDLLVMNDTKVVPARLLGRKPSGGKVEVFLLSPARPRALENGAELHQALVKSHRPLSAGAEILLEAGPGRRETVLQVVSRGERGQALVRVPGSGLELTRRHGQVPLPPYIKRPQGPRAEDQRRYQTVYAAKEGAVAAPTAGLHLSPALLAALEKRGVETASLTLHVGYGTFAEPRPEDLAAGRLHAEWVELPQETSLAVARAKARGGRVIAVGTTSARALEWRAGPGGVPRPGSGWCDFLISEGHAFKALDGLITNFHLPRTTLLMLVSALAGRGRVLAAYAQAVRRGYRFYSYGDAMLIV

SEQ ID NO: 65868 - protein, 360 aa, Desulfococcus multivorans
  misc_feature (1)..(360): tr|S7VD70|S7VD70_DESML S-adenosylmethionine:tRNA ribosy ltransferase-isomerase OS=Desulfococcus multivorans DSM 2059 OX=1121405 GN=queA PE=3 SV=1
MYRLKDYRYDLPQDLIAQSPSARRDASRLLCLNRGDGRIAHRVFADLPALLDPSDLLVINDTEVVPARLYGRKASGGKVEILILDPHDGRAAHAREVTRNCMLKAAKRPKPGTRIFFDQGLTAEVVDSREAVHTLRFSSPEPFESILYRIGRMPLPPYIRRNGDGEPGTAAEGGGTPDDRTHYQTVYAARKGAVAAPTAGLHFTPELLARIRERGVTVAAVTLHVGYGTFVPVRVDDIREHRMHHEAFTIPEKTAEAVNLARSEGRRVVAVGTTSVRTLEYAAGPDGRIAPGSGHCDLFIYPGYRFRAVDAVITNFHLPESTLIMLVSAFAGRENVLSAYREAVARGYRFFSYGDAMLIG

SEQ ID NO: 65869 - protein, 349 aa, Desulfococcus oleovorans
  misc_feature (1)..(349): tr|A8ZRX6|A8ZRX6_DESOH S-adenosylmethionine:tRNA ribosy ltransferase-isomerase OS=Desulfococcus oleovorans (str ain DSM 6200 / Hxd3) OX=96561 GN=queA PE=3 SV=1
MFLVSDYDYDLPPDRIAQQPVTQRDSSRLLRLDRARGGISHHRFYDLPDLLRPSDLLVVNNTRVVPARLEGIKETGGRAGALILDYPGVRTEKGVICRCMVKASGRLRPGTRFLFEDRLSASVVDAADGLYTLCFSCDGDFDQTLFAVGRTPLPPYITRNRDGAPCDDRTCYQTVYADRDGAVAAPTAGLHFTPNVLDRLAAKGISTAPVTLHVGHGTFLPVRVSDIRDHAMHSERFEVPAATAAAINATRRDGGRVVAVGTTVVRTLEYVARTCGEIRAFSGACDLFIYPGYNFQAIAAMITNFHLPRSTLLMLVSAFTGREKVLAAYEAAIQEKYRFYSYGDAMLIE

SEQ ID NO: 65870 - protein, 341 aa, Desulfocucumis palustris
  misc_feature (1)..(341): tr|A0A2L2XGK3|A0A2L2XGK3_9FIRM S-adenosylmethionine:tRN A ribosyltransferase-isomerase OS=Desulfocucumis palust ris OX=1898651 GN=queA PE=3 SV=1
MKTADFDYFLPEELIAQDPGLKRDESRLLVLRRDGSGMEHRKFNNIVEYLAPGDVLVINDTRVIPARLFARKAPTGAEIEVLLLRQLSPHSWETLVRPGKRVRPGTRLIFSQGLLEADVADVTDAGGRILDFKYQGDFNEVIEKIGRMPLPPYIKNYPADPGRYQTVYAREPGSVAAPTAGLHFTPELLERIKGKGVNIVSVLLHVGLGTFRPVTAENVEEHLMHREYYEITPRAAEIINGARAGAGRVIAVGTTSTRCLESSAEQDGKVRPGTGWTDIFIYPGYKFKVIDGLITNFHLPCSTLLMLVSAFAGRERVLDAYRTAVDRRYRFFSFGDAMLLI

SEQ ID NO: 65871 - protein, 363 aa, Desulfocurvibacter africanus
  misc_feature (1)..(363): tr|F3YX39|F3YX39_DESAF S-adenosylmethionine:tRNA ribosy ltransferase-isomerase OS=Desulfocurvibacter africanus subsp. africanus str. Walvis Bay OX=690850 GN=queA PE=3 SV=1
MSHIPESCDLQSYCFELPEELIAQQPGQSREASRLMVLERASGHRRIVPFADIGAFLPPGALLVANNSRVLPARMFGHKPTGGRVEFLLLTPLPLLAAKEPDADGFSSAQAEGLLRSAKKPKPGERIEFSDDFHLVVEARGDFGKSQVTLHWRDDLAAHFMRQGHLPLPPYIRRPDTDSDRERYQTVYSRKDKLGSAAAPTAGLHFSTKLKAELAEAGFAWAELTLYVGYGTFSPVRVRDIREHTMHCEYIEISEATAAAIRDAKVQGRPVVAVGTTSARALEGAFAQSGRIAAFTGWTDIFMRPGYEFKVVERLLTNFHLPGSSLIMLVSALAGREAVQDAYRHAVQERMRFFSYGDAMLVL

SEQ ID NO: 65872 - protein, 363 aa, Desulfocurvibacter africanus
  misc_feature (1)..(363): tr|M5PWZ9|M5PWZ9_DESAF S-adenosylmethionine:tRNA ribosy ltransferase-isomerase OS=Desulfocurvibacter africanus PCS OX=1262666 GN=queA PE=3 SV=1
MSHIPESCDLQSYCFELPEELIAQQPGQNREASRLMILERATGHRRIAPFADIGAFLPPGALLVVNNSRVLPARMFGHKLTGGRVEFLLLTPLPLLAAKEPDADGFRSAQAEGLLRSAKKSKPGERIEFSDDFQLVVEARGDFGKSQVTLYWRDDLATHFMRQGHLPLPPYIRRPDTDSDRERYQTVYSREDKLGSAAAPTAGLHFSTELKASLAAAGFAWAELTLYVGYGTFSPVRVRDIREHTMHREYIEIPEATAAAIREAKSQGRPVVAVGTTSARALEGAFAQTGRMEAFTGWTDIFMRPGYEFKVVERLLTNFHLPGSSLIMLVSALAGREAVQDAYRHAVRERMRFFSYGDAMLVL

SEQ ID NO: 65873 - protein, 353 aa, Desulfofaba hansenii
  misc_feature (1)..(353): tr|A0A2M9DPQ1|A0A2M9DPQ1_9DELT S-adenosylmethionine:tRN A ribosyltransferase-isomerase OS=Desulfofaba hansenii OX=157842 GN=queA PE=3 SV=1
MYQLTDYDYTLPEALISQQPTEERDASRLMALNRSTGEISHHGFAEIEGKLLPGDVLVVNNTQVIPGRLYGRKESGGKVELLILDYLGGRRMLADSGVFVSKCLIRASKRPKNGSILLFDGGLTGEVLDFTDGIYLVRLNFTGELDSLLERIGNMPLPPYIRRNGGQMSCNDKKTYQTVYAAQRGAIAAPTAGLHFTEALLSRLAERGVKVVAITLHVGYGTFLPVRVADIREHAMHTELYTVSAAAADAINGARRGGGRVVAVGTTSVRTLEYASDETGAVVAGSGSCDIFIYPGYRFKCVDAMVTNFHLPQSTLLMLVSAFAGYDNVLAAYRKAVGERYRFFSYGDAMFIA

SEQ ID NO: 65874 - protein, 333 aa, Desulfofarcimen acetoxidans
  misc_feature (1)..(333): tr|C8W4D7|C8W4D7_DESAS S-adenosylmethionine:tRNA ribosy ltransferase-isomerase OS=Desulfofarcimen acetoxidans ( strain ATCC 49208 / DSM 771 / VKM B-1644 / 5575) OX=485 916 GN=queA PE=3 SV=1
MILKLEDFNYNLPEELIAQEPSANRDESRLMVLFRDNPQIEHRRFNNLVEYLKPGDVLVINDTKVMPARLYGLKDTGATVEVLLLKQLDGNRWETLVKPGRKARIGTTLTFAGGKLTGLVAGDTEAGGRVIDFLYQGSFVEILEQIGIMPLPPYIKKIPADPGRYQTVYANRFGSAAAPTAGLHFTDQLLDKIKDLGVEIVPVLLHVGLDTFRPVKVENIREHRMHSEYYEISAGVADKINAAKARGGRIIAVGTTTTRCLESSAGDDGRLKTGSGWTKIFIYPGYRFKIIDGLITNFHLPCSTLIMLVSALSGRDKILEAYNTAVKKKVQIF

SEQ ID NO: 65875 - protein, 343 aa, Desulfofundulus australicus
  misc_feature (1)..(343): tr|A0A1M5AWA3|A0A1M5AWA3_9FIRM S-adenosylmethionine:tRN A ribosyltransferase-isomerase OS=Desulfofundulus austr alicus DSM 11792 OX=1121425 GN=queA PE=3 SV=1
MGLQLSDFDYELPPELIAQDPAPRRDESRLMVLFRQDGRMEHRLFKDIVEYLSPPDVLVINETRVIPARLMGRRAQGGAEVEVLLLRPLEERRWEALVRPGRRLKPGVRLIFGEGLAEGLIEDVTAAGGRIISFSSALPFAEVLARLGRMPLPPYIKKYPDDPERYQTVYARQEGSAAAPTAGLHFTRELLDKIEARGVQLVRVLLHVGLGTFRPVRVEDITRHHMHAEYYEVTEEAARTINAARARGGRVVAVGTTTTRCLETVAGEDGQVRAGAGWTDIFIYPGYRFKAVDALVTNFHLPRSTLLMMVSAFAGREKILHAYRTAVEMRYRFFSFGDAMLII

SEQ ID NO: 65876 - protein, 341 aa, Desulfofundulus kuznetsovii
  misc_feature (1)..(341): tr|A0A101HXY6|A0A101HXY6_9FIRM S-adenosylmethionine:tRN A ribosyltransferase-isomerase OS=Desulfofundulus kuzne tsovii OX=58135 GN=queA PE=3 SV=1
MKTSEFDYDLPESSIAQEPAQRRDASRLMVIYRSKPDVEYRLFKDLPDYLNDRDVLVINETKVIPARLTGKKVSGDANIEILLLKPLDAYRWEVLVRPGKKVKINDQLVFGDELFSGRIIDFTDSGGRIIEFSFEGNFEELIQDAGEMPLPPYIKKYTGDPQRYQTIYARQEGSVAAPTAGLHFTGELLEKVQKKGIAIKKIILHIGLGTFRPVSATDISMHRMHSEYFEVSQDTADSVNMAREKGGRVVAVGTTTVRCLESAARENGSLSATSGWTDLFIYPGYSFKVIDSMVTNFHLPRSTLLMMVSAFAGSGKILSAYRLAVRDKYRFFSFGDAMLIL

SEQ ID NO: 65877 - protein, 341 aa, Desulfofundulus salinum
  misc_feature (1)..(341): tr|A0A494WXA5|A0A494WXA5_9FIRM S-adenosylmethionine:tRN A ribosyltransferase-isomerase OS=Desulfofundulus salin um OX=2419843 GN=queA PE=3 SV=1
MQLNDFDYYLPPELIAQDPAPRRDESRLMVLFRDDGRIEHRLFRDIVEYLSPQDVLVINDTRVIPARLTGRKAQGGAEVEVLLLRPLDERRWEALVRPGRRLRPGTRLIFGDGLAEGLIEGVTAAGGRVVSFASALPFEEVLSRLGKMPLPPYIKKYPEDPGRYQTVYARQEGSAAAPTAGLHFTTELLDRIEARGVQLVRVLLHVGLGTFRPVRVQDITRHHMHAEYYEVTEEAARAINAARARGGRVVAVGTTTTRCLETVADTDGQIRPGTGWTDIFIYPGYRFKAVDALVTNFHLPKSTLLMMVSAFAGRETILNAYRTAVEMRYRFFSFGDAMLII

SEQ ID NO: 65878 - protein, 348 aa, Desulfofundulus thermosubterraneus
  misc_feature (1)..(348): tr|A0A1M6H7H7|A0A1M6H7H7_9FIRM S-adenosylmethionine:tRN A ribosyltransferase-isomerase OS=Desulfofundulus therm osubterraneus DSM 16057 OX=1121432 GN=queA PE=3 SV=1
MGDGFLGFQLSDFDYELPPELIAQDPAPRRDESRLMVLFRQDGRMEHRLFRDIVEYLSPPDVLVINDTRVIPARLTGRKAEGAAEVEVLLLRLLDERRWEALVRPGRRLRPGTRLIFGDGLAEGLIEDVTAAGGRVISFTSALPFEEVLSRLGKMPLPPYIKKYPEDPERYQTVYARQEGSAAAPTAGLHFTTELLGRIEARGVQLVRVLLHVGLGTFRPVRVQDITRHHMHAEYYEVTEEATRAINAARARGGRVVAVGTTTTRCLETVAGEDGQVRPGTGWTDIFIYPGYRFKAVDALVTNFHLPRSTLLMMVSAFAGREKILHAYRTAVEMRYRFFSFGDAMLII

SEQ ID NO: 65879 - protein, 361 aa, Desulfofustis glycolicus
  misc_feature (1)..(361): tr|A0A1M5VB44|A0A1M5VB44_9DELT S-adenosylmethionine:tRN A ribosyltransferase-isomerase OS=Desulfofustis glycoli cus DSM 9705 OX=1121409 GN=queA PE=3 SV=1
MQEDLTLAAYDYDLPESHIAHYPANRRDDSRLLVLNRATGVRRHLHFRDIVTFFQPGDLLVVNDTKVFPARLFGTKESGGKAELFLLSYPAPVSGEKTDGAVRFDSEALIRSSRRPAIGSRIIVSDSCSCRVLAHRGGGKWLVRLAISATGGLDQLLGEAGHIPLPPYIKRPAGPTVEDKRRYQTVYANRPGAVAAPTAGLHFTTDLLMALTARGVRQTTITLHVGYGTFAPVQSEDIRDHHIHREFIDISEETAELVAATKQDGARVWAVGTTTVRALEYAALGTGSIEPVCGWCDLYITPGFSFQVTDHLLTNFHLPRSSLLFLVAALCGRDRLLACYREAIDRGYRFYSYGDAMAIIG

SEQ ID NO: 65880 - protein, 368 aa, Desulfofustis sp.
  misc_feature (1)..(368): tr|A0A353XBD3|A0A353XBD3_9DELT S-adenosylmethionine:tRN A ribosyltransferase-isomerase OS=Desulfofustis sp. OX= 2053546 GN=queA PE=3 SV=1
MKSQEDFSLSSYDYHLPEEAIAQYPVDGRDQSRLLVMDRASGGIEHRLFHQIHTLFKPGDVLVRNDTRVFPARLFGRKESGGKVELFLLHYPVHIKNGGESGNAAYQCEVLVKSSRPPRAGMQLRIADAIIFALDENLGRGRWSGTLFTTTGHDLDSLLAAHGNVPLPPYVKREDGPTAIDVERYQTVYAAEPGAVAAPTAGLHFTGPLLDKISRLGVSIASITLHVGHGTFAPVTHEDIRHHKIHQEYVKIGDETAALINRAKTRGAQVWAVGTTTVRALESAAVSEHEIKPIEQWCDVYITPGYTFQVVDNLITNFHLPRSSLLFLVAALCGRTRLLSAYRAAIEMGYRFYSYGDAMALIKSGKKE

SEQ ID NO: 65881 - protein, 356 aa, Desulfoglaeba alkanexedens
  misc_feature (1)..(356): tr|A0A4P8KZH9|A0A4P8KZH9_9DELT S-adenosylmethionine:tRN A ribosyltransferase-isomerase OS=Desulfoglaeba alkanex edens ALDC OX=980445 GN=queA PE=3 SV=1
MADRPTYRLDDYDYELPGRLIAQSPTPQRDRCRLMVLERASGRLEHRSFRDLPDYLQAGDVLVLNDTRVVPARLLGRKDTGGRVELLVLDPYKDPDVGVREGYRCLLRASKPPRRGSRLFLEQEVMARVMGEVREGRVTVRFETGSPLMEILERAGRVPLPPYIRRNDDAVSFEDGKDYQTIYAAKPGAVAAPTAGLHFTENLLGCLEGKGVETVRLTLHVGYGTFSPIRVEDIREHGIHAEWTEIGEEASQRIREVRRAGRRVVAVGTTVVRALEYTAARFGEVSPFAGFCDHYIYPGFRFRVVDAMVTNFHLPKSSLILLVSAFAGRETILAAYAEAVRKEYRFYSYGDAMLIV

SEQ ID NO: 65882 - protein, 363 aa, Desulfohalobium retbaense
  misc_feature (1)..(363): tr|C8WZC0|C8WZC0_DESRD S-adenosylmethionine:tRNA ribosy ltransferase-isomerase OS=Desulfohalobium retbaense (st rain ATCC 49708 / DSM 5692 / JCM 16813 / HR100) OX=4859 15 GN=queA PE=3 SV=1
MNTIPRDYDLDAYQFELPADQIAQHPHPQRDASRLLILDRSSGQRQHATFRDLVDTLPDGALLVANTSRVLPARLKGQKRATGGKVEFLLLTPLPLVTPQPLADGRNEGFVSGLLRSSKPLAVGQKADFPGGIELTVIEREEFGRVQVRLCWSGDMAEVFQAYGHMPLPPYIQREDDATDHGRYQTVYADSAKTGSVAAPTAGLHFTDDVLHALRDKGIQWAEVTLYVGYGTFSPLRCRDIREHHMHPEYIELDAANAETISRAQAEGRPVVAVGTTTVRTLESIAHHCGRIQPFAGWTDIFIYPGFSFRVVDHLLTNFHLPGSSLILMVAAFAGRRLVLEAYEEAVDEGYRFFSYGDAMFIV

SEQ ID NO: 65883 - protein, 350 aa, Desulfoluna butyratoxydans
  misc_feature (1)..(350): tr|A0A4U8YRR0|A0A4U8YRR0_9DELT S-adenosylmethionine:tRN A ribosyltransferase-isomerase OS=Desulfoluna butyratox ydans OX=231438 GN=queA PE=3 SV=1
MYQLSDYRFDLPEELIARHPEKNRTDSRLLHLERHTGARHHRHFSDLSGLLNKGDLLVVNNTSVIPARLIGHKETGGKVEVLILDYREGMAAMDRDGAFSCRCLLKASKRVKPDTPIRFGDGFSAVVESFDQGIYRLRFACDGDFDRLLETHGNMPLPPYIKRDADAFDKKTYQTVYAKNRGAVAAPTAGLHFTGDLMETLKAKGVEIAELTLHVGYGTFEPVRVDDIRDHAIHTEWYEVSEATAAAVNNAKAEGRRVIAVGTTSVRTLEFATAKDGTLTPGAGPCDIFIYPGYQFKCVDAMVTNFHTPESTLLMLVSAFAGRDTIFTAYEEAVRLKYRFFSYGDAMFID

SEQ ID NO: 65884 - protein, 350 aa, Desulfoluna spongiiphila
  misc_feature (1)..(350): tr|A0A1G5GQX2|A0A1G5GQX2_9DELT S-adenosylmethionine:tRN A ribosyltransferase-isomerase OS=Desulfoluna spongiiph ila OX=419481 GN=queA PE=3 SV=1
MYQLSDYRFDLPDELIARHPEKNRTDSRLLHLERTTGARHHRHFSDLSGLLNKGDLLVVNNTSVIPARLIGHKESGGKVEVLILDYREGMAAMDREGTFSCRCLLKASKRVKPDTPIRFGEHFSAVVESFDQGIYRLRFECDGDFDRQLEAHGNMPLPPYIKRDADAFDKKTYQTVYAKNRGAVAAPTAGLHFTDELMETLKAKGVDIAELTLHVGYGTFEPVRVDDIRDHAIHTEWYEVSEETAHAVNTAKAQGRRVVAVGTTSVRTLEFASKEDGTLTSGAGPCDIFIYPGYRFKCVDAMVTNFHTPESTLLMLVSAFAGRDTIFTAYEEAVSQKYRFFSYGDAMFIG

SEQ ID NO: 65885 - protein, 350 aa, Desulfoluna spongiiphila
  misc_feature (1)..(350): tr|A0A5E7XFI5|A0A5E7XFI5_9DELT S-adenosylmethionine:tRN A ribosyltransferase-isomerase OS=Desulfoluna spongiiph ila OX=419481 GN=queA PE=3 SV=1
MYQLSDYRFDLPDELIARHPEKNRTDSRLLHLERTTGARHHRHFSDLSGLLNKGDLLVVNNTSVIPARLIGHKESGGKVEALILDYREGMAAMDRDGTFSCRCLLKASKRVKPDTPIRFGDNFSAIVESFYQGIYRLRFECDGDFDRQLEAHGNMPLPPYIKRDADAFDKKTYQTVYAKNRGAVAAPTAGLHFTDELMETLKAKGVDIAELTLHVGYGTFEPVRVDDIRDHTIHTEWYEVSEETAHAVNTAKAQGRRVVAVGTTSVRTLEFTSKEDGTLTPGAGPCDIFIYPGYKFKCVDAMVTNFHTPESTLLMLVSAFAGRDTIFTAYEEAVSQKYRFFSYGDAMFIG

SEQ ID NO: 65886 - protein, 360 aa, Desulfomicrobiaceae bacterium
  misc_feature (1)..(360): tr|A0A3D1NEM1|A0A3D1NEM1_9DELT S-adenosylmethionine:tRN A ribosyltransferase-isomerase OS=Desulfomicrobiaceae b acterium OX=2053547 GN=queA PE=3 SV=1
MVASPPIPERYCLQSYIYELPEDRIAQTPAQHREASRLLVVPREGTIFSEHAFAELPQLLPPEALLVFNNTKVLPARLLATKPTGGKSEFLLLTPLPRIVPEPDGTGWQAEAEGLVRGLKPGQALDFHGLQVRVLERMDFGRCRVRLSWQGELPDIFLRHGHMPLPPYIARPDSGEDQERYQTVYADPAKLGSVAAPTAGLHFTPQILAALRERGMQTATVCLYVGYGTFSPVRCEDIRDHRMHAEFIEVSEDAAQAIAQAKAQGRPVVAVGTTSARTLESLPVKTGGIHPYQGWTDLYILPGHRFQVVDSLITNFHLPASSLLIMVAALAGLSTIRAAYAQAVHSGFRFFSYGDAMLIR

SEQ ID NO: 65887 - protein, 361 aa, Desulfomicrobium apsheronum
  misc_feature (1)..(361): tr|A0A1I3XFM9|A0A1I3XFM9_9DELT S-adenosylmethionine:tRN A ribosyltransferase-isomerase OS=Desulfomicrobium apsh eronum OX=52560 GN=queA PE=3 SV=1
MTAIPPEFNLQSYDFDLPEAQIAQDPTEKRGASRLLVLDRNSGEVRDAMFADIPDLLPPGALLVVNNTKVLPARLIGRKESGGKVEFLLLTPLALIEPGANADGTKTATVEGLLKASKGPRQGDRLLFPGIELRVLEKGEFGRAKVAMRWTGDLAEHFLKQGHIPLPPYIHREDKSEDRTRYQTVYSREDKLGSVAAPTAGLHFTPSIMDALAARDIRMAEVTLYVGYGTFSPVRAHDIREHVMHAEYAEVSEETARAIATAKSEGRPVVAVGTTTSRTLESMATALGEIGPFKGWTDIFIRPGYGFKVVDQLITNFHLPRSSLIIMVCTLAGRQQIIDAYNHAVRQGFRFFSYGDAMLIR

SEQ ID NO: 65888 - protein, 361 aa, Desulfomicrobium baculatum
  misc_feature (1)..(361): tr|C7LTM9|C7LTM9_DESBD S-adenosylmethionine:tRNA ribosy ltransferase-isomerase OS=Desulfomicrobium baculatum (s train DSM 4028 / VKM B-1378) OX=525897 GN=queA PE=3 SV= 1
MTAIDPEFNLQSYDFDLPEAQIAQDPTAKRGASRLLVLDRKSGTVRDAMFADIPELLPTGALLVVNNTKVLPARLIGRKESGGKVEFLLLTPLTLIEAKTAADGTKTATAEGLLKASKGPRQGDLLLFPGIELRVLEKGEFGRARVTLRWTGDLAEHFLSQGHIPLPPYIHREDKSEDRTRYQTVYSREDKLGSVAAPTAGLHFTPEIMASLAQQGIQLAEVTLYVGYGTFSPVRCDDIREHVMHAEYAEVPEETARAIAKAKSEGRPVIAVGTTTSRTLESMASALGEIGPFKGWTDIFIHPGYEFKVVDQLITNFHLPRSSLIIMVCTLAGRQQIIDAYNHAIKQGFRFFSYGDAMLIR

SEQ ID NO: 65889 - protein, 361 aa, Desulfomicrobium norvegicum
  misc_feature (1)..(361): tr|A0A1I4ING0|A0A1I4ING0_DESNO S-adenosylmethionine:tRN A ribosyltransferase-isomerase OS=Desulfomicrobium norv egicum (strain DSM 1741 / NCIMB 8310) OX=52561 GN=queA PE=3 SV=1
MTAIPPEFNLQSYDFDLPEAQIAQDPTEKRGASRLLVLDRDSGEVRDAMFADIPDLLPPGALLVVNNTKVLPARLIGRKESGGKVEFLLLTPLALIEPGANADGTRTAEVEGLLKASKGPRQGDRLLFPGIELRVLEKGEFGRAKVSMRWAGDLAEHFLKQGHIPLPPYIHRKDKSEDRTRYQTVYSREDKLGSVAAPTAGLHFTPSIMDALAARDIRMAEVTLYVGYGTFSPVRAHDIREHVMHAEYAEVSEETARAIATAKSEGRPVVAVGTTTSRTLESMATALGEIGPYKGWTDIFIRPGYGFKVVDQLITNFHLPRSSLIIMVCTLAGRQQIIDAYNHAVRQGFRFFSYGDAMLIR

SEQ ID NO: 65890 - protein, 361 aa, Desulfomicrobium orale
  misc_feature (1)..(361): tr|A0A120KNS7|A0A120KNS7_9DELT S-adenosylmethionine:tRN A ribosyltransferase-isomerase OS=Desulfomicrobium oral e DSM 12838 OX=888061 GN=queA PE=3 SV=1
MTAIPPEFNLQSYDFELPEELIAQTPPAEHGASRLLVLDRATGATHEARFADIVEFLPPGALLVANNTKVLPARLTGRRASGGRVEFLLLTPLPLIAVRDREGGGHEAEAEGLVKMSKSVRIGETLHFPSMDILVLEKGDFGRIRGRLSWQGDLGAHFLSTGRIPLPPYIRRADDGQDRLRYQTVYAREDRLGSVAAPTAGLHFTPEILEALSRRGMVRAEVSLYVGYGTFSPVRVEDIREHAMHAEYVEVPERTARLIRQARDEGRPIVAVGTTTVRALESMAARLDGIGPFAGWTDIFIRPGHRFKIVDQLITNFHLPRSSLIIMVGTFAGRQKIIDAYRHAISRGFRFFSYGDAMFIR

SEQ ID NO: 65891 - protein, 292 aa, Desulfomicrobium sp.
  misc_feature (1)..(292): tr|A0A3D5BUZ9|A0A3D5BUZ9_9DELT S-adenosylmethionine:tRN A ribosyltransferase-isomerase (Fragment) OS=Desulfomic robium sp. OX=52017 GN=DGF30_10070 PE=3 SV=1
VLPARLIGRKESGGRAEFLLLTPLSLIEPQTGPDGGSTAEVEGLLKASKGPRPGEPLHFDGLELLVLEKGEFGRSRVRLNWRGELADHFLKLGHIPLPPYIRREDKGEDRDRYQTVYSRDDKLGSVAAPTAGLHFTPEIMAALEARGIRTAEVTLYVGYGTFSPVRCDDIREHVMHAEYAEVPEETAEAIARARAEGRPVVAVGTTTTRTLESMATHLGGIGPFRGWTDIFIRPGYSFKVVDQLITNFHLPRSSLIIMVSTLAGRRRIIDAYTHAVRHGFRFFSYGDAMLIR

SEQ ID NO: 65892 - protein, 372 aa, Desulfomonile tiedjei
  misc_feature (1)..(372): tr|I4C9T4|I4C9T4_DESTA S-adenosylmethionine:tRNA ribosy ltransferase-isomerase OS=Desulfomonile tiedjei (strain ATCC 49306 / DSM 6799 / DCB-1) OX=706587 GN=queA PE=3 SV=1
MMDENTALYTDDASMDIPESFRLATYSYELPPDLIAQKPSPERDRSRLLHLNRRTGAVAHHLFAELPGLLRPSDVLVLNETKVIPAFLQGKKTTGGRVELLVTDPGEMFGPGEFHAVRTCITKSSKPIKPGSRILVGNGVELECIHAVGPGRIQVRFPVTESMLLNFLEEHGKPPLPPYIHTAKRDEALDRCRYQTIYGRVAGSVAAPTAGLHFSEKLLKELEGMGILVARIILHVGPGTFLPVRTQDVRLHTMESEYFEISDETARNITRAAREGRRVIAVGSTSTRALETAVSEDCHICPGKGKTSLFILPGYRFKIVKGIITNFHLPESTLLMLVCALGGTDRVLSAYRQAVHQKYRFYSYGDASLIAE

SEQ ID NO: 65893 - protein, 360 aa, Desulfonatronospira thiodismutans
  misc_feature (1)..(360): tr|D6SUG8|D6SUG8_9DELT S-adenosylmethionine:tRNA ribosy ltransferase-isomerase OS=Desulfonatronospira thiodismu tans ASO3-1 OX=555779 GN=queA PE=3 SV=1
MSISEDFDLENYDYELDPARIASWPTPDRSESRLLMLDRQGGELQEDRFENIDQHLEPGSLLVVNNSKVLPARLMGHKESSGSVEFLLLTPLPLISPAMENREKKARVECLVRASRRPRPGDWVYFAENVRFRLVQDLDQGRAKGDLFWTGDLGDFFVRYGHVPLPPYIKRQDEPQDVNRYQTVYAHPDKQGSVAAPTAGMHFTPKLCHRLEDLGCMWAEVCLYVGYGTFSPVKSADIRQHVMHPEYIEVGSQAAESIRAARAQGRKVVAVGTTTVRTLESVCRMKGRVEPFTGWSDLYIYPGFKFEAVDQLITNFHLPKSSLLIMVSAFAGRRKILHSYQYAREKGFRFFSYGDAMFIK

SEQ ID NO: 65894 - protein, 360 aa, Desulfonatronovibrio sp.
  misc_feature (1)..(360): tr|A0A424XXD2|A0A424XXD2_9DELT S-adenosylmethionine:tRN A ribosyltransferase-isomerase OS=Desulfonatronovibrio sp. MSAO_Bac4 OX=2293858 GN=queA PE=3 SV=1
MPEFADYNLSSYEFELEQELIAQHPSQKREDSKLLVLNKKTGSTESSRFELIGQYLSSGSLLVVNNTRVLPARLTGSKKTGGKVEFLLLTPLPLIEPEVYGSLKKADIECLIKSSKRPKPGDELFFPGNVSFKVLENAPMGRTKGELLWTGDLAKYFIDHGRVPLPPYIQREDNKSDQERYQTVYSSEEKAGSVAAPTAGLHFTPELKENLSKLGIGWAEVTLYVGYGTFSPVRVRDIREHKMHPEYIEVKQDAASKIRQARDAGHKIVAVGTTTVRTLESVISLQGRMDSYSGWTDLFVYPGYKFKIVDQLITNFHLPGSSLIMMVSALAGRENILKAYQMARNEKFRFFSYGDAMLIR

SEQ ID NO: 65895 - protein, 372 aa, Desulfonatronum sp.
  misc_feature (1)..(372): tr|A0A2T5CCE5|A0A2T5CCE5_9DELT S-adenosylmethionine:tRN A ribosyltransferase-isomerase OS=Desulfonatronum sp. S C1 OX=2109626 GN=queA PE=3 SV=1
MTPLSISRNISPTFSLDAYDYYLPESLIAQNPPQSREASRLLIMGRGDDLPPAVGVFNDVLEHLPRGSLIVVNNSRVVPGRLRTVGEHGGGMELLLLTPLNLLRRDQRTVGARAVATSDVLLRPAKKARVGKVLNFSEIQVTVLEKGEFGQTKVELSWPTYLSLEEFLRSNGEIPLPPYIRRPSDQRDLERYQTVYADEQETGSIAAPTAGLHFTPLLRDKLIQAGHEWAEVTLYVGYGTFSPIRCDDIRDHRMHGEYVKITQGAAEAVRRAKQEGRAIVAVGTTSLRTLEGVAAVRGGVEPFEGWLDTYIYPGFSFQVVDGLITNFHLPKSSLLVLVSAFAGRERILAAYRRAMAEGFRFFSYGDAMFIRP

SEQ ID NO: 65896 - protein, 370 aa, Desulfonatronum thiosulfatophilum
  misc_feature (1)..(370): tr|A0A1G6B8W6|A0A1G6B8W6_9DELT S-adenosylmethionine:tRN A ribosyltransferase-isomerase OS=Desulfonatronum thios ulfatophilum OX=617002 GN=queA PE=3 SV=1
MKYIESVRDTSKEFFLDDYDYHLPEELIAQSPPLRRGDSKLLVVSRQDSSVQHSAFAELLDHLSKKSLIVVNNSTVVPARIRARTETGSELEMLLLTPLDLLQQNLVKTASSCKVSATALLRPSKKFKEGKKINFGQLTVEVIEKQRFGHCQVILHWNGNSLESILNQAGEMPLPPYIRRKPDAGDSDRYQTIYADSAEKGSIAAPTAGLHFTREMRDKLLDAGHSWAEVTLYVGYGTFSPIREQDIRNHTMHSEYVKIDEHCVEMICKAKKDGNPVIAVGTTSMRTLEGIAAIKGRLEPFKGWLDTYIYPGFEFKIVEGLITNFHLPRSSLLVLVSAFAGRERMLAAYRKAVEARYKFFSYGDAMFIKP

SEQ ID NO: 65897 - protein, 371 aa, Desulfonauticus sp.
  misc_feature (1)..(371): tr|A0A101DJA8|A0A101DJA8_9DELT S-adenosylmethionine:tRN A ribosyltransferase-isomerase OS=Desulfonauticus sp. 3 8_4375 OX=1635258 GN=queA PE=3 SV=1
MDLPKKDNLPDLFNLDTYDFSLPSELIASLPPKNRGTSRLLVLDKKSGDITLASFKELARFLPPKSLLVANNTKVLPARIWGRKKQQNHLGGKVEFLLLTPFPLLKIQDTRENFKECIAEGLLRASKRPKPGQEVVFAPDFSLEVLETGDFGRAKVKLIFQGDLKEKFLQLGHIPLPPYIKRADTDLDRERYQTIYAAEEKIGAVAAPTAGLHFSPELQAELTHLGFDFAYITLYVGYGTFSPIRTQDIRQHQMHGEYFEIPEQTARKIQEAKKNQRPVIAIGTTTVRTLEGAYQKHQKIRALKDVTDIYIFPGYEFKVVDHLITNFHLPKSSLIIMVSAFAGLENIKRAYKLAIEEKFRFFSYGDAMLII

SEQ ID NO: 65898 - protein, 362 aa, Desulfonauticus submarinus
  misc_feature (1)..(362): tr|A0A1H0BN13|A0A1H0BN13_9DELT S-adenosylmethionine:tRN A ribosyltransferase-isomerase OS=Desulfonauticus subma rinus OX=206665 GN=queA PE=3 SV=1
MKKITSIFNLETYDFKLPEELIAQQPISKRSHSRLLVLNKNTGQIQLASFSELKHFLPSGSLLVGNNTKVLPARILGHKETGGKVEFLLLTPFPLLKPKKISSNQYVVEAEGLLKASKRPKKDQKIIFKEDFYLIVKENKEFGQAKVQIFFQGNLKDKFIAYGHIPLPPYIRREDTQEDKARYQTVYASEDKIGAVAAPTAGLHFTKHLKQELLAIGFDFTYITLYVGYGTFSPVRTKDIRNHQMHAEYFEISKKSAKVISQAKRAKRPIIAIGTTTVRTLEGAFALMGEIRPFSGFTDIFIYPGFKFKVIDHLITNFHLPKSSLIMLVSALAGIENIKKAYQVAIENKMRFFSYGDAMLIL

SEQ ID NO: 65899 - protein, 354 aa, Desulfonema ishimotonii
  misc_feature (1)..(354): tr|A0A401G3P5|A0A401G3P5_9DELT S-adenosylmethionine:tRN A ribosyltransferase-isomerase OS=Desulfonema ishimoton ii OX=45657 GN=queA PE=3 SV=1
MYLLKDYFYELPEDRIAQKPVGGRDGSRLLQMSRETGALSHRTFADLPECLSGPDVLVINNTKVIPGRLTGKKETGGRAELLILNYGSGSRTVPETGDLICECLVKASKRPRTGTRFFFDHGLTAEILESGGMIHTVRFSCPGNFEEIMYRIGEMPLPPYIKRNGNGGAPCDDEATYQTVYAAQKGAIAAPTAGLHFTDALLARIRARGVQIVTVTLHVGYGTFVPVRVPDIREHQMHSEWYSVPPETAAAINAAKENGGRVVAVGTTSVRTLEYVAAKYGEMRADTGNCDLFIYPGYAFRVVDAMITNFHLPESTLLMLVSAFAGREEMLNAYKTAVEEKYRFYSYGDAMLIA

SEQ ID NO: 65900 - protein, 341 aa, Desulfonispora thiosulfatigenes
  misc_feature (1)..(341): tr|A0A1W1VS57|A0A1W1VS57_DESTI S-adenosylmethionine:tRN A ribosyltransferase-isomerase OS=Desulfonispora thiosu lfatigenes DSM 11270 OX=656914 GN=queA PE=3 SV=1
MKLSDFDYFLPEELIAQHPLEQRDSSRMLVLDKKSGNIEHKSFSDLIDYLSPNDVVVINNTKVIPARLYGVKENTGAKIEVVLLRQSEEVDCWEALVKPGKKLKAGTNIIFGEGKLIGEVLKTTDIGGRIIKFKYQGIFNEILNELGQMPLPPYITERLEEQGRYQTVYAEHSGSAAAPTAGLHFTPEVLEKLKNKNIEVVEILLHVGLGTFRPVKVENIEEHNMHPEYFKVSEEAADKLNRAMKQNKRIIAVGTTSTRTLEAVGKTGEVIPGEGWTDIFIYPGYSFKIVSGLVTNFHLPKSTLIMLVSTLAGRENVLKAYHEAVEKKYRFFSFGDAMLII

SEQ ID NO: 65901 - protein, 356 aa, Desulfopila aestuarii
  misc_feature (1)..(356): tr|A0A1M7XZF1|A0A1M7XZF1_9DELT S-adenosylmethionine:tRN A ribosyltransferase-isomerase OS=Desulfopila aestuarii DSM 18488 OX=1121416 GN=queA PE=3 SV=1
MEKDFTLEAYNYHLPVENIAQKPADRRDKSRLLVLDTADCSRNHRTFADILDYIGDDDMLVVNDTRVFPARLYGKKDSGGRAEVFLLGYPMPVDAPGSAEVEALIKSSKRPKPGSTITISPDLTCTVLELLDGGKARLALNFTGDLDSILAACGQVPLPPYISRNDGTTPEDVTRYQTVYANQPGAVAAPTAGLHFTEELLAQLTSRGVLLGTITLHVGYGTFAPVRAEKILEHRIHEEYVVVPKETVEKIEAAKKRGGRIWAVGTTTVRALEFAARDGQLRPIEDWCDLYIYPGFTFRVIDNLITNFHLPGSSLMFLVSALCGRETLLDCYQEAIREGYRFYSYGDAMAVIRHRP

SEQ ID NO: 65902 - protein, 362 aa, Desulfopila sp.
  misc_feature (1)..(362): tr|A0A4U0ZYQ4|A0A4U0ZYQ4_9DELT S-adenosylmethionine:tRN A ribosyltransferase-isomerase OS=Desulfopila sp. IMCC3 5005 OX=2569541 GN=queA PE=3 SV=1
MHKDFTLEAYNFNLPQENIAQKPADKRDHSRLLVMDNLNKELVHKTFSEITDYIRDEDMLVVNNTRVFPARLFGKKETGGKVEVFLLGFPEISPDTRGSAQVDALIKSSKRPKPHSTITISDKLSCTVVELLDGGKARLALQFPQSADLAEILSACGQVPLPPYIARENGTTDEDVARYQTVYADQPGAVAAPTAGLHFTDSLLAELDSRGVNFGTITLHVGYGTFAPVRAQKIKEHSIHGEYIVVPEETVRKIEATKKRGGRIWAVGTTTVRALEFAAKEGTLKPVEGVCDLYIYPGFEFKVIDNLITNFHLPESSLMFLVSALCTRKALLNCYDEAIKAGYRFYSYGDAMAVINTPRHGQ

SEQ ID NO: 65903 - protein, 362 aa, Desulfopila sp.
  misc_feature (1)..(362): tr|A0A4U1AI80|A0A4U1AI80_9DELT S-adenosylmethionine:tRN A ribosyltransferase-isomerase OS=Desulfopila sp. IMCC3 5006 OX=2569542 GN=queA PE=3 SV=1
MQDDLSLHAYNYHLPEHLIAQHPAEKRDDSRLMVVNAAPREPEHCRFSDIARFIGKEDMLVVNNTRVFPARLLGAKETGGKAEVFLLEFPTIDPQNHTTALANGLIKSSKRPKKGSMITMNERLSCTVEEDLEGGKLRLRLHFDPSLGLAETLQRSGQVPLPPYISRKNGCTAEDVTRYQTVYASRPGAVAAPTAGLHFTDSLLAKISKQGTSIGQITLHVGYGTFAPVRETDITRHQIHREYLTIPQETVDTITATKKRGGRIWAVGTTTVRALEFGAIRTGRLQAIEDWCDLYIYPGFQFKVIDNLITNFHLPDSSLMFLVSALCGRKTLLDCYGIAVKEQYRFFSYGDAMAVITKPSAI

SEQ ID NO: 65904 - protein, 368 aa, Desulfoplanes formicivorans
  misc_feature (1)..(368): tr|A0A194AGB7|A0A194AGB7_9DELT S-adenosylmethionine:tRN A ribosyltransferase-isomerase OS=Desulfoplanes formici vorans OX=1592317 GN=queA PE=3 SV=1
MHDPSPSPTIPADFDLASYEYHLDESRIAQTPAPNREDSRLLVLDRSRPGQTATVFSSIADYLPENALLVANNTKVLPARLMGHKESGGKTEFLLLTPLVLIKEIPGRSGWSTARVQGLLRASKAPKPGSKVIFNHRLFLTVVQRGQFGQATVMLSWQGNLTDHFLTDGHIPLPPYIHRQDRPEDRERYQTIFAREDKLGSVAAPTAGLHFTPKVKESLARKSITWEEITLYVGYGTFSPLRCQDIRNHSMHAEYIEISAPTAAAIKQAKDEGRPIVALGTTTVRTLESMYAKTGGIHPFAGWTDLFIMPGYRFRVIDHLITNFHLPGSSLIVLVSALAGRDRIKEAYAFALDHDFRFFSYGDAMLIL

SEQ ID NO: 65905 - protein, 364 aa, Desulforhopalus singaporensis
  misc_feature (1)..(364): tr|A0A1H0TGC5|A0A1H0TGC5_9DELT S-adenosylmethionine:tRN A ribosyltransferase-isomerase OS=Desulforhopalus singa porensis OX=91360 GN=queA PE=3 SV=1
MIPQEDLTLEAYRYHLPKNCIAQHPADRRDTSRLMVLDSGSDSLSHRHFNNLDEYIGPCDMLVVNNTKVFPARLEGVKETGGKAEVFLLELPSEDDCDIGTATATALIKSSKRPKPGSVITIGDNLHCVVSELLEDGKAALELHYNRSHTLAACLLECGQVPLPPYIVRKNGSTKEDAARYQTVYAAQPGAVAAPTAGLHFTDSLLSRITDKGTLLGEVTLHVGYGTFAPVRDNDITQHKIHREFLSIPEETVAKVEKTRERGGKIWAVGTTSVRALEYGALKTGRLQATEEWCDLYIYPGFKFQVTDNLITNFHLPDSSLMFLVSALCGRKTLLNCYKKAIEKGYRFFSYGDAMAIIGDHPRV

SEQ ID NO: 65906 - protein, 358 aa, Desulforhopalus sp.
  misc_feature (1)..(358): tr|A0A4U0ZMP1|A0A4U0ZMP1_9DELT S-adenosylmethionine:tRN A ribosyltransferase-isomerase OS=Desulforhopalus sp. I MCC35007 OX=2569543 GN=queA PE=3 SV=1
MQEDLKLAAYHYDLPQESIAQRPADKRDNSKLMVLNRADNSRQHCHFSDVHEFIQKGDVLVVNNTKVFPARLFGQKATGGKIEVFLLEFPKLLESSTHSGRAHGLLKSSKRPVIGSTITINEELRCQVVDYLEGGKALLEIHFNEDLGLMRCLELAGNVPLPPYINRKEGSTKEDSQRYQTVYADQPGAVAAPTAGLHFTQELLEKLRNKGVTIAEVTLHVGYGTFAPVRESDITRHQIHREYLSIGRDVVKKVNDTKKQGGKIWAVGTTSVRALEFGARETGTLQAMEDWCDLYIYPGFTFKVVDNLITNFHLPDSSLMFLVSALCGRETLLNCYESAIKKGYRFFSYGDAMAIIGS

SEQ ID NO: 65907 - protein, 339 aa, Desulforudis audaxviator
  misc_feature (1)..(339): tr|B1I2I4|B1I2I4_DESAP S-adenosylmethionine:tRNA ribosy ltransferase-isomerase OS=Desulforudis audaxviator (str ain MP104C) OX=477974 GN=queA PE=3 SV=1
MSESNLRTELFNYHLPWELIAQQPATPRDSSRLLVMDRGSREVSETVFSAVVNWLEPGDVLVINDTKVMKARLFGKKPTGGKLEIFLLHPLGDSRWEALLKPYPKGGVLLLGDSVRVQVLEKTARSTFVLQFPTPEAAVEAMGKWGETPLPPYIKEPLADQDRYQTVLAKVHGSSAAPTAALHFTPELLQRVRDKGVQVVNFTLHMGVGSFRPIKTEYVADHNLPLEFYHLPEETVVAVQQAKRQGSRVVACGTDAVRALESAALKEFRPGSGWTDLFITPGYRFQVVDRIITNLHLPCSSHLVLVSAFASREFALQAYAYAVREKFRFLSFGDATLII

SEQ ID NO: 65908 - protein, 351 aa, Desulfosoma caldarium
  misc_feature (1)..(351): tr|A0A3N1ULX4|A0A3N1ULX4_9DELT S-adenosylmethionine:tRN A ribosyltransferase-isomerase OS=Desulfosoma caldarium OX=610254 GN=queA PE=3 SV=1
MSYRLEDYDYDLPEHLVAQKPSPQRDRCALMVLHRITGMIEHRRFVDLPSYFRPGDVLVMNDTRVVPARLLGVKETGGRVELLVLDPHKPPEEGRAKGYRCLVKSSKPAKEGLRLLVEGHVTAQVVQRFENGQVLVSFDHDNLLEFLEAKGRVPLPPYIRRAGTEEREEDRTDYQTVYAQEPGAVAAPTAGLHFTEELLEALKTFGVELVCITLHVGFGTFAPVRTEDIRDHGMHSEVVHVSEEAAARIQTAKQQGRRVLAVGTTVVRTLEWTACRYGAVTPVSGSCDHYIYPGYSFRVVDGMITNFHLPKTSLLILVSAFAGREKILAAYKEAIRRQYRFFSYGDAMLIV

SEQ ID NO: 65909 - protein, 340 aa, Desulfosporosinus acididurans
  misc_feature (1)..(340): tr|A0A0J1FSL8|A0A0J1FSL8_9FIRM S-adenosylmethionine:tRN A ribosyltransferase-isomerase OS=Desulfosporosinus aci didurans OX=476652 GN=queA PE=3 SV=1
MNVSEFDFDLPEELIAQHPVEPRDASRLMVVDRKTGSIEHHTFRDLVSLLDSGDVLVLNNTRVIPARLIGEKVDSQAKIEVLLLKRLELDVWEALVKPGKRLKVGQKVSFGHGLLVGELQEILENGNRKIRFTYAGVFETILDQLGEMPLPPYITAQLEDQERYQTVYAKERGSVAAPTAGLHFTPKLLADLQAKGVEIVEILLHVGLGTFRPVKVEDVQEHVMHSEYYRVETEAAERINRAKQDGRRVIAVGTTVARTLESVGHEGKVVPGEGWTDIFIYPGYEFKIVDALLTNFHFPKSTLVMLVSALAGRDLILHAYKMAVDQQYRFYSFGDAMFIR

SEQ ID NO: 65910 - protein, 340 aa, Desulfosporosinus acidiphilus
  misc_feature (1)..(340): tr|I4D999|I4D999_DESAJ S-adenosylmethionine:tRNA ribosy ltransferase-isomerase OS=Desulfosporosinus acidiphilus (strain DSM 22704 / JCM 16185 / SJ4) OX=646529 GN=queA PE=3 SV=1
MNVSEFDFDLPEELIAQHPVEPRDASRLMVVDRQSGSLEHHSFRDLLALLDAGDVLVLNNTRVIPARLIGEKEGSQAKMEVLLLKRLELDVWEALVKPGKRLKVGQNVTFGNGLLSCELLEILENGNRKIRFIYTGVFETILDQLGEMPLPPYITVQLEDQERYQTVYAKERGSVAAPTAGLHFTPELISDLQAKGVEIVEILLHVGLGTFRPVKVENVQEHVMHSEYYRVEAEAAERINRAKQEGRRVIAVGTTAARTLESVGRQGRVIPGEGWTDIFIYPGYAFQIVDALLTNFHFPKSTLVMLVSALAGRELILRAYKVAVEQNYRFYSFGDAMFIR

SEQ ID NO: 65911 - protein, 341 aa, Desulfosporosinus fructosivorans
  misc_feature (1)..(341): tr|A0A4Z0R461|A0A4Z0R461_9FIRM S-adenosylmethionine:tRN A ribosyltransferase-isomerase OS=Desulfosporosinus fru ctosivorans OX=2018669 GN=queA PE=3 SV=1
MNVSEFDFYLPETLIAQHPVEPRDSSRLMVLSRESGGIEHHTFRDLVSLLKTGDVLVLNNTRVIPARLIGEKEGTEGKIEVLLLKMLEFNVWEALVKPGKKLKVGQKVRFGGGILTGELLDILENGNRKIRFTYTGVFETVLDTLGQMPLPPYITAQLEDQGRYQTVYAKERGSVAAPTAGLHFTPELLGELEKKGVEIVEILLHVGLGTFRPVKVENIQDHPMHSEYYRVDLEAAEKINRAKQEGRRVIAVGTTAARTLESVGDDQGRVVPGEGWTDIFIYPGYSFKVVDVLLTNFHFPKSTLVMLVSALAGRELTIKAYELAVLERYRFYSFGDAMLIL

SEQ ID NO: 65912 - protein, 340 aa, Desulfosporosinus hippei
  misc_feature (1)..(340): tr|A0A1G8GHU6|A0A1G8GHU6_9FIRM S-adenosylmethionine:tRN A ribosyltransferase-isomerase OS=Desulfosporosinus hip pei DSM 8344 OX=1121419 GN=queA PE=3 SV=1
MNVSDFDFELPEDLIAQHPVEPRDTSRLMVVNRGSGEIAHHTFRDLKSLLIKGDVLVLNNTRVIPARLIGEKEGTEVKIEVLLLKRLELDVWEALVKPGKRLKIGQKVSFGNGILVGELQEILANGNRRIHFSYSGMFETILDDLGQMPLPPYITAQLEDRERYQTVYAKERGSVAAPTAGLHFTPELLEELRMKGIEIVEILLHVGLGTFRPVKVEDISEHAMHSEYYRVEVEAAERINRAKLEGRRVIAVGTTAARTLESVAQKGQVIPGEGWTDIFIYPGYLFQIVDVLLTNFHFPKSTLVMLVSALAGRELILKAYENAVQERYRFYSFGDSMLIL

SEQ ID NO: 65913 - protein, 340 aa, Desulfosporosinus lacus
  misc_feature (1)..(340): tr|A0A1M5Z218|A0A1M5Z218_9FIRM S-adenosylmethionine:tRN A ribosyltransferase-isomerase OS=Desulfosporosinus lac us DSM 15449 OX=1121420 GN=queA PE=3 SV=1
MNVSDFDFELPEDLIAQHPVEPRDTSRLMVVNRQSGKIAHHTFRDLSSLLKKGDVLVLNNTRVIPARLIGEKEGTEVKIEILLLKRLKLDVWEALVKPGKRLKVGQKVSFGQGILVGELQEILANGNRKIHFSYSGMFETILDQLGEMPLPPYITAQLEDQERYQTVYAKERGSVAAPTAGLHFTPDLLDELQKTGIEIVEILLHVGLGTFRPVKVEDIRDHAMHSEYYRVDAEAAERINRAKLEGRRVIAVGTTAARTLESVGHEGKVVPGEGWTDIFIYPGYLFQVVDVLLTNFHFPKSTLVMLVSALAGRELILKAYETAVQERYRFYSFGDSMLIL

SEQ ID NO: 65914 - protein, 340 aa, Desulfosporosinus meridiei
  misc_feature (1)..(340): tr|J7IMC7|J7IMC7_DESMD S-adenosylmethionine:tRNA ribosy ltransferase-isomerase OS=Desulfosporosinus meridiei (s train ATCC BAA-275 / DSM 13257 / NCIMB 13706 / S10) OX= 768704 GN=queA PE=3 SV=1
MNVSDFDFELPEDLIAQHPVEPRDTSRLMVVNRESGEIAHHTFRDLKSLLIKGDVLVLNNTRVIPARLIGEKEGTEVKIEVLLLKRLELDVWEALVKPGKRLKIGQKVSFGNGILVGELQEILANGNRRIHFSYSGMFETILDELGQMPLPPYITAQLEDRERYQTVYAKERGSVAAPTAGLHFTPELLDELRMKGVEIVEILLHVGLGTFRPVKVEDISEHAMHSEYYRVEVEAAEQINRAKLEGRRVIAVGTTAARTLESVGHKGKVTPGEGWTDIFIYPGYLFQIVDVLLTNFHFPKSTLVMLVSALAGRELILKAYENAVQERYRFYSFGDSMLIL

SEQ ID NO: 65915 - protein, 340 aa, Desulfosporosinus orientis
  misc_feature (1)..(340): tr|G7WCR3|G7WCR3_DESOD S-adenosylmethionine:tRNA ribosy ltransferase-isomerase OS=Desulfosporosinus orientis (s train ATCC 19365 / DSM 765 / NCIMB 8382 / VKM B-1628) O X=768706 GN=queA PE=3 SV=1
MNVSDFDFELPEELIAQHPAEPRDTSRLMVVDRKSGDITHHTFRDLSSLLHKGDILVLNNTRVIPARLIGEKEGTQVKIEVLLLKRLELDLWEALVKPGKRLKVGQKVSFGNGLLMGELREILDNGNRKIYFQFSGVFETILDQLGEMPLPPYITAQLEDRERYQTVYAKEQGSVAAPTAGLHFTPELLEELREKGIEIVEILLHVGLGTFRPVKVEDIREHTMHSEYYRVDPEAAQRINQGKQEGRRIIAVGTTAARTLESACNQGKVIPGEGWTDIFIYPGYSFQVIDALITNFHFPKSTLVMLVSALAGRELILKAYGIAVKEKYRFYSFGDSMLIL

SEQ ID NO: 65916 - protein, 340 aa, Desulfosporosinus sp.
  misc_feature (1)..(340): tr|A0A1C3F8K6|A0A1C3F8K6_9FIRM S-adenosylmethionine:tRN A ribosyltransferase-isomerase OS=Desulfosporosinus sp. BG OX=1633135 GN=queA PE=3 SV=1
MNLSEFDFDLPETLIAQHPVEPRDASRLMVVKRDSGGIEHHTFRDLVSFLKTGDVLVLNNTRVIPARLIGEKEGTEAKIEVLLLRRLELDVWEALVKPGKRLKVGQKVSFGQGILTGVLQDILENGNRRIHFSYSGLFETILDQLGQMPLPPYITAQLEDQERYQTVYAKERGSVAAPTAGLHFTPELLSELQKMGVQIVEILLHVGLGTFRPVKVDDIREHAMHSEYYRVDLEAAERINQAKQEGRRVIAVGTTAARTLESAVDHGRVVPGDGWTDIFIYPGYSFKIVDALLTNFHFPKSTLVMLVSALAGRKLILQAYEVAVRERYRFYSFGDAMLII

SEQ ID NO: 65917 - protein, 341 aa, Desulfosporosinus sp.
  misc_feature (1)..(341): tr|A0A101WJ48|A0A101WJ48_9FIRM S-adenosylmethionine:tRN A ribosyltransferase-isomerase OS=Desulfosporosinus sp. BRH_c37 OX=1734396 GN=queA PE=3 SV=1
MNVSEFDFYLPETLIAQYPVEPRDASRLMVLNRDSERIEHHTFRDLGSLLRKGDVLVLNNTRVIPARLIGEKEGTEGKIEVLLLKRLELDVWEALVKPGKRLKVGQKVRFGSGILTGELLDILENGNRRIYFTYSGVFETILDALGQMPLPPYITAQLEDQERYQTVYAKERGSVAAPTAGLHFTPELLGSLQKKGVEIVEILLHVGLGTFRPVKVENIQDHLMHSEYYSVDQEAAEQINRAKQEERRVIAVGTTAARTLESVGNDQGRVIPGVGWTDIFIYPGYSFKVVDVLLTNFHFPKSTLVMLVSALAGRELTIKAYELAVLERYRFYSFGDAMLIL

SEQ ID NO: 65918 - protein, 340 aa, Desulfosporosinus youngiae
  misc_feature (1)..(340): tr|H5Y1W2|H5Y1W2_9FIRM S-adenosylmethionine:tRNA ribosy ltransferase-isomerase OS=Desulfosporosinus youngiae DS M 17734 OX=768710 GN=queA PE=3 SV=1
MNVSEFDFELPEDLIAQHPVEPRDTSRLMVVNRENGGIAHHRFRDLTSLLNGGDVLVLNNTRVIPARLIGEKEGTEVKIEILLLKRLELDVWEALVKPGKRLKVGQRVSFGHGILVGELQEIMENGNRIIRFMYSGVFESILDQLGEMPLPPYITAQLEDRDRYQTVYAKERGSVAAPTAGLHFTPELLDELRKNGVEIVEILLHVGLGTFRPVKVDDIREHAMHSEYYRVGIEAAEQINRAKQEGRRVIAVGTTAARTLESAGHNGKVAPGEGWTDIFIYPGYSFQVVDVLLTNFHFPKSTLVMLVSALAGRELILKAYETAVQERYRFYSFGDAMLIL

SEQ ID NO: 65919 - protein, 358 aa, Desulfotalea psychrophila
  misc_feature (1)..(358): sp|Q6AJA8|QUEA_DESPS S-adenosylmethionine:tRNA ribosylt ransferase-isomerase OS=Desulfotalea psychrophila (stra in LSv54 / DSM 12343) OX=177439 GN=queA PE=3 SV=1
MEKDLSREAYYYHLPEENIAQKPADKRDHSKLMVLNTSTGKVEHKIFNNVLEYINPGDMLIVNNTKVFPARLTGHKESGGKVEVFLLELPTYIRPGVSESIALIKSSRKPKVGSTLTINEALSCRVTEQLAGGKARLQLHYDKDVDVTEILAGIGEIPLPPYIKREEGTTPEDVTRYQTVYANVPGAVAAPTAGLHFTEELLQSLRENGIQFGEVTLHVGYGTFAPVRAENIVEHNIHEEFVSVGQETVDKIIATRKAGGKIWAVGTTTVRSLEFAAAQHGGQIAATEGWCALYIYPGFKFQVIDNLITNFHLPDSSLMFLVSALCRREKLLECYQMAIKEDYRFFSYGDAMAVISGE

SEQ ID NO: 65920 - protein, 360 aa, Desulfotalea sp.
  misc_feature (1)..(360): tr|A0A2G2E0C4|A0A2G2E0C4_9DELT S-adenosylmethionine:tRN A ribosyltransferase-isomerase OS=Desulfotalea sp. OX=2 030813 GN=queA PE=3 SV=1
MQEDLSLDAYHYDLPQGSIAQHPADKRDNSKLMVLQTQDNSLQHRKFSNLHEYLQEGDLLVVNNTKVFPARLFGKKETGGKIEVFLLEFPKLVEGTTNTARTNCLLKSSKRPQLGSTLSISDELHCQVVDYLEDGKALLQLHFNEDLGLMRCLELAGDVPLPPYITRKTGATKEDTKRYQTVYADQPGAVAAPTAGLHFTKELLTKLKDKGVTIGEVTLHVGYGTFAPVRETDITRHQIHREYLSIGQDVVDKVQATKQRGGKVWAVGTTSVRALEFGAKKTGTLQPMEDWCDLYIYPGFTFKVIDNLITNFHLPDSSLMFLVSALCGRETLLNCYDAAIKEDYRFFSYGDAMTIIGDRS

SEQ ID NO: 65921 - protein, 354 aa, Desulfotignum phosphitoxidans
  misc_feature (1)..(354): tr|S0FUB4|S0FUB4_9DELT S-adenosylmethionine:tRNA ribosy ltransferase-isomerase OS=Desulfotignum phosphitoxidans DSM 13687 OX=1286635 GN=queA PE=3 SV=1
MFDLSDYTYDLPEDLIAQTPCDIRSDSRLLHIHRNTHAVSHRRFSDLPGLLHPGDLLVVNDTRVIPARLFGKKATGGRVEVLIIDYAQGMQHLEKTGSFQCNCLVRASKMPKTGSVLYFTEQMTGQVMSVRDGICEILFAGGKQFVAYLKSAGTLPLPPYIRRDPETRPVPEDRENYQTVYAKNDGAVAAPTAGLHFTKPLMAALARKKIDMVHLTLHVGYGTFVPVRVKDIREHQIHSEYYSLSAGAAQKINAAKDQGRRVVAVGTTSVRTLEFTADDQGRVASGTGMCDLYIYPGYRFKCVDAMITNFHLPKSTLLMLVSAFYDRQRMLDAYAAAVAEKYRFFSYGDAMLIE

SEQ ID NO: 65922 - protein, 341 aa, Desulfotomaculum aeronauticum
  misc_feature (1)..(341): tr|A0A1M6NMQ5|A0A1M6NMQ5_9FIRM S-adenosylmethionine:tRN A ribosyltransferase-isomerase OS=Desulfotomaculum aero nauticum DSM 10349 OX=1121421 GN=queA PE=3 SV=1
MQLSDFDYHLPEELIAQEPIVRRDQSRLMVVNKNNDQIRHQIFQDILDYLKPGDVLVMNDSKVLPARIFGIKTTTGAKIEVLLLRQIAPNRWETLVKPGKKAKVGERLDFGQGLMTGTIIDHTEVGGRIIEFSHQEPFLQVLERIGTMPLPPYIKKPLDDQKRYQTVYARQEGSAAAPTAGLHFTLELLETIRNQGIQTETVLLHVGLGTFRPVQVENVLEHKMHEEYFEISPQAAETINQAKKRGGRVIAVGTTSVRCLESSSTEEGIVQPGSGLTNIFIYPGYQFKIIDGLITNFHLPKSTLLMLVSALAGREKMLAAYQQAVQERYRFFSFGDAMLII

SEQ ID NO: 65923 - protein, 211 aa, Desulfotomaculum aquiferis
  misc_feature (1)..(211): tr|A0A4Q2WPD3|A0A4Q2WPD3_9FIRM S-adenosylmethionine:tRN A ribosyltransferase-isomerase OS=Desulfotomaculum aqui feris OX=1397668 GN=N752_04420 PE=3 SV=1
MNFVTGNLFCKCWSVLEQCRCHLTLKTAGGSKALPDGLCPARGVSSGSYRRASFTPELLGEIKLKGVKLANVLLHVGLGTFRPVQVEDITNHQMHEEFFEMTPESAGIINDARQKGGRVIAVGTTSVRCLETSSNNEGIVIPGSGMTDIFIYPGYKYKLVEGLITNFHLPKSTLLMLVSAFAGRERMLEAYRLAVAERYRFFSFGDAMFII

SEQ ID NO: 65924 - protein, 54 aa, Desulfotomaculum aquiferis
  misc_feature (1)..(54): tr|A0A4V1S4F7|A0A4V1S4F7_9FIRM S-adenosylmethionine:tRN A ribosyltransferase-isomerase OS=Desulfotomaculum aqui feris OX=1397668 GN=N752_04415 PE=3 SV=1
MVHKDRDSFEHRQFKDLIGYLKSGDVLVMNDTKVLPARIFGTRISTGAKLKYYC

SEQ ID NO: 65925 - protein, 339 aa, Desulfotomaculum arcticum
  misc_feature (1)..(339): tr|A0A1I2SJV8|A0A1I2SJV8_9FIRM S-adenosylmethionine:tRN A ribosyltransferase-isomerase OS=Desulfotomaculum arct icum DSM 17038 OX=1121424 GN=queA PE=3 SV=1
MKITDFDYYLPEELIAQDPAPRRDESRLMVLRKSGGAPEHRTFKDIVEYIDPRDVLVINNTKVIPARLWGKKEGTGTVIEVLLLTRINDHTWETLVRPGRRVRPGTKIIFGDELKGTAQEVLAGGCRKISFDYQGQFEPILDKLGSMPLPPYIKKEPADPQRYQTVYARYPGSAAAPTAGLHFTPDLLEQIKNRGTAVTSVILHVGLGTFRPVKVEDITEHKMHSEYYEIPVDTETIINNKQTGGRTIAVGTTTTRCLETSGLPGGQVRSGTGRTDIFIYPGYDFKVVDGLITNFHLPRSTLLMMVSALVGRERLLSAYEEAVRMRYRFFSFGDAMLII

SEQ ID NO: 65926 - protein, 341 aa, Desulfotomaculum copahuensis
  misc_feature (1)..(341): tr|A0A1B7LHL1|A0A1B7LHL1_9FIRM S-adenosylmethionine:tRN A ribosyltransferase-isomerase OS=Desulfotomaculum copa huensis OX=1838280 GN=queA PE=3 SV=1
MNLSDFDYHLPPELIAQDPAPQRDQSRLMVLHRENGVVEHRLFRDLVEYLQPGDVLVLNETRVIPARLIGHKTDTGAQIEVLLLRRLDQGRWETLVRPGRRAGPGTRLVFGAGELTGLVMDRTDAGGRVVAFNSARPFDEVLTALGRMPLPPYIKKYPDDPQRYQTIYARQEGSAAAPTAGLHFTAELLRRIEAKGVCIVRVLLHVGLGTFRPVQVADITKHHMHAEYYEITPAAAQAVNAARKQGGRVFAVGTTTTRCLETAAKETGEIVPGAGWTEIFIYPGYCFQAIDGLVTNFHLPRSTLLMMISAFAGREKVLAAYRTAVEAGYRFFSFGDAMLIL

SEQ ID NO: 65927 - protein, 341 aa, Desulfotomaculum ferrireducens
  misc_feature (1)..(341): tr|A0A1S6IW60|A0A1S6IW60_9FIRM S-adenosylmethionine:tRN A ribosyltransferase-isomerase OS=Desulfotomaculum ferr ireducens OX=1833852 GN=queA PE=3 SV=1
MQVSDFDFYLPEELIAQEPIEKRDQSRLMVISKKDGHIKHKIFSDILEYFQPGDVLVMNDSKVLPARIFGRKSSTGAKIEVLLLRQIAPGQWETLVKPGKKAKIGESLVFGEGLMTGKIIDHTEVGGRIIKFSCQQPFLQVLEQIGTMPLPPYIKKPLADQRRYQTVYARQEGSAAAPTAGLHFTVELLEKIRELGVITETVLLHVGLGTFRPVQVENIAEHRMHEEYYEITPQAAENINRAKQRGGRIIAVGTTSVRCLESSSTVDGVVQPGSGFTNIFIYPGYQFKVIDGLITNFHLPKSTLLMLVSALVGRERILAAYQEAVREKYRFFSFGDAMLII

SEQ ID NO: 65928 - protein, 341 aa, Desulfotomaculum hydrothermale
  misc_feature (1)..(341): tr|K8EEM4|K8EEM4_9FIRM S-adenosylmethionine:tRNA ribosy ltransferase-isomerase OS=Desulfotomaculum hydrothermal e Lam5 = DSM 18033 OX=1121428 GN=queA PE=3 SV=1
MKLIDFDYHLPEQLIAQEPLEKRDQSRLMVVHRDNRPLEHKVFRDLVEYLRPGDVLVMNESKVLPARIYGTKTSTGAKIEVLLLRQIAERRWEALVKPGKKARVGDMLDFGEGSMTGSILDHTEAGGRIIEFSHREPFLQVLERLGTMPLPPYIKKPLADRQRYQTVYARQEGSAAAPTAGLHFTHELLDEIRSMGVKTVTVLLHVGLGTFRPVQTEDIEQHVMHSEYYEIAPQAAEEINKAKEQGGRVIAVGTTSVRTLETAGNAKGLVLPGSGMTDIFIYPGYKFKIIDGLITNFHLPKSTLLMLVSALAGREKILAAYRTAVQEKYRFFSFGDAMLII

SEQ ID NO: 65929 - protein, 341 aa, Desulfotomaculum nigrificans
  misc_feature (1)..(341): tr|F6B449|F6B449_DESCC S-adenosylmethionine:tRNA ribosy ltransferase-isomerase OS=Desulfotomaculum nigrificans (strain DSM 14880 / VKM B-2319 / CO-1-SRB) OX=868595 GN =queA PE=3 SV=1
MRLSDYDYQLPEELIAQEPLVNRDQSRLMVVHKDNHNFEHKHFKDIINYLQPGDVLVLNDTKVIPARIFGTRIATGAKIEVLLLRQLTNNRWETLVKPGKKARVGDILDFGQGQMQGKILDHTDVGGRIIEFSFREPFVQVLERIGTMPLPPYIKKPLADQQRYQTVYARQEGSAAAPTAGLHFTPELLAEIRSRGVITVNVLLHVGLGTFRPVQVEDITQHHMHEEYYEVTPEAAEKINTARERGGRIIAVGTTSVRCLETSANQAGQVLAGSGLTDIFIYPGYRFKVVEGLITNFHLPKSTLLMLVSALAGREKILAAYQEAVRQRYRFFSFGDAMLII

SEQ ID NO: 65930 - protein, 341 aa, Desulfotomaculum putei
  misc_feature (1)..(341): tr|A0A1M4SQB8|A0A1M4SQB8_9FIRM S-adenosylmethionine:tRN A ribosyltransferase-isomerase OS=Desulfotomaculum pute i DSM 12395 OX=1121429 GN=queA PE=3 SV=1
MKLSDFDFHLPEELIAQEPIEKRDQSRLMVVHRDSQAIEHKTFRDLIEYLRPGDVLVMNESKVLPARIFGTRISTGAKIEVLLLRQTSGSRWEALVKPGKKARIGDVLDFGNGLLTGIIVDHTDVGGRIIEFSYREPFLQVLERIGTMPLPPYIKKPLEDQQRYQTVYARQEGSAAAPTAGLHFTHELLEEIRAKGVKTVTVLLHVGLGTFRPVQVEDIELHTMHKEYFEITPQAAEEINRVKGRGGRVIAVGTTSVRTLETSGNETGQVLPGSGMTDIFIYPGYKFKVIDGLITNFHLPKSTLLMLVSALAGREKILAAYRTAVQEKYRFFSFGDAMLII

SEQ ID NO: 65931 - protein, 341 aa, Desulfotomaculum reducens
  misc_feature (1)..(341): sp|A4J540|QUEA_DESRM S-adenosylmethionine:tRNA ribosylt ransferase-isomerase OS=Desulfotomaculum reducens (stra in MI-1) OX=349161 GN=queA PE=3 SV=1
MQLSDFDFELPEELIAQEPIKQRDQSRLMIVHRDIDRTEHKTFKDLLQYLQPGDVLVMNDSKVLPARIYGEKVSTGAKIEVLLLRQISANQWETLVKPGKRAKIGEILDFGSGKMKGKIVDHTDVGGRVIEFSCQEPFLQVLEQIGSMPLPPYIKKPLTDKQRYQTVYARQEGSAAAPTAGLHFTRELLEEIRNRGVSIVTVLLHVGLGTFRPVQVEDVTSHRMHEEYYEITPQAAEEINQAKLRGGRVIAVGTTSVRCLETSSNEAGQVLPGSGFTDIFIYPGYQFKVIEGLVTNFHLPKSSLLMLISALAGREKILKAYQQAVTEQYRFFSFGDAMLII

SEQ ID NO: 65932 - protein, 341 aa, Desulfotomaculum ruminis
  misc_feature (1)..(341): tr|F6DN34|F6DN34_DESRL S-adenosylmethionine:tRNA ribosy ltransferase-isomerase OS=Desulfotomaculum ruminis (str ain ATCC 23193 / DSM 2154 / NCIMB 8452 / DL) OX=696281 GN=queA PE=3 SV=1
MQLTDFDYELPDELIAQEPAAKRDQSRLMVVHKKDKNIEHQQFTDLLKYLRSGDVLVMNDTKVIPARIYGIKISTGAKIEVLLLRQVAENCWEVLVKPGKKARVGERLDFGAGQMQGKILDYTDAGGRVIEFSCREPFLQVLERIGAMPLPPYIKKPLVDQQRYQTVYARQEGSAAAPTAGLHFTPELLAEVKSLGVKIAYVLLHVGLGTFRPVQVEDVTRHTMHQEYYEITDRSAEEINRAKASGGRVIAVGTTSVRCLETSSNEQGQVLAGSGMTEIFIYPGYSFKVIDGLITNFHLPKSTLLMLVSALAGREKVLEAYHRAVEEKYRFFSFGDAMLII

SEQ ID NO: 65933 - protein, 134 aa, Desulfotomaculum sp.
  misc_feature (1)..(134): tr|A0A3B9SSZ0|A0A3B9SSZ0_9FIRM S-adenosylmethionine:tRN A ribosyltransferase-isomerase OS=Desulfotomaculum sp. OX=41211 GN=DCK87_02845 PE=3 SV=1
MDILDINEFNYYLPPELIAQEPLPQRDKSRLMVLDRLLSRWEHKYFSDLVNYLTPGDVLVFNETKVIPARLYGRKVNGGARVEVLLLQEKQDGLRWEALVRPARRIKVGNLLTFGEGLLTGKVVEETTAGGRGI

SEQ ID NO: 65934 - protein, 341 aa, Desulfotomaculum sp.
  misc_feature (1)..(341): tr|A0A117LKC5|A0A117LKC5_9FIRM S-adenosylmethionine:tRN A ribosyltransferase-isomerase OS=Desulfotomaculum sp. 46_296 OX=1635262 GN=queA PE=3 SV=1
MKTSEFDYDLPESSIAQEPAQQRDASRLMVINRGKPDVEHRFFKDLSEYLNDGDILVINDTKVIPARLNGKKVPGGANIEILLLKPLDERRWEVLVRPGKKVRINDQLVFGDGLFSGIITGHTDSGGRVIEFIFEGNFEDLLQDAGKMPLPPYIKKYTGAPQRYQTIYARQKGSVAAPTAGLHFTEELLEKVQKKGVVLKTVMLHIGLGTFRPVSAEDITMHHMHSEYFEVSADTAHSVNLTREKGGRVVAVGTTTVRCLETAAHEDGRLSATSGWTDLFIYPGYSFKVVDAMITNFHLPRSTLLMMVSAFTGREKILSAYRLAVREKYRFFSFGDVMLIL

SEQ ID NO: 65935 - protein, 380 aa, Desulfovibrio alaskensis
  misc_feature (1)..(380): sp|Q317N3|QUEA_DESAG S-adenosylmethionine:tRNA ribosylt ransferase-isomerase OS=Desulfovibrio alaskensis (strai n G20) OX=207559 GN=queA PE=3 SV=1
MHSKHPTDTARRCETGTDSSDTAADDYSLAGYRFELPEEQIAQHPPEHRGASRLFVMDRKSGVNTQASFKDIGSFLPEGALLVANNSRVLPARMLGRRPTGGKVEFLLLTPLPLVQPQTGTDGRSCAEAEGLLRASKRVRPGDVMHFDGLDVEVLHTADFGRCAVRMHWKGDLAGLFLRQGHLPLPPYIRRPDGEDDHSRYQTVYSRQDRLGSVAAPTAGLHFTPELTASLQEQGFGWAEVTLYVGYGTFSPVRAEDIRTHTMHREYMEITEQAAQAINDAKRQGRPVVTVGTTSTRVLEGAWAACGEIRPFTGWTDIFIYPGYRFNVADHIITNFHLPESSLLMMISAFAGREKTLQAYSQAVAAGYRFFSYGDAMLIL

SEQ ID NO: 65936 - protein, 373 aa, Desulfovibrio alkalitolerans
  misc_feature (1)..(373): tr|S7UQ99|S7UQ99_9DELT S-adenosylmethionine:tRNA ribosy ltransferase-isomerase OS=Desulfovibrio alkalitolerans DSM 16529 OX=1121439 GN=queA PE=3 SV=1
MKPDLIATTDEADLLLESYDFELPQEQIAQHPAERRDASRLMILDRSRDKVVSARFADLPDILAERLPDGALLVANDSRVAPARVMGARETGGRVEMLLLTPPPLLRPSPGGASDWTTARAEALLRASKTLRPGETVHFGEDLAARIVAKGEFGRHEIELSWRGELSVVLERCGAIPLPPYIRRDPGVEDATRYQTIYADPQKTGSVAAPTAGLHFTPVIRERLAQRGFEFAFVTLYVGYGTFSPVRAKDLREHRMHAEYIEIPEQTAGMIRTAKMEGRPVLAVGTTSARTLEGAFQASGEIQAFAGSTDIFITPGYRFRVVDHMLTNFHLPLSSLIIMISGFAGRARVLSAYDQAVREGYRFFSYGDAMLIL

SEQ ID NO: 65937 - protein, 364 aa, Desulfovibrio bizertensis
  misc_feature (1)..(364): tr|A0A1T4X3A7|A0A1T4X3A7_9DELT S-adenosylmethionine:tRN A ribosyltransferase-isomerase OS=Desulfovibrio bizerte nsis DSM 18034 OX=1121442 GN=queA PE=3 SV=1
MKEIPADFRLSSYSFELPEDQIAQQPAEQRDASRLLVLNREDDSITLTNFSEIVDYLPDNAVVVANNSKVLPARIYGHKPSGGKVEFLLLTPLPLVMENKQSSEDGWHSADVVGLLRASKAPKPGLRVEFTDEFFLEVLERRDFGHSSVRLSWKGDLGTLFKDLGHYPLPPYIRRPDTPEDAKRYQTVYAEDEKLGSVAAPTAGLHFTPEVREKLKAKGIEWKEVTLYVGYGTFSPVRSEDIREHKMHGEYIEVPEDTAEAIRRAKAEGRPVFGIGTTSVRSLEGAFAATGKICAYSGWTDIFIYPGYTFNVVDKMLTNFHLPESSLIIMISALANRDTILKAYATALENKFRFFSYGDAMLIL

SEQ ID NO: 65938 - protein, 370 aa, Desulfovibrio carbinolicus
  misc_feature (1)..(370): tr|A0A4P6HNZ0|A0A4P6HNZ0_9DELT S-adenosylmethionine:tRN A ribosyltransferase-isomerase OS=Desulfovibrio carbino licus OX=296842 GN=queA PE=3 SV=1
MTDAKAPHAPPVPEDLLSSYHFELPDALIAERPCEVRDACRLMVLDRAAGSLDHRVFADLPDLLPEGALLVVNNTKVAPVRLLGKRPTGGAAEFLLLTPVALLTPQTDPATGWTSAPASGLLRVSRPPRPGDRIDFAPDLAVTAVSRGAFGHTEVTLSWRGALPAILTRIGHVPLPPYIRRADDAADRETYQTVYARDDKLGSAAAPTAGLHFTEALLARLAGRGFGLTAVTCHVGLGTFSPVRVEDLRDHAMHKEWIEVSPEAAQAVSQAKAQGRPVIAVGTTAARTLEGTAREAGAFGPFAGFTDIFIRPGHRFAVVDGMVTNFHLPGSSLVIMLAALAGRESILAAYGQAVASGYRFFSYGDAMLVL

SEQ ID NO: 65939 - protein, 368 aa, Desulfovibrio carbinoliphilus
  misc_feature (1)..(368): tr|G7Q965|G7Q965_9DELT S-adenosylmethionine:tRNA ribosy ltransferase-isomerase OS=Desulfovibrio carbinoliphilus subsp. oakridgensis OX=694327 GN=queA PE=3 SV=1
MPNPLDSAPAPDDLLAAYHFDLPEDRIANRPCARRDACRLMTVNRATGAVGDAVFADLPDLLPEGALLVANNTKVAPVRLLGRKPTGGAAEFLLVTPIALLRATTDPATGWTSAPAAGLLRVSRPPRPGDRIDFAPDLCITATRRGAFGHTEVVLSWQGSLPAVMDRIGHVPLPPYIRRADDAADRETYQTVYASDDKLGSAAAPTAGLHFTEDLLERLRARGFGFATVTCHVGIGTFSPVRVADIREHAMHREWIEVPQEAATAVLAAKAAGRPVVAVGTTAARTLEGVVREAGEVRPFAGETDIFIRPGHAFQVVDGMVTNFHLPGSSLVIMLAALVGRENLLAAYARAIASGYRFFSYGDAMLAL

SEQ ID NO: 65940 - protein, 365 aa, Desulfovibrio desulfuricans
  misc_feature (1)..(365): tr|B8J2H1|B8J2H1_DESDA S-adenosylmethionine:tRNA ribosy ltransferase-isomerase OS=Desulfovibrio desulfuricans ( strain ATCC 27774 / DSM 6949) OX=525146 GN=queA PE=3 SV =1
MHIEEADFLLQSYRFDLPQEQVAQFPPEERGGSRLLVMPRNGELTLRHENFCDLPDCLPEGALLIANNSRVLQARLLGTRSTGGKVEFLLLTPLPLVIERARADKNGGLYAEAEGLVRSGGSIREGESFGFGAGIGVTVLESGPFGQRRVRLSWTGDLAAAFAATGHIPLPPYIKRPDAEDDLSRYQTVYSRQDKTGSVAAPTAGLHFTPPLRERLAAKGFEWAEVTLYVGYGTFSPVRSSDIRSHRMHREYIEVPEATALAIARAREEKRPVIAVGTTSLRTLEGVAELCGRVQPYTGWTDIFLYPGRPFRVADGLVTNFHLPESSLLMLVSAFAGRKRVLDAYAEAIANNYRFFSYGDAMLIR

SEQ ID NO: 65941 - protein, 360 aa, Desulfovibrio desulfuricans
  misc_feature (1)..(360): tr|F0JIP6|F0JIP6_DESDE S-adenosylmethionine:tRNA ribosy ltransferase-isomerase OS=Desulfovibrio desulfuricans N D132 OX=641491 GN=queA PE=3 SV=1
MEIPEDYRLSSYDYPLPEDRIAQEPAARRDGSRLLVLDRAARSLTPARFTDLLDYLPDDCLLVANNSRVIPARVFGRKPTGGQVEFLLLTPLPLLTPEERDGWLTVRAEGLLRASKGPKPGATVTFADDFSLTALEAGEFGRWQVELRWKGDLTALFNSLGHLPLPPYIKRPDVEADRERYQTTYADRSKTGSVAAPTAGLHFTPELRERIRAKGIQWAEVTLYVGYGTFSPVRCPDIRDHRMHAEYIEVSEETAEAVRGAKAEGRPVIAVGTTSARTLEGMVREAGSIRQFRGETDIFISPGYTFKVIDGILTNFHLPESSLIIMISALAGRKTILDAYAFALENDFRFFSYGDAMLIR

SEQ ID NO: 65942 - protein, 376 aa, Desulfovibrio fairfieldensis
  misc_feature (1)..(376): tr|A0A0X8JN46|A0A0X8JN46_9DELT S-adenosylmethionine:tRN A ribosyltransferase-isomerase OS=Desulfovibrio fairfie ldensis OX=44742 GN=queA PE=3 SV=1
MIPDEADFSLSSYRFDLPSEQIAQFPPEERGASRLLVLPRKGASDPRPELRHGMFGDLPDCLPENALIIANNSRVLQARLLGSRGTGGKVEFLLLTPLPLVMERARPDKRLGGTGGAEAFSAEAEGLVRCGGSVREGETFAFGAGISVTVLESGPFGQRRVRLAWQGDLAKGFAATGHIPLPPYIKRADGEEDLSRYQTVYARSDKTGSVAAPTAGLHFTPAMREKLADRGFEWAEVTLYVGYGTFSPVRCEDIRSHRMHREYVEVPEATAAAIARAKAQGRPVVAVGTTSVRTLEGVAELCGRVQPYTGWTDIFLYPGRNFRVVDAVLTNFHLPESSLLMLVSAFAGRERMLAAYAEAVTRGYRFFSYGDAMLIK

SEQ ID NO: 65943 - protein, 361 aa, Desulfovibrio ferrireducens
  misc_feature (1)..(361): tr|A0A1G9C395|A0A1G9C395_9DELT S-adenosylmethionine:tRN A ribosyltransferase-isomerase OS=Desulfovibrio ferrire ducens OX=246191 GN=queA PE=3 SV=1
MKTIPKDLNLESYNFELPEERIAQCPAEKRHGSKLMVLDRITGETEIKSFTDVPDLLPEGALLVANNSKVIPARIFGKKPSGGRVEFLLLSPIPLIVPTATPQGYKAVVKGLLRSSKPTKIGSEVKFDCAMKLTVLGKGQFGLSDVELEWQGSLKEIFETCGKIPLPPYIRRVADETDNERYQTLYACDDKAGSVAAPTAGLHFSKEIEERLREKNIERVEVTLYVGYGTFSPVRTTDIRDHEMHSEYIEIPEETARAIKKAKDEGRPVIAVGTTSARTLEGAFQQTGKICAFKGETNIFIYPGYEFKVVDRMLTNFHLPESSLVIMISALAGRNNVLNGYQKAIENEFRFFSYGDSMYIR

SEQ ID NO: 65944 - protein, 364 aa, Desulfovibrio ferrophilus
  misc_feature (1)..(364): tr|A0A2Z6B1S5|A0A2Z6B1S5_9DELT S-adenosylmethionine:tRN A ribosyltransferase-isomerase OS=Desulfovibrio ferroph ilus OX=241368 GN=queA PE=3 SV=1
MVTVNEQDYLLKSYRYELPEESIAQSPAQKRDLSKLLVVNRESGELEISTFAKLADLIPDNALLVANNSKVLPARIYGSKETGGKVEFLLLTPLPLLMETAETQGDWSSAEVEGLLRASKPPKTGQNIVFSDQFRLEVITRGDFGKSRVRLYWQGELAGLFCELGHYPLPPYIKRPDTAEDAKRYQTIYAEDDKLGSVAAPTAGLHFTPEVRQSLAERGIEWAEVTLYVGYGTFSPVREADIRNHSMHKEYIEISADTALAVANAKAQGRPVLAVGTTSVRTLEGAYAAVGDIAPYAGWTEIYITPGYEFKVADKLLTNFHLPESSLLIMVSALIGREATLSAYKTALENDFRFFSYGDAMLIL

SEQ ID NO: 65945 - protein, 375 aa, Desulfovibrio fructosivorans
  misc_feature (1)..(375): tr|E1K2C7|E1K2C7_DESFR S-adenosylmethionine:tRNA ribosy ltransferase-isomerase OS=Desulfovibrio fructosivorans JJ OX=596151 GN=queA PE=3 SV=1
MSHDIPTTHAVFTVPAAPDDLLASYHFDLPPERIASRPCEKRDACKLMTVSRATGAVADAVFSDLPDLLPAGALLVVNNTKVAPVRLFGHKPSGGAAELLLTTPVALLAPTVDPDTGWAVAPASGLLRVSRPPKPGDRVDFAPDLRLTTTRRGQFGRTDFILHWQGSLPDILSRIGHVPLPPYIRRADDADDRKTYQTVYARDDKLGSAAAPTAGLHFTEGLLTRLRERGFGLAAVTCHVGIGTFSPVRVDDIRDHAMHKEWIEVPGEAAEAVRRAKAEGRPVVAVGTTAARTLEGVVREAGEMTAFAGETDIFIRPGHAFKMVDGMVTNFHLPGSSLVIMLAALVGRQPLLAAYARAVASGYRFFSYGDAMLVL

SEQ ID NO: 65946 - protein, 380 aa, Desulfovibrio gigas
  misc_feature (1)..(380): tr|T2G9G3|T2G9G3_DESGG S-adenosylmethionine:tRNA ribosy ltransferase-isomerase OS=Desulfovibrio gigas (strain A TCC 19364 / DSM 1382 / NCIMB 9332 / VKM B-1759) OX=1121 448 GN=queA PE=3 SV=1
MRSTVELFPTHAATAATEAHRLETYDFTLPESAIARRPAQQREQARLLVCHRNAGRLEHRTVADLPALLPADAVLVVNNSRVAPARLFGHKETGGRVECLLLTPLPLLERAAQPASRATPGNWQEAPASALLRAAKRPRPGQRILFAEDLHAVMQQEQDFGMADIVLRWQGDLHGILNRIGQLPLPPYLEREPEAEDAERYQTIYARADKTGSVAAPTAGLHLTPAIRAACLARGMDWVEATLHVGYGTFSPVRTANILEHVMHSEYVELSEDAATTIATAKQAGRPVVAIGTTSCRILEGVHRACGRVQAHAGWTDIFLYPGESLHVVDHLVTNFHLPKSTLFMLVCAVAGTTFMHHAYGQALQEGYRFYSYGDAMCIL

SEQ ID NO: 65947 - protein, 366 aa, Desulfovibrio gilichinskyi
  misc_feature (1)..(366): tr|A0A1X7DZZ0|A0A1X7DZZ0_9DELT S-adenosylmethionine:tRN A ribosyltransferase-isomerase OS=Desulfovibrio gilichi nskyi OX=1519643 GN=queA PE=3 SV=1
MKTEKMKTIPKDLNLKSYDFELPEDRIAQCPTEKRHGSKLMVLDKVTGGTELKSFTDVPDILPEGALLVANNSKVIPARIFGKKPSGGRVEFLLLTPVPLIEPTVTPEGNKAIVKGLLRSSKPTKTGSEVIFDCEMNLTVLGKGQFGLSEVELKWKGNLKEIFETYGKIPLPPYIRRAADENDTTRYQTLYACDDKAGSVAAPTAGLHFSKEIEDRLREKNIEKAEVTLYVGYGTFSPVRTTDIREHEMHNEYIEIPETTARAIQKAKDEGRPVIAVGTTSARTLEGAFQQTGKICEFKGETNIFIYPGYEFKVVDRMITNFHLPESSLVIMISALAGRDNVLNAYQKAIENKFRFFSYGDSMYIK

SEQ ID NO: 65948 - protein, 359 aa, Desulfovibrio gracilis
  misc_feature (1)..(359): tr|A0A1T4XNC1|A0A1T4XNC1_9DELT S-adenosylmethionine:tRN A ribosyltransferase-isomerase OS=Desulfovibrio gracili s DSM 16080 OX=1121449 GN=queA PE=3 SV=1
MHPDHALASYTYELPEENIAQTPAQRRQDSKLMTVNRESGATGIHGFSALPELLPKGALLVANNSKVIPARLFGTKPTGGRVEFLLLTPLPLLEPIQDADGLHMAEAWGLLRASKAPKPGQIITFGPEFFVRVLERGAFGRSRVSLFWRGNLKERMESLGSMPLPPYIRREADQSDMARYQTVYAKDDKAGSVAAPTAGLHFTPAVRTALQERGCEWAEVTLYVGYGTFSPVREPDIRDHVMHEEYIEVPRETAEAVQRAKDQGRPVVAVGTTSARSLEGMHRALGHIGPYKGMTDIFIKPGYTFQVVDNLLTNFHLPESSLLIMVSALVGREAILNAYSEALRNDFRFFSYGDAMLIS

SEQ ID NO: 65949 - protein, 361 aa, Desulfovibrio hydrothermalis
  misc_feature (1)..(361): tr|L0RBU5|L0RBU5_9DELT S-adenosylmethionine:tRNA ribosy ltransferase-isomerase OS=Desulfovibrio hydrothermalis AM13 = DSM 14728 OX=1121451 GN=queA PE=3 SV=1
MKIKPEDFLLENYNFELPENQIAQCPAEMRHGSKLMVLDQKSGETEIKSFTDLPDLLPEGALLVANNSKVIPARIFGQKPTGGRVEFLLLTPLPLIKPTVTPKGFKAVVRGLLRASKSPKPGGVVTFECGMKLTVLGKGKFGLSDVELEWQGDLKSIFETCGNIPLPPYIRRAADETDNERYQTLYACDEKAGSVAAPTAGLHFSEEINKKLKAKGIERAEVTLYVGYGTFSPVRAENIHDHEMHHEYIEIPEETAKSVIKAKEEGRPVIAVGTTSARTLEGAFRETGKVCKFKGETDIFIYPGFKFQVVDRMITNFHLPESSLVIMISALAGRENVLSAYRKAVENEFRFFSYGDSMYIK

SEQ ID NO: 65950 - protein, 365 aa, Desulfovibrio legallii
  misc_feature (1)..(365): tr|A0A1G7R0K2|A0A1G7R0K2_9DELT S-adenosylmethionine:tRN A ribosyltransferase-isomerase OS=Desulfovibrio legalli i OX=571438 GN=queA PE=3 SV=1
MPIEEADFWLESYNFDLPQERIAQFPPEERGNSRLMALPRTGPLELTHAQFADLPDLLPPGALLVANNSRVLQARLLGTRATGGKVEFLLLTPLPLVLERARPDKLGGLAAEADGLVRSGGSIRDGESFDFGAGIKVTVLESGPFGQRRVRLHWTGDLARAFAATGHIPLPPYIKRPDGEEDKSRYQTVYAREDKTGSVAAPTAGLHFTEDLRARLAARGFQWAEVTLYVGYGTFSPVRSQNIRAHRMHREYIEVPEATALAVARAKAEKRPVVAVGTTSVRALEGVAELCGRVQPFAGWTDIFLYPGQRFRVTDALVTNFHLPESSLLMLVSAFAGRKRVLAAYAEAVARGYRFFSYGDAMLIR

SEQ ID NO: 65951 - protein, 386 aa, Desulfovibrio litoralis
  misc_feature (1)..(386): tr|A0A1M7TD12|A0A1M7TD12_9DELT S-adenosylmethionine:tRN A ribosyltransferase-isomerase OS=Desulfovibrio litoral is DSM 11393 OX=1121455 GN=queA PE=3 SV=1
MAIDFRNERLKKIALDNSCVHTDGLEIDAEDFQLSSYDFNLPESLVAQTPDEKRDNSKLLVLDRKNNELIVSSFNELASFLPSESLIVTNNVKVAPLRLKGVTKSGGRLEFLLLTPLPLIDNSHATQGKFNARVEGLMRNIKKFKVGETYQFNEKLKFTILEKQEFGRCIVNLEWEAPLTERLNEQGSLPLPPYIKRELTKSDTERYQTIFAKDEKIGSAAAPTAGLHFTPALKAELLAKGHSWTELTLYVGYGTFSPVRSEDIREHLMHSEYFEINEKSAELINNQRANKKPVVAIGTTSTRTLEGVFAKRGKIEACTDTTNIFVYPGKKIEVVDHLITNFHLPKSSLLMLVSAFVGRKRLLSAYEKAIEERLRFFSYGDAMLIL

SEQ ID NO: 65952 - protein, 370 aa, Desulfovibrio magneticus
  misc_feature (1)..(370): tr|K6GQ45|K6GQ45_9DELT S-adenosylmethionine:tRNA ribosy ltransferase-isomerase OS=Desulfovibrio magneticus str. Maddingley MBC34 OX=1206767 GN=queA PE=3 SV=1
MTDAKAPPAPPALEDLLASYHFELPEALIAERPCEVRDACRLMVLDRAAGSVAHRVFADLPDLLPEGALLVVNNTKVAPVRLLGKRPTGGAAEFLLLTPVALLRPQTDPATGWTHAPASGLLRVSRPPRPGDRIDFAPDLAVTAVSRGAFGHTEVTLSWRGELPAILTRIGHVPLPPYIRRADDAADRETYQTVYARDDKLGSAAAPTAGLHFTEELLARLAGRGFGLAAVTCHVGLGTFSPVRVEDLRDHVMHKEWIEVSPEAASAVSRAKAEGRPVIAVGTTAARTLEGASREAGAFGPFAGFTDIFIHPGHRFAVVDGMVTNFHLPGSSLVIMLAALAGRESILAAYGQAVASGYRFFSYGDAMLVL

SEQ ID NO: 65953 - protein, 370 aa, Desulfovibrio magneticus
  misc_feature (1)..(370): tr|C4XJ67|C4XJ67_DESMR S-adenosylmethionine:tRNA ribosy ltransferase-isomerase OS=Desulfovibrio magneticus (str ain ATCC 700980 / DSM 13731 / RS-1) OX=573370 GN=queA P E=3 SV=1
MTDAKAPPAPPVPEDLLASYHFELPDALIADRPCEVRDACRLMVLDRAAGSLDHRVFTDLPDLLPEGALLVVNNTKVAPVRLLGKRPTGGAAEFLLLTPVALLKPETDPATGWTSAPAAGLLRVSRPPRPGDRIDFAPDLAVTAVSRGAFGHTEVTLSWRGALPEILTRIGHVPLPPYIRRADDAADRETYQTVYARDDKLGSAAAPTAGLHFTEELLARLAGRGFRLTAVTCHVGLGTFSPVRVEDLRDHAMHQEWIEVSPEAASAVSRAKAEGRPVIAVGTTAARTLEGAVREAGAFGAFAGFTDIFIRPGHRFAVVDGMVTNFHLPGSSLVIMLAALAGRESILAAYGQAVASGYRFFSYGDAMLVL

SEQ ID NO: 65954 - protein, 379 aa, Desulfovibrio mexicanus
  misc_feature (1)..(379): tr|A0A238ZTW2|A0A238ZTW2_9DELT S-adenosylmethionine:tRN A ribosyltransferase-isomerase OS=Desulfovibrio mexican us OX=147047 GN=queA PE=3 SV=1
MRHDTTPRDESDVPEPFRLSSYVYELPEDRIARRPAERRDGSRLLYLDRSAPAADPRQFAELPELLAAKYPQGGLLVANNSRVFPARVFGRRATGGRVELLLLTPLPLLHVKPLPDGRLCAEAEGLVRTAKRMKEGEAAQFEAPQGMEFQVVLLQRGEYGRCLLRLEWRGGIEAILNEIGHMPLPPYLEREDDAADRERYQTTYAAAAKAGSVAAPTAGLHFTPEVRARLAQRGFRWAEVTLYVGYGTFSPVRAADIRQHKMHSEYVEVPDETAATIRDAKASGLPVIAVGTTSARSLEGMFAARGSVEAFSGETDIYIRPGGVFNVVDALLTNFHLPESSLLIMVSTLAGRERIMAAYAVALARGFRFFSYGDAMLIV

SEQ ID NO: 65955 - protein, 370 aa, Desulfovibrio piger
  misc_feature (1)..(370): tr|B6WVH0|B6WVH0_9DELT S-adenosylmethionine:tRNA ribosy ltransferase-isomerase OS=Desulfovibrio piger ATCC 2909 8 OX=411464 GN=queA PE=3 SV=1
MPPVFVSEDDFLLQNYTYDLPQEQIAQYPPEQRGASRLLTMRRNGALDLEHHMFSDLPDCLPEGALLVANNSRVLQARLLGSRSTGGKVEFLLLTPLPLVRAAATPVKGREDTWSAEVNGLVRSGGSVREGETLHFGAGISVTILECGTFGHRRVRMCWKGDVADAFAATGHIPLPPYIKRSDAEEDFSRYQTIYSREEKTGSVAAPTAGLHFTDELRETLRRRGFQWAEVTLYVGYGTFSPVRCEDIRNHQMHREYVELPEETANAIAEAKAQHRPVIAVGTTSVRTLEGVAQVCGRAQPFAGWTDIFLYPGRPFRVVDGIITNFHLPESSLLMLVSAFAGRKRILEAYQEAVKKGYRFFSYGDAMLIR

SEQ ID NO: 65956 - protein, 375 aa, Desulfovibrio piger
  misc_feature (1)..(375): tr|A0A1K1LGR8|A0A1K1LGR8_9DELT S-adenosylmethionine:tRN A ribosyltransferase-isomerase OS=Desulfovibrio piger O X=901 GN=queA PE=3 SV=1
MKEKTMPPVFVSEDDFLLQNYTYELPQEQIAQYPPDQRGASRLLTMRRSGALGLEHHMFSDLPDCLPEGALLVANNSRVLQARLLGSRSTGGKVEFLLLTPLPLVRADATPVKGREDTWCAEVSGLIRSGGSVREGETLHFGAGISVTILECGTFGHRRVRMCWKGDVAEAFAATGHIPLPPYIKRSDAEEDFSRYQTIYAREEKTGSVAAPTAGLHFTDELRETLRRRGFQWAEVTLYVGYGTFSPVRCEDIRNHQMHREYVELPEETADAIAEAKARHRPVIAVGTTSVRTLEGVAQVCGRAKPFAGWTDIFLYPGRPFRVVDGIITNFHLPESSLLMLVSAFAGRKRILEAYQEAVKEGYRFFSYGDAMLIR

SEQ ID NO: 65957 - protein, 366 aa, Desulfovibrio salexigens
  misc_feature (1)..(366): tr|C6BUS8|C6BUS8_DESAD S-adenosylmethionine:tRNA ribosy ltransferase-isomerase OS=Desulfovibrio salexigens (str ain ATCC 14822 / DSM 2638 / NCIB 8403 / VKM B-1763) OX= 526222 GN=queA PE=3 SV=1
MKTEKMNINTEDFFLKSYDFELPEEQIAQCPAVMRHGSKLMVLDQKTGETEIKNFTDIVDLLPEGALLVANNSKVVPARIFGKKPTGGRVEFLLLTPLPLIKAEPTSDGYKAQARGLLRASKGPKTGDIIYFDGGLKLTVLGKGKFGLSEVELEWSGDLKKIFEECGKIPLPPYIRRAADETDNDRYQTLYACDEKAGSVAAPTAGLHFSEEINEKLKAKNIERAEVTLYVGYGTFSPVRAEDIRDHEMHHEYIEIPEETAAAVIKAKEEGRPVIAVGTTSARTLEGAFQQTGEICEFKGETNIFIYPGFEFKVVDRMITNFHLPESSLVIMISALAGRINVLNAYTEAVDNKFRFFSYGDSMYIK

SEQ ID NO: 65958 - protein, 372 aa, Desulfovibrio sp.
  misc_feature (1)..(372): tr|I2Q496|I2Q496_9DELT S-adenosylmethionine:tRNA ribosy ltransferase-isomerase OS=Desulfovibrio sp. U5L OX=5961 52 GN=queA PE=3 SV=1
MPNPLDSAPTPAPTPDDLLAAYHFDLPDDRIAERPCERRDACKLMTVSRATGEVGHAVFADLPDLLPEGALLVANNTKVAPVRLLGHKSTGGAAEFLLVTPIALLRPTADPATGWTSAPAAGLLRVSRPPRPGDRIDFAPDLFITATRRGAFGHTEVVLSWRGSLPAVMDRIGHVPLPPYIRRADDASDRETYQTVYARDDKLGSAAAPTAGLHFTEDLLLRLKARGFGFATVTCHVGIGTFSPVRVADIREHAMHKEWIEVPDEAATAVLAAKAEGRPVVAVGTTAARTLEGVVREAGAVRPFAGETDIFIRPGHAFRVVDGMVTNFHLPGSSLVIMLAALVGRENLLAAYGRAVASGYRFFSYGDAMLAL

SEQ ID NO: 65959 - protein, 368 aa, Desulfovibrio sp.
  misc_feature (1)..(368): tr|S7U3W2|S7U3W2_9DELT S-adenosylmethionine:tRNA ribosy ltransferase-isomerase OS=Desulfovibrio sp. X2 OX=94144 9 GN=queA PE=3 SV=1
MNMSDAPDELLASYDFALPEELIAQHPAPRRDASRLMVVDRAGEGEELARFADLPRILSERLPEGALLVANNSRVAPARLFGARASGGRVEMLLLTPPPLLEPEPDAVPGFSRARAEVLLRASKTLRRDEELDFGPDLVVRVGARGEFGRHEVELSWRGELAAVLAKQGCMPLPPYIRREAAGDDMERYQTVYASADKAGSVAAPTAGLHFTPEVRADLAARGIEWAEVTLYVGYGTFSPVRAADIRDHRMHAEWVEVPEATAAAVARAKAEGRPVLAVGTTSVRSLEGAFAQTGEPAPFCGTTSIFIRPGFRFRVVDHMLTNFHLPLSSLIIMVSAFAGRVRILSAYDRAVRERFRFFSYGDAMLIL

SEQ ID NO: 65960 - protein, 371 aa, Desulfovibrio vulgaris
  misc_feature (1)..(371): sp|Q725S3|QUEA_DESVH S-adenosylmethionine:tRNA ribosylt ransferase-isomerase OS=Desulfovibrio vulgaris (strain Hildenborough / ATCC 29579 / DSM 644 / NCIMB 8303) OX=8 82 GN=queA PE=3 SV=1
MKDDATGADFLLSGYDYELPEDRIAQHPPVERGLSRLLVLDRTTGERIHARFADLAEHLPEGALLVANNSKVLPARLLGHRPTGGKVEFLLLTPLPLVTPLAAGPASGTVEPGWCVAEVEGLLRASKPLRPGDTLSFGDDLRVEVVHKGEFGRSMVLLFWRGELATLFAREGHLPLPPYIRRADGDEDRDRYQTVFAREDRLGSVAAPTAGLHFTPSLRETLTARGHQWAEVTLYVGYGTFSPVRCADIRDHAMHREYVEVTAETVEVIRRAKADGRPVVAVGTTSCRVLEGVATAKGTLEPYAGWTDIFMYPGYTFKVVDHLITNFHLPESSLLMLVSAFAGRERVLATYREAIEEGYRFFSYGDAMLLR

SEQ ID NO: 65961 - protein, 371 aa, Desulfovibrio vulgaris
  misc_feature (1)..(371): sp|A1V9F1|QUEA_DESVV S-adenosylmethionine:tRNA ribosylt ransferase-isomerase OS=Desulfovibrio vulgaris subsp. v ulgaris (strain DP4) OX=391774 GN=queA PE=3 SV=1
MKDDATGADFLLSGYDYELPEDRIAQHPPVERGLSRLLVLDRTTGERIHARFADLAEHLPEGALLVANNSKVLPARLLGHRPTGGKVEFLLLTPLPLVTPLAAGPASGTVEPGWCVAEVEGLLRASKPLRPGDTLSFGDDLRVEVVHKGEFGRSMVLLFWRGELATLFAREGHLPLPPYIRRADGDEDRDRYQTVFAREDRLGSVAAPTAGLHFTPSLRETLTARGHQWAEVTLYVGYGTFSPVRCADIRDHAMHREYVEVTAETVEAIRRAKADGRPVVAVGTTSCRVLEGVATAKGTLEPYAGWTDIFMYPGYTFKVVDHLITNFHLPESSLLMLVSAFAGRERVLATYREAIEEGYRFFSYGDAMLLR

SEQ ID NO: 65962 - protein, 364 aa, Desulfovibrionaceae bacterium
  misc_feature (1)..(364): tr|A0A2V2G8T4|A0A2V2G8T4_9DELT S-adenosylmethionine:tRN A ribosyltransferase-isomerase OS=Desulfovibrionaceae b acterium OX=2049043 GN=queA PE=3 SV=1
MSIDPFSLDSYDYDLPEERIAQYPPERRGSSRLLVLDKNGPDRVDALFADLPAYLPEGAVLVANNSKVAPARLLGARPSGGKAELLLLTPPPLVERAARSEGGDGFSAPAEALLKPGRSIHPGDRLGFGPDIEVLVEAKHDFGRHDVRLFWRGSLTARLEETGRLPLPPYIRREQGPDDRTRYQTLYARPDKAGSVAAPTAGLHFTDALRARLADLGFPWLEVTLHVGYGTFSPVREQDIREHPMHREFVELPAETARAVNEARRQGRPVIAVGTTSARTLEGVALASGGLPDEGWQGWTDIFIYPGFRFQVLDGLITNFHLPKSSLLMLVSALAGRETVLDAYAHAVRKKYRFFSYGDAMLIR

SEQ ID NO: 65963 - protein, 375 aa, Desulfovibrionaceae bacterium
  misc_feature (1)..(375): tr|A0A1J4T2S6|A0A1J4T2S6_9DELT S-adenosylmethionine:tRN A ribosyltransferase-isomerase OS=Desulfovibrionaceae b acterium CG1_02_65_16 OX=1805130 GN=queA PE=3 SV=1
MRTHQAPPENPDIPPEFRLSSYVYELPEERIARRPADTRDGSRLLVLDREADTRRVDEFRHLPDILSQRFPKGALLVANNSRVFPARIFGRRATGGRVELLLLTPLPLLHVKRLPDGRNSAEAEGLVRTAKRMKEGETALFDAPLTVTLLARGDFGRCRVRLEWAGDIAEIFNNIGHMPLPPYLEREDDASDRERYQTVYADADKAGSVAAPTAGLHFTPEVRAKLAGLGIGWVEVTLYVGYGTFSPVREGDIRQHKMHAEYVEVPETTAEAVRRAKAEGVPVVAVGTTSARSLEGMFAARGEVAAFAGETDIYILPGRAFKVVDALLTNFHLPESSLLIMVSALAGRERIMAAYALALASGLRFFSYGDAMLIV

SEQ ID NO: 65964 - protein, 341 aa, Desulfurella acetivorans
  misc_feature (1)..(341): tr|W0JF09|W0JF09_DESAE S-adenosylmethionine:tRNA ribosy ltransferase-isomerase OS=Desulfurella acetivorans A63 OX=694431 GN=queA PE=3 SV=1
MNLDTFDYNLPKELIAQKPHIPPDECRLFVYNKKNKSISHKIFKDIIEFLSPGDLIVLNNTKVIPAKLSAKKESGGSIGILLIEQIEKNTYYCFVKGKIKHDTKINLAKNLKATIIQTNGQKKIIKFDTTNDIREYLYEIGSMPLPPYIKRKNKEFDALDKQYYQTVFAEIEGSIAAPTASLHFTSNLLDQIKQKGIQIAYITLHVGLGTFKSVETQNIQEHKMHEEYFEISAKTAQIYNKAKLENRNILPVGTTVVRALESVSNDQGYIKPTSAKTDIFIYPGYKFKTVNNILTNFHLPKSTLIMLVAALIGIEDTHFCYKKAIEEKYRFFSYGDVFLVI

SEQ ID NO: 65965 - protein, 341 aa, Desulfurella amilsii
  misc_feature (1)..(341): tr|A0A1X4XZF3|A0A1X4XZF3_9DELT S-adenosylmethionine:tRN A ribosyltransferase-isomerase OS=Desulfurella amilsii OX=1562698 GN=queA PE=3 SV=1
MNLDIFDYALPKELIAQSPHIPPDECKLFIYNKKTKKISHKIFRDIIDYLSPNDLIVLNNTKVIPAKLSATKESGGSLQILLIEQIEKNIYYCFVKGKIKHDTKVILPKSLKATILQTNEQKKIIKFEINSDIKDYLYDIGSMPLPPYIKRKDNQLDALDKQYYQTVFAEIEGSIAAPTASLHFTSKLLEKIKQKGIKIAYITLHVGLGTFKSVETQNIKEHKMHEEYFEISPKTAQIYNKALLENRTILPVGTTVVRALESASNTQGFLKPISTKTDIFIYPGYQFKTVKNILTNFHLPKSTLIMLICALIGVENTHFCYQKAIEERYRFFSYGDAFLVI

SEQ ID NO: 65966 - protein, 341 aa, Desulfurella multipotens
  misc_feature (1)..(341): tr|A0A1G6QZ26|A0A1G6QZ26_9DELT S-adenosylmethionine:tRN A ribosyltransferase-isomerase OS=Desulfurella multipot ens OX=79269 GN=queA PE=3 SV=1
MNLDTFDYNLPKELIAQKPHIPPDECRLFVYNKKNKSISHKIFKDIIEFLSPGDLIVLNNTKVIPAKLSAKKESGGSIGILLIEQIEKNTYYCFVKGKIKHDTKINLAKNLKATIIQTNGQKKIIKFDTTNDIREYLYEIGSMPLPPYIKRKNKEFDVLDKQYYQTVFAEIEGSIAAPTASLHFTSNLLDQIKQKGVQIAYITLHVGLGTFKSVETQNIQEHKMHEEYFEISAKTAQIYNKAKLENRNILPVGTTVVRALESASNDKGYIKPTSAKTDIFIYPGYKFKTVNNILTNFHLPKSTLIMLVAALIGIEDTHFCYKKAIEEKYRFFSYGDAFLVI

SEQ ID NO: 65967 - protein, 341 aa, Desulfurella sp.
  misc_feature (1)..(341): tr|A0A2N7PZT6|A0A2N7PZT6_9DELT S-adenosylmethionine:tRN A ribosyltransferase-isomerase OS=Desulfurella sp. OX=1 962857 GN=queA PE=3 SV=1
MNLDTFDYNLPKELIAQKPHIPPDECRLFVYNKKNKSISHKIFKDIIEFLSPGDLIVLNNTKVIPAKLSAKKESGGSIGILLIEQIEKNTYYCFVKGKIKHDTKINLAKNLKATIIQTNGQKKIIKFDTTNDIREYLYEIGSMPLPPYIKRKNKEFDALDKQYYQTVFAEIEGSIAAPTASLHFTSNLLDQIKQKGIQIAYITLHVGLGTFKSVETQNIQEHKMHEEYFEISAKTAQIYNKAKLENRNILPVGTTVVRALESASNDQGYIKPTSAKTDIFIYPGYKFKTVNNILTNFHLPKSTLIMLVAALIGIEDTHFCYKKAIEEKYRFFSYGDAFLVI

SEQ ID NO: 65968 - protein, 351 aa, Desulfuribacillus alkaliarsenatis
  misc_feature (1)..(351): tr|A0A1E5G1M8|A0A1E5G1M8_9BACL S-adenosylmethionine:tRN A ribosyltransferase-isomerase OS=Desulfuribacillus alk aliarsenatis OX=766136 GN=queA PE=3 SV=1
MKVQDFDFYLPEELIAQSPLSDRAGSRLMVVDTEANKIYDKQFADLYDSIKSGDTLVLNDTRVIPARLLGRSIDTGSKIEFLLLKPLEDDRWEILVKPGKKAKVGRVFEFGNGSLKAEIIDITPAGGRIVHFQYNGIFNEILDELGSMPLPPYITEQLEDKERYQTVYSKYRGSVAAPTAGLHFTKEMLDSLQDKGVNIAYVTLHVGLGTFRPVQVDDVEEHVMHSEYYEISKDTADIINRTKASGGRVISVGTTSTRVLETVGQFDGIVTETSGWTDIFIYPGYKFKVVDGLLTNFHLPKSTLIMLVSAFANQDLILKAYEHAVSERYRFFSFGDAMLLMKGAGKNGRNI

SEQ ID NO: 65969 - protein, 345 aa, Desulfuribacillus stibiiarsenatis
  misc_feature (1)..(345): tr|A0A1E5L379|A0A1E5L379_9BACL S-adenosylmethionine:tRN A ribosyltransferase-isomerase OS=Desulfuribacillus sti biiarsenatis OX=1390249 GN=queA PE=3 SV=1
MKVQDFDFDLPEELIAQSPLKDRESSRLMVIDTLKQEIYDRTFSDIREFLQEGDTLVLNDTRVIPARLLGEKTGSGGKIEFLLLKPTGEDCWEILVKPGRKAKVGATFEFGQGKLKAEVLEITPAGGRIVKFYFKGIFQEILDELGNMPLPPYITETLQDKERYQTVYSKNPGSVAAPTAGLHFTKEIIQELQAKGIRIAYVTLHVGLGTFRPVQVENILDHDMHSEYYEITQETADIINATKEQGGRVISVGTTSTRVLETVGQKGYPIQEESGWTSIFIYPGYRFTVVDGLLTNFHLPKSTLIMLVSAFANRELILKAYNHAINEQYRFFSFGDAMLLLKGAE

SEQ ID NO: 65970 - protein, 339 aa, Desulfurispirillum indicum
  misc_feature (1)..(339): tr|E6W2L7|E6W2L7_DESIS S-adenosylmethionine:tRNA ribosy ltransferase-isomerase OS=Desulfurispirillum indicum (s train ATCC BAA-1389 / S5) OX=653733 GN=queA PE=3 SV=1
MSEYLCDYHVDIPAELIAQEPLAQRDASRLLVLSRALAPAIVGESTFSRLSEYLRPGDLLVFNDTRVIPARLKGRKSTGGAVEIFLVEPCAPRCWRVLTRGKKLVPGTLVHIGDGVEAVIEERDGEMAVARFSVDDQELFACGAIPLPPYIKREADSRDNQRYQSVFAARDGAVAAPTASLHFTSAIVEGLRQRGVRTATITLHVGLGTFLPVKSERIDEHRMHSEHFHVPAQTLDLVADTRRSGGRVIAVGTTVVRALESCFGHTPLRTGGSTDIFIRPGYSFAVIDGMVTNFHLPDSTLILLVSAFYGRENIQQIYQYAVSQRYRFFSYGDGMLFLP

SEQ ID NO: 65971 - protein, 358 aa, Desulfurivibrio alkaliphilus
  misc_feature (1)..(358): tr|D6Z6L0|D6Z6L0_DESAT S-adenosylmethionine:tRNA ribosy ltransferase-isomerase OS=Desulfurivibrio alkaliphilus (strain DSM 19089 / UNIQEM U267 / AHT2) OX=589865 GN=qu eA PE=3 SV=1
MTAYSLDDYDYHLPPELIAQQPPPRRDGSRLLVCDGRRDFALSDQLFPDMLSWLAPGDLLVFNDTRVFPARLSGHKESGGRVELLLLAYPVLSDVSGPGATEAEAWGLLKSSKGARPGTWLQFGDDLRALVEEKGEGGKVRVRLVLGAPLADCLARYGRMPLPPYIKRENEQEEDRRRYQTIYAQTPGAVAAPTAGLHFTQELLGQIKKKGVGMAHITLHVGYGTFAPVRSQDIRRHQIHAEEYLISRENAELINRTKAAGGRIWAVGTTSVRTLEAAAGEDGRVNPGSGSCRLYIYPGYSFKVVDNLLTNFHLPRSSLLFLVSALAGRENILRAYRHAVAERYRFFSYGDAMAIIRK

SEQ ID NO: 65972 - protein, 363 aa, Desulfurivibrio sp.
  misc_feature (1)..(363): tr|A0A3A6P8A6|A0A3A6P8A6_9DELT S-adenosylmethionine:tRN A ribosyltransferase-isomerase OS=Desulfurivibrio sp. O X=2093369 GN=queA PE=3 SV=1
MAENIPLIYDIDSYRFNLPPERIAQQPAVNRDRSRLLALNPATGAVSDLHFTDIVDFFSPHDLLVVNNTRVFPARLLGRKESGGKVELLILHYPQETLPAADKHGQVAVTGLLKSSKGCRPGQRIIFADELTAEVVELYAAGKARLQLHFQGELAPLLDKYGQLPLPPYIRREQGEEPQDRERYQTVFAAATGAIAAPTAGLHFTDELLSAIARKGVERESVTLHVGYGTFAPVRVQDIRQHRIHSEFLTVSAGTAAKINEVRDRGGRLWAVGTTTVRALEFAADDAGRVQAREGWCDLYIYPGYQFKVVRNLITNFHLPGSSLLFMVSALAGRERVLAAYAHAVARGYRFFSYGDAMILVGG

SEQ ID NO: 65973 - protein, 343 aa, Desulfurobacterium atlanticum
  misc_feature (1)..(343): tr|A0A238YV37|A0A238YV37_9BACT S-adenosylmethionine:tRN A ribosyltransferase-isomerase OS=Desulfurobacterium at lanticum OX=240169 GN=queA PE=3 SV=1
MKVSLFDYELPEELIAKEPAEPRDSARLLVLNRKTGEIEHRIFRDIIHYMNKGDVLVINNTKVIPARLIGKFPTGGSAEIFLVRQIKENVWEVIGKPGRKLKPGKKVIFDENFYCEIVERKEEGKRIVEFFTTDGEATLNKIYKIGKMPLPPYINREETEKDKEEYQTVFAKEEGAVAAPTAGLHFTAELLEKLKEKGVIIKEITLHVGLGTFKPVKVEEVEEHKMHYESYKVPKDTAIEIEKAKKEGRRVIAVGTTVVRTLETCFNEKGIATSLEGSTNLFIYPGYNFKVIDGLITNFHLPKSTLLMLVSAFAGRERILNAYEEAVKKRYRFFSYGDAMFIY

SEQ ID NO: 65974 - protein, 341 aa, Desulfurobacterium indicum
  misc_feature (1)..(341): tr|A0A1R1MJF0|A0A1R1MJF0_9BACT S-adenosylmethionine:tRN A ribosyltransferase-isomerase OS=Desulfurobacterium in dicum OX=1914305 GN=queA PE=3 SV=1
MKVSLFNYELPKNLIAKFPVEPRDSAKLLLLNRKTGEIEHKIFRDIKNYLKPGDVLVINNTKVIPARLLGKFFTGGKVEIFLTRQIEKDIWEAIGKPGKRLKPGKKVIFDNELSCEILKIEDEGKRIIRFHSPKSTLEKIYEIGHVPLPPYIEREDTEKDKEEYQTVFAKEEGAVAAPTAGLHFTEELLKQLKEKGIIIKEITLHVGLGTFRPVKVNEVEKHKMHYESFKIPQDTAKEIEKAKSEGRRVIAVGTTVVRTLESGFEKGGKVKILEGSTNLFIYPGYNFKVVDAIITNFHLPKSTLLMLVCAFAGREKVLNAYKEAVKHGYRFYSYGDAMFIY

SEQ ID NO: 65975 - protein, 343 aa, Desulfurobacterium sp.
  misc_feature (1)..(343): tr|A0A432QUD5|A0A432QUD5_9BACT S-adenosylmethionine:tRN A ribosyltransferase-isomerase OS=Desulfurobacterium sp . OX=2004706 GN=queA PE=3 SV=1
MKVSDFDYELPKELIAKFPVEPRDTARLMVLHRDSGKIEHRIFRDIVEYLKEGDVLVLNDTKVIPARLFGKLETGGKVELLLVRQPFPKVWEVMAKPARKLKEGKRILFDEELEGIVKEYVGEGKRLVEFNVKGNKDFMEKLEEIGHVPLPPYIEREERPEDREKYQTVFAQKPGAVAAPTAGLHFTKELLEKLKNKGVIIKTVTLHVGPGTFKPVKVENVEEHQMDYETYNVPEETAREINRAKEEGRRIVAVGTTVVRTLESSSDEVGRVKAGEGSTNLFIYPGYKFKVIDALITNFHLPRSTLLMLVSAFAGRERILNAYRKAVKEGYRFYSYGDAMLIL

SEQ ID NO: 65976 - protein, 343 aa, Desulfurobacterium thermolithotrophum
  misc_feature (1)..(343): tr|F0S207|F0S207_DESTD S-adenosylmethionine:tRNA ribosy ltransferase-isomerase OS=Desulfurobacterium thermolith otrophum (strain DSM 11699 / BSA) OX=868864 GN=queA PE= 3 SV=1
MKVSDFDYKLPKELIAKFPVEPRDSSRLMVLNKNTGKIEHRIFKDIVEYLKAGDVLVINDTKVIPARLFGKLDTGGKVEILLVRQPGLNTWEVMAKPARKLKKGRKISFDEELEAVVKEYSGEGKRIIEFVIKSNKDFMEKIEEIGHIPLPPYIEREEKPEDREKYQTVFARKEGAVAAPTAGLHFTTELLENLKSKGIIIKNITLHVGPGTFKPVKVENVEDHQMDYETYYVPEDTAIEINRAKEEGRRVIAVGTTVTRTLESAADESGKVKQGEDSTNLFIYPGYKFKVIDALITNFHLPRSTLLMLVSAFAGKERILNAYKEAVRKGYRFYSYGDAMFIF

SEQ ID NO: 65977 - protein, 343 aa, Desulfuromonadaceae bacterium
  misc_feature (1)..(343): tr|A0A1G2WE56|A0A1G2WE56_9DELT S-adenosylmethionine:tRN A ribosyltransferase-isomerase OS=Desulfuromonadaceae b acterium GWB2_53_15 OX=1801895 GN=queA PE=3 SV=1
MFVKDFDYHLPPDLIARYPASERDASRLMLLNRQSGSIGEDIFRNISAQFVPGDLLVMNDTRVIPARLFGKKETGGKVEIFLLRREECSSERWSCLLRSSKGVREGSVIHLAEGVTARINTKLLSGSWQIEFVGADDFSAWLEREGHIPLPPYLQRDDEVQDRERYQTVFAQTAGAVAAPTAGLHFTRGLLAELERMGVQIAHLTLHTGLGTFQPIRVERVEDHLIHTEHYSIPAVTADVIRSTKTRGGRVVAVGTTTARTLEHAAIGDGNVRAGDGEANIFIYPGYTFKVVDALVTNFHLPESTLLMLVSAFAGRDLVMESYREAVSRGFRFYSYGDAMLIQ

SEQ ID NO: 65978 - protein, 343 aa, Desulfuromonadaceae bacterium
  misc_feature (1)..(343): tr|A0A1G2WGY3|A0A1G2WGY3_9DELT S-adenosylmethionine:tRN A ribosyltransferase-isomerase OS=Desulfuromonadaceae b acterium GWC2_58_13 OX=1801896 GN=queA PE=3 SV=1
MHLTHFDFELPETLIAQHPPNSREDSRLMVLSRREKEIRAGMFPDILDYFAAGDLLVLNDTRVIPARLLGEKESGGRIEVFLVRRLASHEEDWACLTRCSKTPKAGARLLLGGEIEGTLLAGGEAPYRHIRFRCQGDFTQVLERVGRIPLPPYIRREDDQLDRDRYQTVFAITNGAVAAPTAGLHFTERILEGLRSRGVTICPLTLHVGLGTFLPVRVENILEHRMHVETYHIPRTTADAVNRAKAEGRRVFALGTTTTRTLEHAVDETGCLKAGEGNSDLFIYPGFKFRMVDAMITNFHLPKSTLLMLVSGFAGRDFILEAYRRAVRERFRFFSYGDCMLIL

SEQ ID NO: 65979 - protein, 295 aa, Desulfuromonadales bacterium
  misc_feature (1)..(295): tr|A0A1E7HL47|A0A1E7HL47_9DELT S-adenosylmethionine:tRN A ribosyltransferase-isomerase (Fragment) OS=Desulfurom onadales bacterium C00003094 OX=1869310 GN=BA870_02610 PE=3 SV=1
MHLNDFDFDLPEELIAQEPLAERTGSRLMILNRGTGSLTIGGFSSIVDHFRAGDVLVINDTRVIPARLLGCKESGGKVEVLLVRRLAGDEETWICLTKASKGPRVGTRLLLGDTLTGTVVDGGEEPYKHIQFACEGDFLQQIEEIGRMPLPPYIRRDDSQLDKERYQTVFAQNAGAVAAPTAGLHFTPEILQQLRNKGVEIHPLTLHVGIGTFLPVRVDNIREHRMHAEHFTVPVATAAAVNQARASGRRIFSLGTTSTRTLEYAVDDQGQLQAGSGDCDLFIYPGYRFCTVDAM

SEQ ID NO: 65980 - protein, 290 aa, Desulfuromonadales bacterium
  misc_feature (1)..(290): tr|A0A1E7GM99|A0A1E7GM99_9DELT S-adenosylmethionine:tRN A ribosyltransferase-isomerase (Fragment) OS=Desulfurom onadales bacterium C00003096 OX=1869311 GN=BA871_07730 PE=3 SV=1
DVLVVNDTRVIPARLLGCKESGGKVEVLLVRRLVGDTETWICLTKASKGPRVGTRLLLGDTLTGTVVEGGQDPYKHIQFACEGDFLQQIEEIGRMPLPPYIRRDDSQLDKERYQTVFAQNAGAVAAPTAGLHFTPEILEQLRNKGVEIHPLTLHVGIGTFLPVRVDNIREHRMHEEHFTVPAATAAAVNQARAEGRRVFALGTTSTRTLEYAVDDQGLLQVGSGSCDLFIYPGYRFRTVDAMLTNFHLPRSTLLMLVSAFAGREPVLAAYRRAVAEGFRFFSYGDCMLII

SEQ ID NO: 65981 - protein, 343 aa, Desulfuromonas acetexigens
  misc_feature (1)..(343): tr|A0A550JKH8|A0A550JKH8_9DELT S-adenosylmethionine:tRN A ribosyltransferase-isomerase OS=Desulfuromonas acetex igens OX=38815 GN=queA PE=3 SV=1
MFLDDFDFALPESLIAQYPRPEREDARLLVLRRDDREIRSTAFRDLGAFFRPGDLLVLNDTRVIPARLLGEKESGGRIEVFLVRRLATDGEEWACLTKSSKSPRPGTRLRLGVAIEGTVLPGGEQPYRHIRFECSGDFTAALEREGQIPLPPYIRRDADASDRTRYQTVFARSDGAVAAPTAGLHFTERTLDELRGRGVEIHPLTLHVGLGTFLPVRVENVLEHRMHHEPYVVPTETAAAVNRAKEEGRRVFALGTTTTRALEHAVDGQGRLRAGEGSSDLFIYPGFRFRLVDALITNFHLPKSTLLMLVSAFADREFVLEAYRQAVREEYRFFSYGDCMLIL

SEQ ID NO: 65982 - protein, 350 aa, Desulfuromonas acetoxidans
  misc_feature (1)..(350): tr|Q1K1D4|Q1K1D4_DESA6 S-adenosylmethionine:tRNA ribosy ltransferase-isomerase OS=Desulfuromonas acetoxidans (s train DSM 684 / 11070) OX=281689 GN=queA PE=3 SV=1
MYVTDFNYDLPQELIAQHPCEQRDGSRLMVLDCQAEKIVSDHFRQVDRYFEQGDVLVINDTRVIPARLLGCKESGGKVEVFLVRKLAEEGECWLCLTRASKGPRPGTRLLLGDQLTATVMEGGGDGYRHIRFDVEGDFLSLLDKIGRLPLPPYIDREPQGEDRERYQTTFSSRPGAVAAPTAGLHFTPEILDKLRAKGVIVCPLTLHVGLGTFLPVRVDNVEEHRMHAEAYCIPDETAVQVNRAKREGRRVIALGTTVTRTLEFSVDPQGELQAGDGMTDMFIYPGYRFKIVDALLTNFHLPQSTLLMLVSALAGREFVLQAYRQAVEERYRFFSYGDCMLIHNVIKEAS

SEQ ID NO: 65983 - protein, 315 aa, Desulfuromonas soudanensis
  misc_feature (1)..(315): tr|A0A0M4D8P8|A0A0M4D8P8_9DELT S-adenosylmethionine:tRN A ribosyltransferase-isomerase OS=Desulfuromonas soudan ensis OX=1603606 GN=queA PE=3 SV=1
MVLRRSAKTISNGDFPGIVDHFRPGDVLVVNDTRVIPARLLGARDSGGKIEVLLVRRLAGVEEIWACLTKCSKTPRPGTRLLLGGRIAGTVLEGGQEPYRHISFTCEGSFLEALEAVGHIPLPPYIRREDDSLDRERYQTVFSRKQGAVAAPTAGLHFTPEIFQVLKQRGVEVLPLTLHVGLGTFLPVRTENILDHRMHEEFYEIPEATASGVNRAKREGRRVFALGTTTTRTLEYAVDAEGQLMAGEGGSDLFIYPGFQFRIVDALITNFHLPRSTLLMLVSAFAGRDFVLEAYRRAVNDGFRFFSYGDCMLIL

SEQ ID NO: 65984 - protein, 344 aa, Desulfuromonas sp.
  misc_feature (1)..(344): tr|A0A2N6EK14|A0A2N6EK14_9DELT S-adenosylmethionine:tRN A ribosyltransferase-isomerase OS=Desulfuromonas sp. OX =892 GN=queA PE=3 SV=1
MQLEDFDFLLPEELIAQHPTERRDGSRLMLVDRQRGAISTAGFPSVVDAFRKGDLLVINDTRVIPARLLGRKESGGKVEIFLVRRLAGAVDEDWLCMTRSSRSLKVGTQLKLAEGLTAEVLDGTEPPQRMVRFFCDGPFLDTIERVGHLPLPPYITRPDSAEDRQRYQTVFACNDGALAAPTAGLHFTEDILQQLRDKGVEILPLTLHVGLGTFLPVRVEDIRQHKMHAEIYSVPSATAAAVNRAKAERRRIVALGTTAARALESAVDEQGCLQAGEDESEIFIYPGYRFKLVDALITNFHLPKSTLLMLVSAFAGRDFILQAYQRAVAERFRFFSYGDCMLIV

SEQ ID NO: 65985 - protein, 343 aa, Desulfuromonas sp.
  misc_feature (1)..(343): tr|A0A357YEN5|A0A357YEN5_9DELT S-adenosylmethionine:tRN A ribosyltransferase-isomerase OS=Desulfuromonas sp. OX =892 GN=queA PE=3 SV=1
MQLSDFDFELPEALIAQTPLARRDASRLLVLDRKTATLRHEAFPAIASILGAGDLLVVNDTRVIPARLHGFKDSGGHIEVFLVRRYPGAEEIWGCLTRSSKPPRPGSRLHLAEGVVATVLDGADDDLRRVRFEGVGDFLATLERAGEIPLPPYIRREAEELDRERYQTVFAAAPGAVAAPTAGLHFTPELLERLRRRGVEICNLTLHVGPGTFLPVREDGLRNHRMHAESYLIPAATATAVNRAKREGRRVVALGTTTTRTLEHGADVGGELLPGEGMTDLFILPGYRFRLVDAMITNFHLPRSTLLMLVSAFAGRELLLQAYREAVLERYRFFSYGDSMVIL

SEQ ID NO: 65986 - protein, 345 aa, Desulfuromonas thiophila
  misc_feature (1)..(345): tr|A0A1G7CCH8|A0A1G7CCH8_9DELT S-adenosylmethionine:tRN A ribosyltransferase-isomerase OS=Desulfuromonas thioph ila OX=57664 GN=queA PE=3 SV=1
MRLTDFDYALPAELIAQQPAERRDASRLLVLDRANGSCRSDWFSHIASYFRPGDVLVRNDTRVIPARLLGRKDSGGRVEVFLVRQLSAAADGLCWRCLTRSSKPVRPGQLLYFAEGLKASVLALGEAGERDLCFHHAGDFSALLDRIGQVPLPPYITRPAEADDRERYQTTFARVPGAVAAPTAGLHFTPECFARLERLGVELCNLTLHVGLGTFLPVRVEDPRHHRMHEEAYAVPEATAATINRARAEGRRIVALGTTVARTLEAASMADGHLRTGDGLTDIFIYPGYRFRQVDALVTNFHLPQSTLLMLVCALAGREAVLAAYARAVAEGYRFFSYGDCMFIQ

SEQ ID NO: 65987 - protein, 347 aa, Desulfuromusa kysingii
  misc_feature (1)..(347): tr|A0A1H3YDA1|A0A1H3YDA1_9DELT S-adenosylmethionine:tRN A ribosyltransferase-isomerase OS=Desulfuromusa kysingi i OX=37625 GN=queA PE=3 SV=1
MQLTDFDFLLPDELIAQVPATQRDGSRLLCLKRQSATIAARQFVDIPEYFERGDVLVINDTKVIPARLLGQKLTGGKVEIFLVRKVAGVASTDADEWLCLTKSSKPLRVGTVVQFTAEFSAEVLDEMDAPYRLVRFHCPGDFMQMVDKVGHLPLPPYIKRDDSREDRSRYQTVFANQEGAVAAPTAGLHFTTEILQQLTAAGVEIVNLTLHVGLGTFLPVRVDDICQHKMHSELYSISAATAAAVNLAHQEGRRVFALGTTSARALETAATADGLLRSGAGESEIFIYPGYKFKIVDALITNFHLPKSTLLMLVSAFAGREFILTAYRQAIEKRFRFFSYGDCMLIL

SEQ ID NO: 65988 - protein, 342 aa, Dethiobacter alkaliphilus
  misc_feature (1)..(342): tr|C0GKE7|C0GKE7_9FIRM S-adenosylmethionine:tRNA ribosy ltransferase-isomerase OS=Dethiobacter alkaliphilus AHT 1 OX=555088 GN=queA PE=3 SV=1
MHLSEFDYELPEELIAQVPLTDREASRLLILHRKSGAVEHGNFSDILSHLQAGDTLVLNDTKVLPARLTGRKKGGGAMAEVLLLTRKDKACWEALVKPGRRLRPGAEVEFGNGELTAVIKEELADGTRLVEFRYDGIFEEVLDRLGEMPLPPYITEKLADRQRYQTVYAKNEGSAAAPTAGLHFTPRLLAEAQDRGINVVYLTLHVGLGTFRPVKTEDIREHHMHSEYYNISPESAQILNSCRRAGGRIVAVGTTSCRVLETVAQDDGTINAGSGWTDIFIYPGYRFKTVNALLTNFHLPKSTLIMMISAFAGRDNVLNAYREAVQERYRFFSFGDAMLIID

SEQ ID NO: 65989 - protein, 347 aa, Dethiobacter sp.
  misc_feature (1)..(347): tr|A0A3A6NSX7|A0A3A6NSX7_9FIRM S-adenosylmethionine:tRN A ribosyltransferase-isomerase OS=Dethiobacter sp. OX=2 093370 GN=queA PE=3 SV=1
MEIDSKLKTEDFSYDLPPELIAQEPLRERDNSRLLVLGRNSGKIEDTTFKRLPSYLERGDLLILNNTRVLPARLLGRKKDGGGQVELLLLRRLEEMKWEVLCSPGKRARPGVVLTFGSGQLEAEVLEKTAAGGRIVAFKTAHPLEEILYQLGQVPLPPYIKKHLEDRERYQTVYASEEGSAAAPTAGLHFTASVFEELRTRGIDWAYLTLHIGVGTFRPVKDKYIEDHLMHSEYFELPASTAQSINRTREKGGRIVAVGTTCCRVLETLGDGQGKVSEGRGETDLFIYPGYHFKVIDALLTNFHLPRSTLLMLISAFAGRENILKAYEKAVELRYRFYSFGDSMLIL

SEQ ID NO: 65990 - protein, 363 aa, Dethiosulfatarculus sandiegensis
  misc_feature (1)..(363): tr|A0A0D2HKX7|A0A0D2HKX7_9DELT S-adenosylmethionine:tRN A ribosyltransferase-isomerase OS=Dethiosulfatarculus s andiegensis OX=1429043 GN=queA PE=3 SV=1
MNPALLRSAEASSPLDAYDYQLPPELIAQHPAPRRVQARLMVLAEGQAAPVHKRAYNLLEWLRKDDLLVINNTSVVPARLRGRKPTGGKVEVFLLSPAHPLDVMDDGSEVHETLIKTHRRLAKGARINLDPEENLWAEVVEVSDRGKALVKFPGSALSLASDLGEVPLPPYIKRPDGPLAEDKQRYQTVYAHKQGAVAAPTAGLHLSKELMAALLKRGVRVAPVTLHVGYGTFAEPSAEDLASGKLHSEWVEISCETARAVEETRQKGGRVICVGTTSLRAVEWRGTEQGLVEPGAGWCDILIDESSAIKVADGILTNFHLPRTTLLMLVAAMAGRERILAAYAEAIRMKYRFYSFGDAMLII

SEQ ID NO: 65991 - protein, 344 aa, Dethiosulfatibacter aminovorans
  misc_feature (1)..(344): tr|A0A1M6D3B2|A0A1M6D3B2_9FIRM S-adenosylmethionine:tRN A ribosyltransferase-isomerase OS=Dethiosulfatibacter a minovorans DSM 17477 OX=1121476 GN=queA PE=3 SV=1
MKNDKLTTSDFTFDLPEDQIAQTPIMNREQSKLMVLDKTGETIEHRKFYNILEYLNEGDCLVMNNSRVLPARMFGTKTTGAVIEILLLKRQSLDRWECLVKPGKRAKPGTVINFGNKLQGEVLEDLEDGVKLVEFKYEGVFESIIEELGEMPLPPYIKEKLEDQERYQTVYAEVSGSAAAPTAGLHFTEDLMDKVREKGISIAYVTLHVGLGTFRPVKVDNIDEHIMHSEYYELNEYNADIIKAARNKGGRIISVGTTSTRTLESICKKLGKLDKDSGWTDIFIYPGYEFKAVDALITNFHLPESTLLMLVSAFSNREFILKAYKEAVDNDYRFFSFGDAMFIY

SEQ ID NO: 65992 - protein, 344 aa, Dethiosulfovibrio peptidovorans
  misc_feature (1)..(344): tr|D2Z3E1|D2Z3E1_9BACT S-adenosylmethionine:tRNA ribosy ltransferase-isomerase OS=Dethiosulfovibrio peptidovora ns DSM 11002 OX=469381 GN=queA PE=3 SV=1
MEENIFKVSSYDYRLPKELIAQNPADPRDSSRLMVLSREDGSLEHRVFSDLVDYLRSDDVLIRNDTRVMAARLKGKKVEGEAEVEILVLSRLSGQTWEAMVRPGRRLKPGISVLLSDGTTVKVDGIRPEGLRSVTFPEGVDVLSLLDKVGTVPLPPYITDSNASPEAYQTVFANKVGSAAAPTAGLHFTPELIERIEKKGVEILDVTLQVGLGTFRPVKEEDLRHHPMHRERCQISSYTADRINKAKAQGRRIVAVGTTSVRTLESMGDSGVLLSGERDTSLFIYPGFEFKIVDAMITNFHLPQSTLLMLVSAFAGRERTLNAYKEAVSMEYRFFSFGDAMFIY

SEQ ID NO: 65993 - protein, 345 aa, Dethiosulfovibrio peptidovorans
  misc_feature (1)..(345): tr|A0A2G6M5A5|A0A2G6M5A5_9BACT S-adenosylmethionine:tRN A ribosyltransferase-isomerase OS=Dethiosulfovibrio pep tidovorans OX=47055 GN=queA PE=3 SV=1
MTDERLYLTSSYGYQLPEGLIAQSPAVPRDSSRLLILSRRDGTMEHRRFSDLTEYLHPGDLLVRNDTRVMAARLMGTKIGGGAKVELLLLSRLSDRTWEALVRPGRRLQPGVPVELEDGTTVTIEANRSEGLREVAFPDGLNVDKLMDRLGVVPLPPYITNTSSPAESYQTVFSRNPRSAAAPTAGLHFTSELLDKVARMGVEIVDVTLHVGLGTFRPVQEDDIRAHHMHRERCFISSKTAEAVNRARREGRRVVAVGTTSVRTLESMVENGEVVSGSRETSLYIYPGFRFQAVDAMITNFHLPHSSLLMLVSAFAGLDMVQNAYREAVRREYRFFSFGDAMLIT

SEQ ID NO: 65994 - protein, 344 aa, Dethiosulfovibrio salsuginis
  misc_feature (1)..(344): tr|A0A1X7I4W1|A0A1X7I4W1_9BACT S-adenosylmethionine:tRN A ribosyltransferase-isomerase OS=Dethiosulfovibrio sal suginis OX=561720 GN=queA PE=3 SV=1
MDEKFYRVSTYNYSLPEKLIAQNPVVPRDCSRLLFLSKKDGAIEHRRFCNLLDYLVPGDLLVRNNTKVMPSRLIGFKPGMASEVEILLLSPLSTDTWEAMVRPGRRLKPGTSVSLSDGTKIKVESVRDDGLRALSFPPGTDVMDLMDRLGSIPLPPYINSSTAPDESYQTVFAKEATSAAAPTAGLHFTDSLIESIRLKGVEIVDVTLDVGLGTFRPVKEEDLREHPMHLERCRVPEATAAAINKAKKEGRRVIAVGTTSVRTLESMYREGILKHGDTDTSLFIYPGYSFQVIDGMVTNFHLPQSTLLMLVSAFAGYEFTMSAYKEAVSEEYRFFSFGDAMLIL

SEQ ID NO: 65995 - protein, 359 aa, Devosia chinhatensis
  misc_feature (1)..(359): tr|A0A0F5FMC0|A0A0F5FMC0_9RHIZ S-adenosylmethionine:tRN A ribosyltransferase-isomerase OS=Devosia chinhatensis OX=429727 GN=queA PE=3 SV=1
MLVSDFDFELPETLIALHPAEPRDSARLLVVRPEEALEDRHIPDLRTLLRPGDVLVVNDTRVLPAELRGVRIRGENRAGVSFNLHKRVDAHTWRAFARPAKKMGLLDDLELGNGEGELLRARIAGKGDTGEVTLEFELGGAQLDEAIKSHGAMPLPPYIGAKRAVEERDKVDYQTVYAAEDGAVAAPTAGLHFTEKLLQDLADMDVAMERVTLHVGAGTFLPMKVDDTDDHVMHSEWGEIDQATVERINARRAAGGRVIAVGTTSLRLLETASRATGELKPFVGDTDIFITPGFRFRTVDVLMTNFHLPKSTLFMLVSAFCGLETMKRAYAHAIANGYRFYSYGDSSLLHRAAHPEDDA

SEQ ID NO: 65996 - protein, 360 aa, Devosia crocina
  misc_feature (1)..(360): tr|A0A1I7N925|A0A1I7N925_9RHIZ S-adenosylmethionine:tRN A ribosyltransferase-isomerase OS=Devosia crocina OX=42 9728 GN=queA PE=3 SV=1
MRVSEFDFELPENLIALHPAEPRDSARLLQVVPGEAFRDRHIPDLLDILKPGDVLVVNDTRVLPAELRGTRRRGDIRANVSFNLHKRVDAHTWRAFARPAKKLALLDELELGNGSADVLRARVAGKGDTGEITLEFELGGAQLDEAIRSHGAMPLPPYIGAKRAVEERDKVDYQTVYAAEDGAVAAPTAGLHFTEKLLQQLSDRGVTMERVTLHVGAGTFLPMKADDTDDHVMHSEWGEIDQATVERINAKRELGGRVVAVGTTSLRLLETASRATGALQPFMGDTDIFITPGFRFRTVDILMTNFHLPKSTLFMLVSAFSGLDTMKGAYAHAIANGYRFYSYGDSSLLFRAPGDEDDTA

SEQ ID NO: 65997 - protein, 359 aa, Devosia elaeis
  misc_feature (1)..(359): tr|A0A178HU92|A0A178HU92_9RHIZ S-adenosylmethionine:tRN A ribosyltransferase-isomerase OS=Devosia elaeis OX=177 0058 GN=queA PE=3 SV=1
MRVSEFDFELPESLIALHPAEPRDSARLLVVRPGEKPEDRHIPDLRTLLRPGDVLVVNDTRVLPAELRGIRIRGENRAGVSFNLHKRVDAKTWRAFARPAKKLALLDALELGNGIGEPLRARVAGRGDTGEVTLEFDLGGAQLDEAIKSHGAMPLPPYIGAKRDVEERDKVDYQTVYAAEDGAVAAPTAGLHFTEKLLQDLADMDVALERVTLHVGAGTFLPMKVDDTEDHVMHSEWGEIDRATVERINARRAAGGRVVAVGTTSLRLLETASRATGTLQPFIGDTDIFITPGFHFRTVDVLMTNFHLPKSTLFMLVSAFSGLETMKAAYAHAIENGYRFYSYGDSSLLHRAPHPGDAA

SEQ ID NO: 65998 - protein, 359 aa, Devosia enhydra
  misc_feature (1)..(359): tr|A0A1K2HVB5|A0A1K2HVB5_9RHIZ S-adenosylmethionine:tRN A ribosyltransferase-isomerase OS=Devosia enhydra OX=66 5118 GN=queA PE=3 SV=1
MRVSDFDFELPNDLIALHPAEPRDSARLLLVGEKGRLEDRHVTDLVEILRPGDVLVVNDTRVLPAELSGTRIRGENRSSVSFNLHKRVDANTWRAFARPAKRLHVLDALELGGGEGQGQPMRARVAGKGDTGEVTLEFELGGAELDEAIKAHGAMPLPPYIGAKRGVEPRDSVDYQTVYAAVDGAVAAPTAGLHFTEALLQRLADRGVALERVTLHVGAGTFLPMKVEDLSEHRMHAEWGELTAATAERLEAARAAGGRIVAVGTTSLRLLETAARATGRIAPFIGETDIFITPGFRFRAVDVLMTNFHLPRSTLFMLVSAFAGYDEMRKAYAHAIASGYRFYSYGDGSLLFRAPGDEE

SEQ ID NO: 65999 - protein, 359 aa, Devosia epidermidihirudinis
  misc_feature (1)..(359): tr|A0A0F5QFB9|A0A0F5QFB9_9RHIZ S-adenosylmethionine:tRN A ribosyltransferase-isomerase OS=Devosia epidermidihir udinis OX=1293439 GN=queA PE=3 SV=1
MLVSDFDFDLPEKLIALHPVEPRDSARLLLVDPVNGLSDKHIPDLLSLIGDGDVLVVNDTRVLPAELRGTRIRGENRSTVSFNLHKRVDAHTWRAFARPAKRLALLDRLELGNGQADALTARVAGKGETGEITLEFDLGGAELDEAIKSHGAMPLPPYIGAKRDVEERDLVDYQTVYAAEDGAVAAPTAGLHFTEALLQKLSDQGVTIERVTLHVGAGTFLPMKVDDTDDHIMHSEWGEIDQATVERINAKRAAGGRVVAVGTTSLRLLETASRATGTLQPFIGDTDIFITPGFRFRTVDALMTNFHLPKSTLFMLVSAFAGMEVMRKAYEHAIAEGYRFYSYGDSSLLLRAAHPQGEE

SEQ ID NO: 66000 - protein, 361 aa, Devosia geojensis
  misc_feature (1)..(361): tr|A0A0F5FT72|A0A0F5FT72_9RHIZ S-adenosylmethionine:tRN A ribosyltransferase-isomerase OS=Devosia geojensis OX= 443610 GN=queA PE=3 SV=1
MRVDLFDFELPEDRIALHPAEPRDSARLLVVDPRDGLEDRNVRDLLWLLRPGDVLVVNDTRVLPAELRGERVRGEHRASVSFNLHKRVDARTWRAFARPAKRLKVFDRLELGSDGMEPLLATVAGKGDTGEVTLEFDLSGAALDEAIKSHGAMPLPPYIEAKRRPSERDRTDYQTVYAAEDGAVAAPTAGLHFTEDLLVGLQQKGVSIERVTLHVGAGTFLPMKAEDTDDHVMHAEWGEIEADTVRRILAARQKGGRVVAVGTTSLRLLETAARATGTLAPFVGETDIFITPGFRFRAVDVLMTNFHLPKSTLFMLVAAFSGLDVMKRAYAHAIANGYRFYSYGDSSLLYRASPRDDEDGA

SEQ ID NO: 66001 - protein, 350 aa, Devosia insulae
  misc_feature (1)..(350): tr|A0A1E5XL56|A0A1E5XL56_9RHIZ S-adenosylmethionine:tRN A ribosyltransferase-isomerase OS=Devosia insulae DS-56 OX=1116389 GN=queA PE=3 SV=1
MKVDDFDFDLPAESIALHPAEPRDAARMLVVRPGEALVDGHVRDLLTILRAGDVLVVNDTRVLPAELTGTRIRGELRANVSFNLHKRVDANTWRAFARPAKKLHLLDRLELGDNGSILATVAGKGDTGEITLAFDLGGAELDEAIKAHGAMPLPPYIEAKRHTEERDKSDYQTVYAARDGAVAAPTAGLHFTESLLQQLADLGVSVERVTLHVGAGTFLPVKVDDTDDHVMHAEWGDIPAAVVERILAARAKGGRVIAVGTTSLRLLETAARATGTLQPFVGDTDIFITPGYRFNAVDMLMTNFHLPRSTLFMLVSAFAGLDTMRAAYAHAIGNGYRFYSYGDASLLFRA

SEQ ID NO: 66002 - protein, 357 aa, Devosia limi
  misc_feature (1)..(357): tr|A0A0F5LKR3|A0A0F5LKR3_9RHIZ S-adenosylmethionine:tRN A ribosyltransferase-isomerase OS=Devosia limi DSM 1713 7 OX=1121477 GN=queA PE=3 SV=1
MLVSDFDFDLPEELIALHPVEPRDSARLLLVDPDNGLFDRHIPDLLTLLRPGDVLVVNDTRVLPAELRGTRIRGENRASVSFNLHKRVDAHTWRAFARPAKRLALLDQLELGNGQADALTARVAGKGETGEVTLEFDLGGARLDEAIKSHGAMPLPPYIGAKRKAEARDNVDYQTVYAAEDGAVAAPTAGLHFTETLLQQLSDLGVSIERVTLHVGAGTFLPMKVDNTDDHVMHAEWGDIDQATVERILAAKAAGGRVVAVGTTSLRLLETASRATGTLQPFIGDTDIFITPGFRFRTVDVLMTNFHLPKSTLFMLVSAFAGMDTMRRAYEHAIATGYRFYSYGDSSLLLRAEQDDE

SEQ ID NO: 66003 - protein, 359 aa, Devosia lucknowensis
  misc_feature (1)..(359): tr|A0A1Y6ERN1|A0A1Y6ERN1_9RHIZ S-adenosylmethionine:tRN A ribosyltransferase-isomerase OS=Devosia lucknowensis OX=1096929 GN=queA PE=3 SV=1
MRVTEFDFDLPETLIALHPAEPRDSARLLVVRPGEPFANQHIPDLRTLLRPGDVLVVNDTRVLPAELKGIRVRGETRANVSFNLHKRDDAHTWRAFARPAKKLHLLDRLELGNGGADPLIARVAGKGDTGEVTLEFELGGAQLDEAIKSHGAMPLPPYIGAKRPVEERDKVDYQTVYAAEDGAVAAPTAGLHFTEKLLQDLADMDVAMERVTLHVGAGTFLPMKADDTDDHVMHSEWGEIDQATVERINARRAAGGRVIAVGTTSLRLLETASRATGELKPFVGDTDIFITPGFRFRTVDVLMTNFHLPKSTLFMLVSAFSGLQTMKDAYAHAIGNAYRFYSYGDSSLLHRAPHPEDDA

SEQ ID NO: 66004 - protein, 361 aa, Devosia psychrophila
  misc_feature (1)..(361): tr|A0A0F5PUX3|A0A0F5PUX3_9RHIZ S-adenosylmethionine:tRN A ribosyltransferase-isomerase OS=Devosia psychrophila OX=728005 GN=queA PE=3 SV=1
MLVSDFDFDLPEKLIALHPAEPRDSARLLVVDPKAGLADGHIPDLLWLLKPGDVLVVNDTRVLPAELRGTRVRGENRANISFNLHKRVDAHTWRAFARPAKKLALLDRLELGNGQTDALVARVAGRGDTGEVTLEFELGGAQLDEAIKSHGAMPLPPYIGAKRGVEERDLVDYQTVYAAEDGAVAAPTAGLHFTKKLLQDLTDKGVTIERVTLHVGAGTFLPMKVEDTKDHVMHAEWGEIDQATVERINVKRALGGRVIAVGTTSLRLLETASRKTGTLQPFTGDTDIFITPGFRFATVDALMTNFHLPKSTLFMLVSAFAGFDVMKAAYAHAIADGYRFYSYGDSSLLLRAGRDGLDEGF

SEQ ID NO: 66005 - protein, 360 aa, Devosia riboflavina
  misc_feature (1)..(360): tr|A0A087M1L8|A0A087M1L8_9RHIZ S-adenosylmethionine:tRN A ribosyltransferase-isomerase OS=Devosia riboflavina O X=46914 GN=queA PE=3 SV=1
MRVSEFDFELPENLIALHPAEPRDSARLLVVRPGEALQDRHIPDLLELFQPGDVLVVNDTRVLPAELRGTRVRGETRANVSFNLHKRVDAHTWRAFARPAKKLALLDALELGNGQADALKARVAGKGDTGEVTLEFELGGAQLDEAIKSHGAMPLPPYIGAKRAVEERDKVDYQTVYAAEDGAVAAPTAGLHFTEKLLQQLSDRGVTMERVTLHVGAGTFLPMKVDDTEDHVMHSEWGDIDQATVERINAKRALGGRVIAVGTTSLRLLETASRATGRLQPFIGDTDIFITPGFKFRTVDILMTNFHLPKSTLFMLVSAFSGLDQMKAAYHHAISNGYRFYSYGDSSLLFRASGDEDDEA

SEQ ID NO: 66006 - protein, 361 aa, Devosia soli
  misc_feature (1)..(361): tr|A0A0F5LBI4|A0A0F5LBI4_9RHIZ S-adenosylmethionine:tRN A ribosyltransferase-isomerase OS=Devosia soli OX=36104 1 GN=queA PE=3 SV=1
MRVSEFDFDLPENLIALHPAEPRDSARLLVVRPGRGVEDRHIPDLLEILQPGDVLVVNDTRVLPAELRGVRVRGETRANVSFNLHKRVDAHTWRAFARPAKKLALLDELELGNGQTDALKARVAGKGDTGEVTLEFELGGAQLDEAIKSHGAMPLPPYIGAKRDVEERDKVDYQTVYAAEDGAVAAPTAGLHFTEKLLQQLVERGVSMERVTLHVGAGTFLPMKVDDTEDHVMHSEWGEIDQATVERINAKRAAGGRVIAVGTTSLRLLETASRATGMLQPFMGDTDIFITPGFRFRTVDVLMTNFHLPKSTLFMLVSAFSGLDTMKAAYHHAIANGYRFYSYGDSSLLFRDRSADRDDEV

SEQ ID NO: 66007 - protein, 352 aa, Devosia sp.
  misc_feature (1)..(352): tr|A0A1E4A6D6|A0A1E4A6D6_9RHIZ S-adenosylmethionine:tRN A ribosyltransferase-isomerase OS=Devosia sp. SCN 66-27 OX=1660097 GN=queA PE=3 SV=1
MKVDDFDFDLPAESIALHPAEPRDSARMLVVRPGEALVDGHVRDLLTILRAGDVLVVNDTRVLPAELTGTRIRGELRANVSFNLHKRVDTNTWRAFARPAKKLHLLDRLELGDNGSIAATVTGKGETGEITLAFDLGGAELDEAIKAHGAMPLPPYIEAKRHTEERDKTDYQTVYAARDGAVAAPTAGLHFTESLLQQLADLGVSVERVTLHVGAGTFLPVKVDDTDDHVMHAEWGDIPAAVVERILAARAKGGRVIAVGTTSLRLLETAARATGTLQPFVGDTDIFITPGYRFNAVDMLMTNFHLPRSTLFMLVSAFAGLNTMRAAYRHAIDDGYRFYSYGDSSLLFRAEP

SEQ ID NO: 66008 - protein, 359 aa, Devosia sp.
  misc_feature (1)..(359): tr|A0A2U0TC95|A0A2U0TC95_9RHIZ S-adenosylmethionine:tRN A ribosyltransferase-isomerase OS=Devosia sp. PTEAB7WZ OX=2135613 GN=queA PE=3 SV=1
MRVTEFDFDLPENLIALHPAEPRDSARLLVVRPGEPFADQYIPDLKTLLRPGDVLVVNDTRVLPAELKGVRLRGDVRANVAFNLHKRVDAKTWRAFARPAKKLHLLDRLELGNGEAEPLVARVAGKGETGEVTLEFELGGAQLDEAIKSHGAMPLPPYIGAKRQVEERDKVDYQTVYAAEDGAVAAPTAGLHFTEKLLQELANMDVVMERVTLHVGAGTFLPMKADDTDDHVMHSEWGEIDQATVERINARRAAGGRVVAVGTTSLRLLETASRATGELKPFMGDTDIFITPGFRFRTVDVLMTNFHLPKSTLFMLVSAFSGLDTMKAAYAHAIANGYRFYSYGDSSLLHRAAHPEDDA

SEQ ID NO: 66009 - protein, 339 aa, Dialister invisus
  misc_feature (1)..(339): tr|C9LLI7|C9LLI7_9FIRM S-adenosylmethionine:tRNA ribosy ltransferase-isomerase OS=Dialister invisus DSM 15470 O X=592028 GN=queA PE=3 SV=1
MKLEDFNYVLPKELIAQQPAEPRDSCRLLMVDKKTGEWQHRRFRDILDEIRPGDVFVFNNTKVIPARLFGRRKGTGGKVEALLLTPKGNDVWEILVNPGRKALPGQEIEFSENFSCTVIDKTEFGGRLVKFHYSGDFDNWLDQLGEMPTPPYIHKKLENKDEYQTVYAKFKGSAAAPTAGLHFTPELLEKMKDKGAELLFVTLHVGIGTFRPVAEENIEDHEMHREWYTIEKETAQKVNEAKEEGRRIIAVGTTSVRTLESAGQTGRVEAGSSWTQLYIYPGYQWQVVDAIVTNFHLPESTLIMMMASFAGREHILAAYEEAVRQKYRFFSFGDAMFLR

SEQ ID NO: 66010 - protein, 339 aa, Dialister invisus
  misc_feature (1)..(339): tr|R5T5Q1|R5T5Q1_9FIRM S-adenosylmethionine:tRNA ribosy ltransferase-isomerase OS=Dialister invisus CAG:218 OX= 1263072 GN=queA PE=3 SV=1
MKLEDFNYVLPKELIAQQPAEPRDSCRLLMVDKKTGEWQHCRFRDILDEIRPGDVFVFNNTKVIPARLFGRRKGTGGKVEALLLTPKGNDVWEILVNPGRKALPGQEIEFSENFSCTVIDKTEFGGRLVKFHYSGDFDNWLDQLGEMPTPPYIHKKLENKDEYQTVYAKFKGSAAAPTAGLHFTPELLEKMKDKGAELLFVTLHVGIGTFRPVAEENIEDHEMHREWYTIEKETAQKVNEAKEEGRRIIAVGTTSVRTLESAGQTGRVEAGSSWTQLYIYPGYQWQVVDAIVTNFHLPESTLIMMMASFAGREHILAAYEEAVRQKYRFFSFGDAMFLR

SEQ ID NO: 66011 - protein, 339 aa, Dialister micraerophilus
  misc_feature (1)..(339): tr|F2BV07|F2BV07_9FIRM S-adenosylmethionine:tRNA ribosy ltransferase-isomerase OS=Dialister micraerophilus DSM 19965 OX=888062 GN=queA PE=3 SV=1
MKLENFNYELPESLIAQEPVEPRDSCKLMVLDKETGHLSHHVFTDILDEIKENDLIVFNNTKVIPARLNGYRKQTGGKVEVLLLTPKGNDEWEVLVNPGRKALIGQEIIFSDKFYCVVLDKTDFGGRRVKFYYDGDFDLLLDEVGEMPIPPYIHKKLKNKEEYQTVYAKYKGSAAAPTAGLHFTSELINKIKEKGAEICFVTLHVGLGTFRPVNEENIEDHEMHKEWYVISEQTADAINKAKKEGRRIIAVGTTSVRTLESAGQSGKLKAGANWTNLYIYPGYSWKIVDAIITNFHLPESTLLMMMASFVGTDKILNAYKEAVAKKYRFFSFGDAMFLR

SEQ ID NO: 66012 - protein, 339 aa, Dialister microaerophilus; identical to SEQ ID NO: 66011
  misc_feature (1)..(339): tr|E4L918|E4L918_9FIRM S-adenosylmethionine:tRNA ribosy ltransferase-isomerase OS=Dialister microaerophilus UPI I 345-E OX=910314 GN=queA PE=3 SV=1

SEQ ID NO: 66013 - protein, 339 aa, Dialister pneumosintes
  misc_feature (1)..(339): tr|A0A1B3WD51|A0A1B3WD51_9FIRM S-adenosylmethionine:tRN A ribosyltransferase-isomerase OS=Dialister pneumosinte s OX=39950 GN=queA PE=3 SV=1
MKLENFNYDLPTNLIAQEPAEPRDSCRLMLVDKKTGEWEHQSFRDILNEIRAGDVLVFNNTKVIPARLYGQRKGTGGKVEMLLLSPKGNDNWEVLVKPGKKALPGTEIVFNEHMSCQIVDKTDFGGRIAHFKYNGEFDSILDQIGEMPIPPYIHKKLEDKNKYQTIYAKYKGSAAAPTAGLHFTEELLEEIKNRGAGVYFVTLHVGLGTFRPVAKENIEEHEMHKEWYDVPQITADAVNRAKTEGRRIIAVGTTSVRTLESAGQTGTLVAGGGWTQLYIYPGYEWNIVDAIVTNFHLPESTLIMMMAAFAGTNHILSAYKEAVNQKYRFFSFGDAMFLR

SEQ ID NO: 66014 - protein, 339 aa, Dialister sp.
  misc_feature (1)..(339): tr|A0A510GCG9|A0A510GCG9_9FIRM S-adenosylmethionine:tRN A ribosyltransferase-isomerase OS=Dialister sp. 5BBH33 OX=2582419 GN=queA PE=3 SV=1
MKLEEFNYDLPKELIAQEPAEPRDSCRLMMLDKNTGEWEHHGFRDILNEIRKGDIFVFNNTKVIPARLYGKKKDTGGKVEMLLLTPKGNDVWEVLVNPGRKALPGMEIEFSDDCYCKVLDKTEFGGRLVEFHYNGNFDSLLDQIGEMPTPPYIHKKLDNNDEYQTVYAKYKGSAAAPTAGLHFTPELMEEMKKKGAELLFVTLHVGIGTFRPVSEENIEDHEMHKEWYTVSEETAEKINKAKEEGRRIIAVGTTSVRTLESAGQSRKLKSGSNWTQLYIYPGYQWKMVDAIVTNFHLPESTLIMMMASFAGREHILAAYEEAVRQKYRFFSFGDAMFIR

SEQ ID NO: 66015 - protein, 339 aa, Dialister sp.
  misc_feature (1)..(339): tr|R7CTB2|R7CTB2_9FIRM S-adenosylmethionine:tRNA ribosy ltransferase-isomerase OS=Dialister sp. CAG:357 OX=1262 869 GN=queA PE=3 SV=1
MKLEEFNYDLPKELIAQEPAEPRDSCRLMMLDKNTGEWEHHGFRDILNEIRKGDIFVFNNTKVIPARLYGKKKDTGGKVEMLLLTPKGNDVWEVLVNPGRKALPGTEIEFSDDCYCKVLDKTEFGGRLVEFHYNGNFDSLLDQIGEMPTPPYIHKKLDNNDEYQTVYAKYKGSAAAPTAGLHFTPELMEEMKKKGAELLFVTLHVGIGTFRPVSEENIEDHEMHKEWYTVSEETAEKINKAKEEGRRIIAVGTTSVRTLESAGQSGKLKSGSNWTQLYIYPGYQWKMVDAIVTNFHLPESTLIMMMASFAGREHILAAYEEAVRQKYRFFSFGDAMFIR

SEQ ID NO: 66016 - protein, 339 aa, Dialister succinatiphilus
  misc_feature (1)..(339): tr|H1D2U6|H1D2U6_9FIRM S-adenosylmethionine:tRNA ribosy ltransferase-isomerase OS=Dialister succinatiphilus YIT 11850 OX=742743 GN=queA PE=3 SV=1
MKLEEFNYNLPKELIAQEPAEPRDSCRLMMLDKNTGAWEHHHFRDILDEIRPGDVFVFNNTKVIPARLYGKKRTTGGKVEMLLLTPKGNDVWEVLVNPGKKALPGTEIEFSDSCYCKVLDKTDFGGRVVEFHYDGNFDSLLDQLGEMPTPPYIHKKLENKDEYQTVYAKYKGSAAAPTAGLHFTPELMEEMKKKGAELLFVTLHVGIGTFRPVNEENIEDHEMHKEWYTVSQETADAVNQARSEGRRIIAVGTTSVRTLESAGQSGTLQSGSGWTQLYIYPGYQWHMVDAIVTNFHLPESTLIMMMASFAGREHILAAYEEAVKQKYRFFSFGDAMFIR

SEQ ID NO: 66017 - protein, 366 aa, Diaphorobacter nitroreducens
  misc_feature (1)..(366): tr|A0A3N1ZHD8|A0A3N1ZHD8_9BURK S-adenosylmethionine:tRN A ribosyltransferase-isomerase OS=Diaphorobacter nitror educens OX=164759 GN=queA PE=3 SV=1
MSSASTAPRTFTLSDFDFELPELLIAQHPAPQRSGSRLLDGRTAPPTDRIFRELPDLLQPGDLLVFNDTRVVKARVFGEKASGGKLELLIERVLTGNEVVAHMKVSKKPLPGATLHLAGGAAAGGFDATLLGRYPDADGPLFRLALRGPAGESPWELMERHGHLPLPPYIERQQAGGNDPHAGEDSERYQTVFARAPGAVAAPTAALHFDDAVLARLAERGIERASVTLHVGAGTFQPVKTENLAEHRMHSEWYEVPLATLAALERCRQRGGRVVAVGTTTVRTLESWAASGQAAGDTSIFITPGFQFQVVDLLLTNFHLPKSTLMMLVSAFAGYEHIMHLYRHAVAQRYRFFSYGDCMLLERPRA

SEQ ID NO: 66018 - protein, 366 aa, Diaphorobacter polyhydroxybutyrativorans
  misc_feature (1)..(366): tr|A0A2Z2LJU5|A0A2Z2LJU5_9BURK S-adenosylmethionine:tRN A ribosyltransferase-isomerase OS=Diaphorobacter polyhy droxybutyrativorans OX=1546149 GN=queA PE=3 SV=1
MSSASTAPRTFTLSDFDFELPELLIAQHPAPQRSGSRLLDGRTVPPTDRIFRELPDLLQPGDLLVFNDTRVVKARVFGEKASGGKLELLIERVLTGNEVVAHMKVSKKPLPGATLHLAGGAAAGGFDATLLGRYPDADGPLFRLALRGPAGESPWELMERHGHLPLPPYIERQQAGGNDPHAGEDSERYQTVFARAPGAVAAPTAALHFDDAVLARLAERGIERASVTLHVGAGTFQPVKTENLAEHRMHSEWYEVPLATLAALERCRQRGGRVVAVGTTTVRTLESWAASGQAAGDTSIFITPGFQFQVVDLLLTNFHLPKSTLMMLVSAFAGYEHIMQLYRHAVAQRYRFFSYGDCMLLERPHA

SEQ ID NO: 66019 - protein, 366 aa, Diaphorobacter sp.
  misc_feature (1)..(366): tr|A0A2S4KCS0|A0A2S4KCS0_9BURK S-adenosylmethionine:tRN A ribosyltransferase-isomerase OS=Diaphorobacter sp. LR 2014-1 OX=1933219 GN=queA PE=3 SV=1
MSSASTAPRTFTLSDFDFELPELLIAQHPAPQRSGSRLLDGRAAPPTDRIFRELPDLLQPGDLLVFNDTRVVKARVFGEKASGGKLELLIERVLTGNEVVAHMKVSKKPLPGATLHLAGGAAAGGFDATLLGRYPDADGPLFRLALRGPAGESPWELMERHGHLPLPPYIERQQAGGNDPHAGEDSERYQTVFARAPGAVAAPTAALHFDDAVLARLAERGIERASVTLHVGAGTFQPVKTENLAEHRMHSEWYEVPLATLAALERCRQRGGRVVAVGTTTVRTLESWAASGQAAGDTSIFITPGFPFQVVDLLLTNFHLPKSTLMMLVSALAGYEHIMQLYRHAVAQRYRFFSYGDCMLLERPRA

SEQ ID NO: 66020 - protein, 366 aa, Diaphorobacter sp.
  misc_feature (1)..(366): tr|A0A0J0UR06|A0A0J0UR06_9BURK S-adenosylmethionine:tRN A ribosyltransferase-isomerase OS=Diaphorobacter sp. J5 -51 OX=680496 GN=queA PE=3 SV=1
MSSASTAPRTFTLGDFDFELPELLIAQHPAPQRSGSRLLDGRTAPPTDRIFRELPDLLQPGDLLVFNDTRVVKARVFGEKASGGKLELLIERVLTGNEVVAHMKVSKKPLPGATLHLAGGAAAGGFDATLLGRYPDADGPLFRLALRGPAGESPWELMERHGHLPLPPYIERQQASGNDPHAGEDSERYQTVFARAPGAVAAPTAALHFDDAVLARLAERGIERASVTLHVGAGTFQPVKTENLAEHRMHSEWYEVPLATLAALERCRQRGGRVVAVGTTTVRTLESWAASGQAAGDTSIFITPGFPFQVVDLLLTNFHLPKSTLMMLVSAFAGYEHIMQLYRHAVAQRYRFFSYGDCMLLERPRA

SEQ ID NO: 66021 - protein, 354 aa, Dichelobacter nodosus
  misc_feature (1)..(354): tr|A0A5F1ABE1|A0A5F1ABE1_DICNO S-adenosylmethionine:tRN A ribosyltransferase-isomerase OS=Dichelobacter nodosus OX=870 GN=queA PE=3 SV=1
MQHTLKKSDFFYELPEHLIARYPLQNRSDSRLLVAAVESAQKVHISNKQMIDFIDFLKPEDLLVINNTRVVPARMFGHKISGGKVEVFIERLLSEQRVKAHIRASKAPLLGSQIVIGAQKVTIEDKKDGIYTVFSEMPWTKLMAQQGKMPIPPYLARDAEALDSERYQTVYAQIAGAVAAPTAGLHFDQKLLERIAAKGVKRAAITLHVGAGTFQPVRVENLNEHVMHQEWFSLSQEVVDAVAACRAQNGRVIAIGTTALRALESAAIGSGKVGVFQGDTDLFITPGYEFQVVDALFTNFHLPESTLLMLVSAFAGVNNIRRIYQHAITEQYRFFSYGDAMFLPHRLPALETLL

SEQ ID NO: 66022 - protein, 354 aa, Dichelobacter nodosus; identical to SEQ ID NO: 66021
  misc_feature (1)..(354): sp|A5EWY6|QUEA_DICNV S-adenosylmethionine:tRNA ribosylt ransferase-isomerase OS=Dichelobacter nodosus (strain V CS1703A) OX=246195 GN=queA PE=3 SV=1

SEQ ID NO: 66023 - protein, 369 aa, Dichotomicrobium thermohalophilum
  misc_feature (1)..(369): tr|A0A397QBE7|A0A397QBE7_9RHIZ S-adenosylmethionine:tRN A ribosyltransferase-isomerase OS=Dichotomicrobium ther mohalophilum OX=933063 GN=queA PE=3 SV=1
MSGPDKTSGGLRLDDFDYNLPEDRIALRPASPRDSARLLVVRPGAALELEDRIVRDLPDILAPGDTLVFNDTRVIPAQLNAKRVGRGETEPEIGITLHKRESGNRWRAFAKPGRKLAEGDRLAISGLERKALYARVEEKSGGEVLLAFEAESQALDALIDAAGVMPLPPYIASRRPPDERDREDYQTMFAAREGAVAAPTAGLHFTPELMDRLHARGIGWETVTLHVGAGTFLPVKVEDIANHRMHAEWGEISAETADKLNETRARRGRIVCVGTTCLRILETAVTRDRKIRPFSGETDIFITPGHTFRAIDVLMTNFHLPRSTLVMLVAAFSGLERIMRAYEHAVESGYRFYSYGDACLLWPDPAALP

SEQ ID NO: 66024 - protein, 355 aa, Dickeya aquatica
  misc_feature (1)..(355): tr|A0A375AD82|A0A375AD82_9GAMM S-adenosylmethionine:tRN A ribosyltransferase-isomerase OS=Dickeya aquatica OX=1 401087 GN=queA PE=3 SV=1
MRVSDFSFELPESLIARYPQATRSGCRLLSLDGPTGAVSHGVFTDLLDKLQPGDLLVFNNTRVIPARLFGRKVSGGRLEVLVERMLDEQRVLAHVRASKAPKPGTELLLGEDESVKATMLARHDALFEIRFDDARDVLTILNDIGHMPLPPYIDRPDEAADRELYQTVYGERPGAVAAPTAGLHFDEPLLAALKEKGIQMAFVTLHVGAGTFQPVRVETIEEHVMHAEYAEVPPDVVDAVLACKARGNRVIAVGTTSVRSLESAAQASQQALIAPFFGDTRIFIYPGYHYQVVDALVTNFHLPESTLIMLVSAFAGYQHTMAAYHQAVAAQYRFFSYGDAMFITRNPAAEQEQIG

SEQ ID NO: 66025 - protein, 357 aa, Dickeya chrysanthemi
  misc_feature (1)..(357): tr|C6CEL4|C6CEL4_DICC1 S-adenosylmethionine:tRNA ribosy ltransferase-isomerase OS=Dickeya chrysanthemi (strain Ech1591) OX=561229 GN=queA PE=3 SV=1
MVMRVADFSFELPEYLIARYPQAKRSGCRLLSLDGPTGAIAHGVFTDLLDKLQPGDLLVFNNTRVIPARLFGRKASGGKLEVLVERMLDDKRVLAHVRASKAPKPGTALLLGEDESVKATMLARHDALFEIQFDDTRDVLTILNDIGHMPLPPYIDRPDEAADRELYQTVYSQRPGAVAAPTAGLHFDEPLLAALKEKGVEMAFVTLHVGAGTFQPVRVESIEDHIMHAEYAEVPQAVVDAVLACKARGNRVIAVGTTSVRSLESAAQASAGESLAPFFGDTRIFIYPGYHYRVVDALVTNFHLPESTLIMLVSAFAGYRHTMAAYRQAVTEQYRFFSYGDAMFITRNPSAEQEQVG

SEQ ID NO: 66026 - protein, 355 aa, Dickeya dadantii
  misc_feature (1)..(355): tr|E0SD34|E0SD34_DICD3 S-adenosylmethionine:tRNA ribosy ltransferase-isomerase OS=Dickeya dadantii (strain 3937 ) OX=198628 GN=queA PE=3 SV=1
MRVADFSFELPESLIAHYPQAKRSGCRLLSLDGPTGALTHGVFTDLLDKLQPGDLLVFNNTRVIPARLFGRKVSGGKLEVLVERMLDDKRVLAHVRASKVPKPGTELLLGEDESVKATMLARHDALFEIQFDDTRDVLTILNDIGHMPLPPYIDRPDEAADRELYQTVYSQRPGAVAAPTAGLHFDEPLLAALKEKGVEMAFVTLHVGAGTFQPVRVESIEDHIMHAEYTEVPQVVVDAVLACKARGNRVIAVGTTSVRSLESAAQASTGEIIAPFFGDTRIFIYPGYRYRVVDALVTNFHLPESTLIMLVSAFAGYRHTMTAYQQAVAEQYRFFSYGDAMFITRNPSAEQEQVG

SEQ ID NO: 66027 - protein, 355 aa, Dickeya dianthicola
  misc_feature (1)..(355): tr|A0A3A4CQY3|A0A3A4CQY3_9GAMM S-adenosylmethionine:tRN A ribosyltransferase-isomerase OS=Dickeya dianthicola O X=204039 GN=queA PE=3 SV=1
MRVADFSFELPESLIARYPQAKRSGCRLLSLDGPTGALTHGVFTDLLDKLQPGDLLVFNNTRVIPARLFGRKASGGKLEVLVERMLDDKRVLAHVRASKAPKPGAELLLGEDESVKATMLARHDALFEIQFDDTRDVLTILNDIGHMPLPPYIDRPDDAADRELYQTVYSQRPGAVAAPTAGLHFDEPLLAALKEKGVDMAFVTLHVGAGTFQPVRVESIEDHIMHAEYAEVPQAVVDAVLACKARGNRVIAVGTTSVRSLESAAQASTGEVIAPFFGDTRIFIFPGYHYQVVDALVTNFHLPESTLIMLVSAFAGYRYTMTAYRQAVAEQYRFFSYGDAMFITRNPSAEQEQVG

SEQ ID NO: 66028 - protein, 355 aa, Dickeya fangzhongdai
  misc_feature (1)..(355): tr|A0A2K8QTZ8|A0A2K8QTZ8_9GAMM S-adenosylmethionine:tRN A ribosyltransferase-isomerase OS=Dickeya fangzhongdai OX=1778540 GN=queA PE=3 SV=1
MRVADFSFELPESLIARYPQAKRSGCRLLSLDGPTGALTHGVFTDLLDKLQPGDLLVFNNTRVIPARLFGRKASGGKLEVLVERMLDDQRVLAHVRASKAPKPGTELLLGEDESVKATMLERHDALFEIRFDDTRDVLTILNDIGHMPLPPYIDRPDEAADRELYQTVYSQRPGAVAAPTAGLHFDEPLLAALKEKGVEMAFVTLHVGAGTFQPVRVESIEDHIMHAEYAEVPQAVVDAVLACKARGNRVIAVGTTSVRSLESAAQASTGEAIAPFFGDTRIFIYPGYHYRVVDALVTNFHLPESTLIMLVSAFAGYRHTMTAYRQAVTEQYRFFSYGDAMFITRNPSAEQEQVG

SEQ ID NO: 66029 - protein, 362 aa, Dickeya paradisiaca
  misc_feature (1)..(362): tr|C6CBS2|C6CBS2_DICP7 S-adenosylmethionine:tRNA ribosy ltransferase-isomerase OS=Dickeya paradisiaca (strain E ch703) OX=579405 GN=queA PE=3 SV=1
MVMRVADFSFELPESLIARYPQAQRSACRLLSLEGTTGALTHGVFTDLLDTLNPGDLLVFNNTRVIPARLFGRKASGGKLEVLVERMLDDKRVLAHVRASKAPKPGMELLLGEDESVHATMLERHDALFEIRFDDERDILTILNDIGHMPLPPYIDRPDEAADRELYQTVYSQRPGAVAAPTAGLHFDEPLLAALKEKGVQMAFVTLHVGAGTFQPVRVESIEEHVMHAEYAEVPQEVLDAVLACKARGNRVVAVGTTSVRSLESAAQASPAGQLAPFFGDTSIFIYPGYHYRVVDALVTNFHLPESTLIMLVSAFAGYRHTMEAYRQAVVSEYRFFSYGDAMFITPNPAAEQEIVGQDPRR

SEQ ID NO: 66030 - protein, 357 aa, Dickeya solani
  misc_feature (1)..(357): tr|A0A2K8W3H2|A0A2K8W3H2_9GAMM S-adenosylmethionine:tRN A ribosyltransferase-isomerase OS=Dickeya solani RNS 08 .23.3.1.A OX=1240086 GN=queA PE=3 SV=1
MVMRVADFSFELPESLIARYPQAKRSGCRLLSLDGPTGALAHGVFTDLLDKLQPGDLLVFNNTRVIPARLFGRKASGGKLEVLVERMLDEHRVLAHVRASKAPKPGTELLLGEDESVKATMLERHDALFEIRFDDTRDVLTILNDIGHMPLPPYIDRPDEAADRELYQTVYSQRPGAVAAPTAGLHFDEPLLAALKEKGVEMAFVTLHVGAGTFQPVRVESIEDHIMHAEYAEVPQAVVDAVLACKARGNRVIAVGTTSVRSLESAAQASTGEVIAPFFGDTRIFIYPGYHYRVVDALVTNFHLPESTLIMLVSAFAGYRHTMTAYQQAVAEQYRFFSYGDAMFITRNPSAEQEQVG

SEQ ID NO: 66031 - protein, 355 aa, Dickeya sp.
  misc_feature (1)..(355): tr|A0A5B8IG14|A0A5B8IG14_9GAMM S-adenosylmethionine:tRN A ribosyltransferase-isomerase OS=Dickeya sp. NCPPB 569 OX=568768 GN=queA PE=3 SV=1
MRVADFSFELPESLIARYPQAKRSGCRLLSLDGPTGAVVHGVFTDLLDKLQPGDLLVFNNTRVIPARLFGRKASGGKLEVLVERMLDNHRVLAHVRASKAPKPGTELLLGEDESVKATMLARHDALFEIQFDDTRDVLTILNDIGHMPLPPYIDRPDEAADRELYQTVYSQRPGAVAAPTAGLHFDEPLLAALKEKGVEMAFVTLHVGAGTFQPVRVESIEDHVMHAEYAEVPQTVVDAVLACKARGNRVIAVGTTSVRSLESAAQASVEAVIAPFFGDTRIFIYPGYHYQVVDALVTNFHLPESTLIMLVSAFAGYRHTMDAYHQAVAEQYRFFSYGDAMFITRNPSAEQEQVG

SEQ ID NO: 66032 - protein, 355 aa, Dickeya sp.
  misc_feature (1)..(355): tr|A0A3N0G4P5|A0A3N0G4P5_9GAMM S-adenosylmethionine:tRN A ribosyltransferase-isomerase OS=Dickeya sp. FVG1-MFV- O17 OX=2487136 GN=queA PE=3 SV=1
MRVADFSFELPESLIARYPQAKRSGCRLLSLDGPTGALAHGVFTDLLDKLQPGDLLVFNNTRVIPARLFGRKASGGKLEVLVERMLDDQRVLAHVRASKAPKPGTELLLGEDESVKATMLERHDALFEIRFDDTRDVLTILNDIGHMPLPPYIDRPDDAADRELYQTVYSQRPGAVAAPTAGLHFDEPLLAALKEKGVEMAFVTLHVGAGTFQPVRVESIEDHIMHAEYAEVPQAVVDAVLACKARGNRVIAVGTTSVRSLESAAQASTGEVIAPFFGDTRIFIYPGYHYRVVDALVTNFHLPESTLIMLVSAFAGYHHTMTAYRQAVAEQYRFFSYGDAMFITRNPSAEQEQVG

SEQ ID NO: 66033 - protein, 355 aa, Dickeya zeae
  misc_feature (1)..(355): tr|A0A2K9QC64|A0A2K9QC64_9GAMM S-adenosylmethionine:tRN A ribosyltransferase-isomerase OS=Dickeya zeae OX=20404 2 GN=queA PE=3 SV=1
MRVADFSFELPESLIARYPQAQRSGCRLLSLDGPTGAVAHGVFTDLLDKLQPGDLLVFNNTRVIPARLFGRKASGGKLEVLVERMLDDKRVLAHVRASKAPKPGTALLLGEDESVKATMLARHDALFEIQFDDTRDVLTILNDIGHMPLPPYIDRPDEAADRELYQTVYSQRPGAVAAPTAGLHFDEPLLAALKEKGVEMAFVTLHVGAGTFQPVRVESIEDHVMHAEYAEVPQTVVDAVLACKARGNRVIAVGTTSVRSLESAAQASAEAVIAPFFGDTRIFIYPGYHYHVVDALVTNFHLPESTLIMLVSAFAGYRHTMDAYHQAVAEQYRFFSYGDAMFITRNPSAEQEQVG

SEQ ID NO: 66034 - protein, 355 aa, Dickeya zeae
  misc_feature (1)..(355): tr|A0A0A8FG29|A0A0A8FG29_9GAMM S-adenosylmethionine:tRN A ribosyltransferase-isomerase OS=Dickeya zeae EC1 OX=1 427366 GN=queA PE=3 SV=1
MRVADFSFELPESLIARYPQAQRSGCRLLSLDGPTGAVAHGVFTDLLDKLQPGDLLVFNNTRVIPARLFGRKASGGKLEVLVERMLDDKRVLAHVRASKAPKPGTALLLGEDESVKATMLARHDALFEIQFDDKRDVLTILNDIGHMPLPPYIDRPDEAADRELYQTVYSQRPGAVAAPTAGLHFDEPLLAALKEKGVEMAFVTLHVGAGTFQPVRVESIEDHVMHAEYAEVPQTVVDAVLACKARGNRVIAVGTTSVRSLESAAQASAKAVIAPFFGDTRIFIYPGYHYQVVDALVTNFHLPESTLIMLVSAFAGYRHTMEAYHQAVAEQYRFFSYGDAMFITRNPSAEQEQVG

SEQ ID NO: 66035 - protein, 374 aa, Dictyobacter alpinus
  misc_feature (1)..(374): tr|A0A402B8R7|A0A402B8R7_9CHLR S-adenosylmethionine:tRN A ribosyltransferase-isomerase OS=Dictyobacter alpinus OX=2014873 GN=KDA_31860 PE=3 SV=1
MMYLNAETFGPDTVDIALTSLLDFTLPAELEASMPPEARGLTRDQVRLLVSYRSNNHIIHTQFQHIEEVLQAGDVLVINTSATMKASLPVTNSQGTQLELHLSTHLPADLWIVEIRQHHHKTTLPFFAIQPGEVFQLPEGGSVTLHTPHHAGYRELDRAALHPRLWIATLNLPAVTTRDEFLTKHGQPIRYSYVKDAWPIEYYQTAYANEIGSAEMPSAGRAFTPTLLTRLIARGVQIVPLLLHTGVASLESHEPPYEEFYRVPATTASLVTTARQEGRRVIAVGTTVVRALETVTTPNGITHPGEGWTRTIVTPERGIHSVNALLTGFHEPQATHLAMLEALATRSHLQLTYQEALQQRYLWHEFGDLHLLLP

SEQ ID NO: 66036 - protein, 366 aa, Dictyobacter alpinus
  misc_feature (1)..(366): tr|A0A402B5H5|A0A402B5H5_9CHLR S-adenosylmethionine:tRN A ribosyltransferase-isomerase OS=Dictyobacter alpinus OX=2014873 GN=queA PE=3 SV=1
MDNTLKISDFDYDLPLELIAQTPIEPRDSSRLLVVQRQTETMEHRHFRDLGDYLKPGDLLIANQSRVIPARLLGYRAETRGAAEVLLLAERSELGPDHWETLVRPGRRLREGARIYFGAPDQEPRLIGEILQRTEAGGRIVHFQVPDQETSNPGDPYNVLTVRQRIDEIGRMPLPPYIHETLEDQERYQTVYARIQGSAAAPTAGLHFTPELLERLRQQGVRTGFVTLHVGLDTFRPVEHENVSEHKMHSEEIELDSATAELINETKKAGGRVVAVGTTSVRVLESVASFYDGKIAAYKGNTNLFITPGTKFQVVDAMITNFHLPRSTLLLLVSAFMGKELMERAYQEAIRERYRFFSFGDAMLLL

SEQ ID NO: 66037 - protein, 365 aa, Dictyobacter aurantiacus
  misc_feature (1)..(365): tr|A0A401ZE18|A0A401ZE18_9CHLR S-adenosylmethionine:tRN A ribosyltransferase-isomerase OS=Dictyobacter aurantia cus OX=1936993 GN=queA PE=3 SV=1
MDNNLKISDFDYDLPIELIAQTPIEPRDASRLLVVRREDKTFTHRHFRDLGEFLRPGDLLIANQSRVIPARLLGYRPQTNGSAEVLLLTERNELGPDHWEALVRPGRRLREGAIIHFGPQDQPPRLIGEIQQRTEAGGRIVHFTVPDQQANSDDPYQLLSVRQRIDEIGRMPLPPYIHETLEDQERYQTVYARIQGSAAAPTAGLHFTPELLDHLRQQGVRTGFVTLHVGLDTFRPVEHENVSEHKMHSEEIELDAETAVLINETRQAGGRVVAVGTTSVRVLESVASIYDGEIAPYKGSTSLFITPGTPFRAVDAMITNFHLPRSTLLLLVSAFMGKELMEQAYQEAIKERYRFFSFGDAMLLL

SEQ ID NO: 66038 - protein, 368 aa, Dictyobacter kobayashii
  misc_feature (1)..(368): tr|A0A402AIF9|A0A402AIF9_9CHLR S-adenosylmethionine:tRN A ribosyltransferase-isomerase OS=Dictyobacter kobayash ii OX=2014872 GN=queA PE=3 SV=1
MDNTLKISDFNYDLPLELIAQTPIEPRDASRLLVVQRATGTFEHRHFRDLGDFLRPGDLLIANQSRVIPARLLGYRAETKGAVEVLLLTERNDLGPDHWETLVRPGRRLREGARIYFGPQDQAPRLIGEIQQRTEAGGRIVHFWTPEQEAGSSGSADPYQVLSVRQRIDEIGRMPLPPYIHETLEDQERYQTVYARIQGSAAAPTAGLHFTPELLERLRQQGVRTGFVTLHVGLDTFRPVEHENVSEHKMHSEEIELDSPTAELINETKKAGGRVIAVGTTSVRVLESVASFHNGEIAPYKGSTRLFITPGTRFQAVDAMITNFHLPRSTLLLLVSAFMGKELMEQAYQEAIKERYRFFSFGDAMLLL

SEQ ID NO: 66039 - protein, 368 aa, Dictyobacter sp.
  misc_feature (1)..(368): tr|A0A5A5T5R0|A0A5A5T5R0_9CHLR S-adenosylmethionine:tRN A ribosyltransferase-isomerase OS=Dictyobacter sp. Uno1 7 OX=2014874 GN=queA PE=3 SV=1
MDNILKISDFDYDLPLELIAQTPIEPRDASRLLVARRADQTLEHRHFRDIGEYLRPGDLLIANQSRVIPARLLGQRAETGGAVEVLLLAERTEKGPDHWETLVRPGRRLREGALIHFGPTGQAPRLMAEIKERTEAGGRIVHFWVPQEPNDASNDPYQILTVRQRIDEIGRMPLPPYIHESLADQERYQTVYARIRGSAAAPTAGLHFTTELLERLRQQGVRTGFVTLHVGLDTFRPVEEENVSEHKMHSEEIELDAPTAELINATRKAGGRIIAVGTTSVRVLESVASLQEGQDETTPFKGSTRLFITPGRKYKLVDAMITNFHLPRSTLLLLVSAFMGKEFMETAYQEAIQERYRFFSFGDAMLLL

SEQ ID NO: 66040 - protein, 120 aa, Dictyobacter sp.
  misc_feature (1)..(120): tr|A0A5A5T9F2|A0A5A5T9F2_9CHLR S-adenosylmethionine:tRN A ribosyltransferase-isomerase OS=Dictyobacter sp. Uno1 7 OX=2014874 GN=KDI_11080 PE=3 SV=1
MTSLESHEPPYEEYYRVSSTSARLITTARADGRRLIAVGTTVVRTLETVMDDQGSTHPGEGWTSIIVSPERGDTRSVHALLTGFHEPQATHLAMLEAFASRHHLKLAYQAALNTGYRWHE

SEQ ID NO: 66041 - protein, 339 aa, Dictyoglomus sp.
  misc_feature (1)..(339): tr|A0A2J6XX03|A0A2J6XX03_9BACT S-adenosylmethionine:tRN A ribosyltransferase-isomerase OS=Dictyoglomus sp. NZ13 -RE01 OX=2010949 GN=queA PE=3 SV=1
MVLKLSDYDYYLPEELIAQEPVEPRDSSKLMVVSRESGEISICIFRDIHRFLRKGDVLVLNDTKVIPARIYGRKETGAKIEVLLLKKIDDLTFSALIKPGRRAKIGSKILFKDDVFCEVLERNEDGIFLLKFSTPNLENILPEIGKIPLPPYIKKPLENPERYQTVYAKKLGSVAAPTAGLHFTPELLENLKNMGIEILYITLHVGLGTFRPVVVDDITKHKIDPEYYEISEEVSYRINKAKEEGRRIIAVGTTVTRTLEGNREGSRVKAGKGLVDLFIYPGFEFKIIDGLITNFHLPKSTLLMLVSAFMGYDLMKKAYAKAIEERFRFYSFGDAMFIY

SEQ ID NO: 66042 - protein, 339 aa, Dictyoglomus thermophilum
  misc_feature (1)..(339): tr|B5YFK6|B5YFK6_DICT6 S-adenosylmethionine:tRNA ribosy ltransferase-isomerase OS=Dictyoglomus thermophilum (st rain ATCC 35947 / DSM 3960 / H-6-12) OX=309799 GN=queA PE=3 SV=1
MVLKLSDYDYYLPEELIAQEPAEPRDTSRLMLVNRKTGEINITIFREIKNYLKAGDVLVLNNTKVIPARLYGKKETGAKIEVLLLKKIGEGKYEALLKPGKRAKIGTKIHFLEDIYAEVVERNEEGIFVLKFSQEDLDKILPEIGNIPLPPYIKKPIDDPNKYQTVYAQKEGAVAAPTAGLHFTEELLKTLGEMGVEILYITLHVGLGTFRPVVVEDITKHKLDPEYFEVSDEVAERINKAKEERRRVIAVGTTVTRVLEAQGRSGKVEPGSGLVDLFIYPGFEFKIIDGLITNFHLPKSTLLMLVAAFMGYDLMKKAYNKAIEERMRFYSFGDAMFIY

SEQ ID NO: 66043 - protein, 339 aa, Dictyoglomus thermophilum
  misc_feature (1)..(339): tr|A0A5D4XKK8|A0A5D4XKK8_DICTH S-adenosylmethionine:tRN A ribosyltransferase-isomerase OS=Dictyoglomus thermoph ilum OX=14 GN=queA PE=3 SV=1
MVLKLSDYDYYLPEELIAQEPAEPRDTSRLMLVNRKTGEINITIFREIKNYLKSGDVLVLNNTKVIPARLYGKKETGAKIEVLLLKKIGEGKYEALLKPGKRAKIGTKIYFFEDIYAEVVNRNEEGIFVLKFSQEDLDKILPEIGNIPLPPYIKKPIDDPDKYQTVYAQKEGAVAAPTAGLHFTEELLKTLGEMGVEILYITLHVGLGTFRPVVVEDITKHKLDPEYFEVSDEVAERINKAKEERRRVIAVGTTVTRVLEAQGRSGKVEPGSGLVDLFIYPGFEFKVIDGLITNFHLPKSTLLMLVAAFMGYDLMKKAYNKAIEERMRFYSFGDAMFIY

SEQ ID NO: 66044 - protein, 339 aa, Dictyoglomus turgidum
  misc_feature (1)..(339): tr|B8E2N6|B8E2N6_DICTD S-adenosylmethionine:tRNA ribosy ltransferase-isomerase OS=Dictyoglomus turgidum (strain Z-1310 / DSM 6724) OX=515635 GN=queA PE=3 SV=1
MVLKLSDYDYYLPEELIAQEPAEPRDSSRLMLVNRRTGEIDITIFREIKNYLKSGDVLVLNNTKVIPARLYGKKDTGAKIEVLLLKKVEEGVYEALVKPGKRAKIGTKIYFSGDIYAEVVERKEEGIFVLRFSQEDLEEILPEIGNIPLPPYIKKPLNDPNKYQTVYAQKEGAVAAPTAGLHFTEELLHTLQKMGIEILYITLHVGLGTFRPVVVEDITKHKLDPEYFEVREDVAERINRAKEEGRRVIAVGTTVTRVLEAQGRSGRVEPGAGLVDLFIYPGFEFKILDGLITNFHLPKSTLLMLVAAFMGYDLMKKAYNRAIEERMRFYSFGDAMFIY

SEQ ID NO: 66045 - protein, 340 aa, Dielma fastidiosa
  misc_feature (1)..(340): tr|A0A318KVQ7|A0A318KVQ7_9FIRM S-adenosylmethionine:tRN A ribosyltransferase-isomerase OS=Dielma fastidiosa OX= 1034346 GN=queA PE=3 SV=1
MKTSEFDFDLPEELIAQTPLKERSESRLLVLHRSTGEIEHRHFYDLCDYLKPGDVLVRNNTRVIPARLFGTKEETNAHVELLLLKQEGDVWECLVGNARVVKMGTVISFGEGELKAECIGIGEKGLRTFKMIYEGIFYEILDHLGNVPLPPYIKEKLEDPERYQTVYAKVKGSAAAPTAGLHFTDALFAKIKAMGVEVEDVTLHVGLGTFRPMDTEDVLEHHMHSEFYMMDADTAQRLNQAKSEGRRIIAIGTTSCRTLEAIMQKYGQFQACAEETDIFIYPGYEFKAIDALITNFHLPKSTLVMLVSALASKELIMKAYQEAIDEKYRFFSFGDSMFIE

SEQ ID NO: 66046 - protein, 440 aa, Dinghuibacter silviterrae
  misc_feature (1)..(440): tr|A0A4V6Q9Z1|A0A4V6Q9Z1_9BACT S-adenosylmethionine:tRN A ribosyltransferase-isomerase OS=Dinghuibacter silvite rrae OX=1539049 GN=queA PE=3 SV=1
MIARQGAVRNLYTGKCVFLIVVQNKGADRCVSPLLFLPYLCSMKQGPRVLNINDYTYNLPEDRIAQYPLAERDASKLLVYKNGGITEAPYRDLPAHIPQDAFMVFNDTKVIEARLLFRKESGGQIEIFCLEALGVEPTTAMMQQGEATWKCLVGGAGKWKTGALIRTWEGVTLTAEKLGQVPDGYQVKFTWTPEELHFAEVLHRAGLVPLPPYLHRSSEALDTERYQTVYARTDGSVAAPTAGLHFTQGLIEALRDKGVDTGFVTLHVGAGTFKPVKADRMEDHVMHAEWIDVTRTFIQTLRDTKGPVIPVGTTALRTLESLYWMGVKAQGGTKNLDLTQWEVYEDLPQEMTTKQALDGLLEWMDGRDRLVAQTQLLIAPGYRPRVARALVTNFHQPGSTLLLLVAALIGVDWKKVYAYALEHDFRFLSYGDGSLLWFKK

SEQ ID NO: 66047 - protein, 349 aa, Dinghuibacter silviterrae
  misc_feature (1)..(349): tr|A0A4R8DEX7|A0A4R8DEX7_9BACT S-adenosylmethionine:tRN A ribosyltransferase-isomerase OS=Dinghuibacter silvite rrae OX=1539049 GN=queA PE=3 SV=1
MKLSQFTFDLPLNLIAQHPSKKRDESRLMVIERKTGNIENRNFKDIMDYFDDKDVFVVNNTKVFPARMYGRKEKTGAKIEVFLLRELNKPNRLWDVIVDPARKIRVGNKLYFGDNDELVAEVIDNTTSRGRTIRFLFEGSDDEFRNILETLGETPLPKYIKRKPDEEDKERYQTVYAKFEGAVAAPTAGLHFSRELIKRLEIKGIRFAEVTLHTGLGTFRPIEVEDLSKHKMDAEYYRIDDFACKIVNKAKEEGHRICSVGTTTMRALESSVTAQKLLKPSEGWTNTFIHPPYDFNIADSLVTNFHLPKTSLLIMVCAFAGYELTMEAYKKAIKDKYRFFSYGDAMVVL

SEQ ID NO: 66048 - protein, 353 aa, Dinoroseobacter shibae
  misc_feature (1)..(353): sp|A8LI68|QUEA_DINSH S-adenosylmethionine:tRNA ribosylt ransferase-isomerase OS=Dinoroseobacter shibae (strain DSM 16493 / NCIMB 14021 / DFL 12) OX=398580 GN=queA PE= 3 SV=1
MHLSDFDFDLPETLIATRPARPRSSARLLVAEARGPFRDRRVTDLVDELQPGDRLVLNNTKVIPARLFGTRHRDSAQGPVSAKVEITLLEPASEGWTALAKPLRKLAEGEEIVFSDALRATVAERGADRVRLVFNCTGDDFDAALAQAGAMPLPPYIAAKRAADAQDRDDYQTVFAARKGAVAAPTASLHFDEALLAALRARGVEFSFVTLHVGAGTFLPVKVDDVTTHKMHSEWGEISDQAAAEILATRADGRRVIPVGTTALRLIETAAAQPGGFGPWEGDTDIFIYPGFEFRITDGLMTNFHLPKSTLMMLVSALMGAERIREIYAHAIAQEYRFFSYGDSSLLLPDRGA

SEQ ID NO: 66049 - protein, 136 aa, Dinoroseobacter sp.
  misc_feature (1)..(136): tr|A0A2D8TLQ1|A0A2D8TLQ1_9RHOB S-adenosylmethionine:tRN A ribosyltransferase-isomerase (Fragment) OS=Dinoroseob acter sp. OX=2003366 GN=CL945_11975 PE=3 SV=1
MNLSDFDFDLPEHLIATRPARPRSSARLLVADGDTTRDLHVRDLPDLLRAGDRLILNDTKVIPARLTGQRWRDSAQGRVAAKIEVTLLEPGPDGTWSALAKPMRKLRPGESVGFPGGLSAEVVALEGGLRLRFNLA

SEQ ID NO: 66050 - protein, 319 aa, Dissulfuribacter thermophilus
  misc_feature (1)..(319): tr|A0A1B9F3U3|A0A1B9F3U3_9DELT S-adenosylmethionine:tRN A ribosyltransferase-isomerase OS=Dissulfuribacter ther mophilus OX=1156395 GN=queA PE=3 SV=1
MVLHRGQGRWEHRRFCDLPDLLSETDVLILNDTKVFPARLFGKKPTGGRVEVVLLNFPRVEEEGRATSEALLRSSKPLRPGQRIIVGTDLEIEIMEGADDWIKKISLMYDGELLKVLETHGHVPLPPYIRRQDEDLDKKRYQTIFARNIGSVAAPTAGLHFSNALLERLKDIGVKIGYITLHVGYGTFAPVRTEDIREHKIHSEWIDVPSSALQLVRSAKANGSRIICVGTTTVRALEYVFKEHEKADSYSGPCDLYIYPGFTFRATDAIITNFHLPKSSLLIMVSAFAGRELILSAYNEAVKAQYRFYSYGDSMLILP

SEQ ID NO: 66051 - protein, 366 aa, Dokdonella fugitiva
  misc_feature (1)..(366): tr|A0A4R2I3R7|A0A4R2I3R7_9GAMM S-adenosylmethionine:tRN A ribosyltransferase-isomerase OS=Dokdonella fugitiva O X=328517 GN=queA PE=3 SV=1
MVHTVAPIASTIPHSLFPIPALKKSDFHFDLPPELIAQAPLPERSASRLLVADARSRSLADRRFTDLVELLQPGDLLVFNDTRVLPARLFGRKPSGGLVEILIERVTGTHEARAQLGVSKKPKAGGRIVLADGSEASVLGRDGEFFLLRFETMEPVEKVLLRLGRMPLPPYIDREAGSADDERYQTVFARHAGAVAAPTAGLHFDAGLLRRLEARGVESGYVTLHVGAGTFQPVRSERLEDHVMHREWLNVGAELVEKIRRTRERGGRVVAVGTTVVRALESSMHDGQVAPFAGETQIFIMPGYRITSIDALVTNFHLPESTLLMLVSAFAGREFMLDAYRHAVAERYRFFSYGDAMLILPPGAPA

SEQ ID NO: 66052 - protein, 368 aa, Dokdonella immobilis
  misc_feature (1)..(368): tr|A0A1I4V7A2|A0A1I4V7A2_9GAMM S-adenosylmethionine:tRN A ribosyltransferase-isomerase OS=Dokdonella immobilis OX=578942 GN=queA PE=3 SV=1
MIVPLKKSDFHFDLPPELIAQAPLAERSSSRLLVLDVDRKSLLDRQFRELPDLLRAGDLLVFNDTRVLPARLFGRKSSGGAVEILIERVTGRHEATAQLGVSKKPKEGSAIELADGSLVRVLGRDGEFFRLRFEAAEPLEKLLLRLGRMPLPPYIDREADAVDGERYQTVFAREPGAVAAPTAGLHFDQSLLATLAERGIESGHVTLHVGAGTFQPMRAERVEDHVMHREWLNVGAELVDRIHRTRARGGRVIAVGTTVVRALESASRNGVLEPFAGETQIFIFPGYRFTSIDGLLTNFHLPESTLLMLVSALAGRELILDAYRHAVEQRYRFFSYGDAMLIWPDCRESGMENGESVKRRPPSASSNS

SEQ ID NO: 66053 - protein, 345 aa, Dokdonella koreensis
  misc_feature (1)..(345): tr|A0A160DXS3|A0A160DXS3_9GAMM S-adenosylmethionine:tRN A ribosyltransferase-isomerase OS=Dokdonella koreensis DS-123 OX=1300342 GN=queA PE=3 SV=1
MKKSDFHFDLPPELIAQVPLAERSASRLLVLDAAARRFEDRALRDLPDLLAPGDLLVFNDTRVVPARLFGRKETGGAAEILIERLTGAHEATAQIGVSKKPREGTAIVLADGTVVRVLGRDGEFFRLRFETTEPLEKLLLRLGRLPLPPYIARDPDAADAERYQTVFAREPGAVAAPTAGLHFDAPLLAALERRGVAVGQVTLHVGAGTFQPMRAERLDQHVMHREWLNVGAGLVEKIRHTRERGGRVVAVGTTVVRALETATRDGVLGPYAGETQIFIFPGYRITSVDALLTNFHLPESTLLMLVSALAGRELILEAYRHAVEQRYRFFSYGDAMLILPDRGQP

SEQ ID NO: 66054 - protein, 349 aa, Dokdonia donghaensis
  misc_feature (1)..(349): tr|A0A0A2GUW7|A0A0A2GUW7_9FLAO S-adenosylmethionine:tRN A ribosyltransferase-isomerase OS=Dokdonia donghaensis DSW-1 OX=1300343 GN=queA PE=3 SV=1
MKLSHFDFNLPAELLAEHPAENRDESRLMVLNRKEQTIEHKMFKDLIDYFEPEDVMVLNNTKVFPARLYGNKEKTGARIEVFLLRELNSETRLWDVLVDPARKIRIGNKLYFGDDESLVAEVIDNTTSRGRTLRFLYDGSYEEFRKKLTSLGETPLPKYINREVEPEDEERYQTIYAKEEGAVAAPTAGLHFSKHLLKRLEIKGIDFAEVTLHVGLGTFSAVEVEDLSKHKMDSEEAYIRKPATEIINKAISEKRRVCAVGTTAMRVMESAVSSSGTLNEFGGWTNKFIFPPYDFSIANCMITNFHTPKSTLLMMVSAFAGHDFMKRAYDEAVKEKYKFYSYGDAMLII

SEQ ID NO: 66055 - protein, 349 aa, Dokdonia pacifica
  misc_feature (1)..(349): tr|A0A239C2K8|A0A239C2K8_9FLAO S-adenosylmethionine:tRN A ribosyltransferase-isomerase OS=Dokdonia pacifica OX= 1627892 GN=queA PE=3 SV=1
MKLSHFNFNLPEELLAERPAENRDESKLMVLNRKDQTIEHKTFKDLIDYFDPEDVMVLNNTKVFPARLYGNKEKTGARIEVFLLRELNSETRLWDVLVDPARKIRIGNKLYFGDDESLVAEVIDNTTSRGRTLRFLYDGSYEEFRRKLTDLGETPLPKYIKREVEPEDQERYQTIYAKEEGAVAAPTAGLHFSRHLLKRLEIKGVNFAEVTLHVGLGTFSPVEVEDLSKHKMDSEEAYIRKPATDTINRAITEKRRICAVGTTVMRALESAVSSANTLNEFEGWTNKFIFPPYDFSIANCMITNFHTPKSTLLMMVSAFAGHDLMKKAYDEAIKEGYQFYSYGDAMLII

SEQ ID NO: 66056 - protein, 349 aa, Dokdonia sp.
  misc_feature (1)..(349): tr|A0A3M0G677|A0A3M0G677_9FLAO S-adenosylmethionine:tRN A ribosyltransferase-isomerase OS=Dokdonia sp. SH27 OX= 2479847 GN=queA PE=3 SV=1
MKLSHFHFDLPEELLAERPAENRDESRLMVLNRKEQTIEHKQFKDLINYFDEKDVMVLNNTKVFPARLYGNKEKTGARIEVFLLRELNPETRLWDVLVDPARKIRIGNKLYFGDDETLVAEVIDNTTSRGRTLRFLYDGSYEEFRQKLTELGETPLPKYIQREVEPEDEERYQTIYATEEGAVAAPTAGLHFSKHLLKRLEIKGVDFAEVTLHVGLGTFSPVEVEDLSKHKMDSEEAYVRADTVATINKALTEKRRICAVGTTVMRALESSVSSSNTLNEFGGWTNKFIFPPYDFSIANCMVTNFHTPKSTLLMMVSAFAGHDFMKRAYDEAIKEKYKFYSYGDAMLII

SEQ ID NO: 66057 - protein, 349 aa, Dokdonia sp.
  misc_feature (1)..(349): tr|A0A2S1QCY3|A0A2S1QCY3_9FLAO S-adenosylmethionine:tRN A ribosyltransferase-isomerase OS=Dokdonia sp. Dokd-P16 OX=2173169 GN=queA PE=3 SV=1
MKLSHFNFDLPDELLADRPAENRDESRLMVLNRKEQTIEHKMFKDIIDYFEPEDVMVLNNTKVFPARLYGNKEKTGARIEVFLLRELNSETRLWDVLVDPARKIRIGNKLYFGDDESLVAEVIDNTTSRGRTLRFLYDGSYEEFRKKLTSLGETPLPKYINREVEPEDEDRYQTIYATEEGAVAAPTAGLHFSKHLLKRLEIKGVDFAEVTLHVGLGTFSAVEVEDLSKHKMDSEEAYIHKPATEIINKALKEKRRICAVGTTSMRVMESAVSSNHTLNEFGGWTNKFIFPPYDFSIANCMITNFHTPKSTLLMMVSAFAGHDFMKKAYEEAVKEKYKFYSYGDAMLII

SEQ ID NO: 66058 - protein, 378 aa, Dolichospermum compactum
  misc_feature (1)..(378): tr|A0A1Z4V794|A0A1Z4V794_9CYAN S-adenosylmethionine:tRN A ribosyltransferase-isomerase OS=Dolichospermum compac tum NIES-806 OX=1973481 GN=queA PE=3 SV=1
MKQQIIQDNVETQNVNLDCSLSGYDYELPPGLIAQNPAVPRDSSKLLVVNSPETAKSIPPLHHIFRDLSELLKAGDLLVMNNTKVIPARLYGCKDTGAGVEVLLLEERGHNCWLALVKPGKRFKVGSEIIFTAGGDGNKQELRATVVESDPETGGRLLQFDLPPAVPLVQVLGKFGQIPLPPYITASTAADEQYQTVYAAEQGAIAAPTAGLHFTPELLEKLRNNGINQAFITLHVGVGTFRPVEVEDVTTHAMHEEWIEVTADTVEQIRATQAAGGRIIAVGTTVVRALEGAAQSGDLQPFVGKTNLFIYPGYKWQVVQGLITNFHLPRSSLLMLVSALIGRERLLDLYRQAISFEYRFYSFGDAMLILPEGKSIQL

SEQ ID NO: 66059 - protein, 381 aa, Dolichospermum planctonicum
  misc_feature (1)..(381): tr|A0A480AAI9|A0A480AAI9_9CYAN S-adenosylmethionine:tRN A ribosyltransferase-isomerase OS=Dolichospermum planct onicum OX=136072 GN=queA PE=3 SV=1
MSSLEVQDVNLDCSLSSYDYELPPGLIAQNPAVPRDSSRLLVVNSLKNPHTIPVSHHIFRDLPELLQPGDLLVMNNTKVIPARLYGCKSTGAEVEVLLLEERQHNCWLALVKPGKRFKIGNEIIFTAGGEENQQTLRATVVESDPQTGGRLLQFDLPPAVPLVQVLGKFGEIPLPPYITASTAANEQYQTVYAQEAGAIAAPTAGLHFTPELLERLRVCGINQAFITLHVGVGTFRPVEVEDVTTHAMHEEWIEVSADTVEQIRATQAAGGRIIAVGTTVVRALEGAAQLGDLQPFMGKTNLFIYPGYKWQVVEGLITNFHLPRSSLLMLVSALIGRERLLDIYQEAIASEYRFYSFGDAMVILPADKKKSIKLHETSGEN

SEQ ID NO: 66060 - protein, 376 aa, Dolichospermum sp.
  misc_feature (1)..(376): tr|A0A5C0DQI4|A0A5C0DQI4_9CYAN S-adenosylmethionine:tRN A ribosyltransferase-isomerase OS=Dolichospermum sp. UH CC 0315A OX=1914871 GN=queA PE=3 SV=1
MKQKILQAESQDINLDCSLSGYEYELPPGRIAQNPAVPRDSSKLLVVNSPETAKTIPPLHHIFRNLPELLKPGDLLVMNNTKVIPARLYGYTSTSGSVEVLLVEERRHNCWLALVKPGKRFKIGNEIIFTSGEQGNKQTLKATVVESDSETGGRLLQFELPEQVPLLQVLGTFGQIPLPPYITASTAADEQYQTVYAAEEGAIAAPTAGLHFTPELLEKLRSCGINQAFITLHVGIGTFRPVEVKDVTTHAMHEEWIEVPADTVEQIRATQAAGGRIIAVGTTAVRALEGAAQLGDLQPFVGKTNLFIYPGYKWQVVEGLITNFHLPRSSLLMLVSALIGRERLLDLYQEAITSEYRFYSFGDAMLILPEGKSIKL

SEQ ID NO: 66061 - protein, 345 aa, Dolosicoccus paucivorans
  misc_feature (1)..(345): tr|A0A1G8M5L4|A0A1G8M5L4_9LACT S-adenosylmethionine:tRN A ribosyltransferase-isomerase OS=Dolosicoccus paucivor ans OX=84521 GN=queA PE=3 SV=1
MTFTKKDFEFNLPEELIAQTPLKDRSSSKLLVVDRATDQITDTNFTHILDYLSKGDALVVNETRVIPARLFGIKPDTNGHLEVLLLTNTQGDRWECLIKPARRAKKGTKIQFGEQGQLKATVVEELDHGGRIIEMEYEGVFLEVLETLGEMPLPPYIKERLNDPNRYQTVYAKHNGSAAAPTAGLHFTPQLLKQAKDKGIQVIPVTLHVGLGTFRPMSAERIEDHQMHAEFYTVSSTSAQAIEEVRKNGGKIIAVGTTTVRTLETVANENDGKIVASSGWTSIFITPGYQFKAVDHLITNFHLPASTLVMLVSAFYTRQGILNAYEHAIKEKYRFFSFGDAMLLL

SEQ ID NO: 66062 - protein, 352 aa, Domibacillus aminovorans
  misc_feature (1)..(352): tr|A0A177KSJ0|A0A177KSJ0_9BACI S-adenosylmethionine:tRN A ribosyltransferase-isomerase OS=Domibacillus aminovor ans OX=29332 GN=queA PE=3 SV=1
MKVEDFDFDLPEELIAQIPLLERAESRMMVLDKQTGNIQHDVFKHIVEYIQPGDLLVLNDTKVLPARLHGVKEETGANIEVLLLKQDEKDVWETLVKPAKRIKEGSIISFGDGKLRAVCTAEKEHGGRMLRFEYEGIFYEVLDELGEMPLPPYIKEQLEEKDRYQTVYAKERGSAAAPTAGLHFTEQLLNEIKMRGVRVEFITLHVGLGTFRPVSVDMIEEHDMHAEYYTISKQTEDAIRETKENGGRVIAVGTTSVRTLETAALDHGTVKESNGWTDIFIYPGFEFRAIDGMITNFHLPKSTLIMLISALAGQKEVLKAYAEAVKEQYRFFSFGDAMLIIDSKGGTEYDSH

SEQ ID NO: 66063 - protein, 352 aa, Domibacillus aminovorans
  misc_feature (1)..(352): tr|A0A177LAK1|A0A177LAK1_9BACI S-adenosylmethionine:tRN A ribosyltransferase-isomerase OS=Domibacillus aminovor ans OX=29332 GN=queA PE=3 SV=1
MKVEDFDFDLPEELIAQIPLLERAESRMMVLDKQTGNIQHDVFKHIVEYIQPGDLLVLNDTKVLPARLHGVKEETGANIEVLLLKQDEKDVWETLVKPAKRIKEGSIISFGDGKLRAVCTAEKEHGGRMLRFEYEGIFYEVLDELGEMPLPPYIKEQLEEKDRYQTVYAKERGSAAAPTAGLHFTEQLLNEIKMRGVRVEFITLHVGLGTFRPVSVDTIEEHDMHAEYYTISKQTEDAIRETKENGGRVIAVGTTSVRTLETAALDHGTVKESNGWTDIFIYPGFEFRAIDGMITNFHLPKSTLIMLISALAGQKEVLKAYAEAVKEQYRFFSFGDAMLIIDSKGGTDNDSH

SEQ ID NO: 66064 - protein, 352 aa, Domibacillus antri
  misc_feature (1)..(352): tr|A0A1Q8Q852|A0A1Q8Q852_9BACI S-adenosylmethionine:tRN A ribosyltransferase-isomerase OS=Domibacillus antri OX =1714264 GN=queA PE=3 SV=1
MKVEDFDFNLPEELIAQTPLKERAESRMMVLDKKTGAVRHEVFKHIVDYLQPGDLLVLNDTKVLPARLHGVKEDTGANIEVLLLKQNEQDVWETLVKPAKRMKKGSVISFGDGKLRAVCTAEEEHGGRMLRFEYEGIFYEVLDELGEMPLPPYIKEQLEEKDRYQTVYAKERGSAAAPTAGLHFTEQLLSELKERGVGVEFITLHVGLGTFRPVSVDSIEDHDMHAEYYTISERTAEAIQKTKAEGGRVIAVGTTSVRTLETAARDHGVVEASSGWTDIFIYPGFQFGAIDGMITNFHLPKSTLIMLISALAGKENVLSAYAEAVKEKYRFFSFGDAMLIIDLEGGLDNVSH

SEQ ID NO: 66065 - protein, 347 aa, Domibacillus enclensis
  misc_feature (1)..(347): tr|A0A1N6PX54|A0A1N6PX54_9BACI S-adenosylmethionine:tRN A ribosyltransferase-isomerase OS=Domibacillus enclensi s OX=1017273 GN=queA PE=3 SV=1
MKVEDFNFNLPEELIAQAPLKERAESRLMVLDKKDGAITHASFKDITRYLKPGDLLVLNDTKVLPARLHGVKEETGANIEVLLLKQEETDVWETLVKPAKRIKEGSIISFGDGKLKAVCTGEKEQGGRMLRFQYEGIFYEVLEELGEMPLPPYIKEQLEEKERYQTVYAKERGSAAAPTAGLHFTDALLSELKERGIRIEFITLHVGLGTFRPVSVDSIEDHDMHAEFYTISKQTEEAIQETKQQGGRVIAVGTTSVRTLETAARDHGTVKESSGWTDIFIYPGFQFGAIDGMITNFHLPKSTLIMLISALAGQKQVLAAYEEAVKEQYRFFSFGDAMLIMDTKGGK

SEQ ID NO: 66066 - protein, 352 aa, Domibacillus epiphyticus
  misc_feature (1)..(352): tr|A0A1V2A9B7|A0A1V2A9B7_9BACI S-adenosylmethionine:tRN A ribosyltransferase-isomerase OS=Domibacillus epiphyti cus OX=1714355 GN=queA PE=3 SV=1
MKVEDFDFDLPEELIAQTPLKERAESRMMILDKETGDIRHEVFKHIVNYLQQGDLLVLNNTKVLPARLYGVKEDTGANIEVLLLKQGKEDEWETLVKPAKRIKEGSIISFGDGKLRAVCTAEKEHGGRMLRFEYEGIFYEVLDELGEMPLPPYIKEQLEEKDRYQTVYAKERGSAAAPTAGLHFTEQLLMELKERGVRVEFITLHVGLGTFRPVSVDSVEDHDMHAEYYTISERTAEAIRETKDNGGRVIAVGTTSVRTLETAARDHGAVKASSGWTDIFIYPGFKFGAIDGMITNFHLPKSTLIMLISALAGQKEVLEAYSEAVKEKYRFFSFGDAMLIIDLKGGLDNVSH

SEQ ID NO: 66067 - protein, 352 aa, Domibacillus iocasae
  misc_feature (1)..(352): tr|A0A1E7DMG4|A0A1E7DMG4_9BACI S-adenosylmethionine:tRN A ribosyltransferase-isomerase OS=Domibacillus iocasae OX=1714016 GN=queA PE=3 SV=1
MKVEDFDFNLPEELIAQTPLKERAESRMMVLDKQTGTLTHETFKNVVNYLKPGDLLILNDTKVLPARLHGVKEETGANIEVLLLKQDEKDVWETLVKPAKRIKEGSVISFGNGRLKAVCTGEKEQGGRMLRFEYDGIFYEVLDELGEMPLPPYIKEQLDEKDRYQTVYAKERGSAAAPTAGLHFTEPLLAQLKEHGVRIEFITLHVGLGTFRPVSVDSIEDHDMHAEYYTISKQTEEAIRETKKQGGRVIAVGTTSVRTLETAARDHGIVRESSGWTDIFIYPGFEFKAIDGMITNFHLPKSTLIMLISALAGQSHVMTAYAEAVKERYRFFSFGDAMLIIDMKGGNTIDSH

SEQ ID NO: 66068 - protein, 352 aa, Domibacillus mangrovi
  misc_feature (1)..(352): tr|A0A1Q5P7I9|A0A1Q5P7I9_9BACI S-adenosylmethionine:tRN A ribosyltransferase-isomerase OS=Domibacillus mangrovi OX=1714354 GN=queA PE=3 SV=1
MKVEDFDFDLPEELIAQTPLLQRAESRMMVLDKQTGDIQHDVFKHIADYVQPGDLLVLNNTKVLPARLHGVKEGTGANIEVLLLKQDEKDVWETLVKPAKRIKEGSIISFGDGKLRAVCTAEKEHGGRMLHFEYEGIFYEVLDELGEMPLPPYIKEQLEEKDRYQTVYAKERGSAAAPTAGLHFTEQLLNELKVRGVRVEFITLHVGLGTFRPVSVDTIEEHDMHAEYYTISKQTEDAIRETKENGGRVIAVGTTSVRTLETAARDDGAVKESNGWTNIFIYPGFEFRAIDGMITNFHLPKSTLIMLISALAGQKEVLKAYAEAVKEQYRFFSFGDAMLIIDTKGETDDDSH

SEQ ID NO: 66069 - protein, 349 aa, Donghicola sp.
  misc_feature (1)..(349): tr|A0A1M4N3H4|A0A1M4N3H4_9RHOB S-adenosylmethionine:tRN A ribosyltransferase-isomerase OS=Donghicola sp. KarMa OX=1779855 GN=queA PE=3 SV=1
MKLSDFDFHLPESLIATRPAKPRSASRLLVSRPDGLSDLHVYDLPDLLQAGDRLVLNDTRVIPARLFGQRWRDSAQGRVSAKIEVTLLEPRPNGQWAALVKPLRKLGEGEWVEFSADLKAQLVGREEGQAVLEFNLTGDDFDAALAEAGAMPLPPYIAAKRAADSQDKEDYQTVWARNTGAVAAPTASLHFDQPLLDKLAGMGVGFSYVTLHVGAGTFLPVKVDDVTTHKMHSEWGEVSQAAASEIAETKARGGRVIPVGTTALRLIETAARDTGAIRPWSGDTDIFIYPGFEFRVADALMTNFHLPKSTLMMLVSALVGRDRIMAAYDHAISQKYRFFSYGDASLLIP

SEQ ID NO: 66070 - protein, 350 aa, Donghicola sp.
  misc_feature (1)..(350): tr|A0A1B7Z4V5|A0A1B7Z4V5_9RHOB S-adenosylmethionine:tRN A ribosyltransferase-isomerase OS=Donghicola sp. JL3646 OX=1836468 GN=queA PE=3 SV=1
MKLSDFDFDLPESLIATRPAKPRSSARLLLAKGREISDLRVTDLVDVLLAGDRLVLNDTRVIPARLSGLRHRDSAQGHVSAQIEVTLLEPKADGTWGALIKPLKKVKDGEDIVFSDRLTATVVDRMDGHARVRFNLTGDDFDDALANAGAMPLPPYIAALRAPDEQDKEDYQTVWARNTGAVAAPTASLHFDDELLERLKAKGVEFTYVTLHVGAGTFLPVKVDDIRDHKMHAERGIVTAKAAEEINATKAAGGRVIPVGTTALRLIESAATDDGIAAWDGATDIFITPGFKFRIADALMTNFHLPKSTLMMLVSALIGVDEIRTIYDHAIANGYRFFSYGDASLLIPDA

SEQ ID NO: 66071 - protein, 349 aa, Donghicola tyrosinivorans
  misc_feature (1)..(349): tr|A0A2T0X5A3|A0A2T0X5A3_9RHOB S-adenosylmethionine:tRN A ribosyltransferase-isomerase OS=Donghicola tyrosinivo rans OX=1652492 GN=queA PE=3 SV=1
MKLSDFDFHLPETLIATRPAKPRSSARLLVSRPSGISDLRVTDLVDQLQAGDRLVLNDTKVIPARLFGLRWRDSAQGRVSAKIEVTLLEPRPNGQWAALIKPLRKVNEGEWIVFSDALSAQLVAREEGQAVLEFNLSGDDFDAALAEAGAMPLPPYIAAKRQADAQDKEDYQTVWARNSGAVAAPTASLHFDDALLSALRAKGVQFTHVTLHVGAGTFLPVKVEDVTTHKMHAEWGHVSEEAAAEIAATKAAGGRVIPVGTTALRLIETAARDTGAIAPWQGETDIFIYPGFEFKVADALMTNFHLPKSTLMMLVAALVGHDRILDVYEHAISQEYRFFSYGDASLLFP

SEQ ID NO: 66072 - protein, 376 aa, Dongia mobilis
  misc_feature (1)..(376): tr|A0A4R6WN81|A0A4R6WN81_9PROT S-adenosylmethionine:tRN A ribosyltransferase-isomerase OS=Dongia mobilis OX=578 943 GN=queA PE=3 SV=1
MTSGQEKAKTPAMTGPRTPLTLSDFDFALPPERVALYPANPRDSARLLYVPAVPSGVGDGFGDFRVRDLPGLLQAGDLLISNDTRVIPAQLAGKRGTAGIEVTLIEDARVRDARAADAVRWWAFAKPGKKLKPGDTVTFGENFAATVVEKKPEGEILFDFGSDPVAFQANLARFGAMPLPPYIRKSRAVGSADASDYQTIFAARDGAVAAPTAGLHFTPELLAALERRGVEQHRVTLHVGAGTFLPVKVENIAEHRMHAEYGEVSAATADAVNRARAEGRRIVAIGTTSLRILESAAKDGRLLPFAGATDIFITPGYRFQIVDLLMTNFHLPKSTLFMLVAAFAGLERMRAAYAHAIAGSYRFFSYGDASLLECRR

SEQ ID NO: 66073 - protein, 341 aa, Dorea formicigenerans
  misc_feature (1)..(341): tr|A0A3E4FAP2|A0A3E4FAP2_9FIRM S-adenosylmethionine:tRN A ribosyltransferase-isomerase OS=Dorea formicigenerans OX=39486 GN=queA PE=3 SV=1
MKRQDFYYDLPEELIAQDPLEDRSSSRLLVLDKETGATSHHIFKEITGYLKEGDCLVINDTKVIPARLIGAKEGTGAKIEILLLKRKENNIWETLVKPGKKAKVGTRIVFGEGILVGEVVGIVEEGNRLVKFEYEGIFEEILDQLGQMPLPPYITHQLEDKNRYQTVYAKHTGSAAAPTAGLHFTPELLKEIEEKGIDIARVTLHVGLGTFRPVKVDEITDHHMHSEFYQVDEEAAEKINRAKDSGHRVICVGTTSCRTIESAADETGHLKPTSGWTEIFIYPGYKFKILDGLITNFHLPESTLIMLVSALAGREHVLAAYEEAVQERYRFFSFGDAMLII

SEQ ID NO: 66074 - protein, 341 aa, Dorea formicigenerans
  misc_feature (1)..(341): tr|A0A3E5GUB0|A0A3E5GUB0_9FIRM S-adenosylmethionine:tRN A ribosyltransferase-isomerase OS=Dorea formicigenerans OX=39486 GN=queA PE=3 SV=1
MKRQDFYYDLPEELIAQDPLEDRSSSRLLVLDKETGATSHHIFKEITGYLKEGDCLVINDTKVIPARLIGAKEGTGAKIEILLLKRKENNIWETLVKPGKKAKVGTRIVFGEGLLVGEVVGIVEEGNRLVKFEYEGIFEEILDQLGQMPLPPYITHQLEDKNRYQTVYAKHTGSAAAPTAGLHFTPELLKEIEEKGIDIARVTLHVGLGTFRPVKVDEITDHHMHSEFYQVDEEAAEKINRAKDSGHRVICVGTTSCRTIESAADETGHLKPTSGWTEIFIYPGYKFKILDGLITNFHLPESTLIMLVSALAGREHVLAAYEEAVQERYRFFSFGDAMLII

SEQ ID NO: 66075 - protein, 194 aa, Dorea longicatena
  misc_feature (1)..(194): tr|A6BFJ7|A6BFJ7_9FIRM S-adenosylmethionine:tRNA ribosy ltransferase-isomerase OS=Dorea longicatena DSM 13814 O X=411462 GN=DORLON_01069 PE=3 SV=1
MPLPPYITHQLEDKNRYQTVYATHTGSAAAPTAGLHFTPELLEEIKEKGVDIARVTLHVGLGTFRPVKVDEITEHHMHSEFFMIDEEAAEKINRAKETGHRVICVGTTSCRTVESAADENGHLEAKSGWTQIFIYPGYKFKVLDCLITNFHLPESTLIMLVSALAGREHVLAAYEEAVKERYRFFSFGDAMFIQ

SEQ ID NO: 66076 - protein, 341 aa, Dorea longicatena
  misc_feature (1)..(341): tr|A0A174D4L2|A0A174D4L2_9FIRM S-adenosylmethionine:tRN A ribosyltransferase-isomerase OS=Dorea longicatena OX= 88431 GN=queA PE=3 SV=1
MKRQDFYYELPEELIAQDPLEDRSSSRLLVLDKETGAFSHHVFKEITEYLHEGDCLVINDTKVIPARLIGSKVETNAKIEVLLLKRKENNVWETLVKPGKKAKVGAKISFGDGLLMGEVIDVVEEGNRLIKFDFDGIFEEILDQLGQMPLPPYITHQLEDKNRYQTVYATHTGSAAAPTAGLHFTPELLEEIKAKGVDIARVTLHVGLGTFRPVKVDEITEHHMHSEFFMIDEEAAEKINRAKETGHRVICVGTTSCRTVESAADENGHLEAKSGWTQIFIYPGYKFKVLDCLITNFHLPESTLIMLVSALAGREHVLAAYEEAVKERYRFFSFGDAMFIQ

SEQ ID NO: 66077 - protein, 341 aa, Dorea sp.
  misc_feature (1)..(341): tr|A0A396L075|A0A396L075_9FIRM S-adenosylmethionine:tRN A ribosyltransferase-isomerase OS=Dorea sp. AF36-15AT O X=2292041 GN=queA PE=3 SV=1
MKRQDFYFDLPEELIAQDPLEDRSSSRLLVLDKETGETSHHIFKEIVDYLNPGDCLVINDTKVIPARLIGAREGTGAKIEVLLLKRKENNVWETLVKPGKKARPGTRIVFGEGLLVGEVIDVVEEGNRLIKFEYEGIFEEILDQLGQMPLPPYITHQLEDKNRYQTVYAKHTGSAAAPTAGLHFTPELLKQIEEKGIDIARVTLHVGLGTFRPVKVDDILEHHMHSEFYHIDAEAAEKINRAKDNGGRVICVGTTSCRTVESAADENGRLRECSGWTEIFIYPGYKFKILDALITNFHLPESTLIMLVSALAGREHVLNAYQEAIEQKYRFFSFGDAMFIK

SEQ ID NO: 66078 - protein, 341 aa, Dorea sp.
  misc_feature (1)..(341): tr|R6WFX3|R6WFX3_9FIRM S-adenosylmethionine:tRNA ribosy ltransferase-isomerase OS=Dorea sp. CAG:317 OX=1262873 GN=queA PE=3 SV=1
MKRQDFYYELPEELIAQDPLEDRSSSRLLVLDKESGAVSHHVFKDVIDYLNEGDCLVINDTKVLPARLIGAKVGTDAKIEVLLLKRKENNIWETLVKPGKKAKIGTKISFGDGLLMGEVVDIVEEGNRLIQFTYEGIFEEILDRLGQMPLPPYITHHLEDKNRYQTVYAEHTGSAAAPTAGLHFTPELLEKIEKKGVDIARVTLHVGLGTFRPVKVDEITDHHMHSEFFQIEEEAATKINRAKDAGKKVICVGTTSCRTVESAADETGHLKACSGWTEIFIYPGYQFKVLDSLITNFHLPESTLVMLVSALAGREHVLAAYEEAVKERYRFFSFGDAMLIQ

SEQ ID NO: 66079 - protein, 349 aa, Draconibacterium orientale
  misc_feature (1)..(349): tr|X5DDU1|X5DDU1_9BACT S-adenosylmethionine:tRNA ribosy ltransferase-isomerase OS=Draconibacterium orientale OX =1168034 GN=queA PE=3 SV=1
MKLSKFKYNLEQEKIALHPADNRDESKLMVLNRATRTIEHKLFKDLLDYFDDKDVMVFNDTKVFPARLYGNKEKTGAEIEVFLLRELNREQRLWDVLVDPARKIRIGNKLYFGDDDLLVAEVIDNTTSRGRTLRFLFDGPYDEFKQTLYSLGETPLPKFINRPVQPEDKDRFQTIFAKHEGAVAAPTAGLHFSRELLKRLEIKGVDFSYVTLHVGLGNFRSVDVEDLTKHKMDSEQIWIKNEACEMVNKAKQEKRNVCAVGTTVMRTLESSVSTQGFLKPFEGWTNKFIFPPYEFSVANSMITNFHLPYSTLLMMVAAFGGYDFVMEAYDIATKNDYRFGTYGDAMLII

SEQ ID NO: 66080 - protein, 403 aa, Draconibacterium orientale
  misc_feature (1)..(403): tr|X5DUL7|X5DUL7_9BACT S-adenosylmethionine:tRNA ribosy ltransferase-isomerase OS=Draconibacterium orientale OX =1168034 GN=FH5T_02690 PE=3 SV=1
MNRYKDIKISDYTYNLPDERIAKYPLNERDKSKLLIRQNGTIQQDIFENCANYLPEDAQLVFNNTRVIHARLFFHKETGAKIEIFCLEPVEPADYQVAFQETEEVTWKCMVGNSKKWKEGFLTQTFEIDGKTIELTAAKIGQEGNSFHIRFVWNGGVHFSEIIEHIGQLPIPPYLNRDTEESDEETYQTVYAKIDGSVAAPTAGLHFTDPVIAQLAEKNITTNEITLHVGAGTFQPVKSETIEGHTMHHEQVIIPIEILRSFLENPKNIIAVGTTSVRSLESLYWIGLQLEEKRFDPFHPEVKQWEPYTNEATISLEKALQNIIYFLAENDEKAIRFSTQIIILPGYDFKLISGMFTNFHQPQSTLLLLISAFLGNDWKKIYDYALANDFRFLSYGDSNLYLK

SEQ ID NO: 66081 - protein, 349 aa, Draconibacterium sediminis
  misc_feature (1)..(349): tr|A0A0D8J9H5|A0A0D8J9H5_9BACT S-adenosylmethionine:tRN A ribosyltransferase-isomerase OS=Draconibacterium sedi minis OX=1544798 GN=queA PE=3 SV=1
MKLSKFKYNLEQEKIALHPADNRDESKLMVLNRATRTIEHRLFKDLLDYFDDKDVMVFNDTKVFPARLYGNKEKTGAEIEVFLLRELNREQRLWDVLVDPARKIRIGNKLYFGDDDLLVAEVIDNTTSRGRTLRFLFDGPYDEFKQTLYSLGETPLPKFINRPVQPEDKDRYQTIFAKHEGAVAAPTAGLHFSRELLKRLEIRGVDFSYVTLHVGLGNFRSVDVEDLTKHKMDSEQIWIKNEACEMVNNAKQEKRNVCAVGTTVMRTLESSVSTQGFLKPFEGWTNKFIFPPYEFSVANSMITNFHLPYSTLLMMVAAFGGYDFVMEAYDVATKNDYRFGTYGDAMLII

SEQ ID NO: 66082 - protein, 405 aa, Draconibacterium sediminis
  misc_feature (1)..(405): tr|A0A0D8JDS8|A0A0D8JDS8_9BACT S-adenosylmethionine:tRN A ribosyltransferase-isomerase OS=Draconibacterium sedi minis OX=1544798 GN=LH29_06660 PE=3 SV=1
MVLNRYKDIKISDYTYNLPDERIAKYPLTERDKSKLLVRQNGTITQDIFENCANYLPEETQLVFNNTRVIHARLFFYKETGAKIEIFCLEPVEPADYQVAFQETEEVTWKCMVGNSKKWKEGFLSQTFKIDGQVIELTAAKIGQEGNSFHIRFVWNGGVHFSEIIEHIGQLPIPPYLNRDTEESDEESYQTVYAKIDGSVAAPTAGLHFTDPVIAQLADKNITTNEITLHVGAGTFQPVKSETIEGHTMHHEQVIIPIDILRSFVENPKNIIAVGTTSVRSLESLYWIGLQLEEQRFNPFHPEVKQWEPYENDAKISIEKALQNIIYFLVENNEKAIRFSTQIIILPGYDFKLISGMFTNFHQPQSTLLLLISAFLGNKWKEVYDYALANDFRFLSYGDSNLYLK

SEQ ID NO: 66083 - protein, 349 aa, Draconibacterium sp.
  misc_feature (1)..(349): tr|A0A2G6R9L9|A0A2G6R9L9_9BACT S-adenosylmethionine:tRN A ribosyltransferase-isomerase OS=Draconibacterium sp. OX=1965318 GN=queA PE=3 SV=1
MKLSKFKFELDPKKIAMYPVHNRDESRLMVLNRGTRTIEHRQFKDIIDYFDDKDVMVFNNTKVFPARLHGNKEKTGADIEVFLLRELNREQRLWDVLVDPARKIRIGNKLYFGEDELLVAEVIDNTTSRGRTLRFLFDGPYDEFKKTLYALGETPLPKFISRPVEADDKERYQTIYAKHEGAVAAPTAGLHFSRELMKRLEIKGVDFSYVTLHVGLGNFRSVDVEDLTKHKMDSEQIWIKKDACEMVNEAKANKRNVCAVGTTVMRTIESSVSTQGFLKPYEGWTNKFIFPPYEFSVPNSMISNFHLPYSTLLMMVAAFGGYDFVMEAYQTALKEDYRFGAYGDAMLLI

SEQ ID NO: 66084 - protein, 404 aa, Draconibacterium sp.
  misc_feature (1)..(404): tr|A0A2G6RBN4|A0A2G6RBN4_9BACT S-adenosylmethionine:tRN A ribosyltransferase-isomerase OS=Draconibacterium sp. OX=1965318 GN=CSA36_01635 PE=3 SV=1
MKEKYTNINISDYSYDLPASHIAKYPLQNRDASKLLLWEKGKISEKTFKNAVDTIPENALLVFNNTRVIHARIFFQKETGAKIEIFCLEPVHPADYQLCFQQTKRTSWKCILGNAKKWKNNKLKKNFELNGKKVEITAEKKKQEGNIFEIEFVWTGNFAFAEIIECAGTIPIPPYLNRKTEQSDKKTYQTVYAKIDGSVAAPTAGLHFTKNVLSQLSEKNIATAEVTLHVGAGTFQPVKSELVQHHTMHHEKVIVSKAVIELLLKNNRKVIAVGTTSVRSLESLYWLGVQLKDNTFHAESPEILQWEPYEKKASISNSQALQNIVDYLENSNLNTIQFSTQIIILPGYDFKIVNGMFTNFHQPQSTLLLLISAFLGDDWKKVYDYALKNDFRFLSYGDSNLYLK

SEQ ID NO: 66085 - protein, 341 aa, Drancourtella sp.
  misc_feature (1)..(341): tr|A0A1Y4H5J3|A0A1Y4H5J3_9FIRM S-adenosylmethionine:tRN A ribosyltransferase-isomerase OS=Drancourtella sp. An2 10 OX=1965589 GN=queA PE=3 SV=1
MKKEDFYFDLPEELIAQDPLEDRSGSRLLVLNKETGEIAHHVFRDVIDYLNPGDCLVINDTKVIPARLIGSKVGTDAKIEILLLKRRENDVWETLVKPGKKAKPGTKIQFGEGLLTGEVIDVVEEGNRLIQFTYDGIFEEILDQLGQMPLPPYITHQLKDKNRYQTVYAKHSGSAAAPTAGLHFTPELLEEIQKKGVQIAHVTLHVGLGTFRPVKVENIMEHHMHSEFYQIEASEAEKINRAKEEGHRVICVGTTSCRTVESAAGDDGKLRECSGWTDIFIYPGYKFKILDCLITNFHLPESTLIMLVSALAGREHVLGAYEEAVKEKYRFFSFGDAMLIQ

SEQ ID NO: 66086 - protein, 341 aa, Drancourtella sp.
  misc_feature (1)..(341): tr|A0A1Y3W3E3|A0A1Y3W3E3_9FIRM S-adenosylmethionine:tRN A ribosyltransferase-isomerase OS=Drancourtella sp. An5 7 OX=1965647 GN=queA PE=3 SV=1
MKKEDFYFELPQELIAQDPLEDRSGSRLLVLDKESGEIEHRTFRDIKEYLEPGDCLVINDTKVIPARLIGSKVGTNAKIEILLLKRKENDIWETLVKPGKKAKPGTKISFGEGLLIGEVLDVVDEGNRLIQFSYEGIFEEILDQLGQMPLPPYITHQLEDKNRYQTVYAKHSGSAAAPTAGLHFTPELLEEIKESGVEIAHVTLHVGLGTFRPVKVENIQEHHMHSEFYRIEASEAEKINRAKREGHRVICVGTTSCRTVESAAKPDGTLSECSGWTEIFIYPGYRFKVLDCLLTNFHLPESTLIMLVSALAGREHVLHAYEEAVKERYRFFSFGDAMLIR

SEQ ID NO: 66087 - protein, 341 aa, Duganella phyllosphaerae
  misc_feature (1)..(341): tr|A0A1E7X6J2|A0A1E7X6J2_9BURK S-adenosylmethionine:tRN A ribosyltransferase-isomerase OS=Duganella phyllosphae rae OX=762836 GN=queA PE=3 SV=1
MYSLSDFDFNLPQERIAQFPLPDRSASRLLHLDGAQIVDRQFADIVGLLQAGDLLVMNDTRVLKARFFGTKESGGKVEALVERVLDNRTVLAQVRASRSPLAGTKMRLADAFDVTVGERAGEFFTLHFDADVFDLIEAHGRLPLPPYIEHDADSFDETRYQTVFNKVPGAVAAPTAGLHFDQALLDILKAKGVNFAFITLHVGAGTFQPVRNEVLSEHQMHTEWYTMPQETVDAVRATRAAGRDVVAVGTTSLRALESASQSGQLEAGSADTALFITPGYRFKTVTRLITNFHLPKSTLLMLVSAFAGYDEIRAAYAHAIANEYRFFSYGDAMLLTTQARA

SEQ ID NO: 66088 - protein, 341 aa, Duganella sacchari
  misc_feature (1)..(341): tr|A0A1M7PZW6|A0A1M7PZW6_9BURK S-adenosylmethionine:tRN A ribosyltransferase-isomerase OS=Duganella sacchari OX =551987 GN=queA PE=3 SV=1
MYSLSDFDFNLPQERIAQFPLPDRSASRLLHLDGKQIIDRQFADIVAQLQAGDLLVMNNTRVLKARFFGTKESGGKVEALVERVLDNRTVLAQVRASRSPLAGTKMRLADAFDVTVGERAGEFFTLHFDADVFDLIEAHGRLPLPPYIEHDADSFDENRYQTVFNKVPGAVAAPTAGLHFDEPLLEKLKAKGVNFAYVTLHVGAGTFQPVRHENLSDHQMHTEWYTMPQETVDAVRAARAAGRDVVAVGTTSLRALESASQSGQLEAGSADTALFITPGYQFKTVTRLITNFHLPKSTLLMLVSAFAGFEEIRAAYAHAIANEYRFFSYGDAMLLTTQNKE

SEQ ID NO: 66089 - protein, 341 aa, Duganella sp.
  misc_feature (1)..(341): tr|A0A3D9KXJ3|A0A3D9KXJ3_9BURK S-adenosylmethionine:tRN A ribosyltransferase-isomerase OS=Duganella sp. GV023 O X=2135490 GN=queA PE=3 SV=1
MYSLSDFDFNLPQERIAQFPLPDRSASRLLHLDGEQIIDRQFADILDLLQPGDLLVMNNTRVLKARFFGTKESGGKVEALVERVLDNRTVLAQVRASRSPLAGTKMRLADAFDVTFGERAGEFFTLHFDADVFDLIEAHGRLPLPPYIEHDADSFDENRYQTVFNKVPGAVAAPTAGLHFDEPLLEKLKAKGVNFAYVTLHVGAGTFQPVRHEKLADHQMHTEWYTMPQETVEAVRATRAAGRDVVAVGTTSLRALESASQSGQLEAGSADTALFITPGYLFKTVTRLITNFHLPKSTLLMLVSAFAGYEEIRKAYAHAIANEYRFFSYGDAMLLTTNNKE

SEQ ID NO: 66090 - protein, 341 aa, Duganella sp.
  misc_feature (1)..(341): tr|A0A0Q8QF36|A0A0Q8QF36_9BURK S-adenosylmethionine:tRN A ribosyltransferase-isomerase OS=Duganella sp. Root198 D2 OX=1736489 GN=queA PE=3 SV=1
MYSLSDFDFHLPPERIAQFPLPDRSASRLLHVDGKTLHDRQFTDILDQLQAGDLLVMNNTRVLKARFFGVKDSGGKVEALVERVLDTRTVLAQVRASKSPGPGVKIRLADAFDVTVGERAGEFYTLHFDADVFDLIEQYGRLPLPPYIEHAPGEVDETRYQTVFNKVPGAVAAPTAGLHFDEALLQKLKDKGVQFAYVTLHVGAGTFQPVRTENLAEHKMHTEWYTMPQETVDAVREARAAGRDVVAVGTTSLRALESASQSGSLEAGSGDTNLFITPGYKFKTVTRLITNFHLPKSTLLMLVSAFAGFTEIRHAYQHAIANEYRFFSYGDAMLLTTHNRA

SEQ ID NO: 66091 - protein, 350 aa, Duncaniella muris
  misc_feature (1)..(350): tr|A0A2V1IKD5|A0A2V1IKD5_9BACT S-adenosylmethionine:tRN A ribosyltransferase-isomerase OS=Duncaniella muris OX= 2094150 GN=queA PE=3 SV=1
MKLSQFKFRLPEELIAQRPAPERDQSRMMVVNRRTGEIEHKIFKDIIDYFDDGDLFVYNDTMVFPARLYGNKEKTGARIEVFLLRELSAENKLWDVLVEPARKIRIGNKLYFGDDESMVAEVIDNTTSRGRTLRFLYDGPHEEFKKELYKLGTTPLPYYINREPDEEDAERYQTIFARKEGAVIVPGAALHFSRELLKRLEIKGVNQGFITIHSGLGNYRDIDVEDLTKHRMDSEEMEADEELVKLVNATKDGGHRVCAVGTSVLRAVASSVSMGDHMKTYSGWTNKFIFPPYDFSVTDALVSNFHLPYSTMLMMVAAFGGYDLVMDAYKKAVKEGYKFGVYGDAMLIVS

SEQ ID NO: 66092 - protein, 410 aa, Duncaniella muris
  misc_feature (1)..(410): tr|A0A2V1IP05|A0A2V1IP05_9BACT S-adenosylmethionine:tRN A ribosyltransferase-isomerase OS=Duncaniella muris OX= 2094150 GN=C5O23_10180 PE=3 SV=1
MNIRDIRIENFDYPLPDERIARHPLAQRDRCLLLFKDSDGALSTRSFHELPGLLPAGSMLVYNNTRVINARLRFRKGEAADGALIEIFCLEPVEPADYACNFASVSGCSWTCFVGNSKRWKSGELLMPLSIDGHDFTLRATRVSREGNTSVVRFDWDDREITFSRIISAVGEIPIPPYLNRGTEESDSTDYQTVFSHIDGSVAAPTAGLHFTPEVLEAIDAVGIARRELTLHVGAGTFQPVKSDTIGEHDMHSEFIAVDRSLIGELAAIERRIIAVGTTSVRTLESLYHLGCRLAAGLPADVLPQWYPYDPSHPDLPVAEAMRAILSHLDTTGENTFVASTRLMIAPGYRYRVVKGMVTNFHQPKSTLLLLVSAFLASDPANPDWRAIYDYALADSRYRFLSYGDACLFL

SEQ ID NO: 66093 - protein, 350 aa, Duncaniella sp.; identical to SEQ ID NO: 66091
  misc_feature (1)..(350): tr|A0A4P7VX02|A0A4P7VX02_9BACT S-adenosylmethionine:tRN A ribosyltransferase-isomerase OS=Duncaniella sp. C9 OX =2530392 GN=queA PE=3 SV=1

SEQ ID NO: 66094 - protein, 349 aa, Duncaniella sp.
  misc_feature (1)..(349): tr|A0A4Z0V4R8|A0A4Z0V4R8_9BACT S-adenosylmethionine:tRN A ribosyltransferase-isomerase OS=Duncaniella sp. TLL-A 3 OX=2530391 GN=queA PE=3 SV=1
MKLSQFKFKLPEELIAQHPVGERDEARLMVVNRKDGTIEDHSFKEIINYFDEGDLFVYNDSMVFPALLYGNKEKTGARIEVFLLRELSAENKLWDVLVEPARKIRIGNKLYFGDDESMVAEVIDNTTSRGRTLRFLYDGSHEEFKEELYKLGSTPLPFYINRDSAQEDTERYQTIYARNEGAVVASGAGLHFSRELMKRLEIKGVGEAFITIHSGLGNYREIDVEDLTKHRMDSEEMEASQVLVDKVNATKDAGRKVCAVGTQVLRGIASAVSMGGHMKTYSGWTNKFIFPPYDFTVTDALVSNFHLPYSTMLMMVAAFGGYDLVMEAYKKAVKEGYKFGVYGDSMLII

SEQ ID NO: 66095 - protein, 349 aa, Dyadobacter fermentans
  misc_feature (1)..(349): tr|C6VRV1|C6VRV1_DYAFD S-adenosylmethionine:tRNA ribosy ltransferase-isomerase OS=Dyadobacter fermentans (strai n ATCC 700827 / DSM 18053 / NS114) OX=471854 GN=queA PE =3 SV=1
MKLSEFKFDLPQSLIALHPSDRGESRLMVVHRKTGEIEHKTFADVINYFDDGDVMAINDTKVFPARLYGQKEKTGAKIEVFLLRELNREMRLWDVLVDPARKIRVGNKLYFGDSDLVAEVIDNTTSRGRTIRFLYDGDNDAFMKLVDELGETPLPPEIISRRKVESADRERFQTIFAEHVGAVAAPTAGMHFTKAIMKRLEIKGVSFAPVTLHVGLGTFRTVDVEDLTKHKTDSENYRITQSTAEVVNKAIDGKKRICAVGTTSLRAIESSVSASGHLKPVEGWTDKFVFPPYDFKIANALLSNFQLPESILLMAACAFGGFDLVMKAYDIAIKEKYKFFTYGDAMLII

SEQ ID NO: 66096 - protein, 410 aa, Dyadobacter fermentans
  misc_feature (1)..(410): tr|C6VRZ1|C6VRZ1_DYAFD S-adenosylmethionine:tRNA ribosy ltransferase-isomerase OS=Dyadobacter fermentans (strai n ATCC 700827 / DSM 18053 / NS114) OX=471854 GN=queA PE =3 SV=1
MWRKEAEAIDLQSYTYDLPDDRIAKYPMEVRDQSKLMVYRGGELGHLRFTDISSELPEKTLLVFNDTKVIPARAHFKKETGAIIELLLLHPELPTRVINDAMLVTHACVWECMIGNKKRWKAGDSLSNVIQVNGFEVHLQVSYHDYERNLVRLTWDAGVTFLDLVKALGEIPLPPYLNRDTEEPDKETYQTVYANHDGAVAAPTAGLHFTPRVFDELEKKGIGKAFLTLHVGAGTFQPIKVEKVTEHRMHSEQVVFTRELINDLVQSVDHIVPVGTTSLRSLESLYWYGVKLFAGETTDFHIEKLYPYPWRETELPTAAQSLQAIADHMDAGGLHEIVGETEIFIFPGYRFRLCRGIITNYHQPGSTLILLVAAFVGNDWKKIYSEALSNDYRFLSYGDSSLLWLNGDVS

SEQ ID NO: 66097 - protein, 349 aa, Dyadobacter jejuensis
  misc_feature (1)..(349): tr|A0A316AIJ1|A0A316AIJ1_9BACT S-adenosylmethionine:tRN A ribosyltransferase-isomerase OS=Dyadobacter jejuensis OX=1082580 GN=queA PE=3 SV=1
MKLSEFKFDLPQSLIALHPADRGESRLMVVHRKTGEIEHKTFADLINYFDDGDVMAINDTKVFPARLFGQKEKTGAKIEVFLLRELNREMRLWDVLVDPARKIRVGNKLYFGDSDLVAEVIDNTTSRGRTIRFLYDGDNDAFMKLVDELGETPLPPEIISRRKVETADRERFQTIFAEHTGAVAAPTAGMHFTKAMMKRLEIKGVGFAPVTLHVGLGTFRNVDVEDLTKHKTDSENYRISPESAAIVNKAIDQGKRVCAVGTTSLKAIESSVSASGHLKEVEGWTDRFVFPPYDFKIANAMISNFQLPESILLMSACAFGGYDLVMKAYELAIKEKYKFFTYGDAMLII

SEQ ID NO: 66098 - protein, 413 aa, Dyadobacter jejuensis
  misc_feature (1)..(413): tr|A0A316AQG5|A0A316AQG5_9BACT S-adenosylmethionine:tRN A ribosyltransferase-isomerase OS=Dyadobacter jejuensis OX=1082580 GN=queA PE=3 SV=1
MGMKEKWLERAERIRLSDYVYDLPDERVAKYPLAERDQSKLLVYNQRQISHLQFTSLPGQLPAETLLVFNDTKVIPARAYFRKPTGATIELLLLHPEFPSRIINEAMLVKGGCVWACMIGNKKRWKAQDTLETQVLIDGERIRLVADYADYENNLVRLQWDSEHVFLDIVRALGEIPLPPYLHRKSEASDTLAYQTVYARQDGAVAAPTAGLHFTEPVLKALEQNTIHKTHLTLHVGAGTFQPIKVDTVTEHRMHSEQVVFTRQTIQDLLDHTGCIVPVGTTSMRSLESLYWFGVKLFRKETTVFMIEKLYPYALLEEELPSAEQALEAILSWMQAQGVEEIVGETEIFIFPGYRFQLCKGLVTNFHQPGSTLLLLIAALIGESWRDLYAEALEHGYRFLSYGDSSLLWAKEA

SEQ ID NO: 66099 - protein, 423 aa, Dyadobacter jiangsuensis
  misc_feature (1)..(423): tr|A0A2P8FLU8|A0A2P8FLU8_9BACT S-adenosylmethionine:tRN A ribosyltransferase-isomerase OS=Dyadobacter jiangsuen sis OX=1591085 GN=queA PE=3 SV=1
MEGKIAAEGSDNALWRKEAEAIDLESYTYDLPDDRIAKYPMEVRDQSKLMVYKRGEINHLRFTDITSQLPADTLLVFNDTKVIPARAHFRKETGAVIELLLLHPELPTRVINDAMLVKHSCVWECMIGNKKRWKAGDALSNVIQVNGKEVHLQVSYHDYEHNLVKLTWDADVTFLDLVKALGEIPLPPYLNRDTEEPDKETYQTVYAHHDGAVAAPTAGLHFTPRVFEALAEKGIRKSFLTLHVGAGTFQPIKVEKVTEHRMHSEQVVFTRALIDNLLQSVNHIVPVGTTSLRSLESLYWYGVKLFKGETTDFHIEKLYPYPWKEAEPPSATQSLQAIADYMDASGFQEIVGETEIFIFPGYRFRLCRGIITNYHQPGSTLILLVAAFVGNDWKTIYSEALAKEYRFLSYGDSSLLWLIDEAS

SEQ ID NO: 66100 - protein, 349 aa, Dyadobacter jiangsuensis
  misc_feature (1)..(349): tr|A0A2P8FV24|A0A2P8FV24_9BACT S-adenosylmethionine:tRN A ribosyltransferase-isomerase OS=Dyadobacter jiangsuen sis OX=1591085 GN=queA PE=3 SV=1
MKLSEFKFDLPQSLIALHPSDRGESRLMVVHRKTGEIEHKTFADVINYFDDGDVMAINDTKVFPARLYGQKEKTGAKIEVFLLRELNREMRLWDVLVDPARKIRVGNKLYFGDSDLVAEVIDNTTSRGRTIRFLYDGDNDAFMKLVDELGETPLPPEIISRRKVESADRERFQTIFAEHVGAVAAPTAGMHFTKAIMKRLEIKGVSFAPVTLHVGLGTFRTVDVEDLTKHKTDSENYRITQGTAEVVNKAIDGKKRICAVGTTSLRAIESSVSASGHLKPVEGWTDKFVFPPYDFKIANALLSNFQLPESILLMAACAFGGFDLVMKAYDIAIKEKYKFFTYGDAMLII

SEQ ID NO: 66101 - protein, 409 aa, Dyadobacter koreensis
  misc_feature (1)..(409): tr|A0A1H6X7W7|A0A1H6X7W7_9BACT S-adenosylmethionine:tRN A ribosyltransferase-isomerase OS=Dyadobacter koreensis OX=408657 GN=queA PE=3 SV=1
MENNWLEQAESLRIESFDYDLPDERIARYPLDPRDSSKLLVFNQGKIKHGTFCDLTGNLPSDTLLVFNDTKVIPARAYFQKETGATIEILLLHPELPTRIINDAMLVTDSCIWECMIGNKKRFKLTDTLSTELFVNGKTVRLQVAYADYDRNHIKLWWDQEIQFLDIVQALGEIPLPPYLKRETEEGDKQTYQTVYARQNGAVAAPTAGLHFTENVFKKLAEKGIRKSFLTLHVGAGTFQPIKANSVTEHKMHSEQVVYSRALITELLKNTESIVPVGTTSLRSLESLYWFGVKLFRAETTVFNIEKLYPYPFKAEELPSAHDALTAIATYMDAGKLDEVVGETEIFIFPGYTFRLCKGLITNYHQPGSTLILLVAALVGEDWRRIYKEAMDNGYRFLSYGDSSLLWKK

SEQ ID NO: 66102 - protein, 349 aa, Dyadobacter koreensis
  misc_feature (1)..(349): tr|A0A1H6R4M1|A0A1H6R4M1_9BACT S-adenosylmethionine:tRN A ribosyltransferase-isomerase OS=Dyadobacter koreensis OX=408657 GN=queA PE=3 SV=1
MKLSEFKFDLPQSLIALHPSDRGESRLMVVNRATGEIEHKMFPDLINYFGDGDVMAINDTKVFPARLYGQKEKTGAKIEVFLLRELNREMRLWDVLVDPARKIRVGNKLYFGDSDLVAEVIDNTTSRGRTIRFLYDGDNDEFMKLVDQLGETPLPPEIISRRKVENSDRERFQTIFAEHIGAVAAPTAGLHFTKAMMKRLEIKGVNFAPVTLHVGLGTFRTVDVEDLTKHKTDSENYRISQPSADIVNAALDAKKRVCAVGTTSLKAIESSVSASGHLKAVEGWTDKFVFPPYDFKIANAMISNFQLPESILLMSACAFGGFDLVMKAYEMAIKEKYKFFTYGDAMLII

SEQ ID NO: 66103 - protein, 421 aa, Dyadobacter psychrophilus
  misc_feature (1)..(421): tr|A0A1T5HAM1|A0A1T5HAM1_9BACT S-adenosylmethionine:tRN A ribosyltransferase-isomerase OS=Dyadobacter psychroph ilus OX=651661 GN=queA PE=3 SV=1
MKEEESKGSGNWQNDWLKAAESIRLEDYTYDLPDERIAKYPLENRDQSKLLIHNSGEIAHKCFTDLPENLPAETLLVFNDTKVIPARAYFKKETGAVIEILLLHPELPTRVINDAMLVKNSCVWECMIGNKKRWKLADTLTTEININGQLVTLSVTYEDYDRNLVRLNWNGDFVFLDIVKALGEIPLPPYLNRDTEARDSETYQTVYAHHDGAVAAPTAGLHFTPEVFEKLQSKGVKRSFLTLHVGAGTFQPIKVSSVTEHRMHSEQVVFTKQLINDLLENLGMIIPVGTTSLRSLESLYWFGVKLYRQETTDFFIKKLYPYPFEEKDLPSASEALHSILAFMEQHNTDHIVGETEIFIFPGYKFRLCKAIVTNFHQPGSTLILLVAALTGQDWKRIYAEALENDYRFLSYGDSSLLWRKD

SEQ ID NO: 66104 - protein, 349 aa, Dyadobacter psychrophilus
  misc_feature (1)..(349): tr|A0A1T5FMV1|A0A1T5FMV1_9BACT S-adenosylmethionine:tRN A ribosyltransferase-isomerase OS=Dyadobacter psychroph ilus OX=651661 GN=queA PE=3 SV=1
MKLSEFKFDLPQSLIALHPSDRGESRLMVVHRKTGEIEHKTFADLINYFDDGDVMAINDTKVFPARLYGQKEKTGAKIEVFLLRELNREMRLWDVLVDPARKIRVGNKLYFGDSDLVAEVIDNTTSRGRTIRFLYDGDNDAFMKLVDELGETPLPPEIISRRKVETSDRERFQTIFAEHIGAVAAPTAGMHFTKAIMKRLEIKGVNFAPVTLHVGLGTFRTVDVEDLTKHKTDSENYRITQGSADIVNAAIDNKKRICAVGTTSLKAVESSVSASGHLKAVEGWTDKFVFPPYDFKIANALLSNFQLPESILLMSACAFGGFDLVMKAYELAIKEKYKFFTYGDAMLII

SEQ ID NO: 66105 - protein, 349 aa, Dyadobacter soli; identical to SEQ ID NO: 66095
  misc_feature (1)..(349): tr|A0A1G7XI10|A0A1G7XI10_9BACT S-adenosylmethionine:tRN A ribosyltransferase-isomerase OS=Dyadobacter soli OX=6 59014 GN=queA PE=3 SV=1

SEQ ID NO: 66106 - protein, 420 aa, Dyadobacter soli
  misc_feature (1)..(420): tr|A0A1G7YMQ2|A0A1G7YMQ2_9BACT S-adenosylmethionine:tRN A ribosyltransferase-isomerase OS=Dyadobacter soli OX=6 59014 GN=queA PE=3 SV=1
MEGKMAVEDNVLWRIEAEAIDLESYTYDLPDDRIAKYPMDVRDQSKLMIYRSGEINHLRFTDITAQLPENTLLVFNDTKVIPARAHFRKETGAVIELLLLHPELPTRVINDAMLVKHSCVWECMIGNKKRWKVADTLSNVIQVSGTELHLQVSYHDYERNLVKLTWDADVTFLELVKALGEIPLPPYLNRDTEEPDKETYQTVYAHHDGAVAAPTAGLHFTPRVFEALEQKGIRKSFLTLHVGAGTFQPIKVEKVTEHRMHSEQVVFTRELINDLLLSVDHIVPVGTTSLRSLESLYWYGVKLFKKETTDFNIEKLYPYPWKEAELPSAAQSMQAIADHMDATGVSEIVGETEIFIFPGYRFRLCRGIITNYHQPGSTLILLVAAFVGKDWKTIYSEALANDYRFLSYGDSSLLWLIDEA

SEQ ID NO: 66107 - protein, 411 aa, Dyadobacter sp.
  misc_feature (1)..(411): tr|A0A4U6DD37|A0A4U6DD37_9BACT S-adenosylmethionine:tRN A ribosyltransferase-isomerase OS=Dyadobacter sp. AR-3- 8 OX=2576211 GN=queA PE=3 SV=1
MENNWLERAESLRIESFDYDLPDERIARYPLDPRDGSKLLVYGQGNIQHQKFTDLVENLPENTLLVFNDTKVIPARAYFQKETGATIEILLLHPELPTRIINDAMLVRDFCVWECMIGNKKRFKLTDILSTNLIVNGKAVKLQVAYADYEKNQVKFWWDQDIEFLDIVQALGEIPLPPYLKRDTEEGDKQTYQTVYARQNGAVAAPTAGLHFTENVFEKLDEKGIRRSFLTLHVGAGTFQPIKANSVTEHKMHAEQVVYSRQLITELLKNTDTIVPVGTTSLRSLESLYWYGVKLFRAETSVFNIEKLYPYPFSPDELPSASESLTAIADYMDAQKLNEIVGETEIFIFPGYQFRLCKGLITNYHQPGSTLILLVAALVGEDWQRIYKVAMDNGYRFLSYGDSSLLWRSEV

SEQ ID NO: 66108 - protein, 410 aa, Dyadobacter sp.
  misc_feature (1)..(410): tr|A0A3D8YD16|A0A3D8YD16_9BACT S-adenosylmethionine:tRN A ribosyltransferase-isomerase OS=Dyadobacter sp. RS19 OX=2259619 GN=queA PE=3 SV=1
MKTNWLEQAESIRLEAFHYDLPDERIARYPLNPRDSSKLLVYKDGKIAHQQFPDLVSQLPADSLLVFNNTKVIPARAHFQKETGATIEILLLHPELPTQVINDAMLVTQTCVWECMIGNKKRWKKADVLSTTISVNGESLKLEVEYVDYERNHVRLSWNREFTFLEIVKALGEIPLPPYLNRETEELDKQTYQTVYADRDGAVAAPTAGLHFTEQVFDKLNAKGVKRSFLTLHVGAGTFQPIKASTVTEHRMHSEQVVFSRELIDELLAGIGSVIPIGTTSMRSLESLYWYGVKLFRKETTAFQIEKLYPYPFEEHELPTAQVALTAIANFMDELEISQLIGETEIFIFPGYKFRICKGIVTNFHQPGSTLILLVAALVGEDWTRIYNEALDNDYRFLSYGDSSLLWGRG

SEQ ID NO: 66109 - protein, 342 aa, Dyella japonica
  misc_feature (1)..(342): tr|A0A075K0Q7|A0A075K0Q7_9GAMM S-adenosylmethionine:tRN A ribosyltransferase-isomerase OS=Dyella japonica A8 OX =1217721 GN=queA PE=3 SV=1
MKKTDFDFDLPPELIAQAPLAERSASRMLVLDVEAQARQDRMFRDLPEFLREGDLLVFNDTRVLPARLYGRKDTGGQVEILIERVTGAHEATVQLGVSKKPKEGGRIELADGSHAVVLGRDGSFFRLRFESPDPLERLLLRLGEMPLPPYIERHADDSDMERYQTVFAREPGAVAAPTAGLHFDEATLANLRGRGIQFGYVTLHVGAGTFQPVRADDLKDHQMHREWLNVGASLVEQIRRTRAAGGRVIAVGTTVVRALESAVRDGEVQPFAGETQIFIFPGYRFSSIDGLLTNFHLPQSTLLMLVSALAGRDFMLASYRHAVEQKYRFFSYGDSMLILPKG

SEQ ID NO: 66110 - protein, 342 aa, Dyella japonica
  misc_feature (1)..(342): tr|A0A0G9H973|A0A0G9H973_9GAMM S-adenosylmethionine:tRN A ribosyltransferase-isomerase OS=Dyella japonica DSM 1 6301 OX=1440762 GN=queA PE=3 SV=1
MKKTDFDFELPPELIAQAPLSERSASRLLVLDVDAQSRQDRMFRELPAFLREGDLLVFNDTRVLPARLYGRKDTGGQVEILIERVTGAHEATVQLGVSKKPKEGGRIELADGSHAVVLGRDNAFFRLHFESPEPLERLLLKLGEMPLPPYIERHADASDMERYQTVFAREPGAVAAPTAGLHFDEAMLATLRERGIQFGYVTLHVGAGTFQPIRADDIKDHQMHREWLNVGASLVEQIRRTRAAGGRVIAVGTTVVRALESAVRDGELQPFAGETQIFIFPGYQFSSIDGLLTNFHLPQSTLLMLVSALAGRDFMLGSYRHAVEQKYRFFSYGDAMLILPKG

SEQ ID NO: 66111 - protein, 342 aa, Dyella jiangningensis
  misc_feature (1)..(342): tr|A0A023NNM3|A0A023NNM3_9GAMM S-adenosylmethionine:tRN A ribosyltransferase-isomerase OS=Dyella jiangningensis OX=1379159 GN=queA PE=3 SV=1
MKKTDFDFELPPELIAQAPLPERSASRLLVLDVEAQARQDRMFRDLPEFLRDGDLLVFNDTRVLPARLYGRKDTGGQVEILIERVTGTHEATVQLGVSKKPKEGGRIELADGSHALVLGRDGPFFRLRFESTDPLERLLLRLGEMPLPPYITRHADQSDMERYQTVFAREPGAVAAPTAGLHFDEATLATLRERGVQFGYVTLHVGAGTFQPVRADDIKDHQMHREWLNVGASLVEQIRRTRAAGGRVIAVGTTVVRALESAVRDGELQPFAGETQIFIFPGYKFSSIDGLLTNFHLPQSTLLMLVSALAGKDFMLASYRHAVEQKYRFFSYGDAMLILPKG

SEQ ID NO: 66112 - protein, 342 aa, Dyella jiangningensis
  misc_feature (1)..(342): tr|A0A328P3U4|A0A328P3U4_9GAMM S-adenosylmethionine:tRN A ribosyltransferase-isomerase OS=Dyella jiangningensis OX=1379159 GN=queA PE=3 SV=1
MKKTDFDFELPPELIAQAPLAERSASRLLVLDVEAQARQDRMFRDLPDFLRKGDLLVFNDTRVLPARLYGRKDTGGQVEILIERVTGAHEATVQLGVSKKPKEGGRIELADGSHAVVLGRDGPFFRLRFESTDPLERLLLRLGEMPLPPYITRHADQGDMERYQTVFAREPGAVAAPTAGLHFDETTLATLRERGVQFGYVTLHVGAGTFQPVRADDIKDHQMHREWLNVGASLVEQIRRTRAAGGRVIAVGTTVVRALESAVRDGELQPFAGETQIFIFPGYRFSSIDGLLTNFHLPQSTLLMLVSALAGRDFMLASYRHAVEQKYRFFSYGDAMLILPKG

SEQ ID NO: 66113 - protein, 342 aa, Dyella marensis
  misc_feature (1)..(342): tr|A0A1I2IAF4|A0A1I2IAF4_9GAMM S-adenosylmethionine:tRN A ribosyltransferase-isomerase OS=Dyella marensis OX=50 0610 GN=queA PE=3 SV=1
MKKSDFDFRLPPELIAQAPLPERSASRLLLLDTQAQALQDRMFRELPTLLRAGDLMIFNDTRVLPARLYGRKESGGAVEILLERVTGAHEATAQLGVSKKPKEGGRIELADGSHAVVLGRDGQFFRLRFESPEPLERLLRRLGEMPLPPYIERHADASDLERYQTVFAREPGAVAAPTAGLHFDEAMLAQLRELGVDFGYVTLHVGAGTFQPVRAEEIKDHQMHREWLNVGAGLVEQVRRARARGGRVIAVGTTVVRALESACRDGELRPFAGETQIFIFPGYKFSSIDGLITNFHLPQSTLLMLVSALAGREFVLQAYRHAVAQRYRFFSYGDAMMILPPG

SEQ ID NO: 66114 - protein, 344 aa, Dyella soli
  misc_feature (1)..(344): tr|A0A4R0YZU2|A0A4R0YZU2_9GAMM S-adenosylmethionine:tRN A ribosyltransferase-isomerase OS=Dyella soli OX=522319 GN=queA PE=3 SV=1
MKKSDFDFDLPPELIAQAPLPERSASRLLLLDVERKALEDRMFRDLPGLLRAGDLLVFNDTRVLPARLYGRKESGGAVEILIERVTGAHEATVQLGVSKKPKEGGRIELADGSFATVLGRDGAFFRLRFESPDPLERLLLRLGEMPLPPYIERHADASDLERYQTVFAREPGAVAAPTAGLHFDEPMLQKLRDLGVEFGYVTLHVGAGTFQPVRADDIKDHQMHREWLNVGASLVEQIRRTRANGGRVIAVGTTVVRALESAVRDGELQPFAGETQIFIFPGYQFTSIDGLITNFHLPQSTLLMLVSALAGRDFVLDAYRHAVEQRYRFFSYGDAMAILPPARD

SEQ ID NO: 66115 - protein, 343 aa, Dyella soli
  misc_feature (1)..(343): tr|A0A4R0YV87|A0A4R0YV87_9GAMM S-adenosylmethionine:tRN A ribosyltransferase-isomerase OS=Dyella soli OX=522319 GN=queA PE=3 SV=1
MKKTDFDFELPPELIAQAPLAERSASRLLVLDAEAQSRQDRLFRDLPEFLREGDLLVFNDTRVLPARLYGRKETGGAVEILIERVTGAHEAMVQLGVSKKPKEGGRIELADGSHATVLGREGQFFRLRFESPDSLERLLLKLGEMPLPPYIERRADASDMERYQTVFAREPGAVAAPTAGLHFDEAMLALLRERGVQFGYVTLHVGAGTFQPVRAEELKDHQMHREWLNVGASLVEQIRRTRAAGGRVFAVGTTVVRALESASRDGELQPFAGETQIFIFPGYKFSSIDGLLTNFHLPQSTLLMLVSALAGRDFMLESYRHAVEQKYRFFSYGDAMLILPQSP

SEQ ID NO: 66116 - protein, 343 aa, Dyella sp.
  misc_feature (1)..(343): tr|A0A370XB86|A0A370XB86_9GAMM S-adenosylmethionine:tRN A ribosyltransferase-isomerase OS=Dyella sp. 4MSK11 OX= 1927960 GN=queA PE=3 SV=1
MKKSDFHFELPPELIAQAPLAERSASRLLLLDVPARTWRDRMFRELPSLLRKGDLLVFNDTRVLPARLYGHKPSGGAVEILIERVTGAHEATVQLGVSKKPRVGTHIILADGSWATVLGRDDAFFHLRFESPEPLERLLQRLGEMPLPPYISRHADASDLERYQTVYAREPGAVAAPTAGLHFDDRLLTQLREKGVDFGYVTLHVGAGTFQPVRVEDLSHHQMHREWLNVGAGLVDQIHRTRRTGGRVIAVGTTVLRALESATVDGVLRPFAGETQIFIFPGYRITSIDGLVTNFHLPQSTLLMLVSALAGREFILGAYEHAVKQRYRFFSYGDAMLILPQGG

SEQ ID NO: 66117 - protein, 344 aa, Dyella sp.
  misc_feature (1)..(344): tr|A0A410UET5|A0A410UET5_9GAMM S-adenosylmethionine:tRN A ribosyltransferase-isomerase OS=Dyella sp. M7H15-1 OX =2501295 GN=queA PE=3 SV=1
MKKSDFNFDLPTELIAQSPLPQRSASRLLLLDVPVRTWQDRMFRELPSFLRKNDLLVFNDTRVLPARLYGHKPSGGAVEILIERVTGTHDAIVQLGVSKKPRPGTAIILADGSQATVQGREESFFRLRFESPEPLERLLMRLGEMPLPPYISRHADASDLERYQTVYAREPGAVAAPTAGLHFDEGLLTQIRDKGVHFGYVTLHVGAGTFQPVRTDDLAHHQMHREWLNVGAGLVDQIHRTRRAGGRVIAVGTTVVRALESATVDSVLRPFAGETQIFIFPGYRITSIDGLITNFHLPQSTLLMLVSALAGREYILGAYEHAVKQRYRFFSYGDAMLIFPQGAT

SEQ ID NO: 66118 - protein, 347 aa, Dyella thiooxydans
  misc_feature (1)..(347): tr|A0A160N253|A0A160N253_9GAMM S-adenosylmethionine:tRN A ribosyltransferase-isomerase OS=Dyella thiooxydans OX =445710 GN=queA PE=3 SV=1
MKKSDFDFDLPNALIAQAPLPERSASRLLHLDAAAGTMSDRMFRELPEFLRPGDLLVFNDTRVLPARLYGRKDTGGAVEILIERVTGAHEAVVQLGVSKKPKEGGRIELGDGSHAVVLGREDAFFRLRFESHEPLEKLLHKLGEMPLPPYIERSAEASDLERYQTVYAREPGAVAAPTAGLHFDEEMLARLREKGVQSGYVTLHVGAGTFQPVRADDIKDHHMHREWLNVGAHLVEQVRRTRAAGGRVIAVGTTVVRALESASVDGELHPFAGETQIFIFPGYRFSSIDGLITNFHLPQSTLLMLVSALAGREFMLAAYRHAVAGRYRFFSYGDAMLILPPVPEALR

SEQ ID NO: 66119 - protein, 350 aa, Dysgonamonadaceae bacterium
  misc_feature (1)..(350): tr|A0A2N4SBK4|A0A2N4SBK4_9BACT S-adenosylmethionine:tRN A ribosyltransferase-isomerase OS=Dysgonamonadaceae bac terium OX=2065189 GN=queA PE=3 SV=1
MKLSQFKFNLPEELIAKYPAKYRDESRMMVLHKKSGEIEHRIFKEILEYFNEKDFFIFNDTKVFPARLFGNKEKTGAQIEVFLLRELNPNQHLWDVLVNPARKIRIGNKLYFGENEELVAEVIDNTTSRGRTLRFLYDGPHEEFKKLLFSIGEMPIPEYMDRHADSDDELRYQNIFAANEGAVVAPAAGLHFSRELMKRMEIKGIDYGFLTLHNGLGAYRDIDVEDLTKHKIDSEQFSISEELCERVNKAFDEGHNICAVGTSVLRALETTVTPSGHLKPKEGWTNKFIFPPYEFVLTKSLVTNFHMPYSTLLMMTTAFGGYDQVMKAYQVAIDEKYRFGAYGDAMLIID

SEQ ID NO: 66120 - protein, 415 aa, Dysgonamonadaceae bacterium
  misc_feature (1)..(415): tr|A0A2N4S7I7|A0A2N4S7I7_9BACT S-adenosylmethionine:tRN A ribosyltransferase-isomerase OS=Dysgonamonadaceae bac terium OX=2065189 GN=queA PE=3 SV=1
MKRKEIEQLHITDYDYPLPDERIAKYPLEKRDASKLLFYDDGIISESIFSNLADYIPSGSLMIFNNTRVIHARLLFRKETGAQIEVFCLSPADPEDYAMNFAAKQYCSWHCMIGNAKRWKADILTMKIEHGGNGILTLRAEKIVVTDKDTTVRFSWDDDRLSFSEILEIAGKLPIPPYLNRPGETKDDETYQTVYSRIEGSVAAPTAGLHFTDEVMTSLRRKGIATADVTLHVGAGTFRPVKSETIGEHEMHTEFISVPKETIKAIYDNENPLVVVGTTSMRTIESLYYIGARLAINPVAEPYELSVSQWEPYENFLHDIEAKQSLKNILDYLDRNDADHLISATQIMIAPGFRFHYADALITNFHQPQSTLLLLISAFVGDNWRMIYDYALKSDFRFLSYGDSSLLWRNHNKMK

SEQ ID NO: 66121 - protein, 407 aa, Dysgonomonas alginatilytica
  misc_feature (1)..(407): tr|A0A2V3PS29|A0A2V3PS29_9BACT S-adenosylmethionine:tRN A ribosyltransferase-isomerase OS=Dysgonomonas alginati lytica OX=1605892 GN=queA PE=3 SV=1
MELSDPRHIHIKDYNYDLPDNKIAKYPLEGRDNSKLLVYKDKSITDSHFSSITDYLPEDSLMIFNNTKVIQARLHFNKSTGAQIEIFCLDPYLPHDYNLIFQATEECSWQCMIGNLKKWKEGTLVKEVKIDNQTILLKADRIESAGNTHIIKFEWDNPQYTFADILDAVGELPIPPYLNRDTEEKDKETYQTLYSKIKGSVAAPTAGLHFTEKVFEKLKKKGIETNEVTLHVGAGTFKPVKSEVINDHEMHSEFISVKRETIEHILSHKGNIIAVGTTSVRTLESLYHIGVALEKSPNLNTLKVEQWQPYNSSFDNNITKEKALKNILDYLDKHSINTLLADTQIMIVPGYTFKIVSGIVTNFHQPQSTLLLLVSAFVEGNWMSIYNHALTHEYRFLSYGDSSLLLR

SEQ ID NO: 66122 - protein, 349 aa, Dysgonomonas alginatilytica
  misc_feature (1)..(349): tr|A0A2V3PTW8|A0A2V3PTW8_9BACT S-adenosylmethionine:tRN A ribosyltransferase-isomerase OS=Dysgonomonas alginati lytica OX=1605892 GN=queA PE=3 SV=1
MKLSQFRFDFPEELIASHPNKNRDESRMLVFDRKTGQVEHKQFKDILEYFDDKDVFVFNDTKVFPARLYGNKEKTGAKIEVFLLRELNEEFHLWDVLVDPARKIRIGNKLYFGDDDSMVAEVIDNTTSRGRTLRFLYDGPAEEFKTALYSLGETPIPKYLGRQEEEDDKHRYQTIFAKNEGAVVAPAAGMHFSRELLKRMEIKGIDFAHITLHSGLGNYREIDVEDLTKHKMDSEQMEVTQHAADIVNKAKANGAKICAVGTSSMRAIETIVSTDHQLKASKGWTNKFIFPPYEFNIADAMVTNLHLPQSTLLMMTAAFGGYDKVMELYEEAVKEKYRFGTYGDSMLIL

SEQ ID NO: 66123 - protein, 406 aa, Dysgonomonas capnocytophagoides
  misc_feature (1)..(406): tr|A0A4Y8KVU8|A0A4Y8KVU8_9BACT S-adenosylmethionine:tRN A ribosyltransferase-isomerase OS=Dysgonomonas capnocyt ophagoides OX=45254 GN=queA PE=3 SV=1
MNNSDPRHIHIKDFTYDLPDNRIAKYPLEERDSSQLLVYKNNQITDSNFISITDFLPSDSLMVFNNTKVIQARMYFQKSTGAQIEIFCLDPYFPHDYNLIFQTTDKCSWHCMIGNLKKWKEGELTKEVIIKGDTLHITAKRIHSAGNTHIVEFSWNDRRFTFADILDICGELPIPPYLNRDTEEKDKATYQTVYSKIKGSVAAPTAGLHFTERVFTNLKDKGIKTDEVTLHVGAGTFKPVKSDTINDHEMHSEFISVRKETIEHLLSHQGNIIAVGTTSVRTLESLFYIGAGLETNPNPEHLKVDQWQPYDSSQNLITKDKALRNILDYLAENSLKVLLADTQIIIAPGYEFKIVTGIVTNFHQPQSTLLLLVSAFVKGDWKTIYNHALTHDYRFLSYGDSSLLLR

SEQ ID NO: 66124 - protein, 349 aa, Dysgonomonas capnocytophagoides
  misc_feature (1)..(349): tr|A0A4Y8KXZ5|A0A4Y8KXZ5_9BACT S-adenosylmethionine:tRN A ribosyltransferase-isomerase OS=Dysgonomonas capnocyt ophagoides OX=45254 GN=queA PE=3 SV=1
MKLSQFRFDFPEELIATHPAKNRDESRLLVYNRKTDKVEHKQFKDILEYFDDKDVFIFNDTKVFPARLYGNKEKTGAKIEVFLLRELNEEFHLWDVLVDPARKIRIGNKLYFGDDDSMVAEVIDNTTSRGRTLRFLYDGPSEEFRTALYSLGETPIPRYLGRDEDADDKERYQTIFAKNEGAVVAPAAGLHFSRELMKRMEIKGLEFAYVTLHSGLGNYREIDVEDLTKHKMDSEQMEITDEAADIVNKAKSRGSKICAVGTSVMRGIETIVSTDHQLKSSKGWTNKFIFPPYDFNIADAMVTNLHLPQSTLLMMTAAFGGYDRVMELYEEAVKEKYKFGTYGDAMLIL

SEQ ID NO: 66125 - protein, 349 aa, Dysgonomonas gadei
  misc_feature (1)..(349): tr|F5J3I0|F5J3I0_9BACT S-adenosylmethionine:tRNA ribosy ltransferase-isomerase OS=Dysgonomonas gadei ATCC BAA-2 86 OX=742766 GN=queA PE=3 SV=1
MKLSQFKFDLPEELIASHPAKNRDESRLLVVNRKTGEVEHKVFKDIIEYFDDKDIFIFNDTKVFPARLYGNKEKTGATIEVFLLRELNEEFHLWDVLVDPARKIRIGNKLYFGDDDSMVAEVIDNTTSRGRTLRFLYDGPSEEFRKALYALGETPIPKYLNRGEEADDKDRYQTIFAKNEGAVVAPAAGLHFSRELLKRMEIKGIDFAYITLHSGLGNYRDIDVEDLTKHKMDSEQLQITEEAIMHVNRAKDAGHRVCAVGTSVMRAIETIVSTDGHLKTNEGWTNKFIFPPYDFGIADSMVTNFHLPQSTLLMMTAAFGGYDRIMDIYDMAVKEKYRFGTYGDAMLII

SEQ ID NO: 66126 - protein, 409 aa, Dysgonomonas gadei
  misc_feature (1)..(409): tr|F5J1I4|F5J1I4_9BACT S-adenosylmethionine:tRNA ribosy ltransferase-isomerase OS=Dysgonomonas gadei ATCC BAA-2 86 OX=742766 GN=queA PE=3 SV=1
MEVSIFWDIRINDYDYGLPDSRIAKYPLVKRDESKLLVYKEGKITDARFCNLAEYLPDNSLMIFNNTKVIQARLHFQKITGAQIEIFCLEPHSPNDYQLNFQQTQRCSWVCLVGNLKKWKEGDLIKELVVNGEPVMFKARRIQTNGDSHIIEFEWDNTGVTFSELLEVAGELPIPPYLNRDTEEQDKETYQTIYSKIDGSVAAPTAGLHFTPEVFELLGKSGVKTAEVTLHVGAGTFRPVKTEEVKDHVMHSEFISVKRDVIEQLLNHKGKVIAVGTTSVRTLESLYYIGELLEKDNSSGELKVTQWQPYKASTEKELSVKESLTNILTYLDKNNLTSLIAETQIIIAPGYIYKIVDGIITNFHQPKSTLLLLVSAFTGGDNWKAIYKHALDNDYRFLSYGDSSLLLKE

SEQ ID NO: 66127 - protein, 349 aa, Dysgonomonas macrotermitis
  misc_feature (1)..(349): tr|A0A1M4TY90|A0A1M4TY90_9BACT S-adenosylmethionine:tRN A ribosyltransferase-isomerase OS=Dysgonomonas macroter mitis OX=1346286 GN=queA PE=3 SV=1
MKLSQFRFDFPEELIATHPAKNRDEARLLVYNRKTDKVEHKQFKDILEYFNDKDVFVFNDTKVFPARLYGNKEKTGAKIEVFLLRELNEEFHLWDVLVDPARKIRIGNKLYFGDDDSMVAEVIDNTTSRGRTLRFLYDGPAEEFKTALYALGETPIPRYLGREEEADDKTRYQTIFAKNEGAVVAPAAGLHFSRELMKRMEIKGIDFAYITLHSGLGNYREIDVEDLTKHKMDSEQMEITEEAANIVNQAKARGSKICAVGTSVMRSIETIVSTDNQLKSSKGWTNKFIFPPYEFNIADSMVTNLHLPQSTLLMMTAAFGGYDRVMELYEEAVKEKYKFGTYGDAMLIL

SEQ ID NO: 66128 - protein, 412 aa, Dysgonomonas macrotermitis
  misc_feature (1)..(412): tr|A0A1M5EEA3|A0A1M5EEA3_9BACT S-adenosylmethionine:tRN A ribosyltransferase-isomerase OS=Dysgonomonas macroter mitis OX=1346286 GN=queA PE=3 SV=1
MVIPYQMESLDPRQIHIKDYNYNLPDDRIAKYPLEERDSSRLLVYKEGRITDSSFTTLPDFLPSDSLMIFNNTKVIQARMYFQKSTGAQIEIFCLDPYEPHDYNLVFQSTGCCSWHCLVGNLKKWKEGKLSKSITIGGQEVLITVERKHSAGNTHIIEFAWDNSQFTFADILDSCGELPIPPYLNRDTEEKDKETYQTLYSKIKGSVAAPTAGLHFTERVFADINKKGIKTDEVTLHVGAGTFKPVKSELISDHEMHSEFISVRRETIENILNHQGNIIAVGTTSVRTIESLYHIGAALEKDPSPGYLLVKQWQPYEETNSTITKEQALQNILDYLDSHSMKVLLADTQIIIAPGYEFKIVKGIVTNFHQPQSTLLLLVSAFVKGDWKTIYNHALTHDYRFLSYGDSSLLLR

SEQ ID NO: 66129 - protein, 407 aa, Dysgonomonas mossii
  misc_feature (1)..(407): tr|F8WVL2|F8WVL2_9BACT S-adenosylmethionine:tRNA ribosy ltransferase-isomerase OS=Dysgonomonas mossii DSM 22836 OX=742767 GN=queA PE=3 SV=1
MEISSPQKIHIQDYNYNLPDDRIAKYPLTKRDNSKLLVYKNEKITDTVFSNINNFLPENCLMVFNNTKVIQARLHFQKTTGAQIEIFCLEPCIPNDYQLNFQQTEKCSWVCLIGNLKKWKEGSLTRQIKVNEQIVNFTATRAGSHGDAHVIDFEWDNQSVTFSELLDAVGELPIPPYLNRATEEQDKQTYQTVYSKIDGSVAAPTAGLHFTPEVMKSLKDQGMKLAEVTLHVGAGTFRPVKSDEIGDHVMHSEFISVQKSFIEGLLKFEGKVIAVGTTSVRTLESLYYIGVSLENQKQSHLHVSQWMPYNDSNNRLSKKDALRNILAYLEKNSLSMLIADTQIIIAPGYEFKIVDGIVTNFHQPQSTLLLLVSAFLGNNNWKNIYEHALSSDYRFLSYGDSSLLLKD

SEQ ID NO: 66130 - protein, 407 aa, Dysgonomonas mossii
  misc_feature (1)..(407): tr|A0A4Y9ILG8|A0A4Y9ILG8_9BACT S-adenosylmethionine:tRN A ribosyltransferase-isomerase OS=Dysgonomonas mossii O X=163665 GN=queA PE=3 SV=1
MEISSPQKIHIQDYNYNLPDNRIAKYPLTKRDNSKLLVYKNEKITDTVFSNINNFLPENCLMVFNNTKVIQARLHFQKTTGAQIEIFCLEPCIPNDYQLNFQQTEKCSWVCLIGNLKKWKEGSLTRQINVNEQIVNFTATRTKSHGDAHVIDFEWDNQGVTFSELLDAVGELPIPPYLNRATEEQDKQTYQTVYSKIDGSVAAPTAGLHFTSEVMKSLKDQGMKLAEVTLHVGAGTFRPVKSDEIGDHVMHSEFISVQKSFIEELIRFEGKVIAVGTTSVRTLESLYYIGVSLESQKQSHLHVSQWMPYSDSNNRLSKKDALKNILAYLEANSLSTLIADTQIIIAPGYEFKIVDGIVTNFHQPQSTLLLLVSAFLGNNNWKNIYEHALSSDYRFLSYGDSSLLLKD

SEQ ID NO: 66131 - protein, 349 aa, Dysgonomonas sp.
  misc_feature (1)..(349): tr|A0A3D3TC97|A0A3D3TC97_9BACT S-adenosylmethionine:tRN A ribosyltransferase-isomerase OS=Dysgonomonas sp. OX=1 891233 GN=queA PE=3 SV=1
MKLSQFKFDFPSELIAAHPAKNRDESRLLVYNRKEDKTEHRLFKDILEYFNDKDVFIFNDTKVFPARLYGNKEKTGAKIEVFLLRELNEELHLWDVLVDPARKIRIGNKLYFGEDDSMVAEVIDNTTSRGRTLRFLYDGPPEEFRSALYALGETPIPKYLGRGEEPEDKERYQTIFAKNEGAVVAPAAGLHFSRELLKRMEIKGIDFAYITLHSGLGNYREIDVEDLTKHKMDSEQMEITPEAAAIVNKAKANGNKICAVGTSVMRTIETVVSTDHQLKPNEGWTNKFIFPPYEFNIADAMVTNLHLPQSTLLMMTAAFGGYDKVMELYEEAVKEKYKFGTYGDAMLIL

SEQ ID NO: 66132 - protein, 407 aa, Dysgonomonas sp.
  misc_feature (1)..(407): tr|A0A1M3LEZ1|A0A1M3LEZ1_9BACT S-adenosylmethionine:tRN A ribosyltransferase-isomerase OS=Dysgonomonas sp. 37-1 8 OX=1895907 GN=queA PE=3 SV=1
MEISSPQKIHIQDYNYNLPDDRIAKYPLTKRDNSKLLVYKNEKITDTVFSNINNFLPENCLMVFNNTKVIQARLHFQKTTGAQIEIFCLEPCIPNDYQLNFQQTVKCSWVCLIGNLKKWKEGSLTRQINVNEKVVNLTTTRTKSHGDTHVIDFEWDNQNVTFSELLDAVGELPIPPYLNRATEEQDKQTYQTVYSKIDGSVAAPTAGLHFTPEVMKSLKEQGMKLAEVTLHVGAGTFRPVKSDEIGNHVMHSEFISVQKSFIEELIRFEGKVIAVGTTSVRTLESLYYIGVSLENQKQSHLHVSQWMPYNDSNNRLSKKDALKNILAYLEANSLSTLIADTQIIIAPGYEFKIVDGIVTNFHQPQSTLLLLVSAFLGNNNWKNIYEHALSSDYRFLSYGDSSLLLKD

SEQ ID NO: 66133 - protein, 341 aa, Dysosmobacter welbionis
  misc_feature (1)..(341): tr|A0A4D7B3C4|A0A4D7B3C4_9FIRM S-adenosylmethionine:tRN A ribosyltransferase-isomerase OS=Dysosmobacter welbion is OX=2093857 GN=queA PE=3 SV=1
MKTSDFYYDLPQELIAQTPIEKRDTSRLMTLDRVSGATGHHHFYDLPDYLNPGDCLILNNSRVLPARLVGQRLPGGGICEVLLLNDRGDKVWECLVRPGRKLRKGTRLSFGNGELTAEIVEQLEEGGRLIRFDYEGIFLETLERLGKMPLPPYIKEELQDQERYQTVYSKVLGSAAAPTAGLHFTPELLEKIRAKGVKIGYVTLHVGLGTFRPVKEDTIEDHPMHSEYCTIPQETADLINETRKGGGRCICVGTTSCRTLESWAAEDGHMEAKSGWTDIYIYPGYRFKVMDGLVTNFHLPESTLIMLVSAFAGREHVLAAYEEAVREKYRFFSFGDAMFIS

SEQ ID NO: 66134 - protein, 349 aa, Echinicola sp.
  misc_feature (1)..(349): tr|A0A514CCK1|A0A514CCK1_9BACT S-adenosylmethionine:tRN A ribosyltransferase-isomerase OS=Echinicola sp. LN3S3 OX=2591634 GN=queA PE=3 SV=1
MKLSDFKFEVPKKLISLYPTDNRDESRLMVVHRDTGEIEHRVFKDIIEYFDEGDVFVTNNTKVFPARLYGNKEKTGAKIEVFLLRELNQELRLWDVLVDPARKIRVGNKLYFGDSDLVAEVIDNTTSRGRTIRFLFDGTDEEFYKTIDTLGETPILKDFIDRKVEEEDRERYQTIYAEHVGAVAAPTAGLHFTPHLLKRLEIKGVEVSPITLHIGLGTFRQVDVEDLTKHKMDSENYDIPEKTVDLVNGAIEAKKRVVAVGTTSLKTVESSVTASNKLKSSSGWTDKFIIPPYEFKIANALITNFHLPESTLLMTTAAFGGYDLIMKAYKEAVKEKYRFFSYGDAMLIL

SEQ ID NO: 66135 - protein, 407 aa, Echinicola sp.
  misc_feature (1)..(407): tr|A0A514CLQ7|A0A514CLQ7_9BACT S-adenosylmethionine:tRN A ribosyltransferase-isomerase OS=Echinicola sp. LN3S3 OX=2591634 GN=queA PE=3 SV=1
MDTTSDIKLSDYQYELPEDRIAKFPLEKRDESKLLHFEDGNVDHHRFYNLPALLPSNTLMVFNNTKVIPARLIFQRASGAKIEIFLLQPIAPSTIINETMMHTGAVTWQAMIGNLKKWKDGEVLEGKVMANGNVLTINATLENREERLVKIDWKDDNLPFAAVVEAVGEVPLPPYLNRKATNEDKPRYQTVYSLKEGAVAAPTAGLHFTDETLRKLTDAGIKTDYLTLHVGAGTFQPIKEEIVTHHPMHSEQVVVTRENIRHFLAHDGNIVAVGTTSMRSLESIYWYGVKLLNGDSKAFQIQKLYPYQEGLIKASLQESFQAILDFMNTENLDEITGSTEIFIMPGYEFRVCNGLLTNFHQPASTLILLVAAFTKGTWQKIYHEALSHDYRFLSYGDSSLLWHHKKA

SEQ ID NO: 66136 - protein, 349 aa, Echinicola strongylocentroti
  misc_feature (1)..(349): tr|A0A2Z4IFH8|A0A2Z4IFH8_9BACT S-adenosylmethionine:tRN A ribosyltransferase-isomerase OS=Echinicola strongyloc entroti OX=1795355 GN=queA PE=3 SV=1
MKLSDFKFEVPKKLISLYPSDNRDESRLMVVHRDTGKIEHRIFKDVIEYFDEGDVFVTNNTKVFPARLYGNKEKTGAKIEVFLLRELNQELRLWDVLVDPARKIRVGNKLYFGDSDLVAEVIDNTTSRGRTIRFLFDGTDEEFYKTIDALGETPILKDFIDRKVEEEDRERYQTIYAEHVGAVAAPTAGLHFTPHLLKRLEIKGVEVSPITLHIGLGTFRQVDVEDLTKHKMDSENYDIPEKTVDLVNDALDAKRRVVAVGTTSLKTVESSVTANNRLKPSSGWTDKFIIPPYDFKIANSLITNFHLPESTLLMTTAAFGGYDLIMKAYQEAIKEKYKFFSYGDAMLIL

SEQ ID NO: 66137 - protein, 407 aa, Echinicola strongylocentroti
  misc_feature (1)..(407): tr|A0A2Z4IEB0|A0A2Z4IEB0_9BACT S-adenosylmethionine:tRN A ribosyltransferase-isomerase OS=Echinicola strongyloc entroti OX=1795355 GN=queA PE=3 SV=1
MGITPDIKLSDYHYHLPEDRIAKFPLEKRDRSKLLHFEDGKIGHHHFYDLPELLPSDTLMVFNNTKVIPARLIFQRESGARIEIFLLQPIAPSTVINQIMQHTGSVTWQAMIGNSKKWKDGEILTGKVLINDRPLTITASLANRTDRQVTINWEDEQLPFAAVVEAAGEVPLPPYLNRKATSEDKPRYQTVYSKKEGAVAAPTAGLHFTDEILKTLSDQGIKTDYLTLHVGAGTFQPIKDEIVTHHPMHSEQVVVSKENIQYLLGHKGNIVAVGTTSMRSLESIYWYGVKLLNGDGKDFLIPKLYPYQQRLKKASFEESFRAIMDHMTEENLNEITGSTEIFIMPGYRFKVCNGLLTNFHQPASTLILLVAAFTKGHWQKIYSEALSHDYRFLSYGDSSLLWHHKKA

SEQ ID NO: 66138 - protein, 349 aa, Echinicola vietnamensis
  misc_feature (1)..(349): tr|L0FUI9|L0FUI9_ECHVK S-adenosylmethionine:tRNA ribosy ltransferase-isomerase OS=Echinicola vietnamensis (stra in DSM 17526 / LMG 23754 / KMM 6221) OX=926556 GN=queA PE=3 SV=1
MKLSDFKFEVPKKLISLYPSDNRDESRLMVVHRDTGEIEHRVFKDIIEYFDEGDVFVTNNTKVFPARLYGNKEKTGAKIEVFLLRELNQELRLWDVLVDPARKIRVGNKLYFGDSDLVAEVIDNTTSRGRTIRFLFDGTDEEFYKTIDALGETPILKEFIDRKVEEEDRERYQTIYAEHVGAVAAPTAGLHFTPHLLKRLEIKGVEVSPITLHIGLGTFRQVDVEDLTKHKMDSENYDIPEKTVDLVNDAIDAKKRVVAVGTTSLKTVESSVTASNRLKPSSGWTDKFIIPPYEFKIANALITNFHLPESTLLMTTAAFGGYDLIMKAYKEAVKEKYRFFSYGDAMLIL

SEQ ID NO: 66139 - protein, 425 aa, Echinicola vietnamensis
  misc_feature (1)..(425): tr|L0G548|L0G548_ECHVK S-adenosylmethionine:tRNA ribosy ltransferase-isomerase OS=Echinicola vietnamensis (stra in DSM 17526 / LMG 23754 / KMM 6221) OX=926556 GN=queA PE=3 SV=1
MVITFPLPGKSQQLRGMQMDTTAEIKLSDYQYDLPEDRIAKFPLEKRDQSKLLHYENGKIAHHRFYELPTLLPSNTLMVFNNTKVIPARLIFQRDSGAKIEVFLLQPTAPSTLINETMMHTGTVTWQAMIGNLKKWKDGEVLQGKVMANGTALTIRATLENREERRVKIDWDDDHLTFAAVVEAVGEVPLPPYLNRKATNEDKPRYQTVYSQKEGAVAAPTAGLHFTDEILKKLSDTGIQTDYLTLHVGAGTFQPIKAEIVTHHPMHSEQVVVTKENIRHFLAHDGNIVAVGTTSMRSLESIYWYGVKLLNGDSKEFQIQKLYPYQKQLKKATLKESLQAILDYMNAENLHEITGSTEIFIMPGYEFRVCNGLLTNFHQPASTLILLVAAFTKGRWQNIYHEALSHDYRFLSYGDSSLLWHHKKA

SEQ ID NO: 66140 - protein, 349 aa, Ectothiorhodosinus mongolicus
  misc_feature (1)..(349): tr|A0A1R3W633|A0A1R3W633_9GAMM S-adenosylmethionine:tRN A ribosyltransferase-isomerase OS=Ectothiorhodosinus mo ngolicus OX=233100 GN=queA PE=3 SV=1
MQLSDFVYDLPAELIAQHPPEKRGDSRLLCLEGEDGALADRHIRDLPRLLNAGDLLVVNNTSVIPARLHGVKQASGGRVEVLVERLLGPFEALAHVRASKSPAAGTQLLLEDVIEAEVTGREGDLFALCFKDSVLDLLDTHGHMPLPPYIARDDAPADRQRYQTVYAKEPGAIAAPTAGLHFDDALMQAVKNQGVEVAEVTLHVGAGTFQPVRVTDIAQHVMHSEWLRVTESVCAQVRACKARGNRVVAVGTTSVRSLETAAQSGEIMAFEGETQLFITPGYRFQVVDALLTNFHLPESTLLMLVSAFAGREQVLAAYAHAVAQRYRFFSYGDAMWLTPHKSATPQHEI

SEQ ID NO: 66141 - protein, 348 aa, Ectothiorhodospira haloalkaliphila
  misc_feature (1)..(348): tr|W8KRC8|W8KRC8_9GAMM S-adenosylmethionine:tRNA ribosy ltransferase-isomerase OS=Ectothiorhodospira haloalkali phila OX=421628 GN=queA PE=3 SV=1
MQVRDFDFFLPQELIAQAPLPDRGGARLLCLDGPTGQLADRQIRDLPELLSPDDLLVFNDTRVIPARLKGHKVETGGQVEVLVERITGRQAALAHVRASKAPGPGTRLCLEGVVEATVEGRDGDLFVLVFDAPVLDQLERHGHMPLPPYITREDTEEDRQRYQTVFAREPGAVAAPTAGLHFDDALLAAIRARGVETASVTLHVGAGTFQPVRVADTQDHVMHAEWVRVTQDTCDQVTRCRARGGRVVAVGTTSVRCLETAAAGGELIPFEGDTRLFITPGFEYRAVDAMVTNFHLPQSTLLMLVCAFGGQAAVLAAYQHAVRQQYRFFSYGDAMFITAQRGAQRDAV

SEQ ID NO: 66142 - protein, 348 aa, Ectothiorhodospira magna
  misc_feature (1)..(348): tr|A0A1H9DI53|A0A1H9DI53_9GAMM S-adenosylmethionine:tRN A ribosyltransferase-isomerase OS=Ectothiorhodospira ma gna OX=867345 GN=queA PE=3 SV=1
MQVHDFQFDLPPQLIAQAPLPERSASRLLHLDGISGALADRHVRDLPDLLQPGDLLVFNDTRVIPARLHGRKRDSGGRVEVLVERLEAKHQVLAHLRASKSPGAGVWLWLEEATEAQVLGREGDLFRLRFTDPVLEVLERHGHMPLPPYIDRPDTQDDRQRYQTVFARAPGAVAAPTAGLHFDDALLERIRARGVETASVTLHVGAGTFQPVRVQDIREHVMHAEWVQVSARTCDQVAACKARGGRVVAVGTTSVRSLESAARGGALAPFEGDTRLFIVPGYDYRVVDALVTNFHLPESTLLMLVSAFAGRDQVLAAYRHAVRERYRFFSYGDAMFMTRRPLEHPTEP

SEQ ID NO: 66143 - protein, 348 aa, Ectothiorhodospira marina
  misc_feature (1)..(348): tr|A0A1H7FN16|A0A1H7FN16_9GAMM S-adenosylmethionine:tRN A ribosyltransferase-isomerase OS=Ectothiorhodospira ma rina OX=1396821 GN=queA PE=3 SV=1
MQVSDFDFFLPQELIAQAPLPDRGGARLLCLDGPTGQLADRQIRDLPELLSPDDLLVFNDTRVIPARLKGRKVETGGQVEVLVERITGRQAALAHVRASKAPGPGTRLCLEGVVEATVEGRDGDLFVLVFDAPVLDQLEQHGHMPLPPYITREDTEEDRQRYQTVFAREPGAVAAPTAGLHFDDALLAAIRARGVETASVTLHVGAGTFQPVRVADTQDHVMHAEWVRVTQATCDQVARCRARGGRVVAVGTTSVRCLETAAAGGALAPFEGDTRLFITPGFEYRTVDAMVTNFHLPQSTLLMLVCAFGGQAAVLAAYAHAVSQGYRFFSYGDAMFMTAQRGMQHNAV

SEQ ID NO: 66144 - protein, 349 aa, Ectothiorhodospira mobilis
  misc_feature (1)..(349): tr|A0A1I4SSU1|A0A1I4SSU1_ECTMO S-adenosylmethionine:tRN A ribosyltransferase-isomerase OS=Ectothiorhodospira mo bilis OX=195064 GN=queA PE=3 SV=1
MQVSDFTYTLPPERIAQAPLPERSAARMLCLDGADASLADRHVRDLPQLLHPGDLLVFNDTRVIPARLTGHKIPSGGRVEVLLERLQGPQRALAHVRASKAPREGARLWLEEAVEAVVEGREGDLFCLRFEGGEVLEQLERHGHMPLPPYIRRQDTPEDRRRYQTVFARAPGAVAAPTAGLHFDEALLQALQERGVETASVTLHVGAGTFQPVRVQDPKDHVMHAEWVQVDAEACERVAACRARGGRVVAVGTTSVRCLETAAAGGSLAPFQGDTRLFITPGYRFRVVDALLTNFHLPESTLLMLVCAFAGREAVLSAYAHAVDQGYRFFSYGDAMFLTPCAQARGHAI

SEQ ID NO: 66145 - protein, 348 aa, Ectothiorhodospira sp.
  misc_feature (1)..(348): tr|A0A167BID1|A0A167BID1_9GAMM S-adenosylmethionine:tRN A ribosyltransferase-isomerase OS=Ectothiorhodospira sp . BSL-9 OX=1442136 GN=queA PE=3 SV=1
MQVSDFDFFLPQELIAQTPLPDRGGARLLCLDGPTGQVTDRQIRDLPELLSPDDLLVFNNTRVIPARLKGRKIETGGQVEVLVERITGRQTALAHVRASKSPGVGTRLCLEGVVEATVEGRDGDLFRLAFDGPVLDQLEQHGHMPLPPYITREDTQEDRQRYQTVFAREPGAVAAPTAGLHFDEALLEAIRARGVETASVTLHVGAGTFQPVRVADTQDHVMHAEWVRVTQATCDQVARCRARGGRVVAVGTTSVRCLETAAAGGELIPFGGDTRLFITPGFEYRAVDAMVTNFHLPQSTLLMLVCAFGGQAAVLAAYQHAVRQQYRFFSYGDAMFITAQHGAQHDAV

SEQ ID NO: 66146 - protein, 347 aa, Ectothiorhodospira sp.
  misc_feature (1)..(347): tr|H1G2U2|H1G2U2_9GAMM S-adenosylmethionine:tRNA ribosy ltransferase-isomerase OS=Ectothiorhodospira sp. PHS-1 OX=519989 GN=queA PE=3 SV=1
MQVSDFTFDLPPELIAQAPLPERSASRLLHLDGASGALADRHVRDLPDLLRPGDLLVFNDTRVIPARLHGRKRDSGGRVEVLVERLEDRHQVLAHLRASKSPGAGVWLWLEEAAEAQVLGREGDLFRLRFTDPVLEVLERHGHMPLPPYIDRPDTQDDRRRYQTVFARSPGAVAAPTAGLHFDEALLERIRARGVETASVTLHVGAGTFQPVRVQDIREHVMHAEWVQVSARTCDQVAACKARGGRVVAVGTTSVRSLESAARGGALAPFEGDTRLFIVPGYDYRVVDALVTNFHLPESTLLMLVSAFAGRDQVLAAYRHAVRERYRFFSYGDAMFMTRRPLEPTEP

SEQ ID NO: 66147 - protein, 349 aa, Ectothiorhodospiraceae bacterium
  misc_feature (1)..(349): tr|A0A2A4XSE3|A0A2A4XSE3_9GAMM S-adenosylmethionine:tRN A ribosyltransferase-isomerase OS=Ectothiorhodospiracea e bacterium OX=2026737 GN=queA PE=3 SV=1
MRRSDFNFELPPELIAQHPLAERTASRLLTLLTGEMPCDRQFQDIADLLRPGDLLVMNNTRVIPARLFGHKATGGKVEVLVERVLDEHRVLAHVRASKSPKPGMVLTLEGEVSATVEGREGDLFVLSFAGDTTVVSLLEEHGHMPLPPYIDRADQPADRERYQTVFAERQGAVAAPTAGLHFDQPLLDALAEKGIESTFVTLHVGAGTFQPVRAEMIADHHMHAETIEVSAQTVAAVVATRARGGRVVAVGTTSVRALESAARSGELTPFQGDTDIFITPGYQFQVVDALLTNFHLSESTLLMLVCAFAGYDEVMAAYRHAVEQQYRFFSYGDAMFLTRQTHAAQSFNR

SEQ ID NO: 66148 - protein, 344 aa, Ectothiorhodospiraceae bacterium
  misc_feature (1)..(344): tr|A0A2E0UGX1|A0A2E0UGX1_9GAMM S-adenosylmethionine:tRN A ribosyltransferase-isomerase OS=Ectothiorhodospiracea e bacterium OX=2026737 GN=queA PE=3 SV=1
MKLSDFDYNYPKTLIAKYPAEPRDSARLMVVDRNTGDIEHRRFTDIHEYFRKGDCLVLNDTKVFPARLFGRKEKTNAKIEVFLLRELSKDEHIWDVIVDPARKVRIGNKIYFSDNLMCEVIDNTTSRGRTVKFNYEGDFFKIIEDVGNTPLPPYIKRDAEEEDKARYQTVFAENIGAVAAPTAGLHFTKPLLSRLKRKGVSVTSLLLHIGLGTFRPVEVEDLTKHKMDSEYYEIPPEACMSVNKAKDAKKNIFVCGTSTVRAAESSVTTMRKLTPARGWTDKFIFPPYDFKVTDKLITNFHMPKTTLLMMVAAFMDYDLMMKAYKKAVKERYRLFSYGDAMIIL

SEQ ID NO: 66149 - protein, 351 aa, Edaphobacillus lindanitolerans
  misc_feature (1)..(351): tr|A0A1U7PQ69|A0A1U7PQ69_9BACI S-adenosylmethionine:tRN A ribosyltransferase-isomerase OS=Edaphobacillus lindan itolerans OX=550447 GN=queA PE=3 SV=1
MNIEDFDFDLPEELIAQTPLLDRTGSRLMVVDRMTGGVEDRQFPDILDYLEPGDCLVLNDTKVLPARLLGTKEETGATIEVLLLTDKGGDEWETLAKPAKRVRPGTVIEFGDGLLKAECTGVSDHGGRTFKFTYDGIFYEVLDRLGEMPLPPYIHEKLDDQDRYQTVFAKERGSAAAPTAGLHFTEELLEKIQDKGIELVFITLHVGLGTFRPVSVDSIEEHEMHSEYYSVSEEAASAIRRVKERGGKVISVGTTSTRTLETIASENDGEIVAAGGWTSIFIYPGYEYKAIDGLITNFHLPKSTLIMLVSALADRETILSAYRHAVEERYRFFSFGDAMFIKPPNRKGRTK

SEQ ID NO: 66150 - protein, 366 aa, Edaphobacter aggregans
  misc_feature (1)..(366): tr|A0A428MHB9|A0A428MHB9_9BACT S-adenosylmethionine:tRN A ribosyltransferase-isomerase OS=Edaphobacter aggregan s OX=570835 GN=queA PE=3 SV=1
MRVADFHFDLPDELIAQSPPPVRGTSRMLVLDREAAEYRDDFFRNLPHLLRSGDLLILNDSRVIPARLFATRARGLHTQPSSPDPTGRIEVLLTEHIGGEDWSALVRPSRKVQPGERLHFAALNESEPLLEAEILAAGEFGERTLRFNPVQDFRAILDKIGHMPLPPYIHRDDSEEDKDRYQTVFSHEPGSAAAPTAGLHFTPEILAELRQRGVQIETITLHVGLGTFQPVRAENVEDIRLHAEHYTLPAATAEAVNAALREGRRIIAAGTTTTRTLEHCAQHSLEFEPHAGVRLEAHSGSTSIFISPGYRFRVVSGLLTNFHLPQSTLLMLVSAFAGREAVLAAYAHAVRERYRFFSYGDCMLIL

SEQ ID NO: 66151 - protein, 367 aa, Edaphobacter dinghuensis
  misc_feature (1)..(367): tr|A0A495BWV2|A0A495BWV2_9BACT S-adenosylmethionine:tRN A ribosyltransferase-isomerase OS=Edaphobacter dinghuen sis OX=1560005 GN=queA PE=3 SV=1
MRVTDFHFDLPEELIAQSPPPVRGTSRMLRLDRRTGEYSDDFFRNLPEILRPGDLLILNDSRVIPARLYATRAGLHTQQNSPHPSGRIEVLLTQHLGGEDWSALVRPSRKVQPGEHLHFYASGETEPLLAAEILTAGEFGERTLRFAATENFQSILEKIGHMPLPPYIHRSDTSEDRDRYQTVFSHEPGSAAAPTAGLHFTPEILAQLKQNGIQIETITLHVGLGTFQPVRAENLADIHLHAEHYTLPAATATAINAALAEGRRIVAAGTTTTRTLEHCAQLANTDPFEPHAGLRLHPHSGSTEIFISPGHTFRVVSGLLTNFHLPQSTLLMLVSAFAGRESVLAAYAHAVRERYRFFSYGDCMLLL

SEQ ID NO: 66152 - protein, 373 aa, Edaphobacter modestus
  misc_feature (1)..(373): tr|A0A4Q7YXS2|A0A4Q7YXS2_9BACT S-adenosylmethionine:tRN A ribosyltransferase-isomerase OS=Edaphobacter modestus OX=388466 GN=queA PE=3 SV=1
MRVSDFHFDLPEELIAQSPPPVRGSSRMLVLDRRAGEYRDNFFRNLPELLQPGDLLILNDSRVIPARLYATRARGPQTQAGSPDPTGRIEVLLTQQLSQHEWTALVRPGRKVQPGERLHFAASPTSENPAPTPLLEAEVIAAADFGERTLRFAPTPEFRAILDRIGHMPLPPYIHRSDTPEDRDRYQTVFSHEPGSAAAPTAGLHFTPEILDQLRARGVQTETLTLHVGLGTFQPVRAENVEDIRLHAEHYTLPPSTADAINAALREKRRIIAAGTTTTRTLEHCAHIASTDAFEPHAGLRLHPHSGETSIFISPGYQFRVVSGLLTNFHLPQSTLLMLVSAFAGRESVFAAYSHAVRERYRFFSYGDCMLIL

SEQ ID NO: 66153 - protein, 357 aa, Edwardsiella anguillarum
  misc_feature (1)..(357): tr|A0A076LS08|A0A076LS08_9GAMM S-adenosylmethionine:tRN A ribosyltransferase-isomerase OS=Edwardsiella anguilla rum ET080813 OX=667120 GN=queA PE=3 SV=1
MRVSDFTFELPDELIARYPQEQRSGCRLLSLDGPTGAREHGVFTDIVDKLNPGDLLVFNNTRVIPARLFGRKASGGKVEVLVERVLDRARVLAHVRASKAPKPGAELLLGDNEDIRATMLARHDALFELGFDDPRDVLTILNAAGHMPLPPYIDRPDEEADRELYQTVYSSRPGAVAAPTAGLHFDQPLLDKLRDKGVEMAFVTLHVGAGTFQPVRVESIEDHIMHSEYAEVPQEVVDAVLACKARGNRVIAVGTTSVRSLESAAAASKQALIAPFFDDTQIFIYPGYHYQVIDALITNFHLPESTLIMLVSAFAGYRHTLDAYRDAVARQYRFFSYGDAMYITRNPQAEQEQVVSA

SEQ ID NO: 66154 - protein, 357 aa, Edwardsiella hoshinae
  misc_feature (1)..(357): tr|A0A376DJ08|A0A376DJ08_9GAMM S-adenosylmethionine:tRN A ribosyltransferase-isomerase OS=Edwardsiella hoshinae OX=93378 GN=queA PE=3 SV=1
MRVSDFTFELPDELIARYPQAQRSACRLLSLDGPTGKLEHGVFTDIVDKLQPGDLLVFNNTRVIPARLFGRKASGGKIEVLVERVLDRARVLAHVRASKAPKPGAELLLGDNEEIRATMLARHDTLFELGFEDERDVLTILNAVGHMPLPPYIDRPDEHADRELYQTVYSTRPGAVAAPTAGLHFDQPLLDRLRAKGVEMAFVTLHVGAGTFQPVRVESIEDHIMHSEYAEVPQEVVDAVLACKARGNRVIAVGTTSVRSLESAAAASQSALIAPFFDDTQIFIYPGYHYQVIDALITNFHLPESTLIMLVSAFAGYRHTLNAYHEAVAQQYRFFSYGDAMYITRNPQAEQECITSA

SEQ ID NO: 66155 - protein, 357 aa, Edwardsiella ictaluri
  misc_feature (1)..(357): sp|C5BCF6|QUEA_EDWI9 S-adenosylmethionine:tRNA ribosylt ransferase-isomerase OS=Edwardsiella ictaluri (strain 9 3-146) OX=634503 GN=queA PE=3 SV=1
MRVSDFTFELPDELIARYPQEQRSGCRLLSLDGPTGARQHGVFTDIVDKLNPGDLLVFNNTRVIPARLFGRKASGGKVEVLVERVLDRTRVLAHVRASKAPKPGAGLLLGDNEDIRATMLARHDALFELGFDDPRDVLTILNAAGHMPLPPYIDRPDEEADRELYQTVYSSRPGAVAAPTAGLHFDQPLLDRLRDKGVEMAFVTLHVGAGTFQPVRVESIEDHVMHSEYAEVPQEVVDAVLACKARGNRVIAVGTTSVRSLESAAAANKQALIAPFFDDTQIFIYPGYHYQVIDALITNFHLPESTLIMLVSAFAGYRHTLDAYRDAVVQQYRFFSYGDAMYITRNPQAEQEQVVSA

SEQ ID NO: 66156 - protein, 357 aa, Edwardsiella piscicida; identical to SEQ ID NO: 66153
  misc_feature (1)..(357): tr|A0A034T5I0|A0A034T5I0_9GAMM S-adenosylmethionine:tRN A ribosyltransferase-isomerase OS=Edwardsiella piscicid a OX=1263550 GN=queA PE=3 SV=1

SEQ ID NO: 66157 - protein, 357 aa, Edwardsiella piscicida
  misc_feature (1)..(357): tr|A0A411GZZ8|A0A411GZZ8_9GAMM S-adenosylmethionine:tRN A ribosyltransferase-isomerase OS=Edwardsiella piscicid a OX=1263550 GN=queA PE=3 SV=1
MRVSDFTFELPDELIARYPQEQRSGCRLLSLDGPTGAREHGVFTDIVDKLNPGDLLVFNNTRVIPARLFGRKTSGGKVEVLVERVLDRARVLAHVRASKAPKPGAELLLGDNEDIRATMLARHDALFELGFDDPRDVLAILNAAGHMPLPPYIDRPDDEADRELYQTVYSSRPGAVAAPTAGLHFDQPLLDRLRDKGIEMAFVTLHVGAGTFQPVRVESIEDHIMHSEYAEVPQEVVDAVLACKARGNRVIAVGTTSVRSLESAAAASKQALIAPFFDDTQIFIYPGYHYQVIDALITNFHLPESTLIMLVSAFAGYRHTLDAYRDAVARQYRFFSYGDAMYITRNPQAEQEQVVSA

SEQ ID NO: 66158 - protein, 357 aa, Edwardsiella tarda; identical to SEQ ID NO: 66157
  misc_feature (1)..(357): tr|A0A0H3DP13|A0A0H3DP13_EDWTF S-adenosylmethionine:tRN A ribosyltransferase-isomerase OS=Edwardsiella tarda (s train FL6-60) OX=718251 GN=queA PE=3 SV=1

SEQ ID NO: 66159 - protein, 357 aa, Edwardsiella tarda
  misc_feature (1)..(357): tr|A0A2X1IGH9|A0A2X1IGH9_EDWTA S-adenosylmethionine:tRN A ribosyltransferase-isomerase OS=Edwardsiella tarda OX =636 GN=queA PE=3 SV=1
MRVSDFTFELPDELIARYPQAQRSACRLLSLDGPTGKREHGVFTDIVDKLQPGDLLVFNNTRVIPARLFGRKESGGRIEVLVERVLDRARVLAHVRASKAPKPGAALLLGDNEEIRATMLARHDTLFELGFEDERDVLTILNAAGHMPLPPYIDRPDDEADRELYQTVYSTRPGAVAAPTAGLHFDQPLLDRLRAKGVEMAFVTLHVGAGTFQPVRVESIEDHVMHSEYAEVPQAVVDAVLACKARGNRVIAVGTTSVRSLESAAAASQSALIAPFFDDTQIFIYPGYHYQVIDALITNFHLPESTLIMLVSAFAGYRHTLDAYHEAVAQQYRFFSYGDAMYITRNPQSEQETIVSA

SEQ ID NO: 66160 - protein, 346 aa, Effusibacillus lacus
  misc_feature (1)..(346): tr|A0A292YNF5|A0A292YNF5_9BACL S-adenosylmethionine:tRN A ribosyltransferase-isomerase OS=Effusibacillus lacus OX=1348429 GN=queA PE=3 SV=1
MRVEDFDFELPEELIAQHPLQERTGSRLLVLGRSSGRIEHRMFTELLDYLQPEDCLILNDTRVIPARLYGRKPDTGGQVEFLLLKERGPDLWEVLVRPGKRLKPGTTVEFGDGMLRADILETTEEGGRIVRFDYEGLFYEVLDRFGEMPLPPYITERLEDAERYQTVFSRNKGSAAAPTAGLHFTGEFLDKVRANGVRTGFVTLHVGLGTFRPVSTETVEEHKMHAEYYEFPQATADLIRDTRQRGGRVIAVGTTACRTLETVGSKMAALGEDSLREDRGWTDIFIYPGYSFKVVDGLLTNFHLPKSTLIMLVSALAGRDNVMQAYEEAVRERYRFFSFGDAMLII

SEQ ID NO: 66161 - protein, 359 aa, Eggerthella lenta
  misc_feature (1)..(359): tr|A0A369NWH5|A0A369NWH5_EGGLN S-adenosylmethionine:tRN A ribosyltransferase-isomerase OS=Eggerthella lenta OX= 84112 GN=queA PE=3 SV=1
MKTSDFDYDLPPELIAQEPAAERDGCRLLVMNRVTGEVEDRVFRDIVDYLTPNDLLVANETRVMPARLLGAKRGTGGAAEVFLLRQHGTPTENRSALWEVLVRPGKRLKPGTGAVVDFVDAVGEVALSAEIVDWLPDAQKGERLARLTTPLPSLDEALHAVGHTPLPPYIKDYAGDEELYQTVYSRRESSAAAPTAGLHFTPALIERLREQGVRWETVELEVGLDTFRIVDEDDPTQHAIHTEYYTVPERTVEAIAETRERGGRVVAVGTTSVRSLESAWDDGTGAVTPRDRETTSLYLLPGSQFHVVDALITNFHVPRSTLMMLVSAFSTREHIMAAYRHAIEERYRMLSFGDAMFIC

SEQ ID NO: 66162 - protein, 361 aa, Eggerthella lenta
  misc_feature (1)..(361): tr|A0A5C5C7J5|A0A5C5C7J5_EGGLN S-adenosylmethionine:tRN A ribosyltransferase-isomerase OS=Eggerthella lenta OX= 84112 GN=queA PE=3 SV=1
MKTSDFDYELPPELIAQEPAAERDGCRLLVMDRATGELEDRIFRDIVDYLRPDDLLVVNETRVMPARLLGAKRGTGGAAEVFLLREVHDREPHTNHSALWEVLVRPGKRLKPGTGAVVDFVDAQGDVALSAEIVDWADGAQKGERLARLTTTLPSLDEALHAVGHTPLPPYIKNYAGDEELYQTVYSRRESSAAAPTAGLHFTPALIERLRDQGVRWETVELEVGLDTFRIVDEDDPQQHVIHTEYYTVPQRTVDAIAETRERGGRVVAVGTTSVRSLESAWNPEAGAVTARDRETTSLYLLPGSQFHVVDALVTNFHVPRSTLMMLVSAFSSREHIMAAYRHAIEQRYRLLSFGDAMFIC

SEQ ID NO: 66163 - protein, 361 aa, Eggerthella sinensis
  misc_feature (1)..(361): tr|A0A3N0IT27|A0A3N0IT27_9ACTN S-adenosylmethionine:tRN A ribosyltransferase-isomerase OS=Eggerthella sinensis OX=242230 GN=queA PE=3 SV=1
MKTSDFDYDLPPELIAQEPAAERDGCRLLVMDRATGALEDRIFRDIADYLRPNDLLIANETRVMPARLLGAKRGTGGAAEVFLLREIHDREPRTNQSALWEVLVRPGKRLKPGTGAVVDFTNAEGTVALSAEIVDWADGAQKGERLARLTTSLPSLDEALHAVGHTPLPPYIKNYAGDEELYQTVYSRRESSAAAPTAGLHFTPTLIERLLDAGVRWETVELEVGLDTFRIVDEDDPEQHTIHTEYYTVPQRTVDAIAETRERGGRVIAVGTTSVRSLESAWDAEAGAVTPRDRETTSLYLLPGSEFHVVDALVTNFHVPRSTLMMLVSAFSTREHIMAAYEHAVQERYRLLSFGDAMFIC

SEQ ID NO: 66164 - protein, 630 aa, Eggerthella sp.
  misc_feature (1)..(630): tr|R5FJU8|R5FJU8_9ACTN Multifunctional fusion protein O S=Eggerthella sp. CAG:1427 OX=1262874 GN=queA PE=3 SV=1
MKLLLHACCGPCSLEPVRLLQAAGHDITIAYMNSNIAPADEYQHRLSTLLEWARSQGIPVIEGPYEPDRWQEAVRASWHPDPARLATRLADSAGNASSDTDAACPGADPEFDTGIDPEFDPARDPKFAHLYSDRDNRCRACYRLRLEELARYAHEHGFDAIGTTLSVSPYQYTSIIKEELERAAAHYDGLTALFEDFRPYYPNATKRSRDLGMYRQNYCGCAYSNKEAAAERAARKAARKKKKEEERRAKLQALTTDDFDYELPEELIAQEPAPIRDECRLLVMKRDTGTLEDKIFKDIIDYLQPGDLLVANETRVMPARLIGHKRGTGGAAEVFLLREAKQELERTNQSATWEALVRPGKRLKPGAVVDFVSSSDPTSSPDPTSSSDPASSSTENVVLSAEVIDWVEGAQKGERLVRLSTALPSLDEALHAVGHTPLPPYIKNYAGDEELYQTVYSHEERSAAAPTAGLHFTPELIEDIKAKGIGWETVHLEVGLDTFRIVEEDNPRDHQIHTERYTVPQRTVDAIKRTKEQGGRVIAVGTTSVRSLESAWDAEQGLIARDREATSLYILPGYEFKVVDALITNFHVPRSTLMMLVSAFSTRDNIMKAYRHAIKRKYRMLSFGDAMFIR

SEQ ID NO: 66165 - protein, 359 aa, Eggerthella sp.
  misc_feature (1)..(359): tr|F7UVL4|F7UVL4_EEGSY S-adenosylmethionine:tRNA ribosy ltransferase-isomerase OS=Eggerthella sp. (strain YY791 8) OX=502558 GN=queA PE=3 SV=1
MLTSDFDYNLPPELIAQEPALDRDGCRMLVMDRETGALEDRIFRDIVEYLHPGDLLVANETRVMPARLLGAKRGTGGAAEVFLLRQHGTPLENKSALWEVLVRPGKRLKPGTGAVVDFTDADGNVALSAEIVDWVDNAQKGERLARLSTTLPSLDEALHAVGHTPLPPYIKDYAGDEELYQTVYSRRESSAAAPTAGLHFTPELIERLRNQGVGWETVELEVGLDTFRIVDEDDPTQHVIHTEYYTVPQRTADAIAETRERGGRVVAVGTTSVRSLESAWDAEAAAVTPRDRETTSLYLLPGSEFHVVDALVTNFHVPRSTLMMLVSAFSSRERIMAAYAHAIEERYRMLSFGDAMFIC

SEQ ID NO: 66166 - protein, 416 aa, Eggerthellales bacterium
  misc_feature (1)..(416): tr|A0A316PQS9|A0A316PQS9_9ACTN S-adenosylmethionine:tRN A ribosyltransferase-isomerase OS=Eggerthellales bacter ium OX=2137879 GN=queA PE=3 SV=1
MYRQNFCGCHWSNVEAAEERVERARQRKQKKAEEKQAKLRSLTTSDFDYDLPQELIAQTPHPTRDGCKMLVMKRENGSLQDRIFRDIYDYLKPGDLLVANETRVIPARLLGNKHETGGAAEVLLLRERFDIEEKTSTSAVWEALVKPGRRLKPGAIIDFTREQNDSLSASSNDPASTSDSPVIMQVEVLDWIEDAQKGERLVRLTTPLDSLDEALHQIGHTPLPPYIKNYQGDEELYQTVFSREEKSAAAPTAGLHFTPELIERLKEKGVGFETVHLEVGLDTFRVVETEDPHEHHMHTEYYSVPQKTVDAIKRTKENGGRVIAVGTTSVRSLESAWDNEASELVARERQTTNLFIFPGYTFNVVDALITNFHVPRSTLMMLVSAFSSRDNIMKAYRHAIKRKYRLLSFGDAMFIY

SEQ ID NO: 66167 - protein, 344 aa, Eggerthia catenaformis
  misc_feature (1)..(344): tr|A0A251WSU1|A0A251WSU1_9FIRM S-adenosylmethionine:tRN A ribosyltransferase-isomerase OS=Eggerthia catenaformi s OX=31973 GN=queA PE=3 SV=1
MDINLFDYYLPEELIAQTPLLKRDTSRLMVLNKKTQTIEHKHFYDIIDYLKPGDILVRNNTKVIPARLFGTKEMTHAHVEVLLLKNLHDDVWECLCGNAKTIKHDTIISFGDGRLKAQCIEVKDEGIRVLEMIYEGIFYEILDQLGIMPLPPYIKEKLNDPYRYNTVYAKIEGSAAAPTAGLHFTKELFSKCRDKGIEVLDVTLHVGLGTFRPVKTDNILEHHMHSEYYEIDEKTADRLNKAKDNNHRIIAIGTTSCRTLEANYSKYGCFKAVHENTDIFIYPGYTFKAIDCLITNFHLPKSTLIMLVSALSSRDYILKAYQQAVKEKYRFFSFGDAMFINNGE

SEQ ID NO: 66168 - protein, 350 aa, Eggerthia catenaformis
  misc_feature (1)..(350): tr|M2NGQ6|M2NGQ6_9FIRM S-adenosylmethionine:tRNA ribosy ltransferase-isomerase OS=Eggerthia catenaformis OT 569 = DSM 20559 OX=999415 GN=queA PE=3 SV=1
MKGPFNMDINLFDYYLPEELIAQTPLLKRDTSRLMVLNKKTQTIEHKHFYDIIDYLKPGDILVRNNTKVIPARLFGTKEMTHAHVEVLLLKNLHDDVWECLCGNAKTIKHDTIISFGDGRLKAQCIEVKDEGIRVLEMIYEGIFYEVLDQLGIMPLPPYIKEKLNDPDRYNTVYAKIEGSAAAPTAGLHFTKELFSKCRDKGIEVLDVTLHVGLGTFRPVKTDNILEHHMHSEYYEIDEKTADRLNKAKDNNHRIIAIGTTSCRTLEANYSKYGCFKAVHENTDIFIYPGYTFKAIDCLITNFHLPKSTLIMLVSALSSRDYILKAYQQAVKEKYRFFSFGDAMFIDNGE

SEQ ID NO: 66169 - protein, 343 aa, Eikenella corrodens
  misc_feature (1)..(343): tr|A0A1A9RTP3|A0A1A9RTP3_EIKCO S-adenosylmethionine:tRN A ribosyltransferase-isomerase OS=Eikenella corrodens O X=539 GN=queA PE=3 SV=1
MQLADFDFHLPEHLIAQQPPERRGSSRLLDARPGRPLCDRLFAELPNLLEAGDLLVFNNTKVMKARLFGHKASGGRIEALIERVLDEHCALAHIRSSKSPKPGSLLEFDGGIRAQMEEREGELFKLRFSGSLNVYQILEQTGRLPLPPYIERAADAADDERYQTIYAKHQGAVAAPTAGLHFTPELLNQLQANGIHRAEITLHVGAGTFQPVRSENIVEHKMHKEWYNIPTETVEAIAETKANGKRVWAVGTTSMRSLEAAAQNSHLQAGEGDTDIFITPGYRFQVADGLITNFHLPKSTLLMLVSAFSGVEHIRTAYRHAIEQQYRFFSYGDAMLLTRAEAT

SEQ ID NO: 66170 - protein, 343 aa, Eikenella corrodens
  misc_feature (1)..(343): tr|C0DTW1|C0DTW1_EIKCO S-adenosylmethionine:tRNA ribosy ltransferase-isomerase OS=Eikenella corrodens ATCC 2383 4 OX=546274 GN=queA PE=3 SV=1
MQLADFDFHLPEHLIAQQPPEQRGSSRLLDARSGDLLCDRLFAELPNLLEAGDLLVFNNTKVMKARLFGHKASGGRIEALIERVLDEHCALAHIRSSKSPKPGSLLEFDGGIRAQMEEREGELFKLRFSGSLNVYQILEQTGRLPLPPYIERAADAADDERYQTIYAKHQGAVAAPTAGLHFTPELLNQLQANGIHRAEITLHVGAGTFQPVRSENIVEHKMHKEWYSIPTETVEAIAETKANGKRVWAVGTTSMRSLEAAAQNSHLQAGEGDTDIFITPGYRFQVADGLITNFHLPKSTLLMLVSAFSGVEHIRAAYRHAIEQQYRFFSYGDAMLLTRAEAT

SEQ ID NO: 66171 - protein, 343 aa, Eikenella exigua
  misc_feature (1)..(343): tr|A0A5B9BVE7|A0A5B9BVE7_9NEIS S-adenosylmethionine:tRN A ribosyltransferase-isomerase OS=Eikenella exigua OX=2 528037 GN=queA PE=3 SV=1
MQLTDFDFHLPEHLIAQQPPEQRGSSRLLDARPGRSLCDLLFAELPNLLEVGDLLVFNNTRVMKARLFGHKASGGRIEALIERVLDEHCALAHIRSSKSPKPGSLLEFDGSIQAQMEEREGELFKLRFSGSLNVYQILEQTGRLPLPPYIERAADAADDERYQTVYAKHQGAVAAPTAGLHFTPELLAGLQAKGIRRAEVTLHVGAGTFQPVRSKNIAEHKMHKEWYSIPAETVEAIAETKANGKRVWAVGTTSMRSLEAAAQSGHLQAGEGDTDIFITPGYRFQVADGLITNFHLPKSTLLMLVSAFSGVEHIRAAYRHAIEQQYRFFSYGDAMLLTRSEAS

SEQ ID NO: 66172 - protein, 343 aa, Eikenella sp.
  misc_feature (1)..(343): tr|A0A1A9S0H4|A0A1A9S0H4_9NEIS S-adenosylmethionine:tRN A ribosyltransferase-isomerase OS=Eikenella sp. NML03-A -027 OX=1795828 GN=queA PE=3 SV=1
MQLADFDFHLPEHLIAQQPPEQRGSSRLLDARPGRSLCDRLFAELPNLLEVGDLLVFNNTKVMKARLFGHKASGGRIEALIERVLDKHCALAHIRSSKSPKPGSLLEFDGSIQAQMEEREGELFKLRFSGSLNVYQILEQTGRLPLPPYIERAADAADDERYQTVYAKHQGAIAAPTAGLHFTPELLAGLQANGIRRAEITLHVGAGTFQPVRSKNIAEHKMHKEWYSIPAETVETIAETKANGKRVWAVGTTSMRSLEAAAQSGHLQAGKGDTDIFITPGYRFQVADGLITNFHLPKSTLLMLVSAFSGVEHIRAAYRHAIEQQYRFFSYGDAMLLTRSEAS

SEQ ID NO: 66173 - protein, 343 aa, Eikenella sp.
  misc_feature (1)..(343): tr|A0A1F0F8G7|A0A1F0F8G7_9NEIS S-adenosylmethionine:tRN A ribosyltransferase-isomerase OS=Eikenella sp. HMSC073 A11 OX=1739535 GN=queA PE=3 SV=1
MQLADFDFHLPEHLIAQQPPERRGSSRLLDARPGRPLCDRLFAELPNLLEAGDLLVFNNTKVMKARLFGHKASGGRIEALIERVLDEHCALAHIRSSKSPKPGSLLEFDGGILAQMEEREGELFKLRFSGSLNVYQILEQTGRLPLPPYIERAADAADDERYQTIYAKHQGAVAAPTAGLHFTPELLNQLQANGIRRTEVTLHVGAGTFQPVRSENIAEHKMHKEWYSIPAETVEAIKETKANGKRVWAVGTTSMRSLEAAAQNSHLQAGEGDTDIFITPGYRFQVADGLITNFHLPKSTLLMLVSAFSGVEHIRTAYRHAIEQQYRFFSYGDAMLLTRAEAT

SEQ ID NO: 66174 - protein, 362 aa, Eilatimonas milleporae
  misc_feature (1)..(362): tr|A0A3M0CPJ0|A0A3M0CPJ0_9PROT S-adenosylmethionine:tRN A ribosyltransferase-isomerase OS=Eilatimonas millepora e OX=911205 GN=queA PE=3 SV=1
MDVTLFDFDLPEDRIALRPARPRDSARMLVVRPDLDGDAALAHATARDLPDFLNPGDVLVFNDTRVIPARLHGRRGEAGVEVTLHQHVGGTSWKVFARPARKCRVGDRLVFGELAASVTAQGDGGERTLAFDVAEEDFAAALEQAGIMPLPPYIASKRAVDALDEEDYQTAFADRDGSVAAPTAGLHFTDGLLAALDARGVRRQGVTLHVGAGTFLPVKATDTRDHKMHSEWGEVSAEAAAWINAARAAGGRIVAVGTTSMRLLESAVDENGILHPFDGETDIFITPGFRFRAVDVLMTNFHLPKSTLFMLVSAFSGLDMMKRAYGAAVEKGYRFYSYGDASLLHRPTAGVTDGSEDGADKS

SEQ ID NO: 66175 - protein, 341 aa, Eisenbergiella massiliensis
  misc_feature (1)..(341): tr|A0A3E3IKG5|A0A3E3IKG5_9FIRM S-adenosylmethionine:tRN A ribosyltransferase-isomerase OS=Eisenbergiella massil iensis OX=1720294 GN=queA PE=3 SV=1
MKTSDFYYELPPELIAQDPLEDRSSSRLMVLDKETGEVSHHVFKEIGSFLEPGDCLVLNNTKVIPARLMGVREETGGAIEVLLLKRRENDIWETLVKPGKKARPGTKLVFGDGLLHAEVLEVVEEGNRLIQFHYEGIWEEVLDRLGEMPLPPYITHKLQDKNRYQTVYARYEGSAAAPTAGLHFTQELLKELEEKGIDIAYVTLHVGLGTFRPVKVENLQEHHMHSEYYQVTREAADKINRAKAAGHRVVCVGTTSCRTVESACDENGFLQECCDNTEIFIYPGYRFKVLDALITNFHLPESTLVMLVSALAGREHVLAAYEEAVKEKYRFFSFGDAMLIK

SEQ ID NO: 66176 - protein, 341 aa, Eisenbergiella massiliensis
  misc_feature (1)..(341): tr|A0A3E3I0J3|A0A3E3I0J3_9FIRM S-adenosylmethionine:tRN A ribosyltransferase-isomerase OS=Eisenbergiella massil iensis OX=1720294 GN=queA PE=3 SV=1
MKTSDFYYELPPELIAQDPLEDRSSSRLMVLDKETGEVSHHVFKEIGSFLEPGDCLVLNNTKVIPARLMGVREETGGAIEVLLLKRRENDIWETLVKPGKKARPGTKVVFGDGLLHAEVLEVVEEGNRLIQFHYEGIWEEVLDRLGEMPLPPYITHKLQDKNRYQTVYARYEGSAAAPTAGLHFTQELLKELEEKGIDIAYVTLHVGLGTFRPVKVENLQEHHMHSEYYQVTREAADKINRAKAAGHRVVCVGTTSCRTVESACDENGLLQECCDNTEIFIYPGYRFKVLDALITNFHLPESTLVMLVSALAGREHVLAAYEEAVKEKYRFFSFGDAMLIK

SEQ ID NO: 66177 - protein, 344 aa, Eisenbergiella sp.
  misc_feature (1)..(344): tr|A0A416HBH1|A0A416HBH1_9FIRM S-adenosylmethionine:tRN A ribosyltransferase-isomerase OS=Eisenbergiella sp. OF 01-20 OX=2292348 GN=queA PE=3 SV=1
MEELRTSDFYYELPPELIAQDPLEDRSSSRLMVLDKGTGQVSHHVFREIGDYLEPGDCLVLNNTKVIPARLMGIREETGGTVEVLLLKRRDNDIWETLVKPGKKARPGTKLVFGEGLLHAEVLDVVEEGNRLIRFQYQGIWEEVLDQLGEMPLPPYITHKLQDKNRYQTVYAKYEGSAAAPTAGLHFTRDLLKELEGKGVDTAYVTLHVGLGTFRPVKVENLKEHHMHSEYYQVTREAADKINKAKENGHRVICVGTTSCRTVESACDENGHMEECCDNTEIFIYPGYHFKVLDALITNFHLPESTLVMLVSALAGREQVLAAYEEAVKERYRFFSFGDAMLIQ

SEQ ID NO: 66178 - protein, 344 aa, Eisenbergiella tayi
  misc_feature (1)..(344): tr|A0A1E3AC87|A0A1E3AC87_9FIRM S-adenosylmethionine:tRN A ribosyltransferase-isomerase OS=Eisenbergiella tayi O X=1432052 GN=queA PE=3 SV=1
MEELKTSDFYYDLPPELIAQDPLEDRSSSRLMVLDKETGEVSHHVFREIGNYLEPGDCLVLNNTKVIPARLMGIREETGGAVEVLLLKRRENDIWETLVKPGKKARPGTKLVFGGGLLHARVLEVVEEGNRLIQFQYQGIWEEVLDQLGEMPLPPYITHKLQDKNRYQTVYAKYEGSAAAPTAGLHFTTELLQELEQKGVDIAYVTLHVGLGTFRPVKVDNLKEHHMHSEYYQVTREAADKINKAKENGHRVVCVGTTSCRTVESACDENGHMEECCDNTEIFIYPGYRFKVLDALITNFHLPESTLVMLVSALAGREHVLAAYEEAVKEKYRFFSFGDAMLIK

SEQ ID NO: 66179 - protein, 344 aa, Eisenbergiella tayi
  misc_feature (1)..(344): tr|A0A1E3A0E2|A0A1E3A0E2_9FIRM S-adenosylmethionine:tRN A ribosyltransferase-isomerase OS=Eisenbergiella tayi O X=1432052 GN=queA PE=3 SV=1
MEELKTSDFYYDLPPELIAQDPLEDRSSSRLMVLDKETGEVSHHVFREIGNYLEPGDCLVLNNTKVIPARLMGIREETGGAVEVLLLKRRENDIWETLVKPGKKARPGTKLVFGNGLLHARVLEVVEEGNRLIQFQYQGIWEEVLDQLGEMPLPPYITHKLQDKNRYQTVYAKYEGSAAAPTAGLHFTTELLQELEQKGVDIAYVTLHVGLGTFRPVKVDNLKEHHMHSEYYQVTREAADKINKAKENGHRVVCVGTTSCRTVESACDENGHMEECCDNTEIFIYPGYRFKVLDALITNFHLPESTLVMLVSALAGREHVLAAYEEAVKEKYRFFSFGDAMLIK

SEQ ID NO: 66180 - protein, 386 aa, Ekhidna lutea
  misc_feature (1)..(386): tr|A0A239K5B1|A0A239K5B1_9BACT S-adenosylmethionine:tRN A ribosyltransferase-isomerase OS=Ekhidna lutea OX=4476 79 GN=queA PE=3 SV=1
MDLKLDDFLYELPDDRIAKHPPETRGGSRLLVYKQGEISHHEFMNIPSLLPDESLLVFNDTKVIPARIILHKESGARIEVFLLEPLTPSKVHEEVMNTKKECSWKCMIGNAKKWKIGTSLHLEDLSLNAIRTAHDEVTFHWNNSLTFSDLLTEIGKIPLPPYIDREVEEFDQERYQTVYSRMKGAVAAPTAGLHFTNEIIETITKKRIKTDYLTLHVSAGTFQPIKNANIAEHPMHNEQIWVSRENVENLLLAKKVISVGTTSMRTLESLYWYGVKLKSGDSEFFIDKKDAYNLKPIEREEALQYVLEEMKRRNVERIGGQTEIFIYPGYKFQICDGLVTNYHLPGSTLILLVASFIGNDWKHVYDSALNNNYRFLSYGDSSLLLP

SEQ ID NO: 66181 - protein, 350 aa, Ekhidna lutea
  misc_feature (1)..(350): tr|A0A239J3I5|A0A239J3I5_9BACT S-adenosylmethionine:tRN A ribosyltransferase-isomerase OS=Ekhidna lutea OX=4476 79 GN=queA PE=3 SV=1
MGMKLSEFKFDLPSSLIALHPTDNRDDSRLMVVHKDTGEIEHKVFKDVVDYFGEDDVFVLNDTKVFPARLYGNKEKTGAKIEVFLLRELNTEMKLWDVLVDPARKIRVGNKLYFGDGELVAEVIDNTTSRGRTIRFLFDGDQEQFYKMIDALGETPLPKEIKRSAEPEDRDRFQTIYAKNIGAVAAPTAGLHFTPQLMKRLELIGIDIAPITLHVGLGTFRPVDVEDLTKHKMDSENYWVEKPTADRVNRALAEKSKICAVGTTAMKTLESSVSANGLLKDNSGWTDKFIFPPYEFKICDALITNFHLPESTLLMMASAFGGYDLIQEAYQTAIKEKYRFFSYGDAMLII

SEQ ID NO: 66182 - protein, 336 aa, Elioraea sp.
  misc_feature (1)..(336): tr|A0A541C5M5|A0A541C5M5_9PROT S-adenosylmethionine:tRN A ribosyltransferase-isomerase OS=Elioraea sp. Yellowst one OX=2592070 GN=queA PE=3 SV=1
MFALTDYDYALPPERIAQEPARPRDAARLLVVARDRLEDRIVADLPAVLRPDDLLVVNDTRVIPAQLEGTAGGARVGVTLDRPLPDGTWEALARNARRLKPGSVIDFGAITAEVLARAGGTVRLGFSGDPTASATLALPPYIDRAQGPTPADAEDYQTTFARHPGAVAAPTAGLHLTPRLIEALAARGIRLAHVTLHVGAGTFLPIRVEDVRAHRLHAERATLPAETAAAIAATKRAGGRIVAVGTTSLRTLETAARATGEVRPFSGETDLYITPGFDFRAADLLLTNFHLPRTSLMVLVCAFAGRDRIMVAYAHALAAGYRFASYGDATLLERSA

SEQ ID NO: 66183 - protein, 349 aa, Elizabethkingia anophelis
  misc_feature (1)..(349): tr|A0A290MTF0|A0A290MTF0_9FLAO S-adenosylmethionine:tRN A ribosyltransferase-isomerase OS=Elizabethkingia anoph elis R26 OX=1246994 GN=queA PE=3 SV=1
MKTSDFNFNLPDHLLAEHPSENRDEAKLMVLDRKTQTIEHKLFKDVIDYFNEDDLFIFNNTKVFPARLYGNKEKTGAKIEVFLLRELDREARVWDVLVDPARKIRIGNKLFFTEDESLVAEVIDNTTSRGRTLRFLFDGSYEEFRAKLTELGETPLPKYIKRDVEPEDAERYQTIYAEIEGAVAAPTAGLHFSKHLMKRMEIKGINFANVTLHVGLGTFNPIEVEDLSKHKMECEQAIITQDNADIINKAIEENRRVCAVGTTTMRAIETSVSTNRRLSAYEGWTNKFIYPPYDFGIANAMITNFHTPKSTLIMMIAAFAGRDFVMHAYEEAIKNDYKFYSYGDAMLIL

SEQ ID NO: 66184 - protein, 349 aa, Elizabethkingia anophelis; identical to SEQ ID NO: 66183
  misc_feature (1)..(349): tr|A0A077EI42|A0A077EI42_9FLAO S-adenosylmethionine:tRN A ribosyltransferase-isomerase OS=Elizabethkingia anoph elis NUHP1 OX=1338011 GN=queA PE=3 SV=1

SEQ ID NO: 66185 - protein, 349 aa, Elizabethkingia bruuniana; identical to SEQ ID NO: 64866
  misc_feature (1)..(349): tr|A0A5E8CX93|A0A5E8CX93_9FLAO S-adenosylmethionine:tRN A ribosyltransferase-isomerase OS=Elizabethkingia bruun iana OX=1756149 GN=queA PE=3 SV=1

SEQ ID NO: 66186 - protein, 349 aa, Elizabethkingia meningoseptica
  misc_feature (1)..(349): tr|A0A1V3TYE6|A0A1V3TYE6_ELIME S-adenosylmethionine:tRN A ribosyltransferase-isomerase OS=Elizabethkingia menin goseptica OX=238 GN=queA PE=3 SV=1
MKTSDFNFNLPEHLLAEHPTENRDEAKLMVLDRKTQTIEHKLFKDVIDYFNEDDLFIFNNTKVFPARLYGNKEKTGAKIEVFLLRELDREARVWDVLVDPARKIRIGNKLFFTEDESLVAEVIDNTTSRGRTLRFLFDGSYEEFRAKLTELGETPLPKYIKRDVEPEDAERYQTIYAEIEGAVAAPTAGLHFSKHLMKRMEIKGINFANITLHVGLGTFNPIEVEDLSKHKMECEQAIITQDNADIINRAIEENRRVCAVGTTTMRAIETSVSTNRRLSAYEGWTNKFIYPPYDFGIANAMITNFHTPKSTLIMMIAAFAGRDFVMQAYEEAIKNEYKFYSYGDAMLIL

SEQ ID NO: 66187 - protein, 349 aa, Elizabethkingia meningoseptica; identical to SEQ ID NO: 66183
  misc_feature (1)..(349): tr|A0A376DTE8|A0A376DTE8_ELIME S-adenosylmethionine:tRN A ribosyltransferase-isomerase OS=Elizabethkingia menin goseptica OX=238 GN=queA PE=3 SV=1

SEQ ID NO: 66188 - protein, 349 aa, Elizabethkingia miricola; identical to SEQ ID NO: 64866
  misc_feature (1)..(349): tr|A0A0A2H8V2|A0A0A2H8V2_ELIMR S-adenosylmethionine:tRN A ribosyltransferase-isomerase OS=Elizabethkingia miric ola OX=172045 GN=queA PE=3 SV=1

SEQ ID NO: 66189 - protein, 349 aa, Elizabethkingia occulta
  misc_feature (1)..(349): tr|A0A1T3MBU1|A0A1T3MBU1_9FLAO S-adenosylmethionine:tRN A ribosyltransferase-isomerase OS=Elizabethkingia occul ta OX=1867263 GN=queA PE=3 SV=1
MKTSDFNFNLPDHLLAEHPSENRDEAKLMVLDRKTQTIEHKLFKDVIDYFNEDDLFIFNNTKVFPARLYGNKEKTGAKIEVFLLRELDREARVWDVLVDPARKIRIGNKLFFTEDESLVAEVIDNTTSRGRTLRFLFDGSYEEFRAKLTELGETPLPKYIKRDVEPEDAERYQTIYAEIEGAVAAPTAGLHFSKHLMKRMEIKGINFANVTLHVGLGTFNPIEVEDLSKHKMECEQAIITQDNADTINKAIEENRRVCAVGTTTMRAIETSVSTNRRLSAYEGWTNKFIYPPYDFGIANAMITNFHTPKSTLIMMIAAFAGRDFVMHAYEEAIKNDYKFYSYGDAMLIL

SEQ ID NO: 66190 - protein, 349 aa, Elizabethkingia sp.; identical to SEQ ID NO: 64866
  misc_feature (1)..(349): tr|A0A2T5RML2|A0A2T5RML2_9FLAO S-adenosylmethionine:tRN A ribosyltransferase-isomerase OS=Elizabethkingia sp. Y R191 OX=2135666 GN=queA PE=3 SV=1

SEQ ID NO: 66191 - protein, 349 aa, Elizabethkingia sp.
  misc_feature (1)..(349): tr|A0A5B7UDX8|A0A5B7UDX8_9FLAO S-adenosylmethionine:tRN A ribosyltransferase-isomerase OS=Elizabethkingia sp. J S20170427COW OX=2583851 GN=queA PE=3 SV=1
MKTSNFNFNLPDHLLAKYPAENRDEARLMVLNRKDQTIEHKLFKDVIDYFDEKDLFIFNNTKVFPARLYGNKEKTGAQIEVFLLRELDREARVWDVLVDPARKIRIGNKLFFTEDESLVAEVIDNTTSRGRTLRFLFDGSYEEFREKLNSLGETPLPKYIDRPVEPEDEERYQTIYAEVEGAVAAPTAGLHFSKHLLKRLEIKGIDFANITLHVGLGTFNPIEVEDISKHKMECEQVIINQENADIINAAIEEKRRICAVGTTTMRAIETSVSSNRRLSPFEGWTNKFIYPPYDFGIANAMITNFHTPKSTLLMMIAAFAGKDFILEAYHEAIKEEYRFYSYGDAMLIL

SEQ ID NO: 66192 - protein, 349 aa, Elizabethkingia ursingii
  misc_feature (1)..(349): tr|A0A1T3FR09|A0A1T3FR09_9FLAO S-adenosylmethionine:tRN A ribosyltransferase-isomerase OS=Elizabethkingia ursin gii OX=1756150 GN=queA PE=3 SV=1
MKTSDFNFNLPDHLLAEHPSENRDEAKLMVLDRKTQTIEHKLFKDVIDYFNEDDLFIFNNTKVFPARLYGNKEKTGAKIEVFLLRELDREARVWDVLVDPARKIRIGNKLFFTEDESLVAEVIDNTTSRGRTLRFLFDGSYEEFRAKLTELGETPLPKYIKRDVEPEDAERYQTIYAEIEGAVAAPTAGLHFSKHLMKRMEIKGINFANVTLHVGLGTFNPIEVEDLSKHKMECEQAIITQDNADIINKAIEENRRVCAVGTTTMRAIETSVSTNRRLSAYEGWTNKFIYPPYDFGIANAMITNFHTPKSTLIMMIAAFAGRDFIMQAYEEAIKNDYKFYSYGDAMLIL

SEQ ID NO: 66193 - protein, 353 aa, Elstera cyanobacteriorum
  misc_feature (1)..(353): tr|A0A255XRB6|A0A255XRB6_9PROT S-adenosylmethionine:tRN A ribosyltransferase-isomerase OS=Elstera cyanobacterio rum OX=2022747 GN=queA PE=3 SV=1
MNVADFDFDLPDSLIAERPMEPREAARLLCVGDRLTDKTIGDLPSLLGPGDLIVFNDTKVIPARLHGRRERVEGGAVVAVELLLHQRHSSAEWTAFAKPGKRLRIGDTIRFGDLLRAELLEKRDSGEVLIRFDRKDAELTAALEAIGEMPLPPYIRRAQDARDRQDYQTIFAAKEGAVAAPTAGLHITPGLLQALRERGVATETVTLHVGAGTFQPVKAERVEDHKMHSEWAELSPEGAARLNAHRAAGGRIIACGTTSLRTLESAVAPDRRFSALSGGTEIFLYPGKPIYSADRLLTNFHLPRSTLFMLVSAFSGPNRMRAAYQHAIRQNYRFFSYGDACLLERRDDDTAAL

SEQ ID NO: 66194 - protein, 346 aa, Elstera litoralis
  misc_feature (1)..(346): tr|A0A0F3IW73|A0A0F3IW73_9PROT S-adenosylmethionine:tRN A ribosyltransferase-isomerase OS=Elstera litoralis OX= 552518 GN=queA PE=3 SV=1
MNVADFDFDLPGHLIAERPMEPREGARLLCVGEALEDRIIGDLPTLFGPGDVIVFNDTRVIPARLHGVRARQEGGVTVPVELLLHQRQGDGSWTAFAKPGKRLKIGDTILIGEVLRATLLEKRDSGEVLVQFDRAGADLTAALEQVGEMPLPPYIRRAQDAQDRHDYQTIFATKDGAVAAPTAGLHITPRLLEALKARGVLTETVTLHVGAGTFQPVKVDRIEDHKMHSEWAELSPETAARLNAHRASGGRIIACGTTSLRTLESAVAPDRSFSALAGSTEIFLYPGKPVYSVDRLLTNFHLPRSTLFMLVSAFAGQARMRAAYDHAIASGYRFFSYGDACLLERA

SEQ ID NO: 66195 - protein, 347 aa, Elusimicrobia bacterium
  misc_feature (1)..(347): tr|A0A2M7S001|A0A2M7S001_9BACT S-adenosylmethionine:tRN A ribosyltransferase-isomerase OS=Elusimicrobia bacteri um CG_4_10_14_0_8_um_filter_37_32 OX=2014301 GN=queA PE =3 SV=1
MGILRVADDLQLEGYDYALPEKFIAQHPADKRDQSKLLVFDRRENVVEHRVFSDIMDYLSPGDCVVINKTKVLPARLYCRKNTGGKIELFLLKKISENSWTALCRENVSGKELILPDGNSKVKVVDKNKYGEYILEFMGEIDIYELMNKYGHSPLPPYIKRHYPGKEERYQTVYAESEGAVAAPTAGLHFTLELMKKIKAKGIEIEYIVLHIGWATFKPVSAENINEHKMLPEYFEITKETADKINSCRQKDGRIIAVGTSTVRALESQADVNGNLIPGKGETELYIYPGYKFKVIDAMLTNFHLPKSTNLILVSAFAGKEKLLSLYKSAMENNYRFYSYGDAMLVL

SEQ ID NO: 66196 - protein, 291 aa, Elusimicrobia bacterium
  misc_feature (1)..(291): tr|A0A353CPR4|A0A353CPR4_9BACT S-adenosylmethionine:tRN A ribosyltransferase-isomerase OS=Elusimicrobia bacteri um OX=2030800 GN=DDW67_01210 PE=3 SV=1
MLNRSAVRKARLPARKLTGGKAELLLVAPVDESLTRWKALGRKLSPGTPLELPDGSGAEIEGLADDASLLVRFSVPLTSAWLDLHGEAPLPGYIIKSRRRRGLPEERADDKSLYQTVYAAEEGSIAAPTAGFHFTPALLDTVSGSGVDIAYITLHVGWGTFRPVRVPHPADHVMLPESCEVSREAAEKVNSCLARGGRVIPVGTSSMRTLETLSGEDGRLSPGKADATLFIYPGHRFRTAAGFITNLHVPGSAPLYMTAAFAGEEKLYSAYAEAVKEKYRFYSYGDAMLII

SEQ ID NO: 66197 - protein, 341 aa, Elusimicrobium minutum
  misc_feature (1)..(341): tr|B2KCE2|B2KCE2_ELUMP S-adenosylmethionine:tRNA ribosy ltransferase-isomerase OS=Elusimicrobium minutum (strai n Pei191) OX=445932 GN=queA PE=3 SV=1
MFERFHNLKINIARTPATPRDSAKLMVLNRDGQKIEHRIFRDISQYFTPGDCLVINDTKVFPAKLFAKKPTGGKVEVLLVRPLEKPNEWTALMRDYKEGIELSFSEDLKAVMDFRNENGEVILKFNNDDVLGYACENGLMPLPQYIEKARKHDGLSASIETDKERYQTVYAQFQGSIAAPTAGFHFTPELLKKIEDKGVKIARVTLHIGWGTFKPLKTDPKEHKMLAEYGTVSEEASKKINEARASGGRIFSVGTTSTRTLESFTENGITKSGGRWTDLFIYPGYKFKAIDCLITNFHFPDSTPLCMASAFASEDFIFKAYNEAVENNYRFYSFGDSMLIL

SEQ ID NO: 66198 - protein, 345 aa, Elusimicrobium sp.
  misc_feature (1)..(345): tr|A0A1Y4DBV0|A0A1Y4DBV0_9BACT S-adenosylmethionine:tRN A ribosyltransferase-isomerase OS=Elusimicrobium sp. An 273 OX=1965617 GN=queA PE=3 SV=1
MAFERFKKLNLDPLIAKQPATPRDSARQMVLHRDTHTIEHRIFRDIHEYFNPGDALVINNTKVFPAKLFAHKPTGGKVEVLLVRPMQKPNVWAVLTRDYKEGITLDFGDGLRAKATGKTENNEAVLEFNQEDILPFCNTHGLMPLPQYIEKARKHDGMTPSIATDKDRYQTVYAKYTGSIAAPTAGFHFTPELLQKLKDKGVHICYITLHVGWGTFKPLRGEPEQHHMLAELGEVSPETADTLNAVRANGKRVFSCGTTSTRTLETFTDENHITHPGKKWTDLFIYPGYKFKGIDCLITNFHFPDSTPLCMTSAFAGEDFIYEAYLQAVEKKYRFYSFGDSMMIL

SEQ ID NO: 66199 - protein, 346 aa, Emcibacter congregatus
  misc_feature (1)..(346): tr|A0A2G4YN76|A0A2G4YN76_9PROT S-adenosylmethionine:tRN A ribosyltransferase-isomerase OS=Emcibacter congregatu s OX=2043170 GN=queA PE=3 SV=1
MKVDLFDFELPRESIALRPVATRDGARFLVVKGNERSDKAVTDLPDYLQAGDVLVFNDTRVIPARLTGKRGLAKIQITLHMNEGEGLWRAFAKPAKKLKTDDVILFEGGLEATVLEKGDAGEVSLQFNYAGDALREALDRAGVMPLPPYIASQRPVDDQDLVDYQTVYSRKDGAVAAPTAGLHFTDRLIEEIASLGVKIVHVTLHVGAGTFLPVKVEDTEDHKMHSEWGEIDAETAEIINAAHLAGRNVVAVGTTSLRLLESAADESGIVHPFAAATDIFITPGYQFRAVDMLMTNFHLPKSTLFMLVSAFAGYAPMKAAYAHAIASGYRFYSYGDSSLLFREDKL

SEQ ID NO: 66200 - protein, 349 aa, Emcibacter nanhaiensis
  misc_feature (1)..(349): tr|A0A501PRF8|A0A501PRF8_9PROT S-adenosylmethionine:tRN A ribosyltransferase-isomerase OS=Emcibacter nanhaiensi s OX=1505037 GN=queA PE=3 SV=1
MKVDLFDFELPRELIALRPAADRAGARFLVVKGNELEDRQVSDIVDYLRPGDVMVFNDTRVIPARLTGKRRDAKIELTLHMNAGEGCWKAFAKPAKKLKPGDVINFQDKLAAEVLEKGEAGEVTLQFDRQGTALREALDEVGVMPLPPYIASQRPVDEQDLSDYQTVYSEKDGAVAAPTAGLHFTDELLAKIDDAGVERLTVTLHVGAGTFLPVKAEDTEEHKMHAEWGEITPEVADKINAAHARGNRVIAVGTTSLRLLESATDEQGVTRPFSADTDIFITPGYRFRCVDVLMTNFHLPKSTLFMLVSAFAGFDNMKAAYAHAIDEGYRFYSYGDSSLLCREDQICRK

SEQ ID NO: 66201 - protein, 347 aa, Emergencia timonensis
  misc_feature (1)..(347): tr|A0A415E412|A0A415E412_9FIRM S-adenosylmethionine:tRN A ribosyltransferase-isomerase OS=Emergencia timonensis OX=1776384 GN=queA PE=3 SV=1
MKIDEFDYELPKELIAQKPSERRDVCRMMVLDRQDGTIEHKHFYDVIDYLNPGDCLVLNNSKVLPARLFGEKEGTGAKVEFLLIKRMEGDRWETMVKPGKRLKPGDSVAFSDNFRVEILDYGPDGTRIAEFHYDGIFMERLEELGKMPLPPYIERESTLEDKDMYQTVYCKEEGSVAAPTAGLHFTEELLQKAKDKGVRLAYVTLHVGIGTFRPVKCENVEDHHMHFEEYFVDEETAKTINETILAGGRIISVGTTSTRTLESAAYHDEASGKNLIRAGEGSTGIFIYPGYTFKVVDALITNFHLPKSTLLMLISALYDREKILEAYQAAVDEKYRFFSYGDAMLIQ

SEQ ID NO: 66202 - protein, 351 aa, Empedobacter brevis
  misc_feature (1)..(351): tr|A0A511NL77|A0A511NL77_9FLAO S-adenosylmethionine:tRN A ribosyltransferase-isomerase OS=Empedobacter brevis N BRC 14943 = ATCC 43319 OX=1218108 GN=queA PE=3 SV=1
MKMKTSDFDFTLPEELLADRPSENRDEARLMVVHRDTGEIEHRQFKDLIDYFDEGDVMIRNNTKVFPARLMGNKEKTGAQIEVFLLRELDAETRLWDVLVDPARKIRIGNKLFFDNDDTLVAEVVDNTTSRGRTLRFLFDGSYEEFRAKLKELGETPLPKYILRDVEPEDAERYQTIYAKHEGAVAAPTAGLHFSKHLLKRLEIKGVDFAELTLHIGLGTFQAVEVEDLSKHKMESEQVIIPQATADLVNRAIDEKKKVCAIGTTSMRSIESSVSADGHLNAFDGWTNKFIHPPYDFSIANCMITNFHTPKSTLIMMISAFAGHDLTMKAYNEAVKEGYKFYSYGDAMLIL

SEQ ID NO: 66203 - protein, 351 aa, Empedobacter brevis; identical to SEQ ID NO: 63058
  misc_feature (1)..(351): tr|A0A3P6MFN0|A0A3P6MFN0_9FLAO S-adenosylmethionine:tRN A ribosyltransferase-isomerase OS=Empedobacter brevis O X=247 GN=queA PE=3 SV=1

SEQ ID NO: 66204 - protein, 349 aa, Empedobacter falsenii
  misc_feature (1)..(349): tr|A0A3R8TNX0|A0A3R8TNX0_9FLAO S-adenosylmethionine:tRN A ribosyltransferase-isomerase OS=Empedobacter falsenii OX=343874 GN=queA PE=3 SV=1
MKTSDFDFTLPEELLADRPSENRDEARLMVVHRDTGEIEHRQFKDLIEYFDEGDVMIRNNTKVFPARLMGNKEKTGAQIEVFLLRELDAETRLWDVLVDPARKIRIGNKLFFDNDDTLVAEVVDNTTSRGRTLRFLFDGSYEEFRAKLKELGETPLPKYILRDVEPEDAERYQTIYAKHEGAVAAPTAGLHFSKHLLKRLEIKGVDFAELTLHIGLGTFQAVEVEDLSKHKMESEQVIIPQESADLVNRAIDEKKKVCAIGTTSMRSIESSVSADGHLNAFDGWTNKFIHPPYDFSIANCMITNFHTPKSTLIMMISAFAGHDLTMKAYNEAVKEGYKFYSYGDAMLIL

SEQ ID NO: 66205 - protein, 351 aa, Empedobacter falsenii
  misc_feature (1)..(351): tr|A0A376G5Y2|A0A376G5Y2_9FLAO S-adenosylmethionine:tRN A ribosyltransferase-isomerase OS=Empedobacter falsenii OX=343874 GN=queA PE=3 SV=1
MKMKTSDFDFTLPEELLADRPSENRDEARLMVVHRDTGEIEHRQFKDLIEYFDEGDVMIRNNTKVFPARLMGNKEKTGAQIEVFLLRELDAETRLWDVLVDPARKIRIGNKLFFDNDDTLVAEVVDNTTSRGRTLRFLFDGSYEEFRAKLKELGETPLPKYILRDVEPEDAERYQTIYAKHEGAVAAPTAGLHFSKHLLKRLEIKGVDFAELTLHIGLGTFQAVEVEDLSKHKMESEQVIIPQESADLVNRAIDEKKKVCAIGTTSMRSIESSVSADGHLNAFDGWTNKFIHPPYDFSIANCMITNFHTPKSTLIMMISAFAGHDLTMKAYNEAVKEGYKFYSYGDAMLIL

SEQ ID NO: 66206 - protein, 341 aa, Empedobacter haloabium
  misc_feature (1)..(341): tr|A0A5C7BF54|A0A5C7BF54_9FLAO S-adenosylmethionine:tRN A ribosyltransferase-isomerase OS=Empedobacter haloabiu m OX=592317 GN=queA PE=3 SV=1
MYSLSDFDFNLPPERIAQFPLPDRSASRLLHVDGPRLADRQFTDILALLQPGDLLVMNDTRVLKARFFGVKDSGGKVEVLVERVLDTRTVLAQVRASKSPGPGVRIRLAEAFDVTVGERAGEFYTLKFEADVFDLIEQYGRLPLPPYIEHAPGEVDETRYQTVFNKVPGAVAAPTAGLHFDEALLQKLRDKGVNFAYVTLHVGAGTFQPVRTENLAEHKMHTEWYTMPQETVDAVRATRAAGRDVIAVGTTSLRALESASQTGELVAGSADTALFITPGYLFKTVTRLITNFHLPKSTLLMLVSAFAGYDEIRAAYAHAIAHEYRFFSYGDAMLLTTPNRA

SEQ ID NO: 66207 - protein, 349 aa, Empedobacter sp.
  misc_feature (1)..(349): tr|A0A4Z1BI15|A0A4Z1BI15_9FLAO S-adenosylmethionine:tRN A ribosyltransferase-isomerase OS=Empedobacter sp. MRS2 OX=2491114 GN=queA PE=3 SV=1
MKTSDFDFTLPEELLADRPSENRDEARLMVVHRDTGEIEHRQFKDLIEYFDEGDVMIRNNTKVFPARLMGNKEKTGAQIEVFLLRELDAETRLWDVLVDPARKIRIGNKLFFDNDDTLVAEVVDNTTSRGRTLRFLFDGSYEEFRAKLKELGETPLPKYILRDVEPEDAERYQTIYAKHEGAVAAPTAGLHFSKHLLKRLEIKGVDFAELTLHIGLGTFQAVEVEDLSKHKMESEQVIIPQATADLVNRAIDDKKKVCAIGTTSMRSIESSVSADGHLNAYDGWTNKFIHPPYDFSIANCMITNFHTPKSTLIMMISAFAGHDLTMKAYNEAVKEGYKFYSYGDAMLIL

SEQ ID NO: 66208 - protein, 397 aa, Emticicia sp.
  misc_feature (1)..(397): tr|A0A2N4X8Q9|A0A2N4X8Q9_9BACT S-adenosylmethionine:tRN A ribosyltransferase-isomerase OS=Emticicia sp. TH156 O X=2067454 GN=queA PE=3 SV=1
MITLDLDKYTYHLPDERIARFPVEPRDVSKLLVYKDSLINEDRFYNLAGHLPKESFLVFNNTKVIPARLYFQKESGALIEIFLLNPVAPSTVISQIMETRDTCTWACMIGNKKRLKGRLVGKYSVHTTDDLELVAELVDNEKNYVQFTWNNPELTFAEIVRFFGQIPLPPYLKRDTEEKDYDTYQTVYSKNDGAVAAPTAGLHFTEKVLFDLVTNDIEYDFITLHVGAGTFQPIKVQNVVEHQMHSEQIVFEKDFIKKLLANRAFVIPVGTTSMRSLESLYWFGVKLLEGDETFFIEKLFPYQWQNEVGIEASLQAVLNYMDLKNIEQLIGETEIFIFPGYQFRICKGIITNFHQPDSTLILLVAALVGDNWRTIYDFALENNFRFLSYGDSSLLIP

SEQ ID NO: 66209 - protein, 350 aa, Emticicia sp.
  misc_feature (1)..(350): tr|A0A2N4XBM7|A0A2N4XBM7_9BACT S-adenosylmethionine:tRN A ribosyltransferase-isomerase OS=Emticicia sp. TH156 O X=2067454 GN=queA PE=3 SV=1
MKLSEFKFDLPHSLVAMYPPEQRDGARMMVVNRKTKKIEHKMFKDIVDYFGEKDTLVVNDTKVFPARLYGSKEKTGAKIEVFLLRELNREMRLWDVLVDPARKIRVGNKLYFGDSDLVAEVIDNTTSRGRTIRFLFDGSHEEMMKTIHELGETPLPIDIIKRKVTDQDRERYQTIFADKEGAVAAPTAGMHFTRNVQRRMEINGVNFCPVTLHIGIGTFRQVDVEDLTKHKTDSENFFIPDNTCQIVNDSIDKEGKICAIGTTVLKALESSVSASNHLKPVDNGWTDKFIFPPYDFKITNSLLTNFHLPESILIMMACAFGGYELIMQAYHEAIKEKYKFFTYGDVMLIL

SEQ ID NO: 66210 - protein, 352 aa, Endomicrobium proavitum
  misc_feature (1)..(352): tr|A0A0G3WJ72|A0A0G3WJ72_9BACT S-adenosylmethionine:tRN A ribosyltransferase-isomerase OS=Endomicrobium proavit um OX=1408281 GN=queA PE=3 SV=1
MTQDKLLTNYDYDIPSELIAQKPADRRDSSRLFVVDRKSGKFRHRHFSDITAYFSEGDCLVINTTKVVPSRLFGKKATGGKVELLFLDPVAHSKENSYKVLMKPFLETGKKVFFDNGYECEIKHKTPRGEVVVEFNKADILSFLQKQGVMPLPPYINRKEGLALQLSNFDKERYQTVYAAQQGAIAAPTAGLHFTQEILNALKDKGVKIATLTLHVGWGTFKPIVSDEIDNHKMMSEKFSIDSQNAQKINAAKKENKKIFSVGTTSTRALETLANIFNGEIKEYSGETSIFIYPGYKFKIPDVLITNLHLPKSTPLMMASAFASRELMLKAYKEAVKEKYRFFSYGDSMIIL

SEQ ID NO: 66211 - protein, 340 aa, Bathymodiolus septemdierum
  misc_feature (1)..(340): tr|A0A0P0UTJ9|A0A0P0UTJ9_9GAMM S-adenosylmethionine:tRN A ribosyltransferase-isomerase OS=endosymbiont of Bathy modiolus septemdierum str. Myojin knoll OX=1303921 GN=q ueA PE=3 SV=1
MKLSDFDFDLPKALIAQSPPENRTSSRLLIPQLNIIDTIFSNIGDFIKEGDLLVLNNTKVIPARLFGHKESGGKVEIMIERLLSDCQALAMIKASRAPKVGSHIILENQVQATILQKGEGFYTLEFATDSLLNLLDKVGHIPLPPYIERADNAQDLSRYQTVFAQKEGAVAAPTAGLHFDDALLTSLKNQGVNSAFVTLHVGAGTFQPVKTNEIEDHHMHSEYYELPQQTVDKITKAKANGGRIIAVGTTAVRSLESAARHGALKQRQEETDIFIYPGYQFQVVDAMITNFHLPKSSLLMLVSAFIGRERMMEIYQHAIKGKYRFFSYGDAMLLERNNDL

SEQ ID NO: 66212 - protein, 347 aa, Ridgeia piscesae
  misc_feature (1)..(347): tr|A0A0T5YZN5|A0A0T5YZN5_9GAMM S-adenosylmethionine:tRN A ribosyltransferase-isomerase OS=endosymbiont of Ridge ia piscesae OX=54398 GN=queA PE=3 SV=1
MRLSDFRYELPDELIAQFPQPSRTASRLLCLDGSSGRVVDRQFTQLPDLLQAGDLLVFNDTRVMRARLYGRKTSGGRVELLIERVLAPQRVLAHVRASKSPKPGSRLLLGEADTEVEVVAREGALFELSLADGDFYQLMERQGHIPLPPYITRSDQVLDQERYQTVYARSEGAVAAPTAGLHFDLPLLDRLAASGIGMAQVTLHVGAGTFQPVRVENLDEHEMHSEYLEVDEVVCEKIRETRARGGRVVAVGTTTVRSLETASADGNIRPYRGDTRLFIRPGYRFSSVDAMVTNFHLPESTLLMLVSAFSGYDAVMATYRHAVEQRYRFFSYGDAMFLTPSSSAKYE

SEQ ID NO: 66213 - protein, 341 aa, Trimyema compressum
  misc_feature (1)..(341): tr|A0A191HVR4|A0A191HVR4_9FIRM S-adenosylmethionine:tRN A ribosyltransferase-isomerase OS=endosymbiont 'TC1' of Trimyema compressum OX=243899 GN=queA PE=3 SV=1
MKVQLFDYYLPESLIAQKPMTPRDSSRLLVVHSKEKKWEHQHFYNLIDYLQAGDVLVLNHTKVIPARLFGKKETGAIIEVLLLKKKEIDIWEVLVKPGKKVKIGDRIFFGENQELRTTCIDITEEGSRIIQFYYEGVFEVILDFLGEMPLPPYITETLKDSSRYQTVYSKDGVSVAAPTAGLHFTEELLVKIKEKGIMVTSLLLNVGLGTFRPVKEENLEDHPMHEEYYELSEESANIINKAKNMNQRVIAVGTTSVRVLETIFLKYGKAVSDKGWTNIFIYPGYQYKCIDGLITNFHLPKSTLLMLVSALIGREFTLATYEEAVKQGYRFFSFGDAMFIE

SEQ ID NO: 66214 - protein, 350 aa, Endozoicomonadaceae bacterium
  misc_feature (1)..(350): tr|A0A3S3Q7Q5|A0A3S3Q7Q5_9GAMM S-adenosylmethionine:tRN A ribosyltransferase-isomerase OS=Endozoicomonadaceae b acterium GTF-13 OX=2506149 GN=queA PE=3 SV=1
MQVSDFRFDLPDELIARYPKPDRSSSRLLCVDGQSGALEHRVFSDLEQLLEPGDLLVMNNTRVIPARLFGQKASGGKIEVLVERVLDAHEVLAHVRSSKSPKPGTRLLLEGGIEATMVERQESLFRLRFEGESPVLELLERHGHMPLPPYIERDDQLSDRERYQTVYARHQGAVAAPTAGLHFDEALLQRLADKGIETAFVTLHVGAGTFQPVRVERIEDHQMHSEYLELELAVCDAVNACRARGGRVVAVGTTSVRCLESASQAGEIRPYRGETDIFIYPGYRFRSVDLLVTNFHLPESTLLMLVSAFSGYETMMNAYRVAVEQKYRFFSYGDAMLLSPASPRSMQESM

SEQ ID NO: 66215 - protein, 342 aa, Endozoicomonas elysicola
  misc_feature (1)..(342): tr|A0A081KBJ7|A0A081KBJ7_9GAMM S-adenosylmethionine:tRN A ribosyltransferase-isomerase OS=Endozoicomonas elysic ola OX=305900 GN=queA PE=3 SV=1
MQVSDFDFDLPDEQIARFPAEDRTGSRLLCLDGNSGEIEHQQFSDIEGLLEPGDLLVLNNTRVIPARMYGQKETGGKIEVLIERVVEDNLALAQVRASKSPKPGSVLLLADGAVRVVVEGRQDFLFILRFETSVLPLLLEHGHMPLPPYIDREDGDSDRLRYQTVFAARDGAVAAPTAGLHFDEALLARLEAKGVRKAFVTLHVGSGTYQPVRVDRIEDHVMHAEYIEVSEEVCQAVRETRARGNRVVAVGTTSVRSLESASASGEIAPFQGDSKIFIYPGYEFRSVDLMVTNFHLPQSTLLMLVSAFAGREQVLDAYKEAVEKKYRFFSYGDAMLLARKTD

SEQ ID NO: 66216 - protein, 342 aa, Endozoicomonas montiporae
  misc_feature (1)..(342): tr|A0A081NBA5|A0A081NBA5_9GAMM S-adenosylmethionine:tRN A ribosyltransferase-isomerase OS=Endozoicomonas montip orae OX=1027273 GN=queA PE=3 SV=1
MRVSDFDFDLPDEQIARFPAKERTGSRLLCLEGDSGEIAHRQFADIESFLNPGDLLVMNNTRVIPARLFGRKETGGKLEVLIERVLEEKKVLAHVRSSKSPKPGSRIYLADDQIMAEVTGRQGTLFLIDFDKPVLPQLQEYGHMPLPPYIDREDGSADRLRYQTVFAEKDGAVAAPTAGLHFDEAMLERLEKKGVNKAFVTLHVGSGTFQPVRVDNIADHEMHSEYIEVPEAVCQAVRETRARGNKVVAVGTTSVRSLESASTSGEIQPFTGDTDIFIYPGYQFRSVDAMITNFHLPQSTLLMLVSAFSGQEAILDAYNEAVKEGYRFFSYGDAMWLTRKSG

SEQ ID NO: 66217 - protein, 342 aa, Endozoicomonas montiporae; identical to SEQ ID NO: 66216
  misc_feature (1)..(342): tr|A0A142BB82|A0A142BB82_9GAMM S-adenosylmethionine:tRN A ribosyltransferase-isomerase OS=Endozoicomonas montip orae CL-33 OX=570277 GN=queA PE=3 SV=1

SEQ ID NO: 66218 - protein, 341 aa, Endozoicomonas numazuensis
  misc_feature (1)..(341): tr|A0A081N0Z2|A0A081N0Z2_9GAMM S-adenosylmethionine:tRN A ribosyltransferase-isomerase OS=Endozoicomonas numazu ensis OX=1137799 GN=queA PE=3 SV=1
MRVSDFDFELPDEQIARFPAQERTGSRLLRLDGPTETITHGQFADVESLLEPGDLLVMNNTRVIPARLFGRKETGGKLEVLIERVLEERKVLAHVRSSKAPKPGSRIFLADDCIEAEVTGRQGALFLIDFDEPVLPQLQEHGHMPLPPYIDREDGSADRLRYQTVFAEKDGAVAAPTAGLHFDEAMLQRLKEKGIEQAFVTLHVGSGTFQPVRVDNIADHEMHSEYIEVPEAVCAAVKAARARGNKVVAVGTTSVRSLESASRDGEIKPFFGDTDIFIFPGYEFRSVDAMITNFHLPQSTLLMLVSAFSGKDAILRAYNEAVKEGYRFFSYGDAMWLTRKS

SEQ ID NO: 66219 - protein, 341 aa, Endozoicomonas sp.
  misc_feature (1)..(341): tr|A0A1D2XA63|A0A1D2XA63_9GAMM S-adenosylmethionine:tRN A ribosyltransferase-isomerase OS=Endozoicomonas sp. (e x Bugula neritina AB1) OX=1868284 GN=queA PE=3 SV=1
MQVTDFDFDLPDEQIARFPAEQRTASRMLCLDGKAGTIEHRQFVDIEHLLQPGDLLVLNNTRVIPARMYGRKETGGKIELLVERVIEDNLVLAQIRSSKSPKPGSTIYLADDAVKASIEGRQDFLFIVRFESSVLPVLQEHGHMPLPPYIDREDGQSDRLRYQTVFAEKEGAVAAPTAGLHFDEALLQRLEDKGIKKAFVTLHVGSGTYQPVRVDDIKDHVMHAEYIEVPEETCQAVRETRARGGRVIAVGTTSVRSLESASASGEIQPFQGDSNIFIYPGYEFRSVDAMVTNFHLPQSTLLMLVSAFAGKDEVLQAYDEAVQQKYRFFSYGDAMLLTRKD

SEQ ID NO: 66220 - protein, 350 aa, Endozoicomonas sp.; identical to SEQ ID NO: 66214
  misc_feature (1)..(350): tr|A0A3P3VRP6|A0A3P3VRP6_9GAMM S-adenosylmethionine:tRN A ribosyltransferase-isomerase OS=Endozoicomonas sp. GT F13 OX=2528527 GN=queA PE=3 SV=1

SEQ ID NO: 66221 - protein, 348 aa, Enhydrobacter aerosaccus
  misc_feature (1)..(348): tr|A0A1T4S8E3|A0A1T4S8E3_9PROT S-adenosylmethionine:tRN A ribosyltransferase-isomerase OS=Enhydrobacter aerosac cus OX=225324 GN=queA PE=3 SV=1
MRVDLFDFELPDDLIAQRPVSPRDSARLLDVAPDGLHDCTVRELPALLRRGDLLVFNDTKVIPARLKGVRPGGAGRQDVAVEALLIRDLGSAHWLCFGRPVKRLKRGDVIAFAGGIGAKVETLNADGSIVLVFDRSGHDFLTALESSGAVPLPPYIRGGVADAHDRTDYQTLFARVDGSVAAPTAGLHFTPALMAALAEAGIGATNVTLHVGAGTFQPVRVEDTDQHKMHAEWGEVPESTAQAIGRTRQAGGRVVSIGTTALRLLETVARDQEGAIRAWSGETDIFITPGFRFRAVDLLLTNFHLPRSTLFMLVAAFAGLERIKAAYAHAIAHRYRFYSYGDCCLLHR

SEQ ID NO: 66222 - protein, 348 aa, Enhydrobacter sp.
  misc_feature (1)..(348): tr|A0A5C8PGD8|A0A5C8PGD8_9PROT S-adenosylmethionine:tRN A ribosyltransferase-isomerase OS=Enhydrobacter sp. CC- CFT640 OX=2586908 GN=queA PE=3 SV=1
MRVDAFDFELPPRLIAQRPAVPRDSARLLHLPRDGAPAEHVVRDLPGLLRSGDLLVFNDTRVIPARVYGRRDTGGRHEVLLLPPASPGAWTGMARGTAKLRAGTRLTFDGGLSATVTGFRDDGTITLDFGVADETVRETLHAHGHMPLPPYIRGGRDDARDREDYQTVMARRDGAVAAPTAALHFTEALLADLRAAGIMTATVTLHVGIGTFQPVRVDDTDQHVMHTEQGEIDAAAAASIDACRARGGRVVAVGTTSLRVLEAVALRHAGNLVPWQGGIDLFITPGFRFRAVDLLLTNFHLPRSTLFMLVSAFAGLDRMQALYAQAIARDFRFYSYGDACLLQRQEAA

SEQ ID NO: 66223 - protein, 357 aa, Enhydrobacter sp.
  misc_feature (1)..(357): tr|A0A1V2GP80|A0A1V2GP80_9PROT S-adenosylmethionine:tRN A ribosyltransferase-isomerase OS=Enhydrobacter sp. H5 OX=1907940 GN=queA PE=3 SV=1
MPLTLDDFDYQLPDELIARYPLAVRSASRLLYLPAHGQPKDQQFVDLPELLNSGDLVVFNDTKVMKARLFGQKASGGAVEVLVERILPDDATSHQKHTALCHVRASRSPKEGQTLSLADGNIHATVMGREDNLFLLAFDQPILPVLEHYGELPIPPYFERHADDNDETRYQTVFHDPTKLASVAAPTASLHFDDNVLAAFKSKGINTAFVTLHVGAGTFAPVKTEDILRHKMHSEYAELPQATADLINQTKARGGQVIAVGTTVTRVLETAFQKTASFENPMLSAWSGDTDIFIYPSFRFGVIDKLITNFHLPKSTLLMLVSAFAGSEPIKQAYQHAIEQQYRFFSYGDAMLLEKMV

SEQ ID NO: 66224 - protein, 360 aa, Enhygromyxa salina
  misc_feature (1)..(360): tr|A0A2S9YQW4|A0A2S9YQW4_9DELT S-adenosylmethionine:tRN A ribosyltransferase-isomerase OS=Enhygromyxa salina OX =215803 GN=queA PE=3 SV=1
MAGVAAVRVWSATVPSPADFDFELPTAQIAQRPPERRDAARLLLVPRAGPVQHRGIVDLPQLLADRPLIVVNDSKVVPARIHARRETGSRFELLIVDPAALGPGARVHAWIRKAKRLRVGELLQVEGAELTLRYQGRPTDQPDSRACVLEIVHGQLLAGLDAAGELPLPPYIARPDGPSAQDLERYQTVFARDRGSVAAPTAGLHFDDALLASLDHTAITLHVGPGTFLPLEAEDVRAHRVGAERYEISEQAAAQIESARAEGRAILAVGTTVTRTLESVAAAHGGRIVAGAGATELVITPGHPFSIVDRLLTNFHLPRSSLLMLVCSFAGRERVLAAYAEAVRANYRFYSYGDCMLVER

SEQ ID NO: 66225 - protein, 351 aa, Enhygromyxa salina
  misc_feature (1)..(351): tr|A0A0C2DEU0|A0A0C2DEU0_9DELT S-adenosylmethionine:tRN A ribosyltransferase-isomerase OS=Enhygromyxa salina OX =215803 GN=queA PE=3 SV=1
MLSPLDFDFELPSDQIAQQPPAQRNAARMLVVPRAGAPEHHGVSALPDLLADPRGRAPLVVVNDSKVVPARIYARRDTGKRFELLVVDPAALGPGARVHAWIRGAKRLRVGELLHVDGAALTLRYQGRPTNEPDSRACVLEIVEGELLAGLEAGGELPLPPYISRPNGPSAADLERYQTVFARDRGSVAAPTAGLHFDDALLASIDHAAITLHVGPGTFLPLEAEDVRAHKVGAERYEITEQAAARIEAARAQGRPILAVGTTVTRTLESVAAANGGRIIPGAGATELVITPGHRFLVVDRLLSNFHLPRSSLLMLVCSFAGRERVLAAYAEAVRAGYRFYSYGDCMLVER

SEQ ID NO: 66226 - protein, 406 aa, Enorma massiliensis
  misc_feature (1)..(406): tr|A0A1Y3U3Q4|A0A1Y3U3Q4_9ACTN S-adenosylmethionine:tRN A ribosyltransferase-isomerase OS=Enorma massiliensis O X=1472761 GN=queA PE=3 SV=1
MRTDDFDYNLPEELIAQAPAEPRDSCRLLVLHRGEPLATTGDVVPLAHGGSVEHRHFYDIIDYLEPGDLLVANETRVMPARLIGRKAKTGGMAETLLLTRREDQDSLGYVWECLVSPGKRLKPGAVIEYRAGGPHAPENAPVVLVGEVLDFVPDSRGGRLVRFTPQGENASGASRTLDEAIHAAGHVPLPPYITDYEGDPEKYQTVYAMSEEHSAAAPTAGLHFTPELIERIKQKGVGWATVELEVGIDTFRLVEEDDPTEHVMHTERYHVPQSVVDAVHATKAAGHRVIAVGTTAVRSLESAWDAQAAASEPPVVAHRFENAPGSAVEGMGDIVARENATTNLYLMPGSTYHVVDALITNFHVPRSTLMMLVSALATREQIMDAYREAVRERYRFFSFGDAMLIE

SEQ ID NO: 66227 - protein, 360 aa, Ensifer adhaerens
  misc_feature (1)..(360): tr|A0A2V4WFX2|A0A2V4WFX2_ENSAD S-adenosylmethionine:tRN A ribosyltransferase-isomerase OS=Ensifer adhaerens OX= 106592 GN=queA PE=3 SV=1
MRVDLFDFDLPETSIALRPASPRDSARMLVVRPDGADVLADKGVLDLPSFLREGDALVFNDTKVIPAQLEGIRRRGEEIATQVSLTLHMRVAPDRWKAFARPARRLKVDDRIAFGHGGSSCFLGTLDATVEEKGDAGEVTLRFDLSGPSLDEAIMAVGHIPLPPYIASKRAEDAQDRADYQTMYAREEGAVAAPTAGLHFTDRLFAKLDEAGIERHFVTLHVGAGTFLPVKADDTDDHVMHQEIGHVDARTAERLNAVKARGGRIVCVGTTSLRLIESATSEDGTVKSWSGPTGIFITPGYRFRAVDMLMTNFHLPKSTLFMLVSAFSGLDTMRAAYAHAIETGYRFYSYGDASLLFRKD

SEQ ID NO: 66228 - protein, 360 aa, Ensifer adhaerens
  misc_feature (1)..(360): tr|W8I214|W8I214_ENSAD S-adenosylmethionine:tRNA ribosy ltransferase-isomerase OS=Ensifer adhaerens OV14 OX=141 6753 GN=queA PE=3 SV=1
MRVDLFDFDLPETSIALRPVNPRDSARMLVVDPQAPELLTDHGVLDLPSFLRPGDALVFNDTKVIPAQLEGIRRRGEEITTPVSLTLHMRVAPDRWKAFARPARRLKVGDRIAFGHGGNSCMLGTLDATVEEKGDAGEVTLRFDLAGPLLDEAIMAVGHIPLPPYIASKRAEDAQDRVDYQTVYAREEGAVAAPTAGLHFTERLFSRLNELGIERHFVTLHVGAGTFLPVKADDTDDHVMHLEIGQVDAATAERLNAVKARGGRMVCVGTTSLRLIESAADEHGIIHPWSGPTGIFITPGYRFRAVDMLMTNFHLPKSTLFMLVSAFCGLETMRAAYTYAIESGYRFYSYGDSSLLFRKD

SEQ ID NO: 66229 - protein, 360 aa, Ensifer alkalisoli
  misc_feature (1)..(360): tr|A0A1E3VFC3|A0A1E3VFC3_9RHIZ S-adenosylmethionine:tRN A ribosyltransferase-isomerase OS=Ensifer alkalisoli OX =1752398 GN=queA PE=3 SV=1
MRVDLFDFDLPETSIALRPASPRDSARMLVVRPQGERLLADNCVLDLPSFLKAGDALVFNDTKVIPAQLEGIRRRGEDVATSVSLTLHMRVTADRWKAFARPAKRLKAGDRISFGHGENVCLLGALEATVEEKGEAGEVTLRFDLSGPALDEAIMSVGHIPLPPYIASKRPEDARDRTDYQTIYAREEGAVAAPTAGLHFTDRLFAKLDQAGIERHFVTLHVGAGTFLPVKADDTEDHVMHEEIGHVDAATAEKINAVRARGGRIVCVGTTSLRLVESAATKEGSIRPWSGPTGIFITPGYRFRAVDALVTNFHLPKSTLFMLVSAFAGLDTMRAAYTHAIASGYRFYSYGDASLLFRKD

SEQ ID NO: 66230 - protein, 361 aa, Ensifer glycinis
  misc_feature (1)..(361): tr|A0A178Y591|A0A178Y591_9RHIZ S-adenosylmethionine:tRN A ribosyltransferase-isomerase OS=Ensifer glycinis OX=1 472378 GN=queA PE=3 SV=1
MRVDLFDFDLPESSIALRPASPRDSARMLVVQPEAERVLGDYGVLDLPSFLKPGDALVFNDTKVIPAQLEGIRRRGEDVSTQVSLTLHMRVASDRWKAFARPARRLKPGDRISFGHGENACLLGALDATVEDKGEAGEVTLRFDLSGPVLDEAIMSVGHIPLPPYIASKRPEDARDRTDYQTVYAREEGAVAAPTAGLHFTDRLFGKLDEAGIERHFVTLHVGAGTFLPVKADDTNDHVMHEEIGHVDAATAERLNAVRARGGRIVCVGTTSLRLIESAATEEGKVRPWSGPTGIFITPGYRFRAVDMLMTNFHLPKSTLFMLVSAFAGLETMRAAYAHAIAAGYRFYSYGDASLLFRKEQ

SEQ ID NO: 66231 - protein, 372 aa, Ensifer sojae
  misc_feature (1)..(372): tr|A0A249PAQ4|A0A249PAQ4_9RHIZ S-adenosylmethionine:tRN A ribosyltransferase-isomerase OS=Ensifer sojae CCBAU 0 5684 OX=716928 GN=queA PE=3 SV=1
MPRGGFAFVLQPMRVDLFDFDLPESSIALRPASPRDSARMLVVRPEGEPVLADHGVLDLTSFLNPGDALVFNDTKVIPAQLEGIRRRGEDVATAVSLTLHMRVASDRWKAFARPARRLKSGDRIQFGHGENTCLLGALEATVEEKGEAGEVTLRFDLSGPALDEAILGVGHIPLPPYIASKRPEDARDRADYQTIFAREEGAVAAPTAGLHFTDRLFAKLDEAGIERHFVTLHVGAGTFLPVKADDTDDHVMHEEIGHVDAATAEKLNAVRARGGRIVCVGTTSLRLIESAATEGGEIRHWSGPTGIFITPGYRFRAVDVLMTNFHLPKSTLFMLVSAFAGLDTMRAAYAHAIATGYRFYSYGDASLLFRKD

SEQ ID NO: 66232 - protein, 360 aa, Ensifer sp.
  misc_feature (1)..(360): tr|A0A2N8JEH2|A0A2N8JEH2_9RHIZ S-adenosylmethionine:tRN A ribosyltransferase-isomerase OS=Ensifer sp. MMN_5 OX= 2037902 GN=queA PE=3 SV=1
MRVDLFDFDLPENSIALRPASPRDSARMLIVRPDGEPVLEDRGVLDLPSFLRPGDALVFNDTKVIPAQLEGVRYRGEDISTPVSLTLHMRVAPSRWKAFARPARRLKPGDRISFGHGGNACLLGSLEAVVEEKGDAGEVTLRFDLSGPSLDEAIMAVGHIPLPPYIASKRADDARDRTDYQTVYAREEGAVAAPTAGLHFTDRLFASLDEAGIERYFVTLHVGAGTFLPVKADDTADHVMHEEIGHVDPVTAAKLNAVRERGGRIVCVGTTSLRLIESAAAEDGSIRPWSGATGIFITPGYRFRAVDMLMTNFHLPRSTLFMLVSAFAGLETMHAAYAHAIATGYRFYSYGDSSLLFRKD

SEQ ID NO: 66233 - protein, 360 aa, Ensifer sp.
  misc_feature (1)..(360): tr|A0A1C0T5P6|A0A1C0T5P6_9RHIZ S-adenosylmethionine:tRN A ribosyltransferase-isomerase OS=Ensifer sp. LC54 OX=1 873715 GN=queA PE=3 SV=1
MRVDLFDFDLPETSIALRPVSPRDSARMLVVDPQAPELLTDHGVLDLPSFLRPGDALVFNDTKVIPAQLEGIRRRGEEITTPVSLTLHMRVGPDRWKAFARPARRLKVGDRIAFGHGGNSCMLGTLDATVEEKGDAGEVTLRFDLAGPLLDEAIMAVGHIPLPPYIASKRAEDAQDRTDYQTVYAREEGAVAAPTAGLHFTERLFSRLNELGIERHFVTLHVGAGTFLPVKADDTDDHMMHQEIGLVDARTAERLNAVKARGGRIVCVGTTSLRLIESAADEQGAIHSWSGPTDIFITPGYRFRAVDMLMTNFHLPKSTLFMLVSAFCGLETMRAAYAHAIETGYRFYSYGDSSLLFRKD

SEQ ID NO: 66234 - protein, 357 aa, Enterobacillus tribolii
  misc_feature (1)..(357): tr|A0A370QNC3|A0A370QNC3_9ENTR S-adenosylmethionine:tRN A ribosyltransferase-isomerase OS=Enterobacillus tribol ii OX=1487935 GN=queA PE=3 SV=1
MRVADFSFELPDELIARYPQAERSGCRLLSLDGPTGALEHGTFTDILDKLNPGDLLVFNNTRVIPARLFGRKASGGKLEVLVERVLDDTRVLAHVRASKAPKPGAELLLGDDENIRATMVARHDALFELHFDDGRDVLSILNAAGHMPLPPYIDRPDEEADRELYQTVYADRPGAVAAPTAGLHFDEPLLEKLRAKGVEMAFVTLHVGAGTFQPVRVDTIENHVMHSEYAEVPPEVVEAVLACKARGNRVIAVGTTSVRSLESAAAASQDALIAPFFDDTQIFIYPGYHYQVIDALITNFHLPESTLIMLVSAFAGYRNTMAAYHEAVAQRYRFFSYGDAMFITHNAAAEQETVSGQ

SEQ ID NO: 66235 - protein, 356 aa, Enterobacter agglomerans
  misc_feature (1)..(356): tr|A0A379AKP1|A0A379AKP1_ENTAG S-adenosylmethionine:tRN A ribosyltransferase-isomerase OS=Enterobacter agglomer ans OX=549 GN=queA PE=3 SV=1
MRVADFAFELPESLIAHYPQAQRSGCRLLSLEGPSGTLSHGVFTDVLDKLNPGDLLVFNNTRVIPARVFGRKASGGKIEMLVERMLDDKRVLAHVRASKAPKPGAELLLGEDESVKATMVARHDALFEIVFDDERAVLDILNSVGHMPLPPYIDRPDEEADRELYQTVYSARPGAVAAPTAGLHFDEPLLQALKEKGIEMAFVTLHVGAGTFQPVRVDTIEEHHMHAEYAEVPQEVVDAVLACKARGNKVVAVGTTSVRSLESAAKASQDALIAPFFDDTQIFIYPGYEYQVIDALITNFHLPESTLIMLVSAFAGYQHTMAAYRAAVAEQYRFFSYGDAMFISKNPQAPLEKVGD

SEQ ID NO: 66236 - protein, 356 aa, Enterobacter agglomerans
  misc_feature (1)..(356): tr|A0A2A7V534|A0A2A7V534_ENTAG S-adenosylmethionine:tRN A ribosyltransferase-isomerase OS=Enterobacter agglomer ans OX=549 GN=queA PE=3 SV=1
MRVADFAFELPESLIAHYPQAQRSGCRLLTLDGPSGALSHGVFTDVLDKLNPGDLLVFNNTRVIPARVFGRKASGGKIEMLVERMLDDKRVLAHVRASKAPKPGAELLLGEDESVKATMVARHDALFEIAFDDERAVLDILNSVGHMPLPPYIDRPDEEADRELYQTVYSARPGAVAAPTAGLHFDEPLLQALKEKGVEMAFVTLHVGAGTFQPVRVETIEEHHMHAEYAEVPQEVVDAVLACKARGNKVVAVGTTSVRSLESAAKASQDALIAPFFDDTQIFIYPGYEYQVIDALITNFHLPESTLIMLVSAFAGYQHTMAAYRAAVAEQYRFFSYGDAMFISKNPQAPLEKVGD

SEQ ID NO: 66237 - protein, 356 aa, Enterobacter asburiae
  misc_feature (1)..(356): tr|A0A376F5J6|A0A376F5J6_ENTAS S-adenosylmethionine:tRN A ribosyltransferase-isomerase OS=Enterobacter asburiae OX=61645 GN=queA PE=3 SV=1
MRVADFSFELPESLIAHYPMPERSSCRLLSLDGPTGELTHGTFTDLLDKLNPGDLLVFNNTRVIPARLFGRKASGGKIEVLVERMLDDKRILAHIRASKAPKPGAELLLGDDESIKATMTARHDALFEVAFDDERTVLDILNAIGHMPLPPYIERPDEEADRELYQTVYSQKPGAVAAPTAGLHFDEPLLEKLRAKGVEMAFVTLHVGAGTFQPVRVDSIEDHIMHSEYAEVPQDVVDAVLAAKGRGSRVVAVGTTSVRSLESAAQAAKSDLIEPFFGDTQIFIYPGYQYKVIDALVTNFHLPESTLIMLVSAFAGYQHTMAAYKSAVEQKYRFFSYGDAMFITYNPLALNERVGE

SEQ ID NO: 66238 - protein, 356 aa, Enterobacter asburiae
  misc_feature (1)..(356): tr|A0A5A9BNE3|A0A5A9BNE3_ENTAS S-adenosylmethionine:tRN A ribosyltransferase-isomerase OS=Enterobacter asburiae OX=61645 GN=queA PE=3 SV=1
MRVADFSFELPESLIAHYPMPERSSCRLLSLDGPTGELTHGTFTDLLDKLNPGDLLVFNNTRVIPARLFGRKASGGKIEVLVERMLDDKRILAHIRASKAPKPGAELLLGDDESIKATMTARHDALFEVAFDDERTVLDILNAIGHMPLPPYIERPDEEADRELYQTVYSQKPGAVAAPTAGLHFDEPLLEKLRAKGVEMAFVTLHVGAGTFQPVRVDSIEDHIMHSEYAEVPQDVVDAVLAAKARGSRVVAVGTTSVRSLESAAQAAKNDLIEPFFGDTQIFIYPGYQYKVIDALVTNFHLPESTLIMLVSAFAGYQHTMAAYKSAVEQKYRFFSYGDAMFITYNPLALNERVGE

SEQ ID NO: 66239 - protein, 356 aa, Enterobacter bugandensis
  misc_feature (1)..(356): tr|A0A167H0G7|A0A167H0G7_9ENTR S-adenosylmethionine:tRN A ribosyltransferase-isomerase OS=Enterobacter buganden sis OX=881260 GN=queA PE=3 SV=1
MRVADFSFELPESLIAHYPMPERSSCRLLSLDGPTGELTHGTFTDLLDKLNPGDLLVFNNTRVIPARLFGRKASGGKIEVLVERMLDDKRILAHIRASKAPKPGAELLLGDDESIKATMTARHDALFEVAFDDERTVLDILNAIGHMPLPPYIERPDEEADRELYQTVYSQKPGAVAAPTAGLHFDEPLLEKLRAKGVEMAFVTLHVGAGTFQPVRVDSIEDHIMHSEYAEVPQDVVDAVLAAKARGSRVVAVGTTSVRSLESAAQAAKNGLIEPFFGDTQIFIYPGYQYKVIDALVTNFHLPESTLIMLVSAFAGYQHTMNAYKSAVEQKYRFFSYGDAMFITYNPLALNERVGE

SEQ ID NO: 66240 - protein, 356 aa, Enterobacter cancerogenus
  misc_feature (1)..(356): tr|D2ZFY2|D2ZFY2_9ENTR S-adenosylmethionine:tRNA ribosy ltransferase-isomerase OS=Enterobacter cancerogenus ATC C 35316 OX=500639 GN=queA PE=3 SV=1
MRVADFSFELPESLIAHYPMPERSSCRLLSLDGPTGELTHGTFTDLLDKLNPGDLLVFNNTRVIPARLFGRKASGGKIEVLVERMLDDKRILAHIRASKAPKPGAELLLGDDESTKATMTARHDALFEVEFNDERTVLDILNAIGHMPLPPYIERPDEESDRELYQTVYSQKPGAVAAPTAGLHFDEPLLEKLRAKGIEMAFVTLHVGAGTFQPVRVDSIEDHIMHSEYAEVPQEVVDAVLAAKARGSSVVAVGTTSVRSLESAAQAAKTDLIEPFFGDTQIFIYPGYQYKVIDALVTNFHLPESTLIMLVSAFAGYQHTMTAYKSAVEQKYRFFSYGDAMFITYNPQALNERVGE

SEQ ID NO: 66241 - protein, 356 aa, Enterobacter cancerogenus
  misc_feature (1)..(356): tr|A0A2I6E8R1|A0A2I6E8R1_9ENTR S-adenosylmethionine:tRN A ribosyltransferase-isomerase OS=Enterobacter cancerog enus OX=69218 GN=queA PE=3 SV=1
MRVADFSFELPESLIAHYPMPERSSCRLLSLDGPTGELTHGTFTDLLDKLNPGDLLVFNNTRVIPARLFGRKASGGKIEVLVERMLDDKRILAHIRASKAPKPGAELLLGDDESIKATMTARHDALFEVEFNDERTVLDILNAIGHMPLPPYIERPDEESDRELYQTVYSQKPGAVAAPTAGLHFDEPLLEKLRAKGIEMAFVTLHVGAGTFQPVRVDSIEDHIMHSEYAEVPQEVVDAVLAAKARGSRVVAVGTTSVRSLESAAQAAKTDLIEPFFGDTQIFIYPGYQYKVIDALVTNFHLPESTLIMLVSAFAGYQHTMTAYKSAVEQKYRFFSYGDAMFITYNPQALNERVGE

SEQ ID NO: 66242 - protein, 356 aa, Enterobacter chengduensis
  misc_feature (1)..(356): tr|A0A0F4BSG7|A0A0F4BSG7_9ENTR S-adenosylmethionine:tRN A ribosyltransferase-isomerase OS=Enterobacter chengdue nsis OX=2494701 GN=queA PE=3 SV=1
MRVADFSFELPESLIAHYPMPERSSCRLLSLDGPTGELTHGTFTDLLDKLNPGDLLVFNNTRVIPARLFGRKASGGKIEVLVERMLDDKRILAHIRASKAPKPGAELLLGDDESIKATMTARHDALFEVEFNDERTVLDILNAIGHMPLPPYIERPDEEADRELYQTVYSQKPGAVAAPTAGLHFDEPLLEKLRAKGVEMAFVTLHVGAGTFQPVRVDSIEDHIMHSEYAEVPQDVVDAVLAAKARGSRVVAVGTTSVRSLESAAQAAKNDLIEPFFGDTQIFIYPGYQYKVIDALVTNFHLPESTLIMLVSAFAGYQHTMNAYKSAVEQKYRFFSYGDAMFITYNPLALNERVGE

SEQ ID NO: 66243 - protein, 356 aa, Enterobacter chuandaensis
  misc_feature (1)..(356): tr|A0A3A3ZVT3|A0A3A3ZVT3_9ENTR S-adenosylmethionine:tRN A ribosyltransferase-isomerase OS=Enterobacter chuandae nsis OX=2497875 GN=queA PE=3 SV=1
MRVADFSFELPESLIAHYPMPERSSCRLLSLDGPTGDLTHGTFTDLLDKLNPGDLLVFNNTRVIPARLFGRKASGGKIEVLVERMLDDKRILAHIRASKAPKPGAELLLGDDESIKATMTARHDALFEVEFDDERSVLDILNAIGHMPLPPYIERPDEEADRELYQTVYSQKPGAVAAPTAGLHFDEPLLEKLRAKGIEMAFVTLHVGAGTFQPVRVDSIEDHIMHSEYAEVPQEVVDAVLAAKARGNRVVAVGTTSVRSLESAAQAAKSELIEPFFGDTQIFIYPGYQYKVIDALVTNFHLPESTLIMLVSAFAGYQHTMNAYKSAVEQKYRFFSYGDAMFITYNPLALNERVGE

SEQ ID NO: 66244 - protein, 356 aa, Enterobacter cloacae
  misc_feature (1)..(356): tr|A0A0F0TWU6|A0A0F0TWU6_ENTCL S-adenosylmethionine:tRN A ribosyltransferase-isomerase OS=Enterobacter cloacae subsp. cloacae OX=336306 GN=queA PE=3 SV=1
MRVADFSFELPESLIAHYPMPERSSCRLLSLDGPTGELTHGTFTDLLDKLNPGDLLVFNNTRVIPARLFGRKASGGKIEVLVERMLDDKRILAHIRASKAPKPGAELLLGDDESIKATMTARHDALFEVEFNDERTVLDILNAIGHMPLPPYIERPDEEADRELYQTVYSQKPGAVAAPTAGLHFDEPLLEKLRAKGVEMAFVTLHVGAGTFQPVRVDSIEDHIMHSEYAEVPQEVVDAVLAAKARGSRVVAVGTTSVRSLESAAQAAQKDLIEPFFGDTQIFIYPGYQYKVIDALVTNFHLPESTLIMLVSAFAGYQHTMAAYKSAVEQKYRFFSYGDAMFITYNPLALNERVGE

SEQ ID NO: 66245 - protein, 356 aa, Enterobacter cloacae
  misc_feature (1)..(356): tr|A0A5D9SZ92|A0A5D9SZ92_ENTCL S-adenosylmethionine:tRN A ribosyltransferase-isomerase OS=Enterobacter cloacae OX=550 GN=queA PE=3 SV=1
MRVADFSFELPESLIAHYPMPERSSCRLLSLDGPTGALTHGTFTDLLDKLNPGDLLVFNNTRVIPARLFGRKASGGKIEVLVERMLDDKRILAHIRASKAPKPGAELLLGDDESIKATMTARHDALFEVEFNDERTVLDILNAIGHMPLPPYIERPDEEADRELYQTVYSQKPGAVAAPTAGLHFDEPLLEKLRAKGIEMAFVTLHVGAGTFQPVRVDSIEDHIMHSEYAEVPQEVVDAVLAAKARGSRVVAVGTTSVRSLESAAQAAKKELIEPFFGDTQIFIYPGYQYKVIDALVTNFHLPESTLIMLVSAFAGYQYTMNAYKSAVEQKYRFFSYGDAMFITYNPQALNERVGE

SEQ ID NO: 66246 - protein, 356 aa, Enterobacter genomosp.
  misc_feature (1)..(356): tr|A0A0X4EVC3|A0A0X4EVC3_9ENTR S-adenosylmethionine:tRN A ribosyltransferase-isomerase OS=Enterobacter genomosp . O OX=2364150 GN=queA PE=3 SV=1
MRVADFSFELPESLIAHYPMPERSSCRLLSLDGPTGELTHGTFTDLLDKLNPGDLLVFNNTRVIPARLFGRKASGGKIEVLVERMLDDKRILAHIRASKAPKPGAELLLGDDESIKATMTARHDALFEVAFDDERSVLDILNAIGHMPLPPYIERPDEEADRELYQTVYSQKPGAVAAPTAGLHFDEPLLEKLRAKGIEMAFVTLHVGAGTFQPVRVDSIEDHIMHSEYAEVPQDVVDAVLAAKARGSRVVAVGTTSVRSLESAAQAAKNSLIEPFFGDTQIFIYPGYQYKVIDALVTNFHLPESTLIMLVSAFAGYQHTMNAYKSAVEQKYRFFSYGDAMFITYNPLALNERVGE

SEQ ID NO: 66247 - protein, 356 aa, Enterobacter hormaechei
  misc_feature (1)..(356): tr|F5RV43|F5RV43_9ENTR S-adenosylmethionine:tRNA ribosy ltransferase-isomerase OS=Enterobacter hormaechei ATCC 49162 OX=888063 GN=queA PE=3 SV=1
MRVADFSFELPESLIAHYPMPERSSCRLLSLDGPTGALTHGTFTDLLDKLNPGDLLVFNNTRVIPARLFGRKASGGKIEVLVERMLDDKRILAHIRASKAPKPGAELLLGDDESIKATMTARHDALFEVEFNDERTVLDILNAIGHMPLPPYIERPDEEADRELYQTVYSQKPGAVAAPTAGLHFDEPLLEKLRAKGIEMAFVTLHVGAGTFQPVRVDSIEDHIMHSEYAEVPQEVVDAVLAAKARGSRVVAVGTTSVRSLESAAQAAKSELIEPFFGDTQIFIYPGYQYKVIDALVTNFHLPESTLIMLVSAFAGYQHTMNAYKSAVEQKYRFFSYGDAMFITYNPQALNERVGE

SEQ ID NO: 66248 - protein, 356 aa, Enterobacter hormaechei
  misc_feature (1)..(356): tr|A0A5A9YDK1|A0A5A9YDK1_9ENTR S-adenosylmethionine:tRN A ribosyltransferase-isomerase OS=Enterobacter hormaech ei OX=158836 GN=queA PE=3 SV=1
MRVADFSFELPESLIAHYPMPERSSCRLLSLDGPTGALTHGTFTDLLDKLNPGDLLVFNNTRVIPARLFGRKASGGKIEVLVERMLDDKRILAHIRASKAPKPGAELLLGDDESIKATMTARHDALFEVEFNDERTVLDILNAIGHMPLPPYIERPDEEADRELYQTVYSQKPGAVAAPTAGLHFDEPLLEKLRAKGIEMAFVTLHVGAGTFQPVRVDSIEDHIMHSEYAEVPQEVVDAVLAAKARGNRVVAVGTTSVRSLESAAQAAKSELIEPFFGDTQIFIYPGYQYKVIDALVTNFHLPESTLIMLVSAFAGYQHTMNAYKSAVEQKYRFFSYGDAMFITYNPQALNERVGE

SEQ ID NO: 66249 - protein, 356 aa, Enterobacter huaxiensis
  misc_feature (1)..(356): tr|A0A3R9W162|A0A3R9W162_9ENTR S-adenosylmethionine:tRN A ribosyltransferase-isomerase OS=Enterobacter huaxiens is OX=2494702 GN=queA PE=3 SV=1
MRVADFSFELPESLIAHYPMPERSSCRLLSLDGPTGELTHGTFTDLLDKLNPGDLLVFNNTRVIPARLFGRKASGGKIEVLVERMLDDKRILAHIRASKAPKPGAELLLGDDESIKATMTARHDALFEVAFDDERTVLDILNAIGHMPLPPYIERPDEEADRELYQTVYSQKPGAVAAPTAGLHFDEPLLEKLRAKGIEMAFVTLHVGAGTFQPVRVDSIEDHIMHSEYAEVPQDVVDAVLAAKARGSRVVAVGTTSVRSLESAAQAAKRDLIEPFFGDTQIFIYPGYQYKVIDALVTNFHLPESTLIMLVSAFAGYQHTMNAYKSAVEQKYRFFSYGDAMFITYNPQALNERVGE

SEQ ID NO: 66250 - protein, 356 aa, Enterobacter kobei; identical to SEQ ID NO: 66244
  misc_feature (1)..(356): tr|A0A5E1A1I0|A0A5E1A1I0_9ENTR S-adenosylmethionine:tRN A ribosyltransferase-isomerase OS=Enterobacter kobei OX =208224 GN=queA PE=3 SV=1

SEQ ID NO: 66251 - protein, 356 aa, Enterobacter kobei
  misc_feature (1)..(356): tr|A0A156KN01|A0A156KN01_9ENTR S-adenosylmethionine:tRN A ribosyltransferase-isomerase OS=Enterobacter kobei OX =208224 GN=queA PE=3 SV=1
MRVADFSFELPESLIAHYPMPERSSCRLLSLDGPTGELTHGTFTDLLDKLNPGDLLVFNNTRVIPARLFGRKASGGKIEVLVERMLDDKRILAHIRASKAPKPGAELLLGDDESIKATMTARHDALFEVEFQDERTVLDILNAIGHMPLPPYIERPDEEADRELYQTVYSQKPGAVAAPTAGLHFDEPLLEKLRAKGVEMAFVTLHVGAGTFQPVRVDSIEDHIMHSEYAEVPQEVVDAVLAAKARGNRVVAVGTTSVRSLESAAQAAKTGLIEPFFGDTQIFIYPGYQYKVIDALVTNFHLPESTLIMLVSAFAGYQHTMNAYKSAVEQKYRFFSYGDAMFITYNPQALNERVGE

SEQ ID NO: 66252 - protein, 356 aa, Enterobacter lignolyticus
  misc_feature (1)..(356): tr|E3G709|E3G709_ENTLS S-adenosylmethionine:tRNA ribosy ltransferase-isomerase OS=Enterobacter lignolyticus (st rain SCF1) OX=701347 GN=queA PE=3 SV=1
MRVADFSFELPESLIAHYPQPERSSCRLLSLDGPTGTLTHGTFTDLLDKLNPGDLLVFNNTRVIPARLFGRKASGGKIEVLVERMLDDKRILAHIRASKAPKPGTELLLGDDESINATMTARHDALFEVEFNDERPVLDILNAIGHMPLPPYIDRPDEDADRELYQTVYSQKPGAVAAPTAGLHFDEPLLAALREKGIEMAFVTLHVGAGTFQPVRVDSIEDHIMHSEYAEVPQEVVDAVMAAKARGSRVIAVGTTSVRSLESAAQAAKKERIEPFFGDTQIFIYPGYQYQIIDALVTNFHLPESTLIMLVSAFAGYQHTMNAYKAAVEQNYRFFSYGDAMFITYNPQALHERVGD

SEQ ID NO: 66253 - protein, 367 aa, Enterobacter ludwigii
  misc_feature (1)..(367): tr|G8LPA6|G8LPA6_9ENTR S-adenosylmethionine:tRNA ribosy ltransferase-isomerase OS=Enterobacter ludwigii OX=2997 67 GN=queA PE=3 SV=1
MPPVFKSRVYVMRVADFSFELPESLIAHYPMPERSSCRLLSLDGPTGELTHGTFTDLLDKLNPGDLLVFNNTRVIPARLFGRKASGGKIEVLVERMLDDKRILAHIRASKAPKPGAELLLGDDESIRATMTARHDALFEVAFNDERTVLDILNAIGHMPLPPYIERPDEEADRELYQTVYSQKPGAVAAPTAGLHFDEPLLEKLRAKGIEMAFVTLHVGAGTFQPVRVDSIEDHIMHSEYAEVPQEVVDAVLAAKARGNRVVAVGTTSVRSLESAAQAAKNDLIEPFFGDTQIFIYPGYQYNVIDALVTNFHLPESTLIMLVSAFAGYQHTMAAYKSAVEQKYRFFSYGDAMFITYNPQALNERVGE

SEQ ID NO: 66254 - protein, 356 aa, Enterobacter ludwigii
  misc_feature (1)..(356): tr|W0BLX8|W0BLX8_9ENTR S-adenosylmethionine:tRNA ribosy ltransferase-isomerase OS=Enterobacter ludwigii OX=2997 67 GN=queA PE=3 SV=1
MRVADFSFELPESLIAHYPMPERSSCRLLSLDGPTGELTHGTFTDLLDKLNPGDLLVFNNTRVIPARLFGRKASGGKIEVLVERMLDDKRILAHIRASKAPKPGAELLLGDDESIRATMTARHDALFEVAFNDERTVLDILNAIGHMPLPPYIERPDEEADRELYQTVYSQKPGAVAAPTAGLHFDEPLLEKLRAKGIEMAFVTLHVGAGTFQPVRVDSIEDHIMHSEYAEVPQEVVDAVLAAKARGNRVVAVGTTSVRSLESAAQAAKNDLIEPFFGDTQIFIYPGYQYNVIDALVTNFHLPESTLIMLVSAFAGYQHTMTAYKSAVEQKYRFFSYGDAMFITYNPQALNERVGE

SEQ ID NO: 66255 - protein, 356 aa, Enterobacter mori
  misc_feature (1)..(356): tr|A0A2J0N9W2|A0A2J0N9W2_9ENTR S-adenosylmethionine:tRN A ribosyltransferase-isomerase OS=Enterobacter mori OX= 539813 GN=queA PE=3 SV=1
MRVADFSFELPESLIAHYPMPERSSCRLLSLDGPTGELTHGTFTDLLDKLNPGDLLVFNNTRVIPARLFGRKASGGKIEVLVERMLDDKRILAHIRASKAPKPGAELLLGDDESIKATMTARHDALFEVAFDDERTVLDILNAIGHMPLPPYIERPDEEADRELYQTVYSQKPGAVAAPTAGLHFDEPLLEKLRAKGVEMAFVTLHVGAGTFQPVRVDSIEDHIMHSEYAEVPQEVVDAVLAAKGRGSRVIAVGTTSVRSLESAAQAAKSDLIEPFFGDTQIFIYPGYQYKVIDALVTNFHLPESTLIMLVSAFAGYQHTMNAYKSAVEQKYRFFSYGDAMFITYNPLALNERVGE

SEQ ID NO: 66256 - protein, 356 aa, Enterobacter roggenkampii
  misc_feature (1)..(356): tr|V3E2E3|V3E2E3_9ENTR S-adenosylmethionine:tRNA ribosy ltransferase-isomerase OS=Enterobacter roggenkampii OX= 1812935 GN=queA PE=3 SV=1
MRVADFSFELPESLIAHYPMPERSSCRLLSLDGPTGELTHGTFTDLLDKLNPGDLLVFNNTRVIPARLFGRKASGGKIEVLVERMLDDKRILAHIRASKAPKPGAELLLGDDESIKATMTARHDALFEVEFNDERTVLDILNAIGHMPLPPYIVRPDEEADRELYQTVYSQKPGAVAAPTAGLHFDEPLLEKLRAKGIEMAFVTLHVGAGTFQPVRVDSIEDHIMHSEYAEVPQDVVDAVLAAKARGSRVVAVGTTSVRSLESAAQAAKSELIEPFFGDTQIFIYPGYQYKVIDALVTNFHLPESTLIMLVSAFAGYQHTMNAYKSAVEQKYRFFSYGDAMFITYNPQALNERVGE

SEQ ID NO: 66257 - protein, 356 aa, Enterobacter roggenkampii
  misc_feature (1)..(356): tr|A0A167QT43|A0A167QT43_9ENTR S-adenosylmethionine:tRN A ribosyltransferase-isomerase OS=Enterobacter roggenka mpii OX=1812935 GN=queA PE=3 SV=1
MRVADFSFELPESLIAHYPMPERSSCRLLSLDGPTGELTHGTFTDLLDKLNPGDLLVFNNTRVIPARLFGRKASGGKIEVLVERMLDDKRILAHIRASKAPKPGAELLLGDDESIKATMTARHDALFEVEFNDERTVLDILNAIGHMPLPPYIERPDEEADRELYQTVYSQKPGAVAAPTAGLHFDEPLLEKLRAKGIEMAFVTLHVGAGTFQPVRVDSIEDHIMHSEYAEVPQDVVDAVLAAKARGSRVVAVGTTSVRSLESAAQAAKSELIEPFFGDTQIFIYPGYQYKVIDALVTNFHLPESTLIMLVSAFAGYQHTMNAYKSAVEQKYRFFSYGDAMFITYNPQALNERVGE

SEQ ID NO: 66258 - protein, 356 aa, Enterobacter sichuanensis
  misc_feature (1)..(356): tr|A0A0F1B5Q0|A0A0F1B5Q0_9ENTR S-adenosylmethionine:tRN A ribosyltransferase-isomerase OS=Enterobacter sichuane nsis OX=2071710 GN=queA PE=3 SV=1
MRVADFSFELPESLIAHYPMPERSSCRLLSLDGPTGELTHGTFTDLLDKLNPGDLLVFNNTRVIPARLFGRKASGGKIEVLVERMLDDKRILAHIRASKAPKPGAELLLGDDESINATMTARHDALFEVEFNDERTVLDILNAIGHMPLPPYIERPDEEADRELYQTVYSQKPGAVAAPTAGLHFDEPLLDKLRAKGVEMAFVTLHVGAGTFQPVRVDSIEDHIMHSEYAEVPQDVVDAVLAAKARGSRVVAVGTTSVRSLESAAQAAKNGLIEPFFGDTQIFIYPGYQYKVIDALVTNFHLPESTLIMLVSAFAGYQHTMNAYKSAVEQKYRFFSYGDAMFITYNPLALNERVGE

SEQ ID NO: 66259 - protein, 356 aa, Enterobacter soli
  misc_feature (1)..(356): tr|A0A198GR96|A0A198GR96_9ENTR S-adenosylmethionine:tRN A ribosyltransferase-isomerase OS=Enterobacter soli ATC C BAA-2102 OX=1354262 GN=queA PE=3 SV=1
MRVADFSFELPDSLIAHYPMPERSSCRLLSLDGPTGALTHGTFTDLLDKLNPGDLLVFNNTRVIPARLFGRKASGGKIEVLVERMLDDKRILAHIRASKAPKPGAELLLGDDESIKATMTARHDALFEVEFNDERTVLDILNTIGHMPLPPYIERPDEEADRELYQTVYSQKPGAVAAPTAGLHFDEPLLEKLRAKGVEMAFVTLHVGAGTFQPVRVDSIEDHIMHSEYAEVPQDVVDAVLAAKARGSRVIAVGTTSVRSLESAAQAAQNGLIEPFFGDTQIFIYPGYQYKVIDALVTNFHLPESTLIMLVSAFAGYQHTMTAYKSAVEQKYRFFSYGDAMFITYNPQALNERVGE

SEQ ID NO: 66260 - protein, 356 aa, Enterobacter sp.
  misc_feature (1)..(356): sp|A4W778|QUEA_ENT38 S-adenosylmethionine:tRNA ribosylt ransferase-isomerase OS=Enterobacter sp. (strain 638) O X=399742 GN=queA PE=3 SV=1
MRVADFSFELPESLIAHYPQPERSGCRLLSLDGPTGALTHGTFTDLLDKLNPGDLLVFNNTRVIPARLFGRKASGGKIEVLVERMLDDKRILAHIRASKAPKPGAELLLGDDESINATMVARHDALFEVEFNDARPVLDILNAIGHMPLPPYIDRPDEDADRELYQTVYSQKPGAVAAPTAGLHFDEPLLERLREKGIEMAFVTLHVGAGTFQPVRVDTIEDHIMHSEYAEVPQDVVDAVLAAKARGNRVIAVGTTSVRSLESAAQAAKKDLIEPFFGDTKIFIYPGYQYTVIDALVTNFHLPESTLIMLVSAFAGYQNTMNAYKAAVEQNYRFFSYGDAMFITYNPQALNERVGE

SEQ ID NO: 66261 - protein, 354 aa, Enterobacter sp.
  misc_feature (1)..(354): tr|R9VV39|R9VV39_9ENTR S-adenosylmethionine:tRNA ribosy ltransferase-isomerase OS=Enterobacter sp. R4-368 OX=11 66130 GN=queA PE=3 SV=1
MRVADFSFELPESLIAHYPQPERSSCRLLSLDGPTGALTHGTFTDLLDKLNPGDLLVFNNTRVIPARLFGRKASGGKIEVLVERMLDDKRILAHIRASKAPKPGAELLLGDAEDIQATMVARHDALFEVEFHDERPVLDILNAIGHMPLPPYIDRPDEDADRELYQTVYSEKPGAVAAPTAGLHFDEPLLERLRNKGIEMAFVTLHVGAGTFQPVRVDSIEDHIMHSEYAEVPQKVVDAVLAAKARGNRVVAVGTTSVRSLESAAQAAKKDLIEPFFGDTQIFIYPGYQYRVIDALVTNFHLPESTLIMLVSAFAGYQHTMNAYRAAVAEKYRFFSYGDAMFITYNPQAILERP

SEQ ID NO: 66262 - protein, 357 aa, Enterobacterales bacterium
  misc_feature (1)..(357): tr|A0A2I0FSM3|A0A2I0FSM3_9GAMM S-adenosylmethionine:tRN A ribosyltransferase-isomerase OS=Enterobacterales bact erium CwR94 OX=2025587 GN=queA PE=3 SV=1
MRVADFTFDLPESLIAHYPQPERSGCRLLNLDGPTGALSHGVFTDLLDKLNPGDLLVFNNTRVIPARVFGRKASGGKMEMLVERMLDDKRVLAHVRASKAPKPGTELLLGDDESVKAVMVARHDTLFEIEFHDARPVLDILNAIGHMPLPPYIDRPDEASDRELYQTVYGQRPGAVAAPTAGLHFDEPMLAKLREKGIEMEFVTLHVGAGTFQPVRVDNIEDHIMHAEYAEVSQEVVDAVLACKARGNRVVAVGTTSVRSLESAAKAATETLIAPFFEDTSIFIFPGYHYQVVDALVTNFHLPESTLIMLVSAFAGYQHTMNAYREAVAEQYRFFSYGDAMYITRNPDAPSEAVGQA

SEQ ID NO: 66263 - protein, 167 aa, Enterobacteriaceae bacterium
  misc_feature (1)..(167): tr|A0A351NQK3|A0A351NQK3_9ENTR S-adenosylmethionine:tRN A ribosyltransferase-isomerase (Fragment) OS=Enterobact eriaceae bacterium OX=1849603 GN=queA PE=3 SV=1
MRVADFSFELPESLIAHYPQPERSSCRLLSLDGPTGALTHGTFTDLLDKLNPGDLLVFNNTRVIPARLFGRKASGGKIEVLVERMLDDKRILAHIRASKAPKPGAELLLGDDESIQATMVARHDALFEVEFNDARPVLDILNAIGHMPLPPYIDRPDEAEDRERYQT

SEQ ID NO: 66264 - protein, 356 aa, Enterobacteriaceae bacterium
  misc_feature (1)..(356): tr|A0A427BV43|A0A427BV43_9ENTR S-adenosylmethionine:tRN A ribosyltransferase-isomerase OS=Enterobacteriaceae ba cterium CCUG 66741 OX=1851514 GN=queA PE=3 SV=1
MRVADFSFELPESLIAHYPQPERSGCRLLSLDGPTGALTHGTFTDLLAKLNPGDLLVFNNTRVIPARLFGRKASGGKIEVLVERMLDDKRILAHIRASKAPKPGAELLLGDDESINATMVARHDALFEVQFNDERPVLDILNAIGHMPLPPYIDRPDEDADRELYQTVYSQKPGAVAAPTAGLHFDEPLLAKLREKGIEMAFVTLHVGAGTFQPVRVDTIEDHIMHSEYAEVPQDVVDAVLAAKARGSKVVAVGTTSVRSLESAAQAAKSDLIEPFFGDTQIFIYPGYQYKVIDALVTNFHLPESTLIMLVSAFAGYQNTMNAYKSAVEQKYRFFSYGDAMYITYNPSAIQERVGE

SEQ ID NO: 66265 - protein, 356 aa, Enterococcus aquimarinus
  misc_feature (1)..(356): tr|A0A1L8QW92|A0A1L8QW92_9ENTE S-adenosylmethionine:tRN A ribosyltransferase-isomerase OS=Enterococcus aquimari nus OX=328396 GN=queA PE=3 SV=1
MRRTDLDKEKSGKMLTTEDFNFDLPEELIAQTPLKDRTSSRLLVLDSKTGAMADHHFYDIIDELEAGDALVMNDTRVLPARLYGEKPSTGGHLEVLLLTNLEGDTWETLIKPAKRAKVGTEISFGDGRLKAIVEKELPHGGRVIRFTYEGIFLENLESLGEMPLPPYIKERLEDPERYQTVYAKENGSAAAPTAGLHFTEDLLAKIQAKGVRLVYLTLHVGLGTFRPVSVDNIAEHEMHSEFYRLSEESAAILNEVKAAGGKIVAVGTTSIRTLETIGTKFNGAIQADSGWTSIFITPGYQFKVVDAFSTNFHLPKSTLVMLVSAFATRDFTLAAYHHAIEERYRFFSFGDAMFVK

SEQ ID NO: 66266 - protein, 343 aa, Enterococcus asini
  misc_feature (1)..(343): tr|A0A413AQJ0|A0A413AQJ0_9ENTE S-adenosylmethionine:tRN A ribosyltransferase-isomerase OS=Enterococcus asini OX =57732 GN=queA PE=3 SV=1
MLTTEDFDFDLPEELIAQTPLADRSASRLLVLDRKSGAISDKHFADIVDELNPGDALVMNDTRVLPARLYGEKPDTGGHLEVLLLTNQEGDTWETLIKPAKRAKVGTKISFGDGRLQAVVEEELEHGGRIITFTYEGIFLEILESLGEMPLPPYIKERLEDPERYQTVYAKENGSAAAPTAGLHFTKELLEKIQAKGVELVYLTLHVGLGTFRPVSVDNIADHQMHSEFYRLTEDAAAKLRAVKANGGRIVAVGTTSIRTLESIGTKFAGEIKADSGWTDIFITPGYTFKVVDAFSTNFHLPKSTLVMLVSAFAGREHVLNAYQHAIEEGYRFFSFGDAMFVK

SEQ ID NO: 66267 - protein, 343 aa, Enterococcus asini
  misc_feature (1)..(343): tr|R2PM31|R2PM31_9ENTE S-adenosylmethionine:tRNA ribosy ltransferase-isomerase OS=Enterococcus asini ATCC 70091 5 OX=1158606 GN=queA PE=3 SV=1
MLTTEDFDFDLPEELIAQTPLADRSASRLLVLDRKSGAISDKHFADIVDELNPGDALVMNDTRVLPARLYGEKPDTGGHLEVLLLTNQEGDTWETLIKPAKRAKVGTKISFGDGRLQAVVEEELEHGGRIITFTYEGIFLEILESLGEMPLPPYIKERLEDPERYQTVYAKENGSAAAPTAGLHFTKELLEKIQAKGVELVYLTLHVGLGTFRPVSVDNIADHQMHSEFYRLTEDAAAKLRAVKANGGRIVAVGTTSIRTLETIGTKFAGEIKADSGWTDIFITPGYTFKVVDAFSTNFHLPKSTLVMLVSAFAGREHVLNAYQHAIEEGYRFFSFGDAMFVK

SEQ ID NO: 66268 - protein, 343 aa, Enterococcus avium
  misc_feature (1)..(343): tr|S0S779|S0S779_ENTAV S-adenosylmethionine:tRNA ribosy ltransferase-isomerase OS=Enterococcus avium ATCC 14025 OX=1140002 GN=queA PE=3 SV=1
MLTTEDFDFDLPEELIAQTPLEKRDSSRLLVLDRESGQIEDKHFDEIIEELNPGDALVMNDTRVLPARLYGEKPETGGHLEVLLLNNTQGDEWETLIKPARRAKVGTQIVFGDGRLRAEVKQELEHGGRIVEFSYEGIFLENLESLGEMPLPPYIKERLEDPERYQTVYAKENGSAAAPTAGLHFTPELLEKIAAKGVKLVYLTLHVGLGTFRPVSVENIAEHQMHSEFYRLTEEAAAQLNDVRDSGGKIIAVGTTSIRTLETIGTKFSGEIKADSGWTDIFITPGYEFKIVQAFSTNFHLPKSTLVMLVSAFAGREKTLAAYHHAIEERYRFFSFGDAMFVK

SEQ ID NO: 66269 - protein, 343 aa, Enterococcus avium; identical to SEQ ID NO: 66268
  misc_feature (1)..(343): tr|A0A2N8PZD7|A0A2N8PZD7_ENTAV S-adenosylmethionine:tRN A ribosyltransferase-isomerase OS=Enterococcus avium OX =33945 GN=queA PE=3 SV=1

SEQ ID NO: 66270 - protein, 343 aa, Enterococcus caccae
  misc_feature (1)..(343): tr|R3U1D3|R3U1D3_9ENTE S-adenosylmethionine:tRNA ribosy ltransferase-isomerase OS=Enterococcus caccae ATCC BAA- 1240 OX=1158612 GN=queA PE=3 SV=1
MLSTEDFDFDLPEELIAQTPLKDRTSSRLLVLNRETKEIEDKHFHDIIDELNAGDALVMNDTRVLPARLYGEKPETGGHLEVLLLTNTQGDTWETLIKPAKRAKVGTKINFGDGRLSATVVEELEHGGRIVTFNYEGIFLEILESLGEMPLPPYIKERLEDPERYQTVYAKENGSAAAPTAGLHFTQELLERIQSKGVKLVYLTLHVGLGTFRPVSVENISEHEMHSEFYRLTEEAAEQLNKVRETGGKIVAVGTTSIRTLETIGTKFDGQIKADSGWTDIFITPGYEFKVVQAFSTNFHLPKSTLVMLVSAFAGRDLTLAAYQHAIDERYRFFSFGDAMFVK

SEQ ID NO: 66271 - protein, 343 aa, Enterococcus canintestini
  misc_feature (1)..(343): tr|A0A267HRT8|A0A267HRT8_9ENTE S-adenosylmethionine:tRN A ribosyltransferase-isomerase OS=Enterococcus canintes tini OX=317010 GN=queA PE=3 SV=1
MLTTEDFDFDLPEELIAQTPLEKRSSSRLLVVDRQTGEMEDRHFSDIIDELNPGDALVMNDTRVLPARLHGEKPDTGGHLEVLLLTNTTGDTWETLIKPAKRAKVGTEIVFGDGRLKAVVEEELDHGGRIITFKYDGIFLEILESLGEMPLPPYIKERLENPDRYQTVYAKENGSAAAPTAGLHFTPELLAAIEAKGVKLVYLTLHVGLGTFRPVSVDDISKHQMHSEFYRLTEEAAQELNAVRAAGGKIVAVGTTSIRTLETIGSKFDGEIKADSGWTDIFITPGYEFKIVQAFSTNFHLPKSTLVMLVSAFAGRELTLAAYQHAIEARYRFFSFGDAMFVK

SEQ ID NO: 66272 - protein, 343 aa, Enterococcus canintestini
  misc_feature (1)..(343): tr|A0A1L8R4H3|A0A1L8R4H3_9ENTE S-adenosylmethionine:tRN A ribosyltransferase-isomerase OS=Enterococcus canintes tini OX=317010 GN=queA PE=3 SV=1
MLTTEDFDFDLPEELIAQTPLEKRSSSRLLVVDRQTGEMEDRHFSDIIDELNPGDALVMNDTRVLPARLHGEKPDTGGHLEVLLLTNTTGDTWETLIKPAKRAKVGTEIVFGDGRLKAVVEEELEHGGRIITFKYDGIFLEILESLGEMPLPPYIKERLENPDRYQTVYAKENGSAAAPTAGLHFTPELLAAIEAKGVKLVYLTLHVGLGTFRPVSVDDISKHQMHSEFYRLTEEAAQELNAVRAAGGKIVAVGTTSIRTLETIGSKFDGEIKADSGWTDIFITPGYEFKIVQAFSTNFHLPKSTLVMLVSAFAGRELTLAAYQHAIEARYRFFSFGDAMFVK

SEQ ID NO: 66273 - protein, 343 aa, Enterococcus canis
  misc_feature (1)..(343): tr|A0A1L8REW8|A0A1L8REW8_9ENTE S-adenosylmethionine:tRN A ribosyltransferase-isomerase OS=Enterococcus canis OX =214095 GN=queA PE=3 SV=1
MLTTEDFDFDLPEELIAQTPLKDRDQSRLLVLDHTAGTMEDKHFHDILDELAPGDALVMNDTRVLPARLYGEKPETGGHLEVLLLTNTEGDTWETLIKPARRAKVGTEISFGDGRLTAVVEKELEHGGRIVTFHYDGIFLEILESLGEMPLPPYIKERLEDPDRYQTVYAKENGSAAAPTAGLHFTKELLTAIEAKGVKLVYLTLHVGLGTFRPVSVDNIAEHEMHSEFYRLTEEAAQTLREVKAQGGRIVAVGTTSIRTLETIGTKFAGEIQADSGWTDIFITPGYQFKVVDAFSTNFHLPKSTLVMLVSAFAGRELVLAAYQHAIEEGYRFFSFGDAMFVK

SEQ ID NO: 66274 - protein, 343 aa, Enterococcus casseliflavus
  misc_feature (1)..(343): tr|F0EG21|F0EG21_ENTCA S-adenosylmethionine:tRNA ribosy ltransferase-isomerase OS=Enterococcus casseliflavus AT CC 12755 OX=888066 GN=queA PE=3 SV=1
MLTTEDFDFELPEELIAQTPLSDRSSSRLLVVDRETGKFEDKHFYNIIDELEPGDALVMNDTRVLPARIYGEKQETGAHLEILLLNNIEGDTWETLIKPAKRAKVGTKITFGDGRLEAVVEEELDHGGRIIRFQYKGIFLEILESLGEMPLPPYIKERLEDPDRYQTVYAKENGSAAAPTAGLHFTPELLEQIAAKGVKLVYLTLHVGLGTFRPVSVDNIADHEMHSEFYRLTEEAAAQLNEVRANGGKIVAVGTTSIRTLETIGTKFDGQIKADSGWTSIFITPGYQFKIVEAFSTNFHLPKSTLVMLVSAFAGRDLTLSAYQHAIDERYRFFSFGDAMFLK

SEQ ID NO: 66275 - protein, 343 aa, Enterococcus casseliflavus
  misc_feature (1)..(343): tr|A0A1V3NLD3|A0A1V3NLD3_ENTCA S-adenosylmethionine:tRN A ribosyltransferase-isomerase OS=Enterococcus casselif lavus OX=37734 GN=queA PE=3 SV=1
MLTTEDFDFDLPEELIAQTPLSDRSSSRLLVVDRETGKFEDKHFYNIIDELAPGDALVMNDTRVLPARIYGEKQETGAHLEILLLNNIEGDTWETLIKPAKRAKVGTKITFGDGRLEAVVEEELDHGGRIIRFQYKGIFLEILESLGEMPLPPYIKERLEDPDRYQTVYAKENGSAAAPTAGLHFTPELLEQIAAKGVKLVYLTLHVGLGTFRPVSVDNIADHEMHSEFYRLTEEAAAQLNEVRANGGKIVAVGTTSIRTLETIGTKFDGQIKADSGWTSIFITPGYQFKIVEAFSTNFHLPKSTLVMLVSAFAGRDLTLSAYQHAIDERYRFFSFGDAMFLK

SEQ ID NO: 66276 - protein, 343 aa, Enterococcus cecorum
  misc_feature (1)..(343): tr|S1RHE9|S1RHE9_9ENTE S-adenosylmethionine:tRNA ribosy ltransferase-isomerase OS=Enterococcus cecorum DSM 2068 2 = ATCC 43198 OX=1121864 GN=queA PE=3 SV=1
MLTTEDFDFDLPEELIAQTPLKERTSSRLLVMNRQTGELTDKHFYDIIDYLNPGDALVMNNSRVLPARLHGEKVETGAHLEILLLNNTVNDEWEVLIKPAKRAKVGTEISFGDGRLKAVVKEELDHGGRIIDFKYDGIFLEILESLGEMPLPPYIKERLEDPDRYQTVYAKENGSAAAPTAGLHFTKDLLAKIEAKGVKLVYLTLHVGLGTFRPVSVDNIAEHEMHSEFYSLSPEAAQTLNDVKANGGRIVAVGTTSIRTLETIGSKFDGKIQADSGWTNIFITPGYEFKVVDAFSTNFHLPKSTLVMLVSAFAGREQVLAAYQHAIEEKYRFFSFGDAMFIF

SEQ ID NO: 66277 - protein, 343 aa, Enterococcus cecorum; identical to SEQ ID NO: 66276
  misc_feature (1)..(343): tr|A0A0H2QHE3|A0A0H2QHE3_9ENTE S-adenosylmethionine:tRN A ribosyltransferase-isomerase OS=Enterococcus cecorum OX=44008 GN=queA PE=3 SV=1

SEQ ID NO: 66278 - protein, 343 aa, Enterococcus columbae
  misc_feature (1)..(343): tr|S0K7J3|S0K7J3_9ENTE S-adenosylmethionine:tRNA ribosy ltransferase-isomerase OS=Enterococcus columbae DSM 737 4 = ATCC 51263 OX=1121865 GN=queA PE=3 SV=1
MLTTEDFDFHLPEELIAQTPLADRTSSRLLVLNRQTGAVEDKHFYDIIDELQPGDALVMNDTRVLPARLHGEKVETGAHLELLLLKNTQNDEWETLIKPAKRAKVGTVIRFGDGRLQAVVKEELDHGGRIIEFQYEGIFLEILESLGEMPLPPYIKERLEDPDRYQTVYAKENGSAAAPTAGLHFTEELLAKIQEKGVELVYLTLHVGLGTFRPVSVENIADHEMHSEFYRLSEEAAQKLNEVKANGGRIVAVGTTSIRTLETIGTKFAGKIQADSGWTNIFITPGYEFKVVDAFSTNFHLPKSTLVMLVSAFAGREKVLAAYQHAIEQNYRFFSFGDAMFVK

SEQ ID NO: 66279 - protein, 343 aa, Enterococcus devriesei
  misc_feature (1)..(343): tr|A0A1L8SWS6|A0A1L8SWS6_9ENTE S-adenosylmethionine:tRN A ribosyltransferase-isomerase OS=Enterococcus devriese i OX=319970 GN=queA PE=3 SV=1
MLTTEDFDFDLPEELIAQTPLEKRDSSRLLVLDHQTGKIEDKHFDAIIDELNAGDALVMNDTRVLPARLYGEKPETGGHLEVLLLNNTQGDEWETLIKPARRAKVGTQIVFGDGRLKAEVKQELEHGGRIVEFSYEGIFLENLESLGEMPLPPYIKERLEDPERYQTVYAKENGSAAAPTAGLHFTPELLEKIAAKGVKLVYLTLHVGLGTFRPVSVDNIAEHQMHSEFYRLTEEAAAQLNDVRNNVGKIVAVGTTSIRTLETIGTKFNGEIKADSGWTDIFITPGYEFKVVQAFSTNFHLPKSTLVMLVSAFAGREETLAAYHHAIEERYRFFSFGDAMFVK

SEQ ID NO: 66280 - protein, 343 aa, Enterococcus dispar
  misc_feature (1)..(343): tr|S1NJS1|S1NJS1_9ENTE S-adenosylmethionine:tRNA ribosy ltransferase-isomerase OS=Enterococcus dispar ATCC 5126 6 OX=1139219 GN=queA PE=3 SV=1
MLTTEDFDFDLPEELIAQTPLEKRSSSRLLVVNRQTGEMEDKHFSDIIDELNPGDALVMNDTRVLPARLHGEKPDTGGHLEVLLLTNTTGDTWETLIKPAKRAKIGTEIVFGDGRLKAVVEEELEHGGRIITFKYDGIFLEILESLGEMPLPPYIKERLENPDRYQTVYAKENGSAAAPTAGLHFTPELLAAIEAKGVKLVYLTLHVGLGTFRPVSVDNIAEHHMHSEFYRLTEKAAQELNEVRVSGGKIVAVGTTSIRTLETIGTKFNGEIKADSGWTDIFITPGYEFKIVQAFSTNFHLPKSTLVMLVSAFAGRELTLAAYQHAIEARYRFFSFGDAMFVK

SEQ ID NO: 66281 - protein, 343 aa, Enterococcus durans
  misc_feature (1)..(343): tr|A0A377KKV9|A0A377KKV9_9ENTE S-adenosylmethionine:tRN A ribosyltransferase-isomerase OS=Enterococcus durans O X=53345 GN=queA PE=3 SV=1
MLTTEDFDFDLPEELIAQTPLKDRDQSRLLVLDRTTGEMKDKHFHDIIEELNPGDALVMNNTRVLPARLYGEKPETGAHLEVLLLTNTEGDTWETLIKPAKRAKVGTRISFGDGRLQAVVKEELEHGGRIITFEYEGIFLEILESLGEMPLPPYIKERLEDPDRYQTVYAKENGSAAAPTAGLHFTKELLDEIEAKGVELVYLTLHVGLGTFRPVSVDKIEEHHMHSEFYRLTEEAAERLNQVRQNGGKIVAVGTTSIRTLETIGTKFDGEIKADSGWTDIFITPGYQFKIVEAFSTNFHLPKSTLVMLVSAFAGRELTLAAYQHAIDERYRFFSFGDAMFVK

SEQ ID NO: 66282 - protein, 343 aa, Enterococcus durans
  misc_feature (1)..(343): tr|A0A5B9A3B5|A0A5B9A3B5_9ENTE S-adenosylmethionine:tRN A ribosyltransferase-isomerase OS=Enterococcus durans O X=53345 GN=queA PE=3 SV=1
MLTTEDFDFDLPEELIAQTPLKDRDQSRLLVLDRTTGEMKDKHFHDIIEELNPGDALVMNNTRVLPARLYGEKPETGAHLEVLLLTNTEGDTWETLIKPAKRAKVGTRISFGDGRLQAVVKEELEHGGRIITFEYEGIFLEILESLGEMPLPPYIKERLEDPDRYQTVYAKENGSAAAPTAGLHFTKELLAEIEAKGVELVYLTLHVGLGTFRPVSVDKIEEHHMHSEFYRLTEEAAERLNQVRQNGGKIVAVGTTSIRTLETIGTKFDGEIKADSGWTDIFITPGYQFKIVEAFSTNFHLPKSTLVMLVSAFAGRELTLAAYQHAIAERYRFFSFGDAMFVK

SEQ ID NO: 66283 - protein, 343 aa, Enterococcus faecalis
  misc_feature (1)..(343): sp|Q837H2|QUEA_ENTFA S-adenosylmethionine:tRNA ribosylt ransferase-isomerase OS=Enterococcus faecalis (strain A TCC 700802 / V583) OX=226185 GN=queA PE=3 SV=1
MLSTEDFDFDLPEELIAQTPLKDRASSRLLVVNKETGDMEDKHFHDILDELQPGDALVMNNTRVLPARLYGEKPETGGHLEVLLLTNTEGDTWETLIKPAKRAKVGTEIQFGDGRLKAVVKEELEHGGRIIEFKYDGIFLEILESLGEMPLPPYIKERLDDPDRYQTVYAEENGSAAAPTAGLHFTKELLEEIKAKGVHLVYLTLHVGLGTFRPVSVDNIEEHHMHSEFYRLTEEAAKQLNEVRQAGGRIVAVGTTSIRTLETIGTKFNGEIQADSGWTDIFITPGYQFKVVEAFSTNFHLPKSTLVMLVSAFAGKDLTLAAYQHAIEEKYRFFSFGDAMFIK

SEQ ID NO: 66284 - protein, 343 aa, Enterococcus faecalis; identical to SEQ ID NO: 66283
  misc_feature (1)..(343): tr|J6EXI4|J6EXI4_ENTFL S-adenosylmethionine:tRNA ribosy ltransferase-isomerase OS=Enterococcus faecalis ERV65 O X=1134794 GN=queA PE=3 SV=1

SEQ ID NO: 66285 - protein, 347 aa, Enterococcus faecium
  misc_feature (1)..(347): tr|I3TYI5|I3TYI5_ENTFD S-adenosylmethionine:tRNA ribosy ltransferase-isomerase OS=Enterococcus faecium (strain ATCC BAA-472 / TX0016 / DO) OX=333849 GN=queA PE=3 SV=1
MSDDMLTTEDFDFDLPEELIAQTPLKDRDHSRLLVLDRKTGEMEDKHFHEIIEELQPGDALVMNNTRVLPARLYGEKPDTGAHLEVLLLTNTQGDTWETLIKPAKRAKVGTRISFGDGRLQAVVKEELEHGGRIIDFEYEGIFLEILESLGEMPLPPYIKERLEDPDRYQTVYAKENGSAAAPTAGLHFTKELLDEIEAKGVELVYLTLHVGLGTFRPVSVDKIEEHHMHSEFYRLTEEAAERLNQVRKNGGKIVAVGTTSIRTLETIGTKFNGEIKADSGWTDIFITPGYEFKVVEAFSTNFHLPKSTLVMLVSAFAGRELTLSAYQHAIEERYRFFSFGDAMFVK

SEQ ID NO: 66286 - protein, 343 aa, Enterococcus faecium
  misc_feature (1)..(343): tr|A0A0M1XZA5|A0A0M1XZA5_ENTFC S-adenosylmethionine:tRN A ribosyltransferase-isomerase OS=Enterococcus faecium EnGen0020 OX=1138897 GN=queA PE=3 SV=1
MLTTEDFDFDLPEELIAQTPLKDRDHSRLLVLDRKTGEMEDKRFHEIIEELQPGDALVMNNTRVLPARLYGEKPDTGAHLEVLLLTNTQGDTWETLIKPAKRAKVGTRISFGDGRLQAVVKEELEHGGRIIDFEYEGIFLEILESLGEMPLPPYIKERLEDPDRYQTVYAKENGSAAAPTAGLHFTKELLDEIEAKGVELVYLTLHVGLGTFRPVSVDKIEEHHMHSEFYRLTEEAAERLNQVRKNGGKIVAVGTTSIRTLETIGTKFNGEIKADSGWTDIFITPGYEFKVVEAFSTNFHLPKSTLVMLVSAFAGRELTLSAYQHAIEERYRFFSFGDAMFVK

SEQ ID NO: 66287 - protein, 343 aa, Enterococcus florum
  misc_feature (1)..(343): tr|A0A4P5P7B3|A0A4P5P7B3_9ENTE S-adenosylmethionine:tRN A ribosyltransferase-isomerase OS=Enterococcus florum O X=2480627 GN=queA PE=3 SV=1
MLTTEDFDFELPEELIAQTPLAQRDSSRLLVLDRKSGEIEDKHFNEIIDELTAGDALVMNDTRVLPARLYGVKPDTGGHLEVLLLNNTHDDEWETLIKPAKRAKVGTEIVFGDGRLKAEVKEELEHGGRIITFQYEGIFLENLESLGEMPLPPYIKERLEDPDRYQTVYAKENGSAAAPTAGLHFTPELLQAIEAKGVKLVYLTLHVGLGTFRPVSVDNISEHHMHSEFYRLSEEAAAQLNDVRANGGKIIAVGTTSIRTLETIGSKFDGAIKADSGWTDIFITPGYEFKVVQAFSTNFHLPKSTLVMLVSAFAGREQTLAAYHHAIEERYRFFSFGDAMFVK

SEQ ID NO: 66288 - protein, 343 aa, Enterococcus gallinarum
  misc_feature (1)..(343): tr|C9A2H3|C9A2H3_ENTGE S-adenosylmethionine:tRNA ribosy ltransferase-isomerase OS=Enterococcus gallinarum (stra in EG2) OX=565653 GN=queA PE=3 SV=1
MLTTEDFDFELPEELIAQTPLSDRSSSRLLVVDRESGAMEDKRFYDIIDELAPGDALVMNDTRVLPARIYGEKIETGAHLEILLLNNIEGDSWETLIKPAKRAKVGTKITFGDGRLEAVVEKELEHGGRIIRFSYDGIFLEILESLGEMPLPPYIKERLEDPDRYQTVYAKENGSAAAPTAGLHFTPELLKKIADKGVKLVYLTLHVGLGTFRPVSVDNIADHEMHSEFYRLTEEAAAQLNDVRANGGKIVAVGTTSIRTLETIGTKFDGDIKADSGWTSIFITPGYQFKVVQAFSTNFHLPKSTLVMLVSAFAGRDLTLEAYQHAIDERYRFFSFGDAMFLK

SEQ ID NO: 66289 - protein, 343 aa, Enterococcus gallinarum
  misc_feature (1)..(343): tr|A0A2K3QSW2|A0A2K3QSW2_ENTGA S-adenosylmethionine:tRN A ribosyltransferase-isomerase OS=Enterococcus gallinar um OX=1353 GN=queA PE=3 SV=1
MLTTEDFDFELPEELIAQTPLSDRSSSRLLVVDRESGAMEDKHFYDIIDELAPGDALVMNDTRVLPARIYGEKIETGAHLEILLLNNIEGDSWETLIKPAKRAKVGTKITFGDGRLEAVVEKELEHGGRIIRFSYDGIFLEILESLGEMPLPPYIKERLEDPDRYQTVYAKENGSAAAPTAGLHFTPELLKKIADKGVKLVYLTLHVGLGTFRPVSVDNIADHEMHSEFYRLTEEAAAQLNDVRANGGKIVAVGTTSIRTLETIGTKFDGEIKADSGWTSIFITPGYQFKVVQAFSTNFHLPKSTLVMLVSAFAGRDLTLEAYQHAIDERYRFFSFGDAMFLK

SEQ ID NO: 66290 - protein, 343 aa, Enterococcus gilvus
  misc_feature (1)..(343): tr|R2XFR3|R2XFR3_9ENTE S-adenosylmethionine:tRNA ribosy ltransferase-isomerase OS=Enterococcus gilvus ATCC BAA- 350 OX=1158614 GN=queA PE=3 SV=1
MLTTEDFDFELPEELIAQTPLEKRDSSRLLILDRETGDIEDKHFDEIIEELNPGDALVMNDTRVLPARLYGEKPETGGHLEVLLLNNTQGDEWETLIKPARRAKVGTEIVFGDGRLRAEVKKELEHGGRIVEFSYEGIFLENLESLGEMPLPPYIKERLEDPERYQTVYAKENGSAAAPTAGLHFTPELLEKIAAKGVKLVYLTLHVGLGTFRPVSVDNIAEHQMHSEFYRLTEEAAVQLNDVRDSGGKIIAVGTTSIRTLETIGTKFNGEIKADSGWTDIFITPGYEFKIVQAFSTNFHLPKSTLVMLVSAFAGREKTLAAYHHAIEERYRFFSFGDAMFVK

SEQ ID NO: 66291 - protein, 343 aa, Enterococcus gilvus
  misc_feature (1)..(343): tr|A0A345FVE9|A0A345FVE9_9ENTE S-adenosylmethionine:tRN A ribosyltransferase-isomerase OS=Enterococcus gilvus O X=160453 GN=queA PE=3 SV=1
MLTTEDFDFELPEELIAQTPLEKRDSSRLLILDRETGDIEDKHFDEIIEELNPGDALVMNDTRVLPARLYGEKPETGGHLEVLLLNNTQGDEWETLIKPARRAKVGTEIVFGDGRLRAEVKKELEHGGRIVEFSYEGIFLENLESLGEMPLPPYIKERLEDPERYQTVYAKENGSAAAPTAGLHFTPELLEKIAAKGVKLVYLTLHVGLGTFRPVSVDNIAEHQMHSEFYRLTEEAAAQLNDVRDSGGKIIAVGTTSIRTLETIGTKFNGEIKADSGWTDIFITPGYEFKVVQAFSTNFHLPKSTLVMLVSAFAGREKTLAAYHHAIEERYRFFSFGDAMFVK

SEQ ID NO: 66292 - protein, 343 aa, Enterococcus haemoperoxidus
  misc_feature (1)..(343): tr|R2QCA8|R2QCA8_9ENTE S-adenosylmethionine:tRNA ribosy ltransferase-isomerase OS=Enterococcus haemoperoxidus A TCC BAA-382 OX=1158608 GN=queA PE=3 SV=1
MLSTEDFDFDLPEELIAQTPLKDRTSSKLLVLNRETKEIEDKHFHEIVDELNSGDALVMNDTRVLPARLYGEKPETGGHLEVLLLTNTEGDTWETLIKPAKRAKIGTKISFGDGRLTATVVEELEHGGRIVTFKYEGIFLEILESLGEMPLPPYIKERLEDPERYQTVYAKENGSAAAPTAGLHFTQELLTKIQSKGVKLVYLTLHVGLGTFRPVSVDNIAEHEMHSEFYRLTEEAAVQLNDVRENGGKIVAVGTTSIRTLETIGTKFDGQIKADSGWTDIFITPGYEFKVVQAFSTNFHLPKSTLVMLVSAFAGRDLTLSAYQHAIDERYRFFSFGDAMFVK

SEQ ID NO: 66293 - protein, 343 aa, Enterococcus hermanniensis
  misc_feature (1)..(343): tr|A0A1L8TNF2|A0A1L8TNF2_9ENTE S-adenosylmethionine:tRN A ribosyltransferase-isomerase OS=Enterococcus hermanni ensis OX=249189 GN=queA PE=3 SV=1
MLTTEDFDFELPEELIAQTPLEKRDSSRLLVLDHQSGKIEDKHFDAIIEELNAGDALVMNDTRVLPARLYGEKPETGGHLEVLLLNNTQGDEWETLIKPARRAKTGTQIVFGDGRLKAVVKEELEHGGRIVEFSYEGIFLENLESLGEMPLPPYIKERLDDPERYQTVYAKENGSAAAPTAGLHFTPELLEKIAAKGVKLVYLTLHVGLGTFRPVSVDNIAEHQMHSEFYRLTEEAAAQLNDVRSTGGKIVAVGTTSIRTLETIGTKFNGEIKADSGWTDIFITPGYEFKVVQAFSTNFHLPKSTLVMLVSAFAGREKTLAAYHHAIEARYRFFSFGDAMFVK

SEQ ID NO: 66294 - protein, 343 aa, Enterococcus hirae
  misc_feature (1)..(343): tr|A0A366UE56|A0A366UE56_ENTHR S-adenosylmethionine:tRN A ribosyltransferase-isomerase OS=Enterococcus hirae OX =1354 GN=queA PE=3 SV=1
MLTTEDFDFDLPEELIAQTPLKDRDHSRLLVLDRTTGEMSDKHFHDILEELHPGDALVMNNTRVLPARLYGEKIETGAHLEVLLLTNTEGDTWETLIKPAKRAKVGTRITFGDGRLQAVVKEELEHGGRIIEFEYEGIFLETLESLGEMPLPPYIKERLEDSDRYQTVYAKENGSAAAPTAGLHFTKELLAEIEAKGVELVYLTLHVGLGTFRPVSVDKIEEHHMHSEFYRLTEEAASRLNQVRQNGGKIIAVGTTSIRTLETIGTKFDGEIKADSGWTDIFITPGYQFKVVEAFSTNFHLPKSTLVMLVSAFAGRELTLAAYQHAIDERYRFFSFGDAMFVK

SEQ ID NO: 66295 - protein, 343 aa, Enterococcus hirae
  misc_feature (1)..(343): tr|A0A1V8XBL3|A0A1V8XBL3_ENTHR S-adenosylmethionine:tRN A ribosyltransferase-isomerase OS=Enterococcus hirae OX =1354 GN=queA PE=3 SV=1
MLTTEDFDFDLPEELIAQTPLKDRDHSRLLVLDRTTGEMSDKHFHDILEELHPGDALVMNNTRVLPARLYGEKTETGAHLEVLLLTNTEGDTWETLIKPAKRAKVGTRITFGDGRLQAVVKEELEHGGRIIEFEYEGIFLETLESLGEMPLPPYIKERLEDPDRYQTVYAKENGSAAAPTAGLHFTKELLAEIEAKGVELVYLTLHVGLGTFRPVSVDKIEEHHMHSEFYRLTEEAASRLNQVRQNGGKIIAVGTTSIRTLETIGTKFDGEIKADSGWTDIFITPGYQFKVVEAFSTNFHLPKSTLVMLVSAFAGRELTLAAYQHAIDERYRFFSFGDAMFVK

SEQ ID NO: 66296 - protein, 343 aa, Enterococcus italicus
  misc_feature (1)..(343): tr|E6LID5|E6LID5_ENTI1 S-adenosylmethionine:tRNA ribosy ltransferase-isomerase OS=Enterococcus italicus (strain DSM 15952 / LMG 22039 / TP 1.5) OX=888064 GN=queA PE=3 SV=1
MLTTEDFDFDLPEELIAQTPLTDRASSRLLVLDRKTKEMADKHFYEIIDELNAGDALVMNNTRVLPARLYGVKEETGAHLELLLLNNTEGDTWETLIKPAKRAKVGTEITFGDGRLKAIVEEELDHGGRMIRFVYEGIFLEILESLGEMPLPPYIKERLEDPERYQTVYAKENGSAAAPTAGLHFTKELLEKIQAKGVHLVYLTLHVGLGTFRPVSVDNIAEHEMHSEFYRLTQEAADELTAVRDAGGRIVAVGTTSIRTLETIGTKFDGAIQADSGWTNIFIKPGYQFKLVDAFSTNFHLPKSTLVMLVSAFAGREFVLEAYQHAIDEKYRFFSFGDAMFVK

SEQ ID NO: 66297 - protein, 343 aa, Enterococcus malodoratus
  misc_feature (1)..(343): tr|R2QVJ2|R2QVJ2_9ENTE S-adenosylmethionine:tRNA ribosy ltransferase-isomerase OS=Enterococcus malodoratus ATCC 43197 OX=1158601 GN=queA PE=3 SV=1
MLTTEDFDFDLPEELIAQTPLEKRDSSRLLVLDRETGHISDKHFDEILEELNPGDALVMNDTRVLPARLYGEKPETGGHLEVLLLNNTQGDEWETLIKPARRAKVGTQIVFGDGRLRAEVMEELEHGGRIVEFTYEGIFLENLESLGEMPLPPYIKERLEDPERYQTVYAKENGSAAAPTAGLHFTPELLERIAAKGVKLVYLTLHVGLGTFRPVSVDNISEHQMHSEFYRLTEEAAAQLNDVRAAGGKIIAVGTTSIRTLETIGTKFDGEIKADSGWTDIFITPGYEFKIVQAFSTNFHLPKSTLVMLVSAFAGREETLAAYHHAIEERYRFFSFGDAMFVK

SEQ ID NO: 66298 - protein, 343 aa, Enterococcus moraviensis
  misc_feature (1)..(343): tr|R2RBN3|R2RBN3_9ENTE S-adenosylmethionine:tRNA ribosy ltransferase-isomerase OS=Enterococcus moraviensis ATCC BAA-383 OX=1158609 GN=queA PE=3 SV=1
MLSTEDFDFDLPEELIAQTPLKDRTSSRLLVLNRETKEIEDKHFHDIIDELNAGDALVMNDTRVLPARLYGEKPETGGHLEVLLLTNTQGDTWETLIKPAKRAKVGTKISFGDGRLTATVIEELEHGGRIVTFEYEGIFLENLESLGEMPLPPYIKERLEDPERYQTVYAKENGSAAAPTAGLHFTQELLTKIQSKGVKLVYLTLHVGLGTFRPVSVENISEHEMHSEFYRLTEDAAAQLNEVRSSGGKIVAVGTTSIRTLETIGTKFDGQIKADSGWTDIFITPGYEFKIVQAFSTNFHLPKSTLVMLVSAFASRDLTLAAYHHAIEERYRFFSFGDAMFVK

SEQ ID NO: 66299 - protein, 343 aa, Enterococcus mundtii
  misc_feature (1)..(343): tr|A0A022N763|A0A022N763_ENTMU S-adenosylmethionine:tRN A ribosyltransferase-isomerase OS=Enterococcus mundtii CRL35 OX=1450511 GN=queA PE=3 SV=1
MLTTEDFDFELPEELIAQTPLKDRDHSRLLVVDRKTGEMMDKHFHEIIEELNPGDALVMNNTRVLPARLYGEKVETGAHLEVLLLTNTEGDTWETLIKPAKRAKVGTKIIFGDGRLKAVVKEELDHGGRIIEFAYEGIFLENLEALGEMPLPPYIKERLEDPDRYQTVYAEENGSAAAPTAGLHFTTELLDEIKAKGVELVYLTLHVGLGTFRPVSVDKIEEHEMHSEFYRLTEEAAARLNQVRQNGGKIVAVGTTSIRTLETIGTKFAGEIKADSGWTDIFITPGYDFKIVEAFSTNFHLPKSTLVMLVSAFAGRELTLSAYQHAIEERYRFFSFGDAMFVK

SEQ ID NO: 66300 - protein, 343 aa, Enterococcus mundtii
  misc_feature (1)..(343): tr|V5XLJ8|V5XLJ8_ENTMU S-adenosylmethionine:tRNA ribosy ltransferase-isomerase OS=Enterococcus mundtii QU 25 OX =1300150 GN=queA PE=3 SV=1
MLTTEDFDFELPEELIAQTPLKDRDHSRLLVVDRKTGGMMDKHFHEIIEELNPGDALVMNNTRVLPARLYGEKVETGAHLEVLLLTNTEGDTWETLIKPAKRAKVGTEIIFGDGRLKAVVKEELDHGGRIIEFAYEGIFLENLEALGEMPLPPYIKERLEDPDRYQTVYAEENGSAAAPTAGLHFTTELLDEIKAKGVELVYLTLHVGLGTFRPVSVDKIEEHEMHSEFYRLTEEAATRLNQVRQNGGKIVAVGTTSIRTLETIGTKFDGEIKADSGWTDIFITPGYEFKVVEAFSTNFHLPKSTLVMLVSAFAGRELTLSAYQHAIDERYRFFSFGDAMFVK

SEQ ID NO: 66301 - protein, 343 aa, Enterococcus pallens
  misc_feature (1)..(343): tr|R2T5L7|R2T5L7_9ENTE S-adenosylmethionine:tRNA ribosy ltransferase-isomerase OS=Enterococcus pallens ATCC BAA -351 OX=1158607 GN=queA PE=3 SV=1
MLTTEDFDFDLPEELIAQTPLSKRDSSRLLILDRQTGEVEDKHFHDIIDELAPGDALVMNDTRVLPARLYGEKPETGGHLEVLLLNNTQGDQWETLIKPARRAKVGTKIVFGDGRLRAEVKEELEHGGRIVEFQYEGIFLENLESLGEMPLPPYIKERLEDPDRYQTVYAKENGSAAAPTAGLHFTPELLQAIEAKGIKLVYLTLHVGLGTFRPVSVDNIAEHEMHSEFYRLTQEAADQLNAVRENGGKIVAVGTTSIRTLETIGTKFNGEIKADSGWTDIFITPGYEFKVVQAFSTNFHLPKSTLVMLVSAFAGRENTLAAYQHAIDERYRFFSFGDAMFVK

SEQ ID NO: 66302 - protein, 343 aa, Enterococcus phoeniculicola
  misc_feature (1)..(343): tr|R3W4Q0|R3W4Q0_9ENTE S-adenosylmethionine:tRNA ribosy ltransferase-isomerase OS=Enterococcus phoeniculicola A TCC BAA-412 OX=1158610 GN=queA PE=3 SV=1
MLTTEDFDFDLPEELIAQTPLKDRASSRLLVLNRETNEMEDKHFYEIIDELHAGDALVMNDTRVLPARLYGEKPETGAHLEVLLLTNTQGDTWETLIKPAKRAKVGTEIVFGDGRLKAVVTEELDHGGRIITFSYEGIFLEILESLGEMPLPPYIKERLEDPDRYQTVYAKENGSAAAPTAGLHFTQDLLEKIKEKGVHLVYLTLHVGLGTFRPVSVENISEHEMHSEFYRLTEQAADQLNQVRANGGKIIAVGTTSIRTLETIGTKFDGEIRADSGWTDIFITPGYKFKVVEAFSTNFHLPKSTLVMLVSAFAGRDFTLSAYQHAIDERYRFFSFGDAMFVK

SEQ ID NO: 66303 - protein, 343 aa, Enterococcus plantarum
  misc_feature (1)..(343): tr|A0A2W3YSJ1|A0A2W3YSJ1_9ENTE S-adenosylmethionine:tRN A ribosyltransferase-isomerase OS=Enterococcus plantaru m OX=1077675 GN=queA PE=3 SV=1
MLSTEDFDFDLPEELIAQTPLKDRTSSRLLVLNRETKEIEDKHFHEIIDELTPGDALVMNDTRVLPARLYGEKTETGGHLEVLLLTNTDGDTWETLIKPAKRAKVGTKISFGDGRLTATVVEELEHGGRIVTFKYEGIFLEILESLGEMPLPPYIKERLEDPDRYQTVYAKENGSAAAPTAGLHFTQELLAKIQSKGVKLVYLTLHVGLGTFRPVSVDNISEHEMHSEFYRLTEAAAAQLNNVRKNGGKIVAVGTTSIRTLETIGTKFDGQIKADSGWTDIFITPGYEFKVVQAFSTNFHLPKSTLVMLVSAFAGKELTLAAYQHAIDERYRFFSFGDAMFVK

SEQ ID NO: 66304 - protein, 343 aa, Enterococcus pseudoavium
  misc_feature (1)..(343): tr|A0A3D9A0G5|A0A3D9A0G5_9ENTE S-adenosylmethionine:tRN A ribosyltransferase-isomerase OS=Enterococcus pseudoav ium OX=44007 GN=queA PE=3 SV=1
MLTTEDFDFDLPEELIAQTPLEKRDSSRLLVLDRETGQIEDKHFDAIIEELNAGDALVMNDTRVLPARLYGEKPETGGHLEVLLLNNTQGDEWETLIKPARRAKVGTQIVFGDGRLRAEVKEELEHGGRIVEFFYEGIFLENLESLGEMPLPPYIKERLEDPERYQTVYAKENGSAAAPTAGLHFTPELLEKIGAKGVKLVYLTLHVGLGTFRPVSVDNIAEHQMHSEFYRLTEEAAEQLNEVRANGGKIIAVGTTSIRTLETIGTKFAGEIKADSGWTDIFITPGYEFKIVQAFSTNFHLPKSTLVMLVSAFAGREKTLAAYHHAIEERYRFFSFGDAMFVK

SEQ ID NO: 66305 - protein, 343 aa, Enterococcus quebecensis
  misc_feature (1)..(343): tr|A0A1E5GWA3|A0A1E5GWA3_9ENTE S-adenosylmethionine:tRN A ribosyltransferase-isomerase OS=Enterococcus quebecen sis OX=903983 GN=queA PE=3 SV=1
MLSTEDFDFDLPEELIAQTPLKDRTSSRLLVLNRETKEIEDKHFHDIIDELNAGDALVMNDTRVLPARLYGEKPETGGHLEVLLLTNTEGDTWETLIKPAKRAKVGTQISFGDGRLTATVIEELEHGGRIVTFNYEGIFLEILESLGEMPLPPYIKERLEDPERYQTVYAKENGSAAAPTAGLHFTQELLGKIQSKGVKLVYLTLHVGLGTFRPVSVDNIAEHEMHSEFYRLTEDAAEQLNDVRKNGGKIIAVGTTSIRTLETIGTKFDGQIKADSGWTDIFITPGYEFKVVQAFSTNFHLPKSTLVMLVSAFAGKDLTLAAYQHAIDEKYRFFSFGDAMFVK

SEQ ID NO: 66306 - protein, 343 aa, Enterococcus raffinosus
  misc_feature (1)..(343): tr|R2R0K8|R2R0K8_9ENTE S-adenosylmethionine:tRNA ribosy ltransferase-isomerase OS=Enterococcus raffinosus ATCC 49464 OX=1158602 GN=queA PE=3 SV=1
MLTTEDFDFDLPEELIAQTPLEKRDSSRLLILDRETGQIEDKHFEEIIEELAPGDALVMNDTRVLPARLYGEKPETGGHLEVLLLNNTQGDEWETLIKPARRAKVGTQIVFGDGRLRAEVKKELEHGGRIVEFSYEGIFLENLESLGEMPLPPYIKERLEDPERYQTVYAKENGSAAAPTAGLHFTPELLEKIAAKGVKLVYLTLHVGLGTFRPVSVDNIAEHQMHSEFYRLTEEAAAQLNEVRANGGKIIAVGTTSIRTLETIGTKFNGEIKADSGWTDIFITPGYEFKIVQAFSTNFHLPKSTLVMLVSAFAGREKTLAAYHHAIEERYRFFSFGDAMFVK

SEQ ID NO: 66307 - protein, 343 aa, Enterococcus raffinosus; identical to SEQ ID NO: 66306
  misc_feature (1)..(343): tr|A0A1L8X544|A0A1L8X544_9ENTE S-adenosylmethionine:tRN A ribosyltransferase-isomerase OS=Enterococcus raffinos us OX=71452 GN=queA PE=3 SV=1

SEQ ID NO: 66308 - protein, 343 aa, Enterococcus ratti
  misc_feature (1)..(343): tr|A0A1L8WD09|A0A1L8WD09_9ENTE S-adenosylmethionine:tRN A ribosyltransferase-isomerase OS=Enterococcus ratti OX =150033 GN=queA PE=3 SV=1
MLTTEDFDFDLPEELIAQTPLKTRDHSRLLVLNRTTGEMEDKHFHAILEELHPGDALVMNNTRVLPARLYGEKIETGAHLEVLLLTNTKGDTWETLIKPAKRAKTGTRISFGDGRLQAVVKEELEHGGRIIEFAYEGIFLEILESLGEMPLPPYIKERLEDPDRYQTVYAKENGSAAAPTAGLHFTQELLSEIRAKGVELVYLTLHVGLGTFRPVSVEKIEEHQMHSEFYRLTEEAAAKLNQVRRNGGKIVAVGTTSIRTLETIGTKFNGKIKADSGWTDIFITPGYQFKIVEAFSTNFHLPKSTLVMLVSAFAGRKLTLAAYQHAINERYRFFSFGDAMFVK

SEQ ID NO: 66309 - protein, 343 aa, Enterococcus rivorum
  misc_feature (1)..(343): tr|A0A1E5L1M4|A0A1E5L1M4_9ENTE S-adenosylmethionine:tRN A ribosyltransferase-isomerase OS=Enterococcus rivorum OX=762845 GN=queA PE=3 SV=1
MLTTEDFDFDLPEELIAQTPLKDRSSSKLLVLNHETKEMEDKQFSEIIDELNAGDALVMNNTRVLPARLYGEKPDTGGHLEVLLLTNTDGDTWETLIKPAKRAKAGTEISFGDGRLKATVIEELEHGGRIITFNYEGIFLEIIESLGEMPLPPYIKERLEDPERYQTVYAKENGSAAAPTAGLHFTSELLEKIQAKGVKLVYLTLHVGLGTFRPVSVENLEEHAMHSEFYQLTEAAAEQLNEVRANGGRIIAVGTTSIRTLETIGTKFNGEIKADSGWTDIFITPGYEFKIVQAFSTNFHLPKSTLVMLVSAFAGRELTLAAYQHAIDEKYRFFSFGDAMFVR

SEQ ID NO: 66310 - protein, 343 aa, Enterococcus rotai
  misc_feature (1)..(343): tr|A0A0U2VV05|A0A0U2VV05_9ENTE S-adenosylmethionine:tRN A ribosyltransferase-isomerase OS=Enterococcus rotai OX =118060 GN=queA PE=3 SV=1
MLSTEDFDFDLPEELIAQTPLKDRTSSRLLVLNRETKEIEDKHFHDIIDELNAGDALVMNDTRVLPARLYGEKPETGGHLEVLLLTNTEGDTWETLIKPAKRAKVGTKISFGDGRLSATVIEELEHGGRIVTFSYDGIFLEILESLGEMPLPPYIKERLEDPERYQTVYAKENGSAAAPTAGLHFTQELLGKIQSKGVKLVYLTLHVGLGTFRPVSVENISEHEMHSEFYRLTEEAAEQLNDVRQSGGKIIAVGTTSIRTLETIGTKFDGQIKADSGWTDIFITPGYEFKIVQAFSTNFHLPKSTLVMLVSAFAGRDLTLAAYQHAIDESYRFFSFGDAMFVK

SEQ ID NO: 66311 - protein, 343 aa, Enterococcus saccharolyticus
  misc_feature (1)..(343): tr|S0NV07|S0NV07_9ENTE S-adenosylmethionine:tRNA ribosy ltransferase-isomerase OS=Enterococcus saccharolyticus subsp. saccharolyticus ATCC 43076 OX=1139996 GN=queA PE =3 SV=1
MLTTEDFDFELPEELIAQTPLTDRTSSRLLVLDSKTGNMEDKHFYDIIDELNEGDALVMNDTRVLPARLYGEKVETGAHLEILLLNNTEGDTWETLIKPAKRAKIGTEISFGDGRLKATVKEELTHGGRIIEFSYDGIFLEILESLGEMPLPPYIKERLEDPDRYQTVYAKENGSAAAPTAGLHFTEELLEKIQAKGIELVFLTLHVGLGTFRPVSVDNIAEHEMHSEFYRLTEEAAEKLNQVKANGGRIVAVGTTSIRTLETIGTKFDGAIQADSGWTSIFITPGYEFKVVDAFSTNFHLPKSTLVMLVSAFAGREQTLAAYQHAVEERYRFFSFGDAMFVK

SEQ ID NO: 66312 - protein, 343 aa, Enterococcus saccharolyticus
  misc_feature (1)..(343): tr|A0A449EWM8|A0A449EWM8_9ENTE S-adenosylmethionine:tRN A ribosyltransferase-isomerase OS=Enterococcus saccharo lyticus OX=41997 GN=queA PE=3 SV=1
MLTTEDFDFELPEELIAQTPLSDRSSSRLLVVDRESGAMEDKHFYDIIDELAPGDALVMNDTRVLPARIYGEKIETGAHLEILLLNNIEGDSWETLIKPSKRAKVGTKITFGDGRLEAVVEKELEHGGRIIRFSYDGIFLEILESLGEMPLPPYIKERLEDPDRYQTVYAKENGSAAAPTAGLHFTPELLKKIADKGVKLVYLTLHVGLGTFRPVSVDNIADHEMHSEFYRLTEEAAAQLNDVRANGGKIVAVGTTSIRTLETIGTKFDGDIKADSGWTSIFITPGYQFKVVQAFSTNFHLPKSTLVMLVSAFAGRDLTLEAYQHAIDERYRFFSFGDAMFLK

SEQ ID NO: 66313 - protein, 343 aa, Enterococcus silesiacus
  misc_feature (1)..(343): tr|A0A0S3KF58|A0A0S3KF58_9ENTE S-adenosylmethionine:tRN A ribosyltransferase-isomerase OS=Enterococcus silesiac us OX=332949 GN=queA PE=3 SV=1
MLSTEDFDFDLPEELIAQTPLKDRTSSRLLVLDRETKEIEDKHFHEIIDELNAGDALVMNDTRVLPARLYGEKPETGGHLEVLLLTNTEGDTWETLIKPAKRAKVGTQISFGDGRLTATVVEELEHGGRIVTFKYEGIFLEILESLGEMPLPPYIKERLEDPERYQTVYAKENGSAAAPTAGLHFTQELLGKIQSKGVKLVYLTLHVGLGTFRPVSVDNISEHEMHSEFYRLTEEAAAQLNDVRQNGGKIVAVGTTSIRTLETIGTKFDGQIKADSGWTDIFITPGYEFKIVQAFSTNFHLPKSTLVMLVSAFAGRDLTLTAYQHAIDERYRFFSFGDAMFVK

SEQ ID NO: 66314 - protein, 343 aa, Enterococcus sp.
  misc_feature (1)..(343): tr|A0A291DN61|A0A291DN61_9ENTE S-adenosylmethionine:tRN A ribosyltransferase-isomerase OS=Enterococcus sp. FDAA RGOS_375 OX=2060307 GN=queA PE=3 SV=1
MLTTEDFDFELPEELIAQTPLSDRSSSRLLVVDRETGKFEDKHFYNIIDELAPGDALVMNDTRVLPARIYGEKQETGAHLEILLLNNIEGDTWETLIKPAKRAKVGTKITFGDGRLEAVVEEELDHGGRIIRFQYKGIFLEILESLGEMPLPPYIKERLEDPDRYQTVYAKENGSAAAPTAGLHFTPELLEQIAAKGVKLVYLTLHVGLGTFRPVSVDNIADHEMHSEFYRLTEEAAAQLNEVRANGGKIVAVGTTSIRTLETIGTKFDGQIKADSGWTSIFITPGYQFKIVEAFSTNFHLPKSTLVMLVSAFAGRDLTLSAYQHAIDERYRFFSFGDAMFLK

SEQ ID NO: 66315 - protein, 343 aa, Enterococcus sp.
  misc_feature (1)..(343): tr|A0A0N1LZV0|A0A0N1LZV0_9ENTE S-adenosylmethionine:tRN A ribosyltransferase-isomerase OS=Enterococcus sp. RIT- PI-f OX=1690244 GN=queA PE=3 SV=1
MLTTEDFDFDLPEELIAQTPLSDRSSSRLLVVDRETGGFEDKHFYNIIDELNPGDALVMNDTRVLPARIYGEKQETGAHLEILLLNNIEGDSWETLIKPAKRAKVGTKITFGDGRLEAVVEEELDHGGRIIRFSYEGIFLEILESLGEMPLPPYIKERLEDPDRYQTVYAKENGSAAAPTAGLHFTPELLAEIAAKGVKLVYLTLHVGLGTFRPVSVDNIADHEMHSEFYRLTEESASQLNDVRSKGGKIVAVGTTSIRTLETIGTKFDGEIKADSGWTSIFITPGYEFKVVQAFSTNFHLPKSTLVMLVSAFAGRDLTLAAYQHAIDERYRFFSFGDAMFLK

SEQ ID NO: 66316 - protein, 343 aa, Enterococcus sulfureus
  misc_feature (1)..(343): tr|S0PG01|S0PG01_9ENTE S-adenosylmethionine:tRNA ribosy ltransferase-isomerase OS=Enterococcus sulfureus ATCC 4 9903 OX=1140003 GN=queA PE=3 SV=1
MLTTEDFDFDLPEELIAQTPLEDRASSRLLVLNTKTKEMEDRHFHDIIDELNPGDALVMNNTRVLPARLYGEKTETGGHLEILLLKNTQGDSWETLIKPAKRAKVGTKITFGDGRLTAVVEEELEHGGRIIRFSYEGIFLEILESLGEMPLPPYIKERLEDPDRYQTVYAKENGSAAAPTAGLHFTEELLEKIQAKGVKLVYLTLHVGLGTFRPVSVDNIEEHDMHSEFYRLTKEAADQLNDVRDNGGKIVAVGTTSIRTLETIGSKFDGRLQEDSGWTSIFIKPGYQWKVVDAFSTNFHLPKSTLVMLVSAFAGREFTLEAYQHAIDERYRFFSFGDAMFVK

SEQ ID NO: 66317 - protein, 343 aa, Enterococcus termitis
  misc_feature (1)..(343): tr|A0A242LF08|A0A242LF08_9ENTE S-adenosylmethionine:tRN A ribosyltransferase-isomerase OS=Enterococcus termitis OX=332950 GN=queA PE=3 SV=1
MLSTEDFDFDLPEELIAQTPLKDRTSSRLLVLNRETKEIEDKHFHEIIDELNAGDALVMNDTRVLPARLYGEKPETGGHLEVLLLTNTEGDTWETLIKPAKRAKVGTQISFGDGRLTATVIQELEHGGRIVTFKYDGIFLEILESLGEMPLPPYIKERLEDPDRYQTVYAKENGSAAAPTAGLHFTQELLSKIQSKGVKLVYLTLHVGLGTFRPVSVDNISEHEMHSEFYRLTEEAAAQLNDVRQNGGKIVAVGTTSIRTLETIGTKFDGQIKADSGWTDIFITPGYEFKIVQAFSTNFHLPKSTLVMLVSAFAGRDLTLTAYQHAIDERYRFFSFGDAMFVK

SEQ ID NO: 66318 - protein, 343 aa, Enterococcus termitis
  misc_feature (1)..(343): tr|A0A1E5GB55|A0A1E5GB55_9ENTE S-adenosylmethionine:tRN A ribosyltransferase-isomerase OS=Enterococcus termitis OX=332950 GN=queA PE=3 SV=1
MLSTEDFDFELPEELIAQTPLKDRTSSRLLVLNRETEEMEDKHFHDIVDELQAGDALVMNDTRVLPARLYGEKPDTGGHLEVLLLTNTEGDTWETLIKPAKRAKVGTHIHFGDGRLTATVVEELDHGGRIVTFDYDGIFLEILESLGEMPLPPYIKERLEDPERYQTVYAKENGSAAAPTAGLHFTQELLDKIQEKGVKLVYLTLHVGLGTFRPVSVDNIAEHEMHSEFYRLTEAAAEQLNEVRKQGGKIVAVGTTSIRTLETIGTKFDGQIKADSGWTDIFITPGYEFKVVQAFSTNFHLPKSTLVMLVSAFAGRNLTLAAYQHAIDEHYRFFSFGDAMFVK

SEQ ID NO: 66319 - protein, 343 aa, Enterococcus thailandicus
  misc_feature (1)..(343): tr|A0A510WCV8|A0A510WCV8_ENTTH S-adenosylmethionine:tRN A ribosyltransferase-isomerase OS=Enterococcus thailand icus OX=417368 GN=queA PE=3 SV=1
MLTTEDFDFDLPEELIAQTPLKDRDQSRLLVVNRTTGELEDKHFHDIIDELNPGDALVMNDTRVLPARLYGEKPDTGAHLEVLLLTNTEGDTWETLIKPAKRAKVGTTISFGDGRLKAVVEEELEHGGRIITFKYDGIFLEILESLGEMPLPPYIKERLEDPDRYQTVYAKENGSAAAPTAGLHFTTELLEEIEAKGIELVYLTLHVGLGTFRPVSVDKIEDHHMHSEFYRLTEDAAKRLNQVRENGGKIVAVGTTSIRTLETIGTKFNGEIKADSGWTEIFITPGYEFKVVQAFSTNFHLPKSTLVMLVSAFAGRELILSAYQHAIDERYRFFSFGDAMFVK

SEQ ID NO: 66320 - protein, 343 aa, Enterococcus thailandicus
  misc_feature (1)..(343): tr|A0A249SG45|A0A249SG45_ENTTH S-adenosylmethionine:tRN A ribosyltransferase-isomerase OS=Enterococcus thailand icus OX=417368 GN=queA PE=3 SV=1
MLTTEDFDFDLPEELIAQTPLKDRDQSRLLVVNRTTGELEDKHFHDIIDELNPGDALVMNDTRVLPARLYGEKPDTGAHLEVLLLTNTEGDTWETLIKPAKRAKVGTTISFGDGRLKAVVEEELEHGGRIITFKYDGIFLEILESLGEMPLPPYIKERLEDPDRYQTVYAKENGSAAAPTAGLHFTKELLEEIEAKGIELIYLTLHVGLGTFRPVSVDKIEDHHMHSEFYRLTEDASKRLNQVRENGGKIVAVGTTSIRTLETIGTKFNGEIKADSGWTEIFITPGYEFKVVQAFSTNFHLPKSTLVMLVSAFAGRELILSAYQHAIDERYRFFSFGDAMFVK

SEQ ID NO: 66321 - protein, 343 aa, Enterococcus ureasiticus
  misc_feature (1)..(343): tr|A0A1E5GG16|A0A1E5GG16_9ENTE S-adenosylmethionine:tRN A ribosyltransferase-isomerase OS=Enterococcus ureasiti cus OX=903984 GN=queA PE=3 SV=1
MLSTEDFDFNLPEELIAQTPLKDRTSSRLLVLNRETKEIEDKHFHEIIDELNAGDALVMNDTRVLPARLYGEKPETGGHLEVLLLTNTDGDTWETLIKPAKRAKVGTKISFGDGRLTATVIEELEHGGRIVTFKYEGIFLEILESLGEMPLPPYIKERLEDPDRYQTVYAKENGSAAAPTAGLHFTQELLAKIKSKGVKLVYLTLHVGLGTFRPVSVDNISEHEMHSEFYRLTEEAAAQLNDVRENGGKIVAVGTTSIRTLETIGTKFDGQIKADSGWTDIFITPGYKFKVVQAFSTNFHLPKSTLVMLVSAFAGRDLTLAAYQHAIDERYRFFSFGDAMFVK

SEQ ID NO: 66322 - protein, 343 aa, Enterococcus ureilyticus
  misc_feature (1)..(343): tr|A0A1E5HFM0|A0A1E5HFM0_9ENTE S-adenosylmethionine:tRN A ribosyltransferase-isomerase OS=Enterococcus ureilyti cus OX=1131292 GN=queA PE=3 SV=1
MLSTEDFDFDLPEELIAQTPLKDRTSSRLLVLNHETKEIEDKHFHDIIDELKAGDALVMNDTRVLPARLYGEKPETGGHLEVLLLTNTVGDTWETLIKPAKRAKVGTKISFGDGRLTATVVEELEHGGRIVTFNYEGIFLEILESLGEMPLPPYIKERLEDPERYQTVYAKENGSAAAPTAGLHFTQELLAKIQSKGVKLVYLTLHVGLGTFRPVSVENIAEHEMHSEFYRLTEAAAEQLNEVRKMGGRIVAVGTTSIRTLETIGTKFDGQIKADSGWTDIFITPGYEFKIVQAFSTNFHLPKSTLVMLVSAFAGKDLTLTAYQHAIDERYRFFSFGDAMFVK

SEQ ID NO: 66323 - protein, 347 aa, Enterococcus villorum
  misc_feature (1)..(347): tr|A0A511J2U9|A0A511J2U9_9ENTE S-adenosylmethionine:tRN A ribosyltransferase-isomerase OS=Enterococcus villorum OX=112904 GN=queA PE=3 SV=1
MSDDMLTTEDFDFNLPEELIAQTPLKDRDQSRLLVVDRTTGEMKDKHFHDILEELNPGDALVMNNTRVLPARLYGEKTETGAHLEVLLLTNTEGDTWETLIKPAKRAKVGTRISFGDGRLQAVVKEELDHGGRIIAFEYEGIFLEILESLGEMPLPPYIKERLEDPDRYQTVYAKENGSAAAPTAGLHFTKELLAEIEAKGVELVYLTLHVGLGTFRPVSVDKIEEHQMHSEFYRLTEEAATRLNQIRQNGGKIVAVGTTSIRTLETIGTKFNGEIKADSGWTDIFITPGYEFKVVEAFSTNFHLPKSTLVMLVSAFAGRELTLSAYQHAIEERYRFFSFGDAMFVK

SEQ ID NO: 66324 - protein, 343 aa, Enterococcus villorum
  misc_feature (1)..(343): tr|A0A1V8YX59|A0A1V8YX59_9ENTE S-adenosylmethionine:tRN A ribosyltransferase-isomerase OS=Enterococcus villorum OX=112904 GN=queA PE=3 SV=1
MLTTEDFDFDLPEELIAQTPLKDRDQSRLLVVDRTTGEMKDKHFHDILEELHPGDALVMNNTRVLPARLYGEKTETGAHLEVLLLTNTEGDTWETLIKPAKRAKVGTRISFGDGRLQAVVKEELDHGGRIIAFEYEGIFLEILESLGEMPLPPYIKERLEDPDRYQTVYAKENGSAAAPTAGLHFTKELLAEIEAKGVELVYLTLHVGLGTFRPVSVDKIEEHQMHSEFYRLTEEAATRLNQIRQNGGKIVAVGTTSIRTLETIGTKFNGEIKADSGWTDIFITPGYEFKVVEAFSTNFHLPKSTLVMLVSAFAGRELTLSAYQHAIEERYRFFSFGDAMFVK

SEQ ID NO: 66325 - protein, 365 aa, Enterorhabdus caecimuris
  misc_feature (1)..(365): tr|A0A4S4G3Q9|A0A4S4G3Q9_9ACTN S-adenosylmethionine:tRN A ribosyltransferase-isomerase OS=Enterorhabdus caecimu ris OX=671266 GN=queA PE=3 SV=1
MRTDDFDYALPDELIAQEPAAERDRCRLLVMDRATGAVEDRVFRDIVDYLRPGDLLVANETRVMPARLLGAKRGTGGAAEVFLLRECAGPEPRTNRVAFWEVLVRPGKRLKPGAGAVVDFADGAGNVVLSAEIIDWARNGQRGERVARLITPLPSLDEALHAVGHTPLPPYIKDYAGDEELYQTVYSRRESSAAAPTAGLHFTSQLIERLREQGVGWATVELEVGLDTFRIVDEEDPEKHVIHTEFYTVPQATVDAVAAARAAGGRVIAVGTTSVRSLESAWDPAANGGAGALAPRDREATSLYILPGYRFHVVDALITNFHVPRSTLMMLVSAFSTRESVMAAYEHAVAERYRLLSFGDAMFLH

SEQ ID NO: 66326 - protein, 365 aa, Enterorhabdus caecimuris
  misc_feature (1)..(365): tr|R9L316|R9L316_9ACTN S-adenosylmethionine:tRNA ribosy ltransferase-isomerase OS=Enterorhabdus caecimuris B7 O X=1235794 GN=queA PE=3 SV=1
MRTDDFDYALPDELIAQEPAAERDRCRLLVMDRATGEVEDRIFRDIVDYLRPGDLLVANETRVMPARLLGAKRGTGGAAEVFLLRECAGPEPRTNRVAFWEVLVRPGKRLKPGAGAVVDFADGAGNVVLSAEIIDWARNGQRGERVARLITPLPSLDEALHAVGHTPLPPYIKDYAGDEELYQTVYSRRESSAAAPTAGLHFTSQLIERLCDQGVGWATVELEVGLDTFRIVDEEDPEKHVIHTEFYTVPQATVDAVAAARAAGGRVIAVGTTSVRSLESAWDSAANGGAGALVPRDREATSLYILPGYRFHVVDALITNFHVPRSTLMMLVSAFSTRESVMAAYEHAVAERYRLLSFGDAMFLH

SEQ ID NO: 66327 - protein, 365 aa, Enterorhabdus sp.
  misc_feature (1)..(365): tr|A0A4S2FYE5|A0A4S2FYE5_9ACTN S-adenosylmethionine:tRN A ribosyltransferase-isomerase OS=Enterorhabdus sp. NM0 5_H27 OX=2516956 GN=queA PE=3 SV=1
MRTDDFDYALPDELIAQEPAAERDRCRLLVMDRATGAVEDRIFRDIADYLRPGDLLVANETRVMPARLLGAKRGTGGAAEVFLLRECAGPEPRTNRVAFWEVLVRPGKRLKPGAGAVVDFADGAGNVVLSAEIIDWTRSGQRGERVARLTTPLPSLDEALHAVGHTPLPPYIKDYAGDEELYQTVYSRRESSAAAPTAGLHFTPQLIERLRDQGVGWATVELEVGLDTFRIVDEEDPEKHVIHTEFYTVPQATVDAVAAARAAGGRVIAVGTTSVRSLESAWDPAANGGAGALVSRDREATSLYILPGYRFHVVDALITNFHVPRSTLMMLVSAFSTRESVMAAYEHAVAERYRLLSFGDAMFLH

SEQ ID NO: 66328 - protein, 368 aa, Enteroscipio rubneri
  misc_feature (1)..(368): tr|A0A2K2UFD0|A0A2K2UFD0_9ACTN S-adenosylmethionine:tRN A ribosyltransferase-isomerase OS=Enteroscipio rubneri OX=2070686 GN=queA PE=3 SV=1
MKTSDFDYDLPEELIAQKPAAERDGCRMLVMDRATGALEDRIFRDIADYLRPGDLLIANETRVMPARLLGAKRGTGGAAEVFLLRQHGTPLENRSALWEVLVRPGKRLKPGTGAVVDFTDAAGNVALSAEIVDWAAPSSQSASTDGAQKGERIARLTTQLPSLDEALHAVGHTPLPPYIKDYSGDEELYQTVYSRRESSAAAPTAGLHFTPELIASLRERHVRWETVELEVGLDTFRIVDEDDPERHVIHTEYYTVPQRTVDAVTETRERGGRVIAVGTTSVRSLESAWDAESGVLASREREATSLYILPGYQFHVVDALVTNFHVPRSTLMMLVSAFSTRERIMAAYRHAVEERYRMLSFGDAMFIR

SEQ ID NO: 66329 - protein, 351 aa, Enterovibrio nigricans
  misc_feature (1)..(351): tr|A0A1T4US91|A0A1T4US91_9GAMM S-adenosylmethionine:tRN A ribosyltransferase-isomerase OS=Enterovibrio nigrican s DSM 22720 OX=1121868 GN=queA PE=3 SV=1
MQVSDFDFDLPDALIARYPQPNRTASRLLQLTGNTGELHHKNFTDILDLVQPGDLMVFNNTRVIPARVYGRKASGGKIEVLVERMLDDKSILAHVRASKPPKPGTQLFLGENDEFEAEMVARHDALFEIHFSDEQAVLDILNQVGHMPLPPYIDRPDEDSDKERYQTVYNKKPGAVAAPTAGLHFDEGILATLKEKGVETAFVTLHVGAGTFQSVRVDDINDHVMHAEYAEVPQEVVDAVLAAKARGNRVIAVGTTSVRSLESAAQHAKQQGTELKPFFDDTQIFIYPGYEWQLVDALVTNFHLPESTLIMLVSSFAGYDNVMNAYKEAIENAYRFFSYGDAMFVTRKTEV

SEQ ID NO: 66330 - protein, 351 aa, Enterovibrio norvegicus
  misc_feature (1)..(351): tr|A0A2N7LHQ9|A0A2N7LHQ9_9GAMM S-adenosylmethionine:tRN A ribosyltransferase-isomerase OS=Enterovibrio norvegic us OX=188144 GN=queA PE=3 SV=1
MQVSDFHFDLPDSLIARYPQPDRTSSRLLQLDGNSGELSHKQFTDVLDLVEPGDLMVFNNTRVIPARVYGRKASGGKIEMLVERMLDEKTILAHVRASKPPKPGTQLFLGENDEFEAEMVARHDALFEIRFSGEQAVLDILNQVGHMPLPPYIDRPDEDSDKERYQTVYNEKPGAVAAPTAGLHFDEKMLAALKAKGVEMAFVTLHVGAGTFQPVRVDSIDDHIMHAEYAEVSQEVVDAVNAAKARGNRVIAVGTTSVRSLESAAQSAKEQGTELKPFFQDTKIFIYPGYEWNLIDALVTNFHLPESTLIMLVSSFAGYDHVMNAYQQAVENDYRFFSYGDAMFVTRQTAL

SEQ ID NO: 66331 - protein, 351 aa, Enterovibrio norvegicus
  misc_feature (1)..(351): tr|A0A4U1XMG8|A0A4U1XMG8_9GAMM S-adenosylmethionine:tRN A ribosyltransferase-isomerase OS=Enterovibrio norvegic us OX=188144 GN=queA PE=3 SV=1
MQVSDFHFDLPDSLIARYPQPDRTSSRLLQLDGNSGELSHKQFTDVLDLVEPGDLMVFNNTRVIPARVYGRKASGGKIEMLVERMLDEKTILAHVRASKPPKPGTQLFLGENDEFEAEMVARHDALFEIRFSGEQAVLDILNQVGHMPLPPYIDRPDEDSDKERYQTVYNEKPGAVAAPTAGLHFDENMLAALKAKGVEMAFVTLHVGAGTFQPVRVDSIDDHVMHAEYAEVSQEVVDAVNAAKARGNRVIAVGTTSVRSLESAAQSAKEQGSELKPFFQDTKIFIYPGYEWNLVDALVTNFHLPESTLIMLVSSFAGYDHVMNAYQQAVENEYRFFSYGDAMFVTRQTAL

SEQ ID NO: 66332 - protein, 350 aa, Enterovibrio pacificus
  misc_feature (1)..(350): tr|A0A1C3EGE8|A0A1C3EGE8_9GAMM S-adenosylmethionine:tRN A ribosyltransferase-isomerase OS=Enterovibrio pacificu s OX=1080227 GN=queA PE=3 SV=1
MQVTDFHFDLPDELIARYPQPDRTASRLLQLNGNSGALNHGQFTDILELVEPGDLMVFNNTRVIPARVFGRKASGGKLEVLVERVLDEHSILAHVRSSKAPKPGTTMFLGEKDDFEAEMVARHDALFEIRFKGDRAVLDILNEVGHMPLPPYIDRPDEDSDKERYQTVYNEKPGAVAAPTAGLHFDDAILTRLKEKGVETAFVTLHVGAGTFQPVRVDNILEHVMHAEYAEVSQEVVDTIAATRARGGRVIAVGTTSVRSLESAAQRAKEQGTELQPFFDDTQIFIYPGYEWQLVDCLVTNFHLPESTLIMLVSSFAGYDNVMKAYREAVDSQYRFFSYGDAMFVTRKNG

SEQ ID NO: 66333 - protein, 350 aa, Enterovibrio sp.
  misc_feature (1)..(350): tr|A0A4Q0YQ65|A0A4Q0YQ65_9GAMM S-adenosylmethionine:tRN A ribosyltransferase-isomerase OS=Enterovibrio sp. CAIM 600 OX=1278244 GN=queA PE=3 SV=1
MQVSDFHFDLPDELIARYPQPDRTASRLLQLNGNDGTLNHGQFTDILELVQPGDLMVFNNTRVIPARVFGRKASGGKLEVLVERVLDERTILAHVRSSKAPKPGTELFLGENDEFAAEMVARHDALFEIRFKGDMAVLEILNEVGHMPLPPYIDRPDEDSDKERYQTVYNEKPGAVAAPTAGLHFDDSILAALKEKGIDTAFVTLHVGAGTFQPVRVDNILDHVMHAEYAEVPQDVVDAITATRARGGRVIAVGTTSVRSLESAAQKAKEQGTELQPFFDDTQIFIYPGYQWQLVDCLVTNFHLPESTLIMLVSSFAGYDHVMKAYKEAVSEQYRFFSYGDAMFVTRKDA

SEQ ID NO: 66334 - protein, 360 aa, Enterovirga rhinocerotis
  misc_feature (1)..(360): tr|A0A4R7BIY9|A0A4R7BIY9_9RHIZ S-adenosylmethionine:tRN A ribosyltransferase-isomerase OS=Enterovirga rhinocero tis OX=1339210 GN=queA PE=3 SV=1
MRVDLFDFDLPEDRIALRPAVPREAARLLVVPPAGALGHRTIADLPGLLRAGDALVLNDTRVIPARLRGLRIRGENAARVEIMLHRRLAPDTWLAFARPAKKLAPGDRIRFGDERESTACLLASLDAEVEARGEGGEVRLRFAFQGPALDEAIAAHGEMPLPPYIAGKRPADERDLVDYQTVYAAEAGAVAAPTAGLHLSAGMLAGLAERGIAQHRVTLHVGAGTFLPVSADDTTDHRMHPEWGTVSAETAAALNETRARGGRVVAIGTTSLRLLESAADPDGTIRAFSDETSIFITPGYRFRAVDVLMTNFHLPRSTLFMLVSAFAGLDRMRAAYAEAIAQGYRFYSYGDACLLERAPA

SEQ ID NO: 66335 - protein, 367 aa, Eoetvoesia caeni
  misc_feature (1)..(367): tr|A0A366HCZ8|A0A366HCZ8_9BURK S-adenosylmethionine:tRN A ribosyltransferase-isomerase OS=Eoetvoesia caeni OX=6 45616 GN=queA PE=3 SV=1
MAAPGAKAEYPDQPNNTLSLLRVNSSLLLSQFDYHLPAELIAQSPPERRGASRLLHLDSAGGLHDKLFADLPSLLNPGDLLVFNNTRVIKARLHGQKDTGGKVEILVERITQPNIALVHIRASKSPKTGSRIHIDDAFWVDMLGRDGELFELQFPGRVLDLLEKHGSTPLPPYIEHEAGQEDDERYQTVYAQAPGAVAAPTAGLHFDQPMLDALAAAGIQETFVTLHVGAGTFQPVRVEDLSEHHMHSERYSVSEQTLALIRATRAAGKRVIAVGTTSVRALESAAQQDGQPGPLEGDTRLFITPGYKFRYVDALITNFHLPKSTLLMLVSALAGMEPIQRAYAHAIQSRYRFFSYGDAMFIEPSRT

SEQ ID NO: 66336 - protein, 349 aa, Epibacterium mobile
  misc_feature (1)..(349): tr|A0A1B1A2H1|A0A1B1A2H1_9RHOB S-adenosylmethionine:tRN A ribosyltransferase-isomerase OS=Epibacterium mobile F 1926 OX=1265309 GN=queA PE=3 SV=1
MKLSDFDFDLPEDLIATRPAVPRSSARLLVAEQDRITDARVTDLLQWLNAGDRLVLNDTRVIPARLSGQRHRTSAQGPVSARIEVTLLEPQADGCWSGLLKPLKKIKIGETVRFSDVLSAELVDVVEGQGRLRFNLAGDDFDAALAEAGAMPLPPYIAAKRPADEQDKTDYQTVWARSSGAVAAPTASLHFDEPLLAALAAKGVEFTYVTLHVGAGTFLPVKVEDVTSHKMHAEWGQVTAKAAAEIAATKTAGKRVIPVGTTALRLIESAARDSGAIAPWEGETDIFIYPGFTFRVADALMTNFHLPKSTLMMLVSALMGQERMRSVYAHAVTERYRFFSYGDASLLIP

SEQ ID NO: 66337 - protein, 369 aa, Epibacterium mobile
  misc_feature (1)..(369): tr|A0A1H2ZTC1|A0A1H2ZTC1_9RHOB S-adenosylmethionine:tRN A ribosyltransferase-isomerase OS=Epibacterium mobile O X=379347 GN=queA PE=3 SV=1
METRCDGPWTFAQARSIARAMKLSDFDFDLPEDLIATRPAVPRSSARLLVAEQDRITDARVTDLLQWLNAGDRLVLNDTRVIPARLSGQRHRTSAQGPVSARIEVTLLEPQADGCWSGLLKPLKKIKIGETVRFSDTLSAELVDVVEGQGRLRFNLAGDDFDSALAEAGAMPLPPYIAAKRPADEQDKTDYQTVWARSSGAVAAPTASLHFDEPLLAALAAKGVEFTYVTLHVGAGTFLPVKVEDVTSHKMHAEWGQVTAKAAAEIAATKTAGKRVIPVGTTALRLIESAARDSGAIAPWEGETDIFIYPGFIFRVADALMTNFHLPKSTLMMLVSALMGQERMRSVYAHAVTERYRFFSYGDASLLIP

SEQ ID NO: 66338 - protein, 350 aa, Epibacterium multivorans
  misc_feature (1)..(350): tr|A0A0P1GZ45|A0A0P1GZ45_9RHOB S-adenosylmethionine:tRN A ribosyltransferase-isomerase OS=Epibacterium multivor ans OX=928856 GN=queA PE=3 SV=1
MKLSDFDFDLPDTLIATRPAVPRTSARLLVAEGDAIHDARVGDLLDWLRPGDRLVLNDTKVIPARLSGQRHRDSAQGPVSAKIEVTLLEPQADGAWAALLKPLKKIKIGETVVFSDDLSAELVEIVDGQGRLQFNLSGDDFDAALNAAGAMPLPPYIAAKRAADEQDKTDYQTVWAKNSGAVAAPTASLHFDEPLLKALAEKGVDFTHVTLHVGAGTFLPVKVDDVTTHKMHAEWGRVSETAAAEIAATKAAGGRVIPVGTTALRLIESAARVGAIAPWEGETDIFIYPGFTFHVADALMTNFHLPKSTLLMLVSALMGQDEIRRVYDHAVRTGYRFFSYGDASLLLPKR

SEQ ID NO: 66339 - protein, 349 aa, Epibacterium scottomollicae
  misc_feature (1)..(349): tr|A0A2T1AGY0|A0A2T1AGY0_9RHOB S-adenosylmethionine:tRN A ribosyltransferase-isomerase OS=Epibacterium scottomo llicae OX=483013 GN=queA PE=3 SV=1
MKLSDFDFDLPDDLIATRPAVPRSSARLLVAEQDQITDARVTDLLQWLQPGDRLVLNDTRVIPARLSGQRHRDSAQGAVSARIEVTLLEPQADGCWGALLKPLKKIKVGETVVFSDQLSAELVEVVEGQGRLRFNLAGDDFDAALAEAGAMPLPPYIAAKRPADEQDKTDYQTVWARSTGAVAAPTASLHFDEALLAALAAKGVEFTYVTLHVGAGTFLPVKVEDVTSHKMHAEWGQVTVQAAAEIAATKAAGQRVIPVGTTALRLIESAARDSGAIAPWEGETDIFIYPGFTFRVADALMTNFHLPKSTLMMLVSALMGQERMRRVYDHAVTERYRFFSYGDASLLIP

SEQ ID NO: 66340 - protein, 351 aa, Epibacterium ulvae
  misc_feature (1)..(351): tr|A0A1G5RCY4|A0A1G5RCY4_9RHOB S-adenosylmethionine:tRN A ribosyltransferase-isomerase OS=Epibacterium ulvae OX =1156985 GN=queA PE=3 SV=1
MKLSDFDFDLPETLIATRPATPRSSARLLVADGDVVHDESVQDLLSWLRPGDRLVLNDTKVIPARLSGFRHRNSAQGPVQARIEVTLLEPRADGCWTALLKPLKKIKTGEEIIFSEDLSAQLRGVEDGQGILQFNVTGADFDTALAEAGAMPLPPYIAAKRPADAQDKTDYQTVWAKNAGAVAAPTASLHFDQPLLDALAARGVGFTHVTLHVGAGTFLPVKVEDVTTHKMHAEWGRVSPEAAAEIAATKAAGGRVIPVGTTALRLIESAARNGTLTAWEGETDIFIYPGFTFHVTDALMTNFHLPKSTLLMLVSALMGQERMKAVYAHALSEEYRFFSYGDASLLIPETS

SEQ ID NO: 66341 - protein, 95 aa, Epsilonproteobacteria bacterium
  misc_feature (1)..(95): tr|A0A496XML3|A0A496XML3_9PROT S-adenosylmethionine:tRN A ribosyltransferase-isomerase (Fragment) OS=Epsilonpro teobacteria bacterium OX=2026809 GN=DRQ89_10600 PE=3 SV =1
KNVFAVGTTSLRTLESSYQKEIDPDKVYETDIFLHPGKEVKSIKGLLTNFHLPKSSLLMLISCLIGRDEVLRIYKEAVDKKYRFFSYGDAMLILP

SEQ ID NO: 66342 - protein, 341 aa, Epsilonproteobacteria bacterium
  misc_feature (1)..(341): tr|A0A426W3P4|A0A426W3P4_9PROT S-adenosylmethionine:tRN A ribosyltransferase-isomerase OS=Epsilonproteobacteria bacterium (ex Lamellibrachia satsuma) OX=2496635 GN=qu eA PE=3 SV=1
MPSSELLTQNYDYELPEGFIATAPVHPRDHAKLLVYDRKTDTVTHTTFKHLLDFLPKKCDIFLNDTRVIKARIFGKKKSGGKVELLFNKPIDAHHYLVLIRGKVQIGTELFFDDDLIATVTKLNIDGSREVSFKHKGKEIRFEELVLILDKIGHIPLPPYMQREDTKEDETDYQTLFAKNAGAVAAPTASLHFTPELFSALEQRHKTHKITLHVGAGTFKPVEVEKILDHPMHSEYFYISPEAARVLDSSMPILAIGTTVTRTVEYYTRTHKTEGECDLFLNPHNPPQRVTHLLTNFHLPKSTLIMLVSAFIGREKTLQLYKEAIEKKYRFFSYGDAMLIL

SEQ ID NO: 66343 - protein, 341 aa, Epulopiscium sp.
  misc_feature (1)..(341): tr|A0A1V2M088|A0A1V2M088_9FIRM S-adenosylmethionine:tRN A ribosyltransferase-isomerase OS=Epulopiscium sp. SCG- B11WGA-EpuloA1 OX=1710701 GN=queA PE=3 SV=1
MKTTDFYFDLPQYLIAQTPLEDRTSSRLMVINKKNGEIEHERFFNIINYLNEGDCLVLNDTRVIPARLFGEKQDTGGKVELLLLNRFDKTRWEVLVKPGKKAREGDIIIFGNGILSGKIETIIDDGKRIINFEYDGIWEEILDKLGEMPLPPYIYEKLENKERYQTVYSKYSGSAAAPTAGLHFTEKLLEKIKEKGVKIAYVTLHVGLGTFRPVKVEDITMHKMHSEFYIMTQDNADIINNTKNSGGRIISVGTTSARTIECCADKNGYVVAGEGWTDIFIYPGYRFKCADGIITNFHLPESTLIMLVSAFCTKEITLNAYKTAIENEYRFFSFGDAMLII

SEQ ID NO: 66344 - protein, 340 aa, Epulopiscium sp.
  misc_feature (1)..(340): tr|A0A1V2M717|A0A1V2M717_9FIRM S-adenosylmethionine:tRN A ribosyltransferase-isomerase OS=Epulopiscium sp. SCG- B10WGA-EpuloA2 OX=1712379 GN=queA PE=3 SV=1
MQTSDFYFKLPEDLIAQTPLKDRTSSKLMVLNRANNTIFHKHFCDIIDYLNEGDCLVLNDTKVIPARLFGTRQTGGKIEILLLKRLEDNCFEVLVKPGKNAKIGDILTFGNGILTGEVIDIIDDGKRILKFSYNGIWEQILDELGHMPLPPYITEKLEDKNRYQTVYAKNDGSAAAPTAGLHFSQDLLEKIEQKGVKIAYVTLHVGLGTFRPVKVENIAEHKMHSEFYQLDEQNANIINTAKENGKNIISVGTTSTRVLESIADKFGKVKSASGETDIFIAPGYKFKIVDKLITNFHLPESTLIMLVSALYNRDNILEAYKTAVEQEYRFFSFGDAMFIQ

SEQ ID NO: 66345 - protein, 365 aa, Ereboglobus luteus
  misc_feature (1)..(365): tr|A0A2U8E5S4|A0A2U8E5S4_9BACT S-adenosylmethionine:tRN A ribosyltransferase-isomerase OS=Ereboglobus luteus OX =1796921 GN=queA PE=3 SV=1
MPLSTDLFDYQLPPRLIAQTPAGRRDASRLLVVDRTARTLTHATFADLPRFLRPTDTLFRNNAAVLPARLRAQRPTGGAVECFLLRPEPARGENIWWCLLRPGKKLPVGATFAHGTEFTGHILEKNSEGGALIRFETAGNESIIAVANRLGEIPLPPYINRDAAHNSPDTRAADRERYQTVYAARDRQVAVAAPTAGLHFTPELLARLGADGVAMRDITLHVGLGTFKPIETATIEEHPIHRELYEIPASTQSALLSPRGRRVAVGTTSVRTIEDFFRKHSAGTTAPTSAFADEAALYIYPPSTFAGVDALITNFHQPRSTLLCLVAAFLSPGTSDGIAWIREIYAEAIAKEYRFFSYGDAMLIV

SEQ ID NO: 66346 - protein, 344 aa, Eremococcus coleocola
  misc_feature (1)..(344): tr|E4KLX0|E4KLX0_9LACT S-adenosylmethionine:tRNA ribosy ltransferase-isomerase OS=Eremococcus coleocola ACS-139 -V-Col8 OX=908337 GN=queA PE=3 SV=1
MTLSTKDFDYELPEELIAQTPLKDRSSSRLLVIDRHTDQLMDTDFKHILDYLQAGDGLVVNETRVIPARIIGTKPETGGHLEVLLLHNREGNEWETLVKPARRAKVGTKISFGQGQLTAIVKEELDHGGRIIEFDYQGVFLEILEELGQMPLPPYIKEKLNDPDRYQTVYAKENGSAAAPTAGLHFTPELLEAAKAKGIEIIPLVLHVGLGTFRPVSVDNIEDHDMHAEFYQLSDQSAQAINRIKAAGGKITAVGTTSVRTLETISHKFEGKLVADSGWTSIFITPGFDYQVVDHLITNFHLPQSTLVMLVSAFYDREKILAAYDHAVKEKYRFFSFGDAMLLL

SEQ ID NO: 66347 - protein, 356 aa, Erwinia amylovora
  misc_feature (1)..(356): tr|D4HXY8|D4HXY8_ERWAC S-adenosylmethionine:tRNA ribosy ltransferase-isomerase OS=Erwinia amylovora (strain CFB P1430) OX=665029 GN=queA PE=3 SV=1
MRVADFTFELPESLIAHYPQAQRSGCRLLSLNGPDGALTHGVFTDLLHQLNPGDLLVFNNTRVIPARIFGRKASGGKIEVLVERMLDEKRVLAHVRSSKAPKPGSELLLGDDESVQAIMVARHDTLFEIEFNDARPVLDILNSIGHMPLPPYIDRPDEDADRELYQTVYSQKPGAVAAPTAGLHFDEPLLEALREKGIETVFVTLHVGAGTFQPVRVDTIEDHIMHAEYAEVPQDVVDAVLACKARGKRVIAVGTTSVRSLESAAQAAENALIAPFFGDTKIFIYPGYHYQVIDALVTNFHLPESTLIMLVSAFAGYQHTMHAYQQAVAQRYRFFSYGDAMFITRNPQAFAEIPGR

SEQ ID NO: 66348 - protein, 356 aa, Erwinia amylovora; identical to SEQ ID NO: 66347
  misc_feature (1)..(356): tr|E5B2U3|E5B2U3_ERWAM S-adenosylmethionine:tRNA ribosy ltransferase-isomerase OS=Erwinia amylovora ATCC BAA-21 58 OX=889211 GN=queA PE=3 SV=1

SEQ ID NO: 66349 - protein, 356 aa, Erwinia aphidicola
  misc_feature (1)..(356): tr|A0A4R6PF31|A0A4R6PF31_ERWAP S-adenosylmethionine:tRN A ribosyltransferase-isomerase OS=Erwinia aphidicola OX =68334 GN=queA PE=3 SV=1
MRVADFTFELPESLIAHYPQAQRSGCRLLSLNGPDGALSHGVFTDLLHKLNPGDLLVFNNTRVIPARIFGRKASGGKIEVLIERMLDDTRVLAHVRSSKAPKPGTALLLGDDESVQATMVARHDALFEIEFNDARPVLDILNAIGHMPLPPYIDRPDEDADRELYQTVYSQKPGAVAAPTAGLHFDEPLLEALREKGIETAFVTLHVGAGTFQPVRVDSIKDHIMHAEYAEVPQEVVDAVLACKARGNKVIAVGTTSVRSLESAAQAAEDALIAPFFGDTKIFIYPGYHYQVIDALVTNFHLPESTLIMLVSAFAGYRHTMHAYQQAVAEQYRFFSYGDAMFITRNPEAYAEIPGQ

SEQ ID NO: 66350 - protein, 356 aa, Erwinia billingiae
  misc_feature (1)..(356): tr|D8MNV0|D8MNV0_ERWBE S-adenosylmethionine:tRNA ribosy ltransferase-isomerase OS=Erwinia billingiae (strain Eb 661) OX=634500 GN=queA PE=3 SV=1
MRVADFSFELPESLIAHYPQAQRSGCRLLSLNGPDGELSHGIFTDLLDKLTPGDLLVFNNTRVIPARVFGRKVSGGKIEVLVERMLDDHRVLAHVRASKAPKPGAELLLGDDESVKATMVARHDALFELQFDDERAVLDILNAVGHMPLPPYIDRPDEDADRELYQTVYSQRPGAVAAPTAGLHFDQPMLDALREKGIETAFVTLHVGAGTFQPVRVDSIEDHIMHAEYAEVPQDVVDAVLACKARGNRVVAVGTTSVRSLESAAQAAQDALIAPFFDDTKIFIFPGYQYQVIDALVTNFHLPESTLIMLVSAFAGYRNTMHAYQQAVAEQYRFFSYGDAMFITRNPEAVTEQVGE

SEQ ID NO: 66351 - protein, 356 aa, Erwinia billingiae
  misc_feature (1)..(356): tr|A0A5J6LZ62|A0A5J6LZ62_9GAMM tRNA preQ1(34) S-adenosy lmethionine ribosyltransferase-isomerase QueA OS=Erwini a billingiae OX=182337 GN=queA PE=4 SV=1
MRVADFSFELPESLIAHYPQAQRSGCRLLSLNGPDGELSHGIFTDLLDKLTPGDLLVFNNTRVIPARVFGRKVSGGKIEVLVERMLDDHRVLAHVRASKAPKPGAELLLGDDESVKATMVARHDALFELQFDDERAVLDILNAVGHMPLPPYIDRPDEDADRELYQTVYSQRPGAVAAPTAGLHFDQPMLDALREKGIETAFVTLHVGAGTFQPVRVDSIEDHIMHAEYAEVPQDVVDAVLACKARGNRVVAVGTTSVRSLESAAQAAQDALIAPFFDDTKIFIFPGYQYQVIDALVTNFHLPESTLIMLVSAFAGYRNTMHAYQQAVAEQYRFFSYGDAMFITRNPEAVSEQVGE

SEQ ID NO: 66352 - protein, 356 aa, Erwinia citreus
  misc_feature (1)..(356): tr|A0A358L260|A0A358L260_ERWCI S-adenosylmethionine:tRN A ribosyltransferase-isomerase OS=Erwinia citreus OX=55 8 GN=queA PE=3 SV=1
MRVADFSFELPESLIAHYPQAQRSGCRLLCLNGPDGELTHGVFTDLLDLLNPGDLLVFNNTRVIPARIFGRKASGGKIEVLVERMLDEHRVLAHIRASKAPKAGAELLLGDDESVKATMVARHDALFELHFDDERAVLDILDAVGHMPLPPYIDRPDEDADRELYQTVYSERPGAVAAPTAGLHFDEPMLEALRAKGIETAFVTLHVGAGTFQPVRVDSIEDHIMHAEYAEVPQEVVDAVLACKARGNRVVAVGTTSVRSLESAAAAAKDALIAPFFDDTKIFIYPGYEYQVIDALVTNFHLPESTLIMLVSAFAGYRHTMHAYQQAVAEQYRFFSYGDAMFITRNPQAINEQVGK

SEQ ID NO: 66353 - protein, 356 aa, Erwinia gerundensis
  misc_feature (1)..(356): tr|A0A0U5LLH4|A0A0U5LLH4_9GAMM S-adenosylmethionine:tRN A ribosyltransferase-isomerase OS=Erwinia gerundensis O X=1619313 GN=queA PE=3 SV=1
MRVADFAFDLPDSLIARYPQTERSGCRLLSLDGPSGELTHGRFTDVLDKLNRGDLLVFNNTRVIPARVFGRKASGGKIEVLVERMLDDKRVLAHVRASKAPKPGAALLLGEDESVKATMVARHDALFEIVFEDDRAVLDILNAVGHMPLPPYIDRPDEASDRELYQTVYSERPGAVAAPTAGLHFDEPLLAALREKGVEMAFVTLHVGAGTFQPVRVDTIEEHIMHAEYAEVPQEVVDAVLACKARGNKVVAVGTTSVRSLESAAQASEQALIAPFFDDTKIFIYPGYRYQVIDALITNFHLPESTLIMLVSAFAGYRHTMHAYQQAVAEAYRFFSYGDAMYITMNPQAIDEKVGD

SEQ ID NO: 66354 - protein, 356 aa, Erwinia iniecta
  misc_feature (1)..(356): tr|A0A0L7T3N6|A0A0L7T3N6_9GAMM S-adenosylmethionine:tRN A ribosyltransferase-isomerase OS=Erwinia iniecta OX=15 60201 GN=queA PE=3 SV=1
MRVADFSFELPESLIAHYPQPQRSGCRLLSLDGPSGELTHGVFTDLLDKLEAGDLLVFNNTRVIPARVFGRKASGGKIEVLVERMLDETRVLAHVRSSKSPKPGAELLLGEDESVKATMVARHDALFEIEFHDERAVLDILNAVGHMPLPPYIDRPDEDADRELYQTVYSQRPGAVAAPTAGLHFDEPLLAALREKGIEMAFVTLHVGAGTFQPVRVETIEDHIMHAEYAEVPQDVVDAVLACKARGKRVVAVGTTSVRSLESAAKASQDALIAPFFDDTKIFIYPGYHYQVVDALVTNFHLPESTLIMLVSAFAGYRHTMQAYQQAVAEQYRFFSYGDAMFISRNPQAADEVVGA

SEQ ID NO: 66355 - protein, 361 aa, Erwinia mallotivora
  misc_feature (1)..(361): tr|A0A014NT52|A0A014NT52_9GAMM S-adenosylmethionine:tRN A ribosyltransferase-isomerase OS=Erwinia mallotivora O X=69222 GN=queA PE=3 SV=1
MRVADFSFELPESLIAHYPQAQRSGCRLLSLNGPDGELTHGVFTDLLDKLNAGDLLVFNNTRVIPARVFGRKVSGGRIEVLVERMLDDHRVLAHVRASKAPKPGAELLLGDDESVRATMVARHDALFELRFDDERAVLDILNAVGHMPLPPYIDRPDEEADRELYQTVYSQRPGAVAAPTAGLHFDQPLLDALRDKGVETAFVTLHVGAGTFQPVRVESIEDHIMHAEYAEVPQEVVDAVLACKARGNRVVAVGTTSVRSLESAAQAAGDALIAPFFDDTKIFIYPGYQYQVIDALVTNFHLPESTLIMLVSAFAGYRHTLRAYQQAVAEQYRFFSYGDAMFITHNPQAVNEKVGVHNNGC

SEQ ID NO: 66356 - protein, 356 aa, Erwinia persicina
  misc_feature (1)..(356): tr|A0A3S7TGB6|A0A3S7TGB6_9GAMM S-adenosylmethionine:tRN A ribosyltransferase-isomerase OS=Erwinia persicina OX= 55211 GN=queA PE=3 SV=1
MRVADFNFELPESLIAHYPQAQRSGCRLLSLNGPDGELTHGVFTDLLDKLNPGDLLVFNNTRVIPARIFGRKASGGKIEVLIERMLDDKRVLAHVRASKAPKPGSELLLGDEENVSATMQARHDALFEIEFHDPRPVLDILNDIGHMPLPPYIDRPDEDADRELYQTVYSQKPGAVAAPTAGLHFDEPLLAALREKGVETAFVTLHVGAGTFQPVRVDTIEDHIMHAEYAEVPQDVVDAVLACKARGNRVIAVGTTSVRSLESAAQASRDALIAPFFGDTSIFIYPGYHYQIIDVLVTNFHLPESTLIMLVSAFAGYQHTMHAYQQAVAEKYRFFSYGDAMFITRNPQAVSEIPGQ

SEQ ID NO: 66357 - protein, 356 aa, Erwinia piriflorinigrans
  misc_feature (1)..(356): tr|V5Z635|V5Z635_9GAMM S-adenosylmethionine:tRNA ribosy ltransferase-isomerase OS=Erwinia piriflorinigrans CFBP 5888 OX=1161919 GN=queA PE=3 SV=1
MRVADFAFELPESLIAHYPQAQRSGCRLLSLNGSDGTLTHGVFTDLLNKLNPGDLLVFNNTRVIPARIFGRKASGGKIEVLVERMLDEKRVLAHVRSSKAPKPGSDLLLGDDESVQATMLARHDTLFEIEFNDARPVLDILNSIGHMPLPPYIDRPDEDADRELYQTVYSQKPGAVAAPTAGLHFDEPLLEALREKGIETAFVTLHVGAGTFQPVRVDTIEEHIMHAEYAEVPEDVVDAVLACKARGNRVIAVGTTSVRSLESAAQAAENALIAPFFGDTKIFIYPGYHYQVIDALVTNFHLPESTLIMLVSAFAGYKHTMHAYQQAVAEQYRFFSYGDAMFITRNPQAFSEVPGQ

SEQ ID NO: 66358 - protein, 363 aa, Erwinia psidii
  misc_feature (1)..(363): tr|A0A3N6TWS8|A0A3N6TWS8_9GAMM S-adenosylmethionine:tRN A ribosyltransferase-isomerase OS=Erwinia psidii OX=692 24 GN=queA PE=3 SV=1
MRVADFSFELPESLIAHYPQAQRSGCRLLSLNGADGELTHGVFTDLLDFLTPGDLLVFNNTRVIPARVFGRKVSGGKIEVLVERVLDDCRVLAHVRASKAPKPGSELLLGDDESVKATMVARHDALFELRFDDQRAVLDILNAVGHMPLPPYIDRPDEASDRELYQTVYSQRPGAVAAPTAGLHFDQPLLDALRDKGIETAFVTLHVGAGTFQPVRVDSIEDHIMHAEYAEVPQDVVEAVLACKARGNRVVAVGTTSVRSLESAAQAAGEALIAPFFGDTKIFIYPGYRYQVIDALVTNFHLPESTLIMLVSAFAGYRNTMRAYRQAVAERYRFFSYGDAMFITRNPDAVNEPVGTSLSARHE

SEQ ID NO: 66359 - protein, 358 aa, Erwinia pyrifoliae
  misc_feature (1)..(358): tr|D2T4P0|D2T4P0_ERWP6 S-adenosylmethionine:tRNA ribosy ltransferase-isomerase OS=Erwinia pyrifoliae (strain DS M 12163 / CIP 106111 / Ep16/96) OX=644651 GN=queA PE=3 SV=1
MTMRVADFTFKLPESLIAHYPQTQRSGCRLLSLNGPDGALTHGVFTDLLHKLNPGDLLVFNNTRVIPARIFGRKVSGGKIEVLVERMLDEKRVLAHVRSSKAPRPGSELLLGDDENVQATMLARHDALFEIEFNDARPVLDILNSIGHMPLPPYIDRPDEDADRELYQTVYSQKPGAVAAPTAGLHFDEPLLEALREKGIETAFVTLHVGAGTFQPVRVDTIEEHIMHAEYAEVPQDVVDAVLACKARGNRVIAVGTTSVRSLESAAQVAGNDLIAPFFGDTKIFIYPGYHYQVIDALVTNFHLPESTLIMLVSAFAGYQNTMHAYQQAVAEQYRFFSYGDAMFITRNPQAFAEIPGQ

SEQ ID NO: 66360 - protein, 358 aa, Erwinia rhapontici
  misc_feature (1)..(358): tr|A0A4R7GI12|A0A4R7GI12_ERWRD S-adenosylmethionine:tRN A ribosyltransferase-isomerase OS=Erwinia rhapontici OX =55212 GN=queA PE=3 SV=1
MTMRVADFTFELPESLIAHYPQAQRSGCRLLSLNGPDGELTHGVFTDLLDKLNPGDLLVFNNTRVIPARIFGRKASGGKIEVLIERMLDDKRVLAHVRSSKAPKPGTELLLGDAENVQATMVARHDALFEIEFHDERPVLDILNAIGHMPLPPYIDRPDEDADRELYQTVYSQKPGAVAAPTAGLHFDEPLLAALREKGIETAFVTLHVGAGTFQPVRVDTIEDHIMHAEYAEVSQDVVDAVLACKARGNRVIAVGTTSVRSLESAAQAAQDALIAPFFGDTKIFIYPGYHYQVIDVLVTNFHLPESTLIMLVSAFAGYQHTMQAYQQAVAEKYRFFSYGDAMFITRNPEAYAEIPGQ

SEQ ID NO: 66361 - protein, 356 aa, Erwinia sp.
  misc_feature (1)..(356): tr|A0A427KA90|A0A427KA90_9GAMM S-adenosylmethionine:tRN A ribosyltransferase-isomerase OS=Erwinia sp. 198 OX=20 22746 GN=queA PE=3 SV=1
MRVADFSFELPESLIAHYPQAQRSGCRLLCLNGPDGALTHGVFTDLLDLLNPGDLLVFNNTRVIPARIFGRKASGGKIEVLVERMLDEHRVLAHIRASKAPKAGAELLLGDDESVKATMVARHDALFELHFDDERAVLDILDAVGHMPLPPYIDRPDEDADRELYQTVYSERPGAVAAPTAGLHFDEPMLEALRAKGIETAFVTLHVGAGTFQPVRVDSIEDHIMHAEYAEVPQEVVDAVLACKARGNRVVAVGTTSVRSLESAAAAAKDALIAPFFDDTKIFIYPGYAYQVIDALVTNFHLPESTLIMLVSAFAGYRHTMHAYEQAVAEKYRFFSYGDAMFITRNPQAINEQVGK

SEQ ID NO: 66362 - protein, 359 aa, Erwinia sp.
  misc_feature (1)..(359): tr|A0A0Q4NHA1|A0A0Q4NHA1_9GAMM S-adenosylmethionine:tRN A ribosyltransferase-isomerase OS=Erwinia sp. Leaf53 OX =1736225 GN=queA PE=3 SV=1
MRVADFAFELPESLIAHYPQAQRSGCRLLSLNGEDGALQHGVFTDLLDKLNPGDLLVFNNTRVIPARIFGRKASGGKIEVLVERMLDDKRVLAHVRSSKAPKPGSELLLGEDESVQATMTARHDALFEIEFNDNRPVLDILNAIGHMPLPPYIDRPDEDADRELYQTVYSQKPGAVAAPTAGLHFDEPLLAALREKGVESAFVTLHVGAGTFQPVRVDSIEDHIMHAEYAEVPQDVVDAVLACKARGNRVIAVGTTSVRSLESAAQAAGDALIAPFFGDTKIFIYPGYHYQVIDVLVTNFHLPESTLIMLVSAFAGYRNTMHAYRQAVAEQYRFFSYGDAMFITRNERAFSEIPGQPIS

SEQ ID NO: 66363 - protein, 355 aa, Erwinia tasmaniensis
  misc_feature (1)..(355): sp|B2VHQ4|QUEA_ERWT9 S-adenosylmethionine:tRNA ribosylt ransferase-isomerase OS=Erwinia tasmaniensis (strain DS M 17950 / CIP 109463 / Et1/99) OX=465817 GN=queA PE=3 S V=1
MRVADFTFELPESLIAHYPQAERSGCRLLSLNGSDGALTHGVFTDLLHKLNPGDLLVFNNTRVIPARIFGRKASGGKIEVLVERMLDDTRVLAHVRSSKAPKPGSDLLLGDDESVQATMLARHDTLFEIEFNDARPVLDILNSIGHMPLPPYIDRPDEDADRELYQTVYSQKPGAVAAPTAGLHFDEPLLVALREKGIETAFVTLHVGAGTFQPVRVDTIEDHIMHAEYAEVPQDVVDAVLACKARGNRVIAVGTTSVRSLESAAQAAENTLIAPFFGDTKIFIYPGYHYQVIDALVTNFHLPESTLIMLVSAFAGYKHTMRAYQQAVAEQYRFFSYGDAMFITRNPQAFAEIPG

SEQ ID NO: 66364 - protein, 356 aa, Erwinia tracheiphila
  misc_feature (1)..(356): tr|A0A0M2KG04|A0A0M2KG04_9GAMM S-adenosylmethionine:tRN A ribosyltransferase-isomerase OS=Erwinia tracheiphila OX=65700 GN=queA PE=3 SV=1
MRVADFSFELPDSLIAHYPQARRSACRLLSLNGPDGELTHGVFTDLLDFLNPGDLLVFNNTRVIPARVFGRKVSGGKIEVLVERVLDDHRVLAHARASRVPKPGAELLLGDDQSVKATMLARHDALFELCFDDKRSVLEILNAVGHMPLPPYIDRPDEEADRELYQTVYSQRPGAIAAPTAGLHFDQPLLDALRDKGIETAFVTLHVGAGTFQPVRVDSIEDHIMHAEYAEVPQEVVDAVLACKARGNRVVAVGTTSVRSLESAAQAAGSTLIAPFFDDTKIFIYPGYHYQVIDALVTNFHLPESTLIMLVSAFAGYRNTMRAYQQAVAEKYRFFSYGDAMFITRNPAAVNELGGK

SEQ ID NO: 66365 - protein, 356 aa, Erwinia tracheiphila
  misc_feature (1)..(356): tr|A0A345CZ03|A0A345CZ03_9GAMM S-adenosylmethionine:tRN A ribosyltransferase-isomerase OS=Erwinia tracheiphila OX=65700 GN=queA PE=3 SV=1
MRVADFSFELPDSLIAHYPQARRSACRLLSLNGPDGELTHGVFTDLLDFLNPGDLLVFNNTRVIPARVFGRKVSGGKIEVLVERVLDDHRVLAHVRASRVPKPGAELLLGDDQSVKATMLARHDALFELCFDDKRSVLEILNAVGHMPLPPYIDRPDEEADRELYQTVYSQRPGAIAAPTAGLHFDQPLLDALRDKGIETAFVTLHVGAGTFQPVRVDSIEDHIMHAEYAEVPQEVVDAVLACKARGNRVVAVGTTSVRSLESAAQAAGSTLIAPFFDDTKIFIYPGYHYQVIDALVTNFHLPESTLIMLVSAFAGYRNTMRAYQQAVAEKYRFFSYGDAMFITRNPAAVNELGGN

SEQ ID NO: 66366 - protein, 356 aa, Erwinia typographi
  misc_feature (1)..(356): tr|A0A0A4AAT4|A0A0A4AAT4_9GAMM S-adenosylmethionine:tRN A ribosyltransferase-isomerase OS=Erwinia typographi OX =371042 GN=queA PE=3 SV=1
MRVADFSFELPESLIAHYPQAQRSGCRLLSLNGPDGKLSHGIFTDLLDLLNPGDLLVFNNTRVIPARVFGRKVSGGKIEVLVERMLDDRRVLAHVRASKAPKPGAELLLGDDESVKATMVARHDALFELQFDDDRAVLDILNDVGHMPLPPYIDRPDEEADRELYQTVYSQRPGAVAAPTAGLHFDQPMLEALRAKGIESAFVTLHVGAGTFQPVRVENITDHIMHAEYAEVPQDVVDAVLACKARGNRVVAVGTTSVRSLESAAQAAQHALIAPFFDDTKIFIYPGYQYQVIDALVTNFHLPESTLIMLVSAFAGYRHTMQAYQQAVAAEYRFFSYGDAMFITLNPQAINEQVGK

SEQ ID NO: 66367 - protein, 356 aa, Erwiniaceae bacterium
  misc_feature (1)..(356): tr|A0A3D5MA53|A0A3D5MA53_9GAMM S-adenosylmethionine:tRN A ribosyltransferase-isomerase OS=Erwiniaceae bacterium OX=2053552 GN=queA PE=3 SV=1
MRVADFSFELPESLIAHYPQPQRSGCRLLSLNGPDGALSHGVFTDVLDKLNPGDLLVFNNTRVIPARVYGRKASGGKIEMLVERMLDDKRVLAHVRASKAPKPGAALLFGDDESVRATMVARHDALFEIVFDDERSVLDILNAIGHMPLPPYIDRPDEEADRELYQTVYSQKPGAVAAPTAGLHFDEPLLAALREKGIEMAFVTLHVGAGTFQPVRVDSIEDHIMHSEYAEVPQEVVDAVLACKARGNRVVAVGTTSVRSLESAAQAAQDALIAPFFDDTQIFIYPGYHYQVIDALITNFHLPESTLIMLVSAFAGYRHTMNAYREAVAQQYRFFSYGDAMFITRNPQAPNEKVGV

SEQ ID NO: 66368 - protein, 341 aa, Erysipelatoclostridium ramosum
  misc_feature (1)..(341): tr|A0A3E3EG15|A0A3E3EG15_9FIRM S-adenosylmethionine:tRN A ribosyltransferase-isomerase OS=Erysipelatoclostridiu m ramosum OX=1547 GN=queA PE=3 SV=1
MKISEFDFNLPEELIAQTPLDKRDTSRLMILNRNQQTIEHKHFYDIIDYLKPGDILVRNNTKVIPARLFGIKEETNGHVEVLLLKDQGNDMWECLVGNARIVKIDTIITFGDGLLKAQCVEIKEEGIRVFKMIYEGIFYEILDQLGTMPLPPYIKEKLDDQNRYQTVYAKIEGSAAAPTAGLHFTDEIIEKIKAKGIEILDVTLHVGLGTFRPVKVDDVLEHHMHSEYYMIEPDVADKLNQAKQNGQRIIAVGTTSTRTLEANMKKYGKFTSVHENTDIFIYPGYKYEAIDCLITNFHLPKSTLLMLISAFASKEFIFKAYQEAIDEKYRFFSFGDSMFIM

SEQ ID NO: 66369 - protein, 350 aa, Erysipelatoclostridium ramosum
  misc_feature (1)..(350): tr|B0N4F7|B0N4F7_9FIRM S-adenosylmethionine:tRNA ribosy ltransferase-isomerase OS=Erysipelatoclostridium ramosu m DSM 1402 OX=445974 GN=queA PE=3 SV=1
MTYIRGLFKMKISEFDFNLPEELIAQTPLDKRDTSRLMVLNRNQQTIEHKHFYDIIDYLKPGDILVRNNTKVIPARLFGIKEETNGHVEVLLLKDQGNDMWECLVGNARIVKIDTIITFGDGLLKAQCVEIKEEGIRVFKMIYEGIFYEILDQLGTMPLPPYIKEKLDDQNRYQTVYAKIEGSAAAPTAGLHFTDEIIEKIKAKGIEILDVTLHVGLGTFRPVKVDDVLEHHMHSEYYMIEPDVADKLNQAKQNGQRIIAVGTTSTRTLEANMKKYGKFTSVHENTDIFIYPGYKYEAIDCLITNFHLPKSTLLMLISAFASKEFIFKAYQEAIDEKYRFFSFGDSMFIM

SEQ ID NO: 66370 - protein, 341 aa, Erysipelatoclostridium sp.
  misc_feature (1)..(341): tr|A0A417C866|A0A417C866_9FIRM S-adenosylmethionine:tRN A ribosyltransferase-isomerase OS=Erysipelatoclostridiu m sp. AM42-17 OX=2293102 GN=queA PE=3 SV=1
MKLSEFDFDLPEELIAQHPVKKRDTSRLMVVDRETGSIEHKHFYDIVDYLKPGDVLVRNNTKVIPARLFGIKEETNGHVEVLLLKELKKDTWECLCGNARIVKMNTVISFGEGLLKAKCIEIKDEGIRVFEMIYDGIFYEILDQLGTMPLPPYIKEKLADKDRYQTVYAKIEGSAAAPTAGLHFTDEINQKIIDKGVTILEVTLHVGLGTFRPVKVDNVLEHHMHSEYYMIEPDVADALNKAKAEGRRIIAVGTTSTRTLEANMQKYGKFTATHENTDIFIYPGYQYKAIDCLITNFHLPKSTLLMLISAFASKELIFKAYHEAIQEKYRFFSFGDSMFIK

SEQ ID NO: 66371 - protein, 341 aa, Erysipelatoclostridium sp.
  misc_feature (1)..(341): tr|A0A1Y4QP14|A0A1Y4QP14_9FIRM S-adenosylmethionine:tRN A ribosyltransferase-isomerase OS=Erysipelatoclostridiu m sp. An15 OX=1965566 GN=queA PE=3 SV=1
MKLSEFDFNLPEELIAQRPLDKRDTSRLMVLNREKQTIEHKHFYDIIDYLQPGDILVRNNTKVIPARLFGIKEETNGHVEVLLLKDLGDDTWECLVGNARIVKIDTVITFGEGLLKAKCIKIKDEGIRVFKMIYTGIFFEILDQLGTMPLPPYIKEKLNDQNRYQTVYAKIEGSAAAPTAGLHFTDEIIEKIKAKGIEILDVTLHVGLGTFRPVKVDDILDHHMHSEFYMIEPDVAKKLNQAKANGQRIIAVGTTSTRTLEANIKKYGKFTATHENTDIFIYPGYQYEAIDCLITNFHLPKSTLLMLISAFASKEFIFKAYQEAIDKKYRFFSFGDSMFII

SEQ ID NO: 66372 - protein, 350 aa, Erysipelothrix larvae
  misc_feature (1)..(350): tr|A0A120JTF6|A0A120JTF6_9FIRM S-adenosylmethionine:tRN A ribosyltransferase-isomerase OS=Erysipelothrix larvae OX=1514105 GN=queA PE=3 SV=1
MNVNDFDFNLPEELIAQVPLKNRETSRLLVVAQDHLEDRHFYDIVDYLKSGDVLVVNNTKVIAARLFGIKEETGAHVELLILKFEGNRVECLVGNAKVVKLGTRLSFGEGRLIAVCTKIGEEGIRFFDLEYDGIFLEVLDELGQMPLPPYIHERLEDPNRYQTVYAKVDGSAAAPTAGLHFTPDLMDRIKDLGVSIAEVTLHVGLGTFRPVKVETVETHKMHEEHYMMSQETADLLNEAKAKGRRIIAVGTTSVRTLETILKKYGAFKACEGDSDIFIYPGYTFEGVDAIITNFHLPKSTLVMLVSAFAGKSVIEHAYQHAIDEKYRFFSFGDSMFLQEPAKGVCRKTIK

SEQ ID NO: 66373 - protein, 343 aa, Erysipelothrix rhusiopathiae
  misc_feature (1)..(343): tr|E7FYA4|E7FYA4_ERYRH S-adenosylmethionine:tRNA ribosy ltransferase-isomerase OS=Erysipelothrix rhusiopathiae ATCC 19414 OX=525280 GN=queA PE=3 SV=1
MNVNDFDFDLPEELIAQTPAEKRSESRLLVVDGMNLEDKRFYNIIDYLNEGDVLVLNDTRVIAARLFGEKPETGAHVELLILKFEGKTAECLVGNAKVVKLGTELSFGDGQLKAICTHVGDEGLRNFDLIFDGIFLEILDELGQMPLPPYIHERLEDKERYQTVYSRVEGSAAAPTAGLHFTPELLDAIQAKGITIAPVTLHVGLGTFRPVKVDNVLEHKMHSEAYTMTQDTADILNTAKREGRRIIAVGTTSVRTLETVMSKYGTFKECQGNSEIFIYPGYEWKAVDAIITNFHLPKSTLIMLVSAFMGKEEIDHAYKHAVDSKYRFFSFGDSMFLKARNIK

SEQ ID NO: 66374 - protein, 343 aa, Erysipelothrix sp.
  misc_feature (1)..(343): tr|A0A3S5HK02|A0A3S5HK02_9FIRM S-adenosylmethionine:tRN A ribosyltransferase-isomerase OS=Erysipelothrix sp. 15 TAL0474 OX=2485784 GN=queA PE=3 SV=1
MNVNDFDFDLPEELIAQTPAEKRSESRLLVVDGMNLEDKHFYNIIDYLNEGDVLVLNDTRVIAARLFGEKPETGAHVELLILKFEGKTAECLVGNAKVVKLGTELSFGNGKLKAVCTHVGEEGLRNFDLVFDGIFLEILDELGQMPLPPYIHERLEDKERYQTVYSRVQGSAAAPTAGLHFTPELLEAIEAKGITIAPVTLHVGLGTFRPVKVDNVLEHKMHSEAYTMSQETAEILNDAKQDGRRIIAVGTNSVRTLETVMSKYGTFKECQGNSEIFIYPDYEWKAVDAIITNFHLPKSTLIMLVSAFMGKEAIDHAYKHAVDSKYRFFSFGDSMFLKARNTK

SEQ ID NO: 66375 - protein, 551 aa, Erysipelotrichaceae bacterium
  misc_feature (1)..(551): tr|A0A3P1S975|A0A3P1S975_9FIRM Multifunctional fusion p rotein OS=Erysipelotrichaceae bacterium OH741_COT-311 O X=2491058 GN=queA PE=3 SV=1
MRTDEFDFHLPEELIAQTPVKNRKTSRLLVVNKKNKKLADKHFYNIVDYFKKGDVLVRNNTRVIPARLFGIKEETNAHVELLLLKQDGDIWQCLVGNAKVVKLNTIVSFGDGRLKAQCVEVLEKGLRRFKMIYEGIFFEILNELGNIPLPPYIHEKLEDKERYQTVYSKVLGSAAAPTAGLHFTDDIFDALKRKGVQIVDVTLHVGLGTFKPIDVEMVEEHIMHSEFYMMDQASADILNHALKKKQRIITVGTTSTRTIEAIYKQYHTFKECSGYTDIFIYPGYKWQVVDAIITNFHLPKSTLIMMISSFAGKDLIFKAYQHAIKQKYRFFSFGDCMFITNEDPLPSQPKINYYQKCIDEMEGFEGKKNLLLHACCAPCISFPLEFLIKKFNITIYYNNSNIYPENEYIKRLEELRYYVDEFNKQYQCDIPILAPDYDNVAYTKKLEPLKDEKEGGKRCFHCYAMRMDEAYNYATKHNFDYFTTVMTISRQKDSQKLNQIGANLEKKYSKVKYLYSDFKKNKGIDRRNELVKEKNLYAQHYCGCIYSMNNE

SEQ ID NO: 66376 - protein, 346 aa, Erysipelotrichaceae bacterium
  misc_feature (1)..(346): tr|A0A3C1MZZ4|A0A3C1MZZ4_9FIRM S-adenosylmethionine:tRN A ribosyltransferase-isomerase OS=Erysipelotrichaceae b acterium OX=2049044 GN=queA PE=3 SV=1
MDIELFDYDLPHELIAQTPLEKRDTSRLMVLNKNTGEVTHKHFYDIIDYLKPGDVLVRNNTKVIPARLFGTKEETHAHVEVLLLKNTHDDVWECLCGNARTIKVGTVISFGDGRLKAKCLEVREEGIRILEMIYEGIFFEVLDQLGIMPLPPYIKEKLDDPDRYNTVYAKIEGSAAAPTAGLHFTPELFQKLRDKGIEVEDVTLHVGLGTFRPVKVENVLEHHMHSEYYEISEDVAERLNKAKAEGRRIIAIGTTSCRTLEANVSKYGKFTAAHENTNIFIYPGYTFKAIDCLITNFHLPKSTLIMLVSALASREKILHAYNIAVKEKYRFFSFGDAMFITNETEL

SEQ ID NO: 66377 - protein, 340 aa, Erysipelotrichales bacterium
  misc_feature (1)..(340): tr|A0A524KAW4|A0A524KAW4_9FIRM S-adenosylmethionine:tRN A ribosyltransferase-isomerase OS=Erysipelotrichales ba cterium OX=2478483 GN=queA PE=3 SV=1
MKTDDFDFQLPPHLIAQTPLKDRSASRLLVVDRKTGKITHQHFYNIGAYLRAGDVLVLNETKVLPARLFGIKEGTGAHVELLILKIEQDAAECLVGNAKVVKVGTMISFGDGELKAQCLEVLPEGLRKFKFIHDGIFYEILDRLGVMPLPPYIKEKLADPDRYQTVYAREKGSAAAPTAGLHFTPELLASLSEQGVEIVKITLHVGLGTFRPVDVQDVMQHKMHEESYYVSEEAAAHLNIAKKEGRRIVSVGTTSTRTLETQMKKFGAFRAESSSTEIFIYPGFKFEAVDVQITNFHLPKSTLMMLVSAFASKDLIFKAYDEAIKEEYRFFSFGDSMLIL

SEQ ID NO: 66378 - protein, 342 aa, Erythrobacter aquimixticola
  misc_feature (1)..(342): tr|A0A419RRI7|A0A419RRI7_9SPHN S-adenosylmethionine:tRN A ribosyltransferase-isomerase OS=Erythrobacter aquimix ticola OX=1958945 GN=queA PE=3 SV=1
MKVDLFDFELPQELIALRPVRPRDAARLLVARGDASLEDRGVLDLPGLLEPGDLLVFNDTRVIPAQLEGRRGEAKIGATLHKRIDLRRWQAFIRNAKRLREGDTIAFGGDVEAVAEQRHADGSFTLGFAGDEPVEVMLERAGRMPLPPYIAGKRTTDERDREDYQTMFAREDGAVAAPTAALHFTPRLIEALEARGVKRETLTLHVGAGTFLPVKAEDTDDHAMHAEFGRIEADTAKRLNAAREAGGRLIAVGTTSLRLLESAADADGVIQPFAADTDIFITPGYRFRAADGLMTNFHLPKSTLMMLVSALMGRERMMTVYAHAIAERYRFYSYGDSSLLIP

SEQ ID NO: 66379 - protein, 343 aa, Erythrobacter atlanticus
  misc_feature (1)..(343): tr|A0A0H4VHK6|A0A0H4VHK6_9SPHN S-adenosylmethionine:tRN A ribosyltransferase-isomerase OS=Erythrobacter atlanti cus OX=1648404 GN=queA PE=3 SV=1
MRVDLFDFDLPQELIALRPVAPRDSARMLVACGESGLEDRHVYDLASLLQPGDVLVFNDTRVIPAQLEGRRREARIGATLHKRLDLRRWQAFIRNAKRLREGDTVEFPAGVSAVAEQRHGDGSFTLAFAGDEPVEVLLERAGRMPLPPYIAGKRSTDERDKVDYQTMFARKDGAVAAPTAALHFTPELIKTLDARGISRETLTLHVGAGTFLPVKADNTDDHAMHSEWGLIESATADRLNAARASGGRIIAVGTTSLRLLESATGEDGVIRAFAGDTAIFITPGYIFRAVDGLMTNFHLPKSTLMMLVSALMGRERMLGVYAHAIAQKYRFYSYGDSSLLLPR

SEQ ID NO: 66380 - protein, 344 aa, Erythrobacter citreus
  misc_feature (1)..(344): tr|A0A0L1KDM3|A0A0L1KDM3_9SPHN S-adenosylmethionine:tRN A ribosyltransferase-isomerase OS=Erythrobacter citreus LAMA 915 OX=1306953 GN=queA PE=3 SV=1
MKVDLFDFELPPERIALRPARPRDAARMLVVRSAGPFEDRGVRDLPEMLRAGDVLVFNDTRVIPAQLEGRRGEARIGATLHKRIDLRRWQAFVRNAKRLRIGDAVEFGGGVAATAEERLEDGSFVLAFAGKEPVEILLERAGRMPLPPYIAGKRATDAQDREDYQTMFAAEDGAVAAPTAALHFTPELIGALDAAGIGRETLTLHVGAGTFLPVKAHDTSDHAMHSEWGRIEPEAAARLNAVRAAGGRVIAVGTTSLRLLESATGEDGIIGAFAGDTDIFITPGYRFRAVDGLMTNFHLPKSTLMMLVSALMGRERMMDAYAHAIDSEYRFYSYGDSSLLLPHD

SEQ ID NO: 66381 - protein, 342 aa, Erythrobacter flavus
  misc_feature (1)..(342): tr|A0A3T1CIH8|A0A3T1CIH8_9SPHN S-adenosylmethionine:tRN A ribosyltransferase-isomerase OS=Erythrobacter flavus OX=192812 GN=queA PE=3 SV=1
MKVDLFDFELPPERIALRPARPRDAARMLVVRNDGAFEDRGVRDLPGLLRAGDVLVFNDTRVIPAQLEGRRGEARIGATLHKRIDLRRWQAFVRNAKRLRVGDIAEFGGGVTAVAEDRLADGSFVLAFEGEEPVEVLLERAGRMPLPPYIAGKRETDARDREDYQTMFAAEDGAVAAPTAALHFTPDLIAALDAAGVARETLTLHVGAGTFLPVKAEDTDDHAMHSEWGRIEADTARRLNAARAAGGRIIAVGTTSLRLLESATGDDDVIREFAGDTDIFITPGYRFRAVDGLMTNFHLPKSTLMMLVSALMGRDRMMAAYAHAIAREYRFYSYGDSSLLLP

SEQ ID NO: 66382 - protein, 342 aa, Erythrobacter flavus
  misc_feature (1)..(342): tr|A0A222EUS6|A0A222EUS6_9SPHN S-adenosylmethionine:tRN A ribosyltransferase-isomerase OS=Erythrobacter flavus OX=192812 GN=queA PE=3 SV=1
MKVDLFDFELPPERIALRPARPRDAARMLVVRNDGAFEDRGVRDLPGLLRAGDVLVFNDTRVIPAQLEGRRGEARIGATLHKRIDLRRWQAFVRNAKRLRVGDIAEFGGGVTALAEDRLADGSFVLAFEGEEPVEVLLERAGQMPLPPYIAGKRETDARDREDYQTMFAAEDGAVAAPTAALHFTPDLIAALDAAGVVRETLTLHVGAGTFLPVKAEDTDDHAMHSEWGRIEADTARRLNAARAAGGRIIAVGTTSLRLLESATGDDDVIREFAGDTDIFITPGYRFRAVDGLMTNFHLPKSTLMMLVSALMGRDRMMAAYAYAIAQEYRFYSYGDSSLLLP

SEQ ID NO: 66383 - protein, 345 aa, Erythrobacter gangjinensis
  misc_feature (1)..(345): tr|A0A0G9MU08|A0A0G9MU08_9SPHN S-adenosylmethionine:tRN A ribosyltransferase-isomerase OS=Erythrobacter gangjin ensis OX=502682 GN=queA PE=3 SV=1
MRVDLFDFDLPQELIALRPARPRDTARMLVVEGDAPFADCGVLDLPQILREGDVLVFNDTRVIPAQLEGRRGEAKIGATLHKRLDLRRWQAFIRNAKRLKEGDTVEFGANVTATAEERHADGSFTLAFHGDEPVEVLLERAGRMPLPPYIAGKRDTDAQDREDYQTMFAEKDGAVAAPTAALHFTDRLIAALDEAGVKRETLTLHVGAGTFLPVKADDTDDHQMHSEWGTIDAATAERLNGARAAGGRLIAVGTTSLRLLESAAGEDGTIRPFADDTDIFITPGYRFRAVDGLMTNFHLPKSTLMMLVSALMGRERMQAVYAHAIAQKYRFYSYGDSSLLLPARD

SEQ ID NO: 66384 - protein, 347 aa, Erythrobacter litoralis
  misc_feature (1)..(347): sp|Q2NAT1|QUEA_ERYLH S-adenosylmethionine:tRNA ribosylt ransferase-isomerase OS=Erythrobacter litoralis (strain HTCC2594) OX=314225 GN=queA PE=3 SV=1
MRVDLFDFELPQELIALRPAVPRDSARLLVAAGAGAIDDRIVRDLPQLLMPGDVLVFNDTRVIPAQLTGKRGEATVGVTLHKRLDLRRWQAFVRNAKRLAPGDTVDFGNDVSADVEDRADDGSFTFAFRGDEPVEVLLDRAGTMPLPPYIAGKRATDERDRDDYQTMFAREDGAVAAPTAALHFTSELIAALDERGVARQTLTLHVGAGTFLPVKADDTDDHRMHSEWGRIEHDTADRLNAAKSRGGRIIAVGTTSLRLLESATGEDGVIRTFAGDTDIFITPGYRFRAVDGLMTNFHLPKSTLMMLVSALMGRERMMDIYAHAIAQRYRFYSYGDSSLLIPEGNTK

SEQ ID NO: 66385 - protein, 349 aa, Erythrobacter litoralis
  misc_feature (1)..(349): tr|A0A074MV14|A0A074MV14_9SPHN S-adenosylmethionine:tRN A ribosyltransferase-isomerase OS=Erythrobacter litoral is OX=39960 GN=queA PE=3 SV=1
MRVDLFDFELPPELIALRPVRPRDAARMLLVRGTDPSAPIEDRGVRDLPDLLNPGDVLVFNDTRVIPAQLEGRRRDGEAKVGATLHKRIDLRRWQAFLRNAKRVKEGDALVFGGGVTAIAEERHGDGSMTLLFEGEEPVEVLLDRAGTMPLPPYIASKRAIDEADREDYQTMFAAKDGAVAAPTASLHFTQRLVDALDERGILRETLTLHVGAGTFLPVKAEDTEDHRMHAEFGIIRTEVADRLNAVRAAGNRIVAVGTTSLRLLESAAQPDRTIAPFEGDTDIFITPGYAFNAVDGLMTNFHLPKSTLMMLVSALMTRERMMAAYAHAIANRYRFYSYGDSSLLLPGG

SEQ ID NO: 66386 - protein, 345 aa, Erythrobacter longus
  misc_feature (1)..(345): tr|A0A074MEX6|A0A074MEX6_ERYLO S-adenosylmethionine:tRN A ribosyltransferase-isomerase OS=Erythrobacter longus OX=1044 GN=queA PE=3 SV=1
MRVDLFNFELPQDRIALRPVRPRDAARMLVVRGQDAPFVDAGVLDLPKMLRPGDVLVFNDTRVLPAQLEGRRVGGEARIGATLHKRLDLRRWQAFVRNAKRVKEGDQLIFGGGVTAIAQDRFKDGSITLFFEGDEPVEVLLDRAGTMPLPPYIALRRGVDEQDLSDYQTMFAAEDGAVAAPTASLHFTQRLVEALDARGIGRETLTLHVGAGTFLPVKADDTDDHQMHSEFGRISAATAQRLNEAREAGGRVIAVGTTSLRTLESAAGEDGKLREFADDTDIFITPGYRFRVVDGLMTNFHLPKSTLMMLVSALMGRERMMDAYTHAIQNDYRFYSYGDSSLLLP

SEQ ID NO: 66387 - protein, 342 aa, Erythrobacter luteus
  misc_feature (1)..(342): tr|A0A0G9MY57|A0A0G9MY57_9SPHN S-adenosylmethionine:tRN A ribosyltransferase-isomerase OS=Erythrobacter luteus OX=1581420 GN=queA PE=3 SV=1
MKVDLFDFDLPQELIALRPVAPRDSARMLVVRDDAPFTDATVRDLPGLLAPGDVLVFNDTRVIPAQLEGRRGEAKIGATLHKRIDMRRWQAFVRNAKRLSEGDTIDFGAGVSAVAEARHADGSFTLAFAGEEPVEVLLERAGRMPLPPYIAGKRPTDERDRADYQTMFAQHDGAVAAPTAALHFTPGLMAALADRDVGAETLTLHVGAGTFLPVKAEDTDDHAMHAEWGTVSAETAARLNAARAAGGRLIAVGTTSLRLLESAAGEDGQVRAFAGDTAIFITPGYAFRAVDGLMTNFHLPRSTLMMLVSALMGRERMMDAYAHAIARGYRFYSYGDSSLLLP

SEQ ID NO: 66388 - protein, 349 aa, Erythrobacter lutimaris
  misc_feature (1)..(349): tr|A0A395LME4|A0A395LME4_9SPHN S-adenosylmethionine:tRN A ribosyltransferase-isomerase OS=Erythrobacter lutimar is OX=1538146 GN=queA PE=3 SV=1
MKVDLFDFELPPERIALRPVSPRDSAKMLVVGGDAPFDDRQVCDLPDVLRAGDVLVFNDTRVIPAQLEGERIREGASGAAIGATLHKRIDARRWQAFVRNAKRLRAGERIAFPDGVAAIAEARAEDGSWTLAFEGDEPVEVLLERAGAMPLPPYIAQRRAADERDAQDYQTLFAQKAGAVAAPTAALHFTPDLMARLEAAGIATETLTLHVGAGTFLPVKAQDTADHRMHAEWGSITPEVADRLNTARAEGRRVIAVGTTSLRLLESAADETGTIRPFADDTAIFITPGYRFRAIDGLMTNFHLPKSTLFMLVSALMGRERMLDVYAHAIDNEYRFYSYGDSSLLLPRS

SEQ ID NO: 66389 - protein, 342 aa, Erythrobacter marinus
  misc_feature (1)..(342): tr|A0A0H0XML9|A0A0H0XML9_9SPHN S-adenosylmethionine:tRN A ribosyltransferase-isomerase OS=Erythrobacter marinus OX=874156 GN=queA PE=3 SV=1
MRVDLFDFELPQALIALRPVAPRDSARMLLARGSAPLADRIVRDLPDMLEPGDVLVFNDTRVIPAQLEGERGEARIGATLHKRIDLRRWQAFIRNAKRLREGDLVEFGANVTAIAEARHKDGSFTLAFEGDEPVEVLLERAGRMPLPPYIAGKRPTDERDQSDYQTMFAQKDGAVAAPTAALHFTPELISALDARGIKRETLTLHVGAGTFLPVKAKDTDDHAMHSEWGQIDGETAARLNAARAAGGRLIAVGTTSLRLLESAADDSGLVQPFSADTDIFITPGYRFRVVDGLMTNFHLPKSTLMMLVSALMGMERMKEVYAHAIANEYRFYSYGDSSLLLP

SEQ ID NO: 66390 - protein, 343 aa, Erythrobacter nanhaisediminis
  misc_feature (1)..(343): tr|A0A1I5MZF0|A0A1I5MZF0_9SPHN S-adenosylmethionine:tRN A ribosyltransferase-isomerase OS=Erythrobacter nanhais ediminis OX=604088 GN=queA PE=3 SV=1
MKVDLFDFDLPPERIALRPARPRDAARMLVVEGAEGAMRDCGVRDLPSLLKAGDVLVFNDTRVIPAQLEGRRGEAKIGATLHKRVDLRRWQAFIRNAKRVRAGDLIEFGGGVSAIAEERLPDGSFILAFQGDEPVEVLLERAGRMPLPPYIARKRETDAQDREDYQTMFAAEDGAVAAPTASLHFTPELVAALDDAGVGRETLTLHVGAGTFLPVKADDTDDHAMHSEWGRIEPEVADRLNAARASGGRIIAVGTTSLRLLESATQDDGVIRAFAGDTDIFITPGYQFRAVDGLMTNFHLPKSTLMMLVSALMGRDRMMAAYAHAIANEYRFYSYGDSSLLIP

SEQ ID NO: 66391 - protein, 345 aa, Erythrobacter sp.
  misc_feature (1)..(345): tr|A0A1E4B0A6|A0A1E4B0A6_9SPHN S-adenosylmethionine:tRN A ribosyltransferase-isomerase OS=Erythrobacter sp. SCN 62-14 OX=1660099 GN=queA PE=3 SV=1
MKVDLFDFELPQERIALRPVRPRDAARMLVVRGNNAPFEDRGVRDLPQLLNPGDVLVFNDTRVIPAQLEGRRADGEAKIGATLHKRMDLRRWQAFVRNAKRVKEGDSLVFGGGVTAIAEARHGDGSITLFFEGTEPVEVLLDRAGTMPLPPYIAQKRGVDAQDLEDYQTMFAAQDGAVAAPTASLHFTPRLVDAIDAAGIGRAMLTLHVGAGTFLPVKAEDTEDHQMHAEFGRISQTTADQLNAARAAGGRIIAVGTTSLRLLESAVDEDGVIHPFAGDTSIFITPGYTLRGVDGLMTNFHLPKSTLMMLVSALMGRERMMAAYAHAIANEYRFYSYGDSSLLLP

SEQ ID NO: 66392 - protein, 344 aa, Erythrobacter sp.
  misc_feature (1)..(344): tr|A0A1A7QEC1|A0A1A7QEC1_9SPHN S-adenosylmethionine:tRN A ribosyltransferase-isomerase OS=Erythrobacter sp. QSS C1-22B OX=1860125 GN=queA PE=3 SV=1
MNIDLFDFALPPERIALRPARPRDAARMLVVRGTGTRPFEDRGVGDLPQLLRAGDVLVFNDTRVIPAQLEGRRGEAKIGATLHKRIDLRRWQAFIRNAKRLKEGDLITFGGGVSAQAETRHEDGSFTLCFGGDEPVELLLERAGTMPLPPYIAGKRGTDAQDREDYQTMFAREDGAVAAPTASLHFTDALVAALDEAGIGREMLTLHVGAGTFLPVKAQDTADHKMHSEWGRIEPAVADRLNAARAAGGRIIAVGTTSLRLLESATGEDGVIAPFAGDTDIFITPGYAFRAVDGLMTNFHLPKSTLFMLVSAMMGRERMQDAYAHAIAAEYRFYSYGDSSLLLP

SEQ ID NO: 66393 - protein, 349 aa, Erythrobacter xanthus
  misc_feature (1)..(349): tr|A0A3A1NYU7|A0A3A1NYU7_9SPHN S-adenosylmethionine:tRN A ribosyltransferase-isomerase OS=Erythrobacter xanthus OX=1784712 GN=queA PE=3 SV=1
MKVDLFDFDLPPERIALRPARPRDAARMLVVKGGEPLADAGVRDLPGLLAPGDVLVFNDTRVIPAQLEGRRGEARIGATLHKRLDLRRWQAFIRNAKRLREGDVIDFGADVYATTEQRHADGSFTLAFAGEEPVELLLERAGTMPLPPYIAQKRGTDEADRSDYQTMFAREDGAVAAPTASLHFTDALVAAIDAAGVSRETLTLHVGAGTFLPVKAEDTAEHKMHSEWGRIDAATAARLNAARAAGGRLIAVGTTSLRLLESAAGEDRLIREFAGDTDIFITPGYRFRAVDGLMTNFHLPKSTLFMLVSALMGRETMQAAYAHAIASEYRFYSYGDSSLLLPHKAAAEE

SEQ ID NO: 66394 - protein, 344 aa, Erythrobacter zhengii
  misc_feature (1)..(344): tr|A0A418NXL7|A0A418NXL7_9SPHN S-adenosylmethionine:tRN A ribosyltransferase-isomerase OS=Erythrobacter zhengii OX=2307003 GN=queA PE=3 SV=1
MRVDLFDFDLPQELIALRPARPRDAARMLVVRGNAPFADCGVLDLPDMLRAGDVLVFNDTRVIPAQLEGRRGEARIGATLHKRLDLRRWQAFIRNAKRLKPGDRVEFGAEVFAIAEERHDDGSFTLAFEGDEPVEVLLERAGRMPLPPYIAGKRETDAQDREDYQTMFAQKDGAVAAPTAALHFTDRLIASLDDAGIGRETLTLHVGAGTFLPVKAEDTDDHRMHAEFGIIDAATADRLNTARAAGGRIIAVGTTSLRLLESAADEEGVIHPFSADTDIFITPGYRFRAVEGLMTNFHLPKSTLMMLVSALMGRERMQAVYAHAIAQGYRFYSYGDSSLLLPEG

SEQ ID NO: 66395 - protein, 348 aa, Erythrobacteraceae bacterium
  misc_feature (1)..(348): tr|A0A4R0NXQ3|A0A4R0NXQ3_9SPHN S-adenosylmethionine:tRN A ribosyltransferase-isomerase OS=Erythrobacteraceae ba cterium CFH 75059 OX=2528174 GN=queA PE=3 SV=1
MKTDLFDFDLPEDRIALRPAVPRDAARLLVATREGPFGDHVFRELPRLLRAGDLLVFNDTRVIPAQLEGVRRARDGGAGAKIGVTLHQRLGARRWHAFVRNGRRLAPGDRIDFGHDVAAEVEDRLPDGSFHLSFLGAEPAEDLLARAGTVPLPPYIASRRRADARDRADYQTVFAREDGAVAAPTAALHFTDAVLGELAGAGIRSTTVTLHVGAGTFLPVKAADTRDHAMHSEWGRITPEAARALNEAKAQGGRIIAVGTTSLRLLESAADDNGSVVPFTGSTDIFITPGYRFRAIDGLVTNFHLPRSTLFMLVSALMGRERMLEAYAHAIENQYRFYSYGDSSLLLP

SEQ ID NO: 66396 - protein, 349 aa, Erythrobacteraceae bacterium
  misc_feature (1)..(349): tr|A0A0P7W093|A0A0P7W093_9SPHN S-adenosylmethionine:tRN A ribosyltransferase-isomerase OS=Erythrobacteraceae ba cterium HL-111 OX=1666908 GN=queA PE=3 SV=1
MRVDLFDFELPQDLIALRPVRPRDAARMLLVRGTDPAAPLEDRGVRDLPDLLDPGDVLVFNDTRVIPAQLEGRRKDGEARIGATLHKRIDLRRWQAFLRNARRVKEGDALIFGGGVTAIAEERHGDGSMTLFFEGEEPVEVLLDRAGTMPLPPYIASRRAIDEADREDYQTMFAAKDGAVAAPTASLHFTQRLVDALDERGILRETLTLHVGAGTFLPVKAEDTEDHRMHAEFGVIRPEVAERLNAVRAQGRRIVAVGTTSLRLLESAAREDRAIAAFEGDTDIFITPGYAFRAVDGLMTNFHLPKSTLMMLVSALMTRERMMAAYAHAIANRYRFYSYGDSSLLLPGG

SEQ ID NO: 66397 - protein, 356 aa, Escherichia albertii; identical to SEQ ID NO: 62661
  misc_feature (1)..(356): tr|W0ARX8|W0ARX8_9ESCH S-adenosylmethionine:tRNA ribosy ltransferase-isomerase OS=Escherichia albertii KF1 OX=1 440052 GN=queA PE=3 SV=1

SEQ ID NO: 66398 - protein, 356 aa, Escherichia albertii
  misc_feature (1)..(356): tr|A0A3W6DNR1|A0A3W6DNR1_9ESCH S-adenosylmethionine:tRN A ribosyltransferase-isomerase OS=Escherichia albertii OX=208962 GN=queA PE=3 SV=1
MRVTDFSFELPESLIAHYPMPERSSCRLLSLDGPTGALTHGTFTDLLDKLNPGDLLVFNNTRVIPARLFGRKASGGKIEVLVERMLDDKRILAHIRASKAPKPGAELLLGDDESINATMTARHGALFEVEFNDERSVLDILNSIGHMPLPPYIDRPDEDADRELYQTVYSEKPGAVAAPTAGLHFDEPLLEKLRAKGVEMAFVTLHVGAGTFQPVRVDTIEDHIMHSEYAEVPQDVVDAVLAAKVRGNRVIAVGTTSVRSLESAAQAAKNDLIEPFFDDTQIFIYPGFQYKVVDALVTNFHLPESTLIMLVSAFAGYQHTMNAYKAAVEEKYRFFSYGDAMFITYNPQAINERVGE

SEQ ID NO: 66399 - protein, 356 aa, Escherichia fergusonii
  misc_feature (1)..(356): tr|F0JMX1|F0JMX1_ESCFE S-adenosylmethionine:tRNA ribosy ltransferase-isomerase OS=Escherichia fergusonii ECD227 OX=981367 GN=queA PE=3 SV=1
MRVTDFSFELPESLIAHYPMPERSSCRLLSLDGPTGALTHGTFTDLLDKLNPGDLLVFNNTRVIPARLFGRKASGGKIEVLVERMLDDKRILAHIRASKAPKPGAELLLGDDESINATMTARHGALFEVEFNDERSVLDILNSIGHMPLPPYIDRPDEDADRELYQTVYSEKPGAVAAPTAGLHFDEPLLEKLRAKGVEMAFVTLHVGAGTFQPVRVDTIEDHIMHSEYAEVPQDVVDAVLATKARGNRVIAVGTTSVRSLESAAQAAKNDLIEPFFDDTQIFIYPGFQYKVVDALVTNFHLPESTLIMLVSAFAGYQHTMNAYKAAVEEKYRFFSYGDAMFITYNPQAINERVGE

SEQ ID NO: 66400 - protein, 356 aa, Escherichia fergusonii
  misc_feature (1)..(356): tr|A0A564SNX1|A0A564SNX1_ESCFE S-adenosylmethionine:tRN A ribosyltransferase-isomerase OS=Escherichia fergusoni i OX=564 GN=queA PE=3 SV=1
MRVTDFSFELPESLIAHYPMPERSSCRLLSLDGPTGALTHGTFTDLLDKLNPGDLLVFNNTRVIPARLFGRKASGGKIEVLVERMLDDKRILAHIRASKAPKPGAELLLGDDESINATMTARHGALFEVEFNDDRSVLDILNSIGHMPLPPYIDRPDEDADRELYQTVYSEKPGAVAAPTAGLHFDEPLLEKLRAKGVEMAFVTLHVGAGTFQPVRVDTIEDHIMHSEYAEVPQDVVDAVLAAKARGNRVIAVGTTSVRSLESAAQAAKNDLIEPFFDDTQIFIYPGFQYKVVDALVTNFHLPESTLIMLVSAFAGYQHTMNAYKAAVEEKYRFFSYGDAMFITYNPQAINERVGE

SEQ ID NO: 66401 - protein, 356 aa, Escherichia marmotae
  misc_feature (1)..(356): tr|A0A2B7LX14|A0A2B7LX14_9ESCH S-adenosylmethionine:tRN A ribosyltransferase-isomerase OS=Escherichia marmotae OX=1499973 GN=queA PE=3 SV=1
MRVTDFSFELPESLIAHYPMPERSSCRLLSLDGPTGALTHGTFTDLLDKLNPGDLLVFNNTRVIPARLFGRKASGGKIEVLVERMLDDKRILAHIRASKAPKPGAELLLGDDESIKATMTARHGALFEVEFNDQRSVLDILNSIGHMPLPPYIDRPDEDADRELYQTVYSEKPGAVAAPTAGLHFDEPLLEKLRAKGVEMAFVTLHVGAGTFQPVRVDTIEDHIMHSEYAEVPQDVVDAVLAAKARGNRVIAVGTTSVRSLESAAQAAKNALIEPFFDDTQIFIYPGFQYKVVDALVTNFHLPESTLIMLVSAFAGYQHTMNAYKAAVEEKYRFFSYGDAMFITYNPQAINERVGE

SEQ ID NO: 66402 - protein, 356 aa, Escherichia sp.
  misc_feature (1)..(356): tr|A0A4U6CKP4|A0A4U6CKP4_9ESCH S-adenosylmethionine:tRN A ribosyltransferase-isomerase OS=Escherichia sp. MR OX =2575922 GN=queA PE=3 SV=1
MRVTDFSFELPESLIAHYPMPERSSCRLLSLDGPTGALTHGTFTDLLDKLNPGDLLVFNNTRVIPARLFGRKASGGKIEVLVERMLDDKRILAHIRASKAPKPGAELLLGDDESIKATMTARHGALFEVEFNDDRSVLDILNSIGHMPLPPYIDRPDEDADRELYQTVYSEKPGAVAAPTAGLHFDEPLLEKLRAKGVEMAFVTLHVGAGTFQPVRVDTIEDHIMHSEYAEVPQEVVDAVLAAKARGNRVIAVGTTSVRSLESAAQAAKNDLIEPFFDDTQIFIYPGFQYKVVDALVTNFHLPESTLIMLVSAFAGYQHTMNAYKAAVEEKYRFFSYGDAMFITYNPQAINERVGE

SEQ ID NO: 66403 - protein, 356 aa, Escherichia sp.
  misc_feature (1)..(356): tr|A0A4Q9JR62|A0A4Q9JR62_9ESCH S-adenosylmethionine:tRN A ribosyltransferase-isomerase OS=Escherichia sp. E10V4 OX=2478971 GN=queA PE=3 SV=1
MRVTDFSFELPESLIAHYPMPERSSCRLLSLDGPTGALTHGTFTDLLDKLNPGDLLVFNNTRVIPARLFGRKASGGKIEVLVERMLDDKRILAHIRASKAPKPGAELLLGDDESIKATMTARHGALFEVEFNDERSVLDILNSIGHMPLPPYIDRPDEDADRELYQTVYSEKPGAVAAPTAGLHFDEPLLEKLRAKGVEMAFVTLHVGAGTFQPVRVDTIEDHIMHSEYAEVPQDVVDAVLAAKARGNRVIAVGTTSVRSLESAAQAAKNDLIEPFFDDTQIFIYPGFQYKVVDALVTNFHLPESTLIMLVSAFAGYQHTMNAYKAAVEEKYRFFSYGDAMFITYNPQAINERVGE

SEQ ID NO: 66404 - protein, 427 aa, Estrella lausannensis
  misc_feature (1)..(427): tr|A0A0H5DSC1|A0A0H5DSC1_9BACT S-adenosylmethionine:tRN A ribosyltransferase-isomerase OS=Estrella lausannensis OX=483423 GN=queA PE=3 SV=1
MEKTQILGGYTRCGKQIIRFKFVEGLQKLAKARLDENVSKIRFARDSIHHNHLIQSFKRNIFFVDVSYRFRYDDSEKFNEKSAMDPTLLKSYSYHLPEELIAKKPASPRDSSRLMVIERSSGTIRIGIFRDLLSLVGPHDRFVVNNTKVFKARLLGMKPGTGGKCEVFLLKEISKGRWQALVRPGKKMPHGTVVEFSPHFYCQILDTLPDGSRIVQFPQEVDVLQQTSLLGHIPLPHYIQRDADDPQDEKDYQTSFASRVGANAAPTAGLHFTDELVSALKNKGNAFFEVTLHVGLGTFRPVQVEDIREHKMHSEWCEITSETASALNQACRGREIAVGTTSCRTLESFADERGQLSSGCHETDIFIYPGYRFKRTNALLTNFHLPESSLLMLVSAFAGPELIKEAYSKAIEERMRFYSYGDAMLIL

SEQ ID NO: 66405 - protein, 341 aa, Ethanoligenens harbinense
  misc_feature (1)..(341): tr|E6U6Z3|E6U6Z3_ETHHY S-adenosylmethionine:tRNA ribosy ltransferase-isomerase OS=Ethanoligenens harbinense (st rain DSM 18485 / JCM 12961 / CGMCC 1.5033 / YUAN-3) OX= 663278 GN=queA PE=3 SV=1
MKKSDFYYDLPPERIAQEPLAQRDQSRLMTLDRATGAVGHRHFYDLPDLLLPGDCLILNNSRVLPARLYGNREKTGGRVEFVLLNEKKRDEWEVILRPGRTARVGARYVFGGGLLKAEVLEIIEDGNRIVRFEHEGDFYRLIEQIGEMPLPHYITHRLKDKERYQTVYAKESGSAAAPTAGLHFTPELLEHLRQKGVRIGYVTLHVGLGTFRPVKADTIEKHVMHSEHYELPEETAALIRETKASGGRVVGVGTTSCRTLESVAQRYGEIRAAEGWTDIFIYPGFQFQVLDALITNFHLPESTLIMLVSAFAGREHVLHAYQEAIAEQYRFYSFGDAMLLY

SEQ ID NO: 66406 - protein, 341 aa, Ethanoligenens harbinense; identical to SEQ ID NO: 66405
  misc_feature (1)..(341): tr|A0A386XQP5|A0A386XQP5_9FIRM S-adenosylmethionine:tRN A ribosyltransferase-isomerase OS=Ethanoligenens harbin ense OX=253239 GN=queA PE=3 SV=1

SEQ ID NO: 66407 - protein, 341 aa, Eubacteriaceae bacterium
  misc_feature (1)..(341): tr|A0A143XZF4|A0A143XZF4_9FIRM S-adenosylmethionine:tRN A ribosyltransferase-isomerase OS=Eubacteriaceae bacter ium CHKCI004 OX=1780380 GN=queA PE=3 SV=1
MKTSDFYYDLPEELIAQDPLENRSDSRLMVLDKETGAVSHHVFREIVDYLNPGDCLVINDTKVIPARLIGEREGTGAKIEVLLLKRKTGDVWETLVKPGRKAKPGTRIQFGGGLLVGEVMDIVDEGNRLIRFEFEGIFEEILDQLGQMPLPPYITHQLKDKDRYNTVYATHSGSAAAPTAGLHFTPELLKTIEEKGIDIARVTLHVGLGTFRPVKVDDVENHHMHSEFYMIDEEAAEKINRAKENGKRVICVGTTSCRTIESAADENGRLKPCSGWTEIFIYPGYQFKILDCLITNFHLPESTLIMLVSALAGKEHVLAAYEEAVKERYRFFSFGDAMFIC

SEQ ID NO: 66408 - protein, 341 aa, Eubacteriaceae bacterium
  misc_feature (1)..(341): tr|A0A143ZNN6|A0A143ZNN6_9FIRM S-adenosylmethionine:tRN A ribosyltransferase-isomerase OS=Eubacteriaceae bacter ium CHKCI005 OX=1780381 GN=queA PE=3 SV=1
MKKSDFYYDLPEELIAQTPIEPRDHSRLMVLDRSKEGVEHKHFYDLVDYLNPGDCLILNDSRVLPARLYGAREDTGAVVEFLLLADKGNGVWETLCGPGKKARPGHRFSFGEGLMTGEVLDIIEGGNRLVKLSCEGPIYPMLERIGEMPLPHYITQKLENQERYQTVYSKEPGSAAAPTAGLHFTPELLEKLKAKGIKIGFVTLHVGLGTFRPVKEDEIEHHTMHSEHYTLPEETAQLILDTKKNGGRVIAVGTTSCRTLESVATYHGKIEAAEGDTSIFIYPGYTFKVLDGLVTNFHLPESTLVMLVSALAGRERILEAYRIAVEEKYRFFSFGDAMYIR

SEQ ID NO: 66409 - protein, 345 aa, Eubacterium aggregans
  misc_feature (1)..(345): tr|A0A1H4BSN2|A0A1H4BSN2_9FIRM S-adenosylmethionine:tRN A ribosyltransferase-isomerase OS=Eubacterium aggregans OX=81409 GN=queA PE=3 SV=1
MTTTLSTTDFYYDLPESSIAQTPLDQRDTSKLLAINRATGEMADRHFHDILEYLKPGDLLVMNDTKVLPARIYGKRKETGGKVELLLLKRLDDHRWETMVKPGKKAKPGTELVFGRGLTGTIEETIPGGLRIIRFEYQGVFEEILSEIGTMPLPPYIHETLKDQSRYQTVYAEHDGSAAAPTAGLHFTPELLKEIADRGVGIARVTLHVGIGTFRPVKVENLLEHQMHSERYVLPEETARAIAETKKQGGRIIAVGTTSVRTLESVASRHDGQVVSEAGTTDIFIYPGYHWQVVDALITNFHLPESTLLMLVSSFYNREKILEAYRHAVAADYRFFSFGDAMFLY

SEQ ID NO: 66410 - protein, 345 aa, Eubacterium barkeri
  misc_feature (1)..(345): tr|A0A1H3CAB3|A0A1H3CAB3_EUBBA S-adenosylmethionine:tRN A ribosyltransferase-isomerase OS=Eubacterium barkeri O X=1528 GN=queA PE=3 SV=1
MTTTLSTADFYYDLPETSIAQTPLSKRDTSKLLAIDRTTGEMADRHFHDILEYLKPGDLLVMNDTKVLPARIYGQRKETGGKVELLLLKRLDDHRWETMVKPGKKAKPGTELVFGKGLTGTIEETIPGGLRIIRFEYQGVFEEILSEIGTMPLPPYIHETLKDQSRYQTVYAEHDGSAAAPTAGLHFTPELLKEIEDRGVGIAWVTLHVGIGTFRPVKVENLLEHQMHSERYVLPEETARAIAKTKEGGGRVIAVGTTSVRTLESVASRHDGHVVCDAGTTDIFIYPGYQWQVVDALITNFHLPESTLLMLVSSFYNREKILEAYRHAVAADYRFFSFGDAMFLY

SEQ ID NO: 66411 - protein, 347 aa, Eubacterium brachy
  misc_feature (1)..(347): tr|V1CHV4|V1CHV4_9FIRM S-adenosylmethionine:tRNA ribosy ltransferase-isomerase OS=Eubacterium brachy ATCC 33089 OX=1321814 GN=queA PE=3 SV=1
MKVSDFDYNLPERFIAQTPASKRDKSKLMVVNRHTGTIEHRIFSDVLEYLNEGDCLVLNNSKVIPARIFGKKRETGANAEFLLIKPIENDLWQVMVKPGRKLKKGNIIDFADNFTAEIIDYGEDGTRIVKFQYEGVFMERLDEIGSMPLPPYIERNSTEFDKDRYQTVYSLNEGSVAAPTAGLHFTRELLKKIREKGVEIAYVTLHVGIGTFRPVKVEDIRFHTMHKENLFITEDNARKINEAILRGNMVIAVGTTSTRTLESSSYYDEKEKKYLVRSGNAETDIFIYPGYDFKIVNSQITNFHLPKSTLLMLISAFYDRGKVMECYDVAKREGYRFFSYGDSMLLI

SEQ ID NO: 66412 - protein, 344 aa, Eubacterium callanderi; identical to SEQ ID NO: 64533
  misc_feature (1)..(344): tr|E3GG71|E3GG71_9FIRM S-adenosylmethionine:tRNA ribosy ltransferase-isomerase OS=Eubacterium callanderi OX=534 42 GN=queA PE=3 SV=1

SEQ ID NO: 66413 - protein, 344 aa, Eubacterium callanderi
  misc_feature (1)..(344): tr|A0A1I5KGU5|A0A1I5KGU5_9FIRM S-adenosylmethionine:tRN A ribosyltransferase-isomerase OS=Eubacterium callander i OX=53442 GN=queA PE=3 SV=1
METLTTKDFYYDLPEELIAQTPEKKRDASRLMVLNRMKGSIQDRHFHDIIDYLNEDDLLVMNNTKVLPARIFGKKEETGGKVELLLLKRLDDKTWETMVKPGKKAMPGTRLVFGDKLKGEIKDKIESGLRIIEFEYDGIFEEIIGELGTMPLPPYIHEVLEDQDRYQTVYAKYTGSAAAPTAGLHFTEELLDALRRKGIRTAEVTLHVGIGTFRPVKCDNILDHHMHEETYQVPKETEKLIEETRKKGGRVIAVGTTSVRTLESAAARFGGKVQACEGSTDIFIYPGYKWQVIDALITNFHLPESTLLMLVSSFYNREAVLKAYQHAIDARYRFFSFGDAMFIY

SEQ ID NO: 66414 - protein, 345 aa, Eubacterium coprostanoligenes
  misc_feature (1)..(345): tr|A0A1T4LTC4|A0A1T4LTC4_9FIRM S-adenosylmethionine:tRN A ribosyltransferase-isomerase OS=Eubacterium coprostan oligenes OX=290054 GN=queA PE=3 SV=1
MKTSDFYYDLPQELIAQTPMEPRDMSRLMVIDKNTGEIEHKIFKDLIDYLRPGDCLILNDTRVIPARIYGVKKETGAVVEFLLLKQSENNVWECLCKPGKRAKVGTSFVFGDGIVECEVVDVTDDGNRKVQFKCDSKEIYTILDKIGKMPLPPYITEELKNGELYQTVYSKELGSAAAPTAGLHFTEEMLKKIEEKGIKIGYVTLHVGLGTFRPVKVDDVKNHKMHSEHYHISKETADLINDTKKNGGRVIAVGTTSTRTLESVATKNGCICEDEDDTSIFIYPGYEFKCIDGLVTNFHLPESTLIMLISAFAGYDNVMNAYKIAVDEKYRFFSFGDACFFTDIK

SEQ ID NO: 66415 - protein, 343 aa, Eubacterium eligens
  misc_feature (1)..(343): tr|C4Z1H5|C4Z1H5_EUBE2 S-adenosylmethionine:tRNA ribosy ltransferase-isomerase OS=Eubacterium eligens (strain A TCC 27750 / VPI C15-48) OX=515620 GN=queA PE=3 SV=1
MDLHDFYYDLPEELIAQDPLSDRSSSRLMVLDKETGEIEHKIFRDIVDYLKPGDCLVVNDTKVIPARLIGTKADTGATIEVLLLKRLEDRQDTWEVLVKPGKKAKVGAKISFGEGKLIGEIIDIVEEGNRLIQFTYDGIFEEILDELGQMPLPPYITHKLEDKNRYQTVYAKHEGSAAAPTAGLHFTTELLEKIKAMGVNIARVTLHVGLGTFRPVKVENILDHHMHSEFYVVTQEAADMINNTRKNGGRVIAVGTTSTRTLESVALEDGTIPAKSGWTEIFIYPGYKFKAIDCLITNFHLPESTLVMLVSALAGREHVLHAYEVAVQEKYRFFSFGDAMFIK

SEQ ID NO: 66416 - protein, 343 aa, Eubacterium eligens; identical to SEQ ID NO: 62550
  misc_feature (1)..(343): tr|R5ZP72|R5ZP72_9FIRM S-adenosylmethionine:tRNA ribosy ltransferase-isomerase OS=Eubacterium eligens CAG:72 OX =1263077 GN=queA PE=3 SV=1

SEQ ID NO: 66417 - protein, 351 aa, Eubacterium infirmum
  misc_feature (1)..(351): tr|H1PM18|H1PM18_9FIRM S-adenosylmethionine:tRNA ribosy ltransferase-isomerase OS=Eubacterium infirmum F0142 OX =883109 GN=queA PE=3 SV=1
MHINDFDYELPEELIAQKPQKDRDKCRLMVLRRKENSIEHRHFFDILEYLKEGDCLLLNDSKVIPARLYGIKEETGARVEFLLIKRVDGDIWETMVRPGKRLKPGDSVLFSDEDGKKLRAEILDYGEDGTRIVKMEYDGILMERLEEIGSMPLPPYISRPGNEEDKDDYQTVYCHEEGSVAAPTAGLHFTTELLEKAKEKGVKIAFVTLHVGIGTFRPVKCETIEEHHMHFEEYSISEEAAEIVNRTVLEGGRIISVGTTSTRTAESAAYFDEKSGKYLIAAGSGSTDIFIYPGYKFKIIGSLITNFHLPKSTLMMLVSALYDREHILKAYGKAVEEKYRFFSYGDAMFIE

SEQ ID NO: 66418 - protein, 344 aa, Eubacterium limosum
  misc_feature (1)..(344): tr|A0A317RUM8|A0A317RUM8_EUBLI S-adenosylmethionine:tRN A ribosyltransferase-isomerase OS=Eubacterium limosum O X=1736 GN=queA PE=3 SV=1
METLTTKDFYYDLPEELIAQTPEKKRDASRLMVLNRMEGSIQDRHFHDIIDYLAEDDLLVMNNTKVLPARIFGKKEETGGKVELLLLKRLDDKTWETMVKPGKKAMPGTRLVFGDKLKGEIKDKIEGGLRIIEFEYNGIFEEIIGELGTMPLPPYIHEVLEDQERYQTVYAKYTGSAAAPTAGLHFTEELLDELHRKGVRTAEVTLHVGIGTFRPVKCDNILDHHMHEETYQVPEETAKLIEETRKKGGRVVAVGTTSVRTLESAAARFDGKVQACEGSTDIFIYPGYKWQVVDALITNFHLPESTLLMLVSSFYNREAVLKAYQHAIDARYRFFSFGDAMFIY

SEQ ID NO: 66419 - protein, 344 aa, Eubacterium limosum
  misc_feature (1)..(344): tr|A0A0U3EKC0|A0A0U3EKC0_EUBLI S-adenosylmethionine:tRN A ribosyltransferase-isomerase OS=Eubacterium limosum O X=1736 GN=queA PE=3 SV=1
METLTTKDFYYDLPEELIAQTPEKKRDASRLMVLNRMEGTVQDRHFHDIIDYLTEGDLLVMNNTKVLPARIFGKKEETGGKVELLLLKRLDDKTWETMVKPGKKAMPGTRLVFGDKLRGEIKDKVEGGLRTIEFEYDGIFEEIIGELGTMPLPPYIHEVLEDQDRYQTVYAKYTGSAAAPTAGLHFTEELLNALRQKGVRTAEVTLHVGIGTFRPVKCDNILDHHMHEETYQVPEETAKLIEETRKKGGRVIAVGTTSVRTLESAAARFDGEVQACEGSTDIFIYPGYKWQVVDALITNFHLPESTLLMLVSSFYNREAVLEAYQHAIDARYRFFSFGDAMFIY

SEQ ID NO: 66420 - protein, 346 aa, Eubacterium maltosivorans
  misc_feature (1)..(346): tr|A0A4V1GMG6|A0A4V1GMG6_9FIRM S-adenosylmethionine:tRN A ribosyltransferase-isomerase OS=Eubacterium maltosivo rans OX=2041044 GN=queA PE=3 SV=1
MNLETLTTKDFYYDLPEELIAQTPEKKRDASRLMVLNRMEGTVQDRHFHDIIDYLTEGDLLVMNNTKVLPARIFGKKEETGGKVELLLLKRLDDKTWETMVKPGKKAMPGTRLVFGDKLRGEIKDKVEGGLRTIEFEYDGIFEEIIGELGTMPLPPYIHEVLEDQDRYQTVYAKYTGSAAAPTAGLHFTEELLNALRQKGVRTAEVTLHVGIGTFRPVKCDNILDHHMHEETYQVPEETAKLIEETRKKGGRVIAVGTTSVRTLESAAARFDGEVQACEGSTDIFIYPGYKWQVVDALITNFHLPESTLLMLVSSFYNREAVLEAYQHAIDARYRFFSFGDAMFIY

SEQ ID NO: 66421 - protein, 348 aa, Eubacterium minutum
  misc_feature (1)..(348): tr|A0A223B0C6|A0A223B0C6_9FIRM S-adenosylmethionine:tRN A ribosyltransferase-isomerase OS=Eubacterium minutum A TCC 700079 OX=888721 GN=queA PE=3 SV=1
MRIEDFDYDLPERLIAQTPSGERDRCRLMVLNRADDTIEHKSFRDVLKHLRPGDCMVLNDSRVIPARLFGKKEKTGAGVEFLLSRRLEGDIWETLVRPGKRLKPGDVVNFGDGKLKAEIIDYGDDGTRHVRFFYDGIFMERLEELGRMPLPPYITRESTEKDREMYQTVYARTDGSVAAPTAGLHFTEELLKEVESKGVKIAYVTLHVGIGTFRPVKCDNIEDHEMHFEEYSISGSAADTINSAIERGDRIISVGTTSARTLESAAYSDRSSGKNFVHAGTGNTGIFIYPGYEYKIVKALITNFHLPKSTLIMLVSALYDREKILKAYDEAVGEEYRFFSYGDAMLIE

SEQ ID NO: 66422 - protein, 348 aa, Eubacterium nodatum
  misc_feature (1)..(348): tr|W2BYX9|W2BYX9_9FIRM S-adenosylmethionine:tRNA ribosy ltransferase-isomerase OS=Eubacterium nodatum ATCC 3309 9 OX=1161902 GN=queA PE=3 SV=1
MKIEDFDYELPKGLIAQTPDKSRDHCRLMVLNRDKRSIEHRRFCDILDYLNSGDCLVMNDSRVIPARLFGEKAETGAKVEFLLSKRIEDDVWESLVRPGRRLKPGDKVSFGEGRLVAEILEYGSGGTRKVRFHYDGIFMERLEELGKMPLPPYIERESSEEDKEMYQTVYSKVDGSVAAPTAGLHFTEELLEKVKKKGIKLAYVTLHVGIGTFRPVKCNDIEDHEMHFEEYFIEEETANVINDTILSGGRIVSVGTTSTRTLESAAYFDENKGKFLVKTGRDNTGIFIYPGYEYRIVKALITNFHLPKSTLIMLISALYDRKEILRAYDEAVREKYRFFSYGDAMMIE

SEQ ID NO: 66423 - protein, 350 aa, Eubacterium oxidoreducens
  misc_feature (1)..(350): tr|A0A1G6AKH1|A0A1G6AKH1_EUBOX S-adenosylmethionine:tRN A ribosyltransferase-isomerase OS=Eubacterium oxidoredu cens OX=1732 GN=queA PE=3 SV=1
MLVKDFDFYLPQEQIAQDPLEDRSSSKLLLLDKETGKLKHEIFKNITQYLKPGDCLVLNNTKVIPARLYGEKEDTGAQIEVLLLKRKENDIWECLVKPGKKMKVGARVSFGEGLLKGEVVDIVEEGNRLIRFSYEGIFEEILDRLGQMPLPPYITHKLKDKNRYQTVYAKYDGSAAAPTAGLHFTKELLEEVRRMGVEIAEVTLHVGLGTFRPVKVEDVLDHHMHSEFYQIDQEAADIINNTKKKGGRVICVGTTSCRTIESAAKDGQLSAKSGWTDIFIYPGYQFKILDCLITNFHLPQSTLLMLVSALAGREHVLAAYEEAVKEQYRFFSFGDAMFITDNIENLDKKL

SEQ ID NO: 66424 - protein, 341 aa, Eubacterium plexicaudatum
  misc_feature (1)..(341): tr|N2BEU8|N2BEU8_9FIRM S-adenosylmethionine:tRNA ribosy ltransferase-isomerase OS=Eubacterium plexicaudatum ASF 492 OX=1235802 GN=queA PE=3 SV=1
MDVKDFFYELPQELIAQDPLEDRSASRLMVLGREDGSVEHHVFRDIVNYLHPGDCLVLNNTKVLPARLYGTKEGTQAGIELLLLRRMEGDRWETLVKPGKKAKIGTKIRFGGGLLTGEIVDIAEEGNRIIRFSYSGIFEEILDELGEMPLPPYITHKLEDKQRYQTVYAKQEGSAAAPTAGLHFTPQLLEQIRNAGVDIAEVTLHVGLGTFRPVKTANVLEHHMHSEYYSLEQEQADKINRAKADGHRVIAVGTTSTRTLESIADEQGFVKAASGWTEIFIYPGYRFRCIDGLITNFHLPESTLIMLVSALAGREHVLNAYAQAVREKYRFFSFGDAMYIG

SEQ ID NO: 66425 - protein, 348 aa, Eubacterium pyruvativorans
  misc_feature (1)..(348): tr|A0A1I7GZT1|A0A1I7GZT1_9FIRM S-adenosylmethionine:tRN A ribosyltransferase-isomerase OS=Eubacterium pyruvativ orans OX=155865 GN=queA PE=3 SV=1
MNIEEFDYELPKELIAQKPEEQRDSCRLMVLNREKGTIEHKHFYDILDYLGPGDCLVMNDSRVIPARLFGTKAGTGAHIEFLLSKRMHDDTWETLVRPGRRLKPGDRVVFGEGALEATIDGYGKDGTRIVTFHYDGIFMERLEELGKMPLPPYIERESTKEDADMYQTVYAHHNGSVAAPTAGLHFTKELLAKAQEKGVKLVYVTLHVGIGTFRPVKCENIEEHHMHFEEYTISEEAAETINRTIREGGRIISVGTTSTRTLESAAYWDEECGEYRVKAGHDSTGIFIYPGYEWKIVNALITNFHLPKSTLIMLVSSLYNREKILEAYNEAVKEKYRFFSYGDAMAIF

SEQ ID NO: 66426 - protein, 341 aa, Eubacterium ramulus
  misc_feature (1)..(341): tr|A0A2V1JU89|A0A2V1JU89_EUBRA S-adenosylmethionine:tRN A ribosyltransferase-isomerase OS=Eubacterium ramulus O X=39490 GN=queA PE=3 SV=1
MKVTDYYFDLPQEQIAQDPLEDRSSSRLLVLDKETGEYSHHVFREITEFLKPGDCLVLNNTKVIPARLFGEKEGTQAKIEILLLKRKENDVWETLVKPGKKAKVGTKIIFGGGLLVGEVIDIVEEGNRLIKFTYEGIFEEILDQLGQMPLPPYITHQLKDKNRYQTVYAKYDGSAAAPTAGLHFTPELLQQVKDMGVDIAEVTLHVGLGTFRPVKVDNILEHHMHSEFYMVTQEAADKINNAKKNGHRVICVGTTSCRTIESAADENGMLRESSGWTEIFIYPGYQFKVLDCLITNFHLPESTLLMLVSALAGREHVLAAYEEAVKEGYRFFSFGDAMFIQ

SEQ ID NO: 66427 - protein, 341 aa, Eubacterium ramulus
  misc_feature (1)..(341): tr|U2NYZ2|U2NYZ2_EUBRA S-adenosylmethionine:tRNA ribosy ltransferase-isomerase OS=Eubacterium ramulus ATCC 2909 9 OX=1256908 GN=queA PE=3 SV=1
MKVTDYYFDLPQEQIAQDPLEDRSSSRLLVLDKETGEYSHHVFREITEFLKPGDCLVLNNTKVIPARLFGEKEGTQAKIEILLLKRKENDVWETLVKPGKKAKVGTKIIFGGGLLVGEVIDIVEEGNRLIKFTYEGIFEEILDQLGQMPLPPYITHQLKDKNRYQTVYAKYDGSAAAPTAGLHFTPELLQQVKDMGVDIAEVTLHVGLGTFRPVKVDNILEHHMHSEFYMVTQEAADKINNAKKNGHRVICVGTTSCRTIESAADENGMLKESSGWTEIFIYPGYQFKVLDCLITNFHLPESTLLMLVSALAGREHVLAAYEEAVKEGYRFFSFGDAMFIQ

SEQ ID NO: 66428 - protein, 352 aa, Eubacterium rectale; identical to SEQ ID NO: 62553
  misc_feature (1)..(352): tr|R6TGF2|R6TGF2_9FIRM S-adenosylmethionine:tRNA ribosy ltransferase-isomerase OS=Eubacterium rectale CAG:36 OX =1263079 GN=queA PE=3 SV=1

SEQ ID NO: 66429 - protein, 341 aa, Eubacterium ruminantium
  misc_feature (1)..(341): tr|A0A1H5WH54|A0A1H5WH54_9FIRM S-adenosylmethionine:tRN A ribosyltransferase-isomerase OS=Eubacterium ruminanti um OX=42322 GN=queA PE=3 SV=1
MNVSDFNYELPQELIAQDPLLKRSDSRLMVVHRDTGEIEHKHFSDVIDYLNPGDCLVINETKVIPARLMGVKEETGAVIEVLLLKNKGDNVWETLVKPGKKMKPGAVVSFGNGILKGEVQEVVEDGNRLIKFHYEGIWEEILDSLGEMPLPPYITHKLEDKNRYQTVYAKNSGSAAAPTAGLHFTEELLQKIEKKGVKIARLTLHVGLGTFRPVKVTTIEEHHMHSEFYMISEECAELVNETKKQGGRIIAVGTTSTRTLESAADDEGYLKACSGWTDIFIYPGYKFKCVNSLITNFHLPESTLIMLVSAFYDREKVLDAYKEAVKEKYRFFSFGDASMFI

SEQ ID NO: 66430 - protein, 341 aa, Eubacterium ruminantium
  misc_feature (1)..(341): tr|A0A1T4PG74|A0A1T4PG74_9FIRM S-adenosylmethionine:tRN A ribosyltransferase-isomerase OS=Eubacterium ruminanti um OX=42322 GN=queA PE=3 SV=1
MNVSDFNYELPEELIAQDPLLKRSDSRLMVVHRDTGEIEHKIFSDVIDYLNPGDCLVINDTKVIPARLMGVKEDTGAVIEILLLKNKGDNVWETLVKPGKKMKPGAVVTFGDGILKGEVLEVVEDGNRLIKFTYDGIWEEILDSLGEMPLPPYITHKLLDKDRYQTVYAKNSGSAAAPTAGLHFTEELLKKIEDKGVKIARLTLHVGLGTFRPVKVETIEEHHMHSEFYMISDECAEIVNETKKNGGRIISVGTTSTRTLESAANDDGTLKPCSGWTNIFIYPGYKFKCVDSLITNFHLPESTLIMLVSAFYDREKVLEAYKIAVEEKYRFFSFGDASMFI

SEQ ID NO: 66431 - protein, 365 aa, Eubacterium saphenum
  misc_feature (1)..(365): tr|C7GZ11|C7GZ11_9FIRM S-adenosylmethionine:tRNA ribosy ltransferase-isomerase OS=Eubacterium saphenum ATCC 499 89 OX=592031 GN=queA PE=3 SV=1
MNNRIKTDDFNYDLPPQKIASYPVSKRDESKLMVVKRRSFESPEISHAKFLDIIDYLNEGDCLVINQTKVIKARFIGFKDTGARIEVLLLKPLGENLFEAMIKPAKRVSEGTIISVLPKDDETGEPLKIQVVKSDDDIIKQVRILNADSLDYIEEFGKIPLPPYIEREAELSDEKRYQTVYSKIKGSVAAPTAGLHFTEELISKIQNKGIKVARILLHVGVGTFRPVNCDDISDHIMHSEYFEIPEEAADIINSTKNSGGRVICVGTTSVRTLEGAKCIQNASSDASGHKTSDLKVCSGETNIFIYPGYEFKLTDGIITNFHLPKSTLLMLVSAFLGLDNTLNAYDIALKSDYRFFSYGDAMLII

SEQ ID NO: 66432 - protein, 343 aa, Eubacterium siraeum; identical to SEQ ID NO: 62556
  misc_feature (1)..(343): tr|R6RUC9|R6RUC9_9FIRM S-adenosylmethionine:tRNA ribosy ltransferase-isomerase OS=Eubacterium siraeum CAG:80 OX =1263080 GN=queA PE=3 SV=1

SEQ ID NO: 66433 - protein, 341 aa, Eubacterium sp.
  misc_feature (1)..(341): tr|A0A416WCZ3|A0A416WCZ3_9FIRM S-adenosylmethionine:tRN A ribosyltransferase-isomerase OS=Eubacterium sp. AF15- 50 OX=2293103 GN=queA PE=3 SV=1
MSLHDYYYDLPEELIAQDPLEDRSSSRLMVLDKETGNVEHHVFKEIIDYLNPGDCLVINDTKVLPARLYGNKVGTDAKIEVLLLKRREKDVWETLVKPGKKCKPGTVINFGDGILTGEVIDVVEEGNRLIKFNYEGIFEEVLDRLGEMPLPPYITHKLKDKSRYQTVYAKYEGSAAAPTAGLHFTKELLEKIREKGVKIAHVTLHVGLGTFRPVKVDNILEHHMHSEFYMVDEEDANLINTCKENGGRIISVGTTSTRTLETVTDENGVVHEGSGWTQIFIYPGYKFKAIDCLITNFHLPESTLIMLVSALAGREKVLNAYEIAVKEKYRFFSFGDAMFIK

SEQ ID NO: 66434 - protein, 341 aa, Eubacterium sp.
  misc_feature (1)..(341): tr|A0A374ULU3|A0A374ULU3_9FIRM S-adenosylmethionine:tRN A ribosyltransferase-isomerase OS=Eubacterium sp. OM08- 24 OX=2292352 GN=queA PE=3 SV=1
MKTSDFYYDLPKELIAQTPVEPRDSSRLMLLNRNTGEIDHKHFYDIIDSLNPGDLLVANDSRVLPARIYGIKDETGARVEFLLLRQITGNRWEALCKPGKKAKEGTSFTFGDGLLRATVAEVKDDGNRIVDFECDENFFSTLDKIGQMPLPPYITEELKDKERYQTVYSHELGSAAAPTAGLHFTKELMQRIKDKGVNITYVTLHVGLGTFRPVKVDDVTNHKMHSEHYEIPEETARLINETKKSGGRVIAVGTTSCRTLESVATFYGEIKPCEGFTDIFIYPGYEFKVLDGLITNFHLPESTLIMLVSAFAGYDNVMNAYKTAVEEKYRFFSFGDAMFIS

SEQ ID NO: 66435 - protein, 351 aa, Eubacterium sulci
  misc_feature (1)..(351): tr|X8K2Q2|X8K2Q2_9FIRM S-adenosylmethionine:tRNA ribosy ltransferase-isomerase OS=Eubacterium sulci ATCC 35585 OX=888727 GN=queA PE=3 SV=1
MHINDFDYELPEELIAQKPQKDRDKCRLMVLRRSDNSIEHRHFFDILEYLKEGDCLLLNDSKVIPARLYGIKEGTGARVEFLLIKRIEGDTWETMVRPGKRLKPGDSVLFSDEEGKKLRAEILDYGEDGTRIVKMEYDGILMERLEEIGSMPLPPYISRPSNDEDKDDYQTVYCHEEGSVAAPTAGLHFTTELLEKAREKGVKIAFVTLHVGIGTFRPVKCETIENHHMHFEEYSVSEETAEIVNQTILSGGRVISVGTTSTRTAESAACFNEKSGKYLLKAGSGSTDIFIYPGYEFKIIESLITNFHLPKSTLMMLVSALYDREHILKAYDEAVREEYRFFSYGDAMFIE

SEQ ID NO: 66436 - protein, 358 aa, Eubacterium uniforme
  misc_feature (1)..(358): tr|A0A1T4VST6|A0A1T4VST6_9FIRM S-adenosylmethionine:tRN A ribosyltransferase-isomerase OS=Eubacterium uniforme OX=39495 GN=queA PE=3 SV=1
MSKEVLDSSEKQLSENSMSVHDYYYDLPERLIAQDPLEDRSSSRLLVLDRNTGDYEDKHFSDIIDYLNEGDCLVINNTKVIPARLLGQKKETGAAIEVLLLKRKTADEWECIVKPGKKLRPGAEVTFGDGLLEGEILEVVDEGNRIIKFKYEGIFEEILDKLGKMPLPPYITHELKDKDRYQTVYAKYDGSAAAPTAGLHFTKELLKKIEDKGIIIANVTLHVGLGTFRPVKVDNILEHHMHSEYYVVEKEEADKINNARANGGRIIAVGTTSSRTLETVTNDDGIVIPGSGDTSIFIYPGYRFKAVDCLITNFHLPESTLVMLVSALAGRDNVLNAYKHAVEEEYRFFSFGDAMFIK

SEQ ID NO: 66437 - protein, 342 aa, Eubacterium ventriosum
  misc_feature (1)..(342): tr|A0A413S1V0|A0A413S1V0_9FIRM S-adenosylmethionine:tRN A ribosyltransferase-isomerase OS=Eubacterium ventriosu m OX=39496 GN=queA PE=3 SV=1
MSLHDYYYDLPEELIAQDPLEDRSSSRLMVLDKNTGEIEHHIFKDIIDYLNPNDCLVINDTKVIPARLYGSKVGTDAKIEVLLLKRKENDVWETLVKPGKKCKPGTVISFGDGILTGEVIDVVEEGNRLIKFTYEGIFEEVLDKLGEMPLPPYITHKLEDKNRYQTVYAKYEGSAAAPTAGLHFTKELLEKIKEKGIKIAHVTLHVGLGTFRPVKVENILEHHMHSEFYMVDEEDANMINECRANGGRVIAVGTTSTRTLETVTDENGIVHPGSGWTQIFIYPGYQFKAIDCLITNFHLPESTLLMLVSALAGRENVLNAYNKAVEEKYRFFSFGDAMFIKE

SEQ ID NO: 66438 - protein, 342 aa, Eubacterium ventriosum
  misc_feature (1)..(342): tr|A0A413R727|A0A413R727_9FIRM S-adenosylmethionine:tRN A ribosyltransferase-isomerase OS=Eubacterium ventriosu m OX=39496 GN=queA PE=3 SV=1
MSLHDYYYDLPEELIAQDPLEDRSSSRLMVLDKNTGEIEHHIFKDIIDYLNPNDCLVINDTKVIPARLYGSKVGTDAKIEVLLLKRKENDVWETLVKPGKKCKPGTVISFGDGILTGEVIDVVEEGNRLIKFTYEGIFEEVLDKLGEMPLPPYITHKLEDKNRYQTVYAKYEGSAAAPTAGLHFTKELLEKIKEKGIKIAHVTLHVGLGTFRPVKVENILEHHMHSEFYMVDEEDANMINECRANGGRVIAVGTTSTRTLETVTDENGIVHPGSGWTQIFIYPGYQFKAIDCLITNFHLPESTLLMLVSALAGRENILNAYNKAVEEKYRFFSFGDAMFIKE

SEQ ID NO: 66439 - protein, 359 aa, Euhalothece natronophila
  misc_feature (1)..(359): tr|A0A5B8NPE3|A0A5B8NPE3_9CHRO S-adenosylmethionine:tRN A ribosyltransferase-isomerase OS=Euhalothece natronoph ila Z-M001 OX=522448 GN=queA PE=3 SV=1
MNTNSSSLDKNVNSYDYHLPESYIAQTPVTPRDHSRLLVVDSPTTHQHQHFYDLPQWLNSGDLLILNNTKVIPARLYGHKTTGAAVEVLLLEEKEQNCWLALVKPGKRLQVGAKIQFSSRFSENELLQATIIEKDETRGGRLLKFDLPEDTPLMSILDKYGEIPFPPYVTDTEANPEQYQTVFAEKSGAVAAPTAGLHFTDELLGRLAEKGINQAQVTLHVGMGTFRPVEVETITDHKMHEEWIDVSEETMAKIRETKAQGGRVIAVGTTVVRALEGAVAAQGDLKGFCGKTDLFICPGYSLQVVDGLITNFHLPRSSLLMLVSAFVGRERLLSLYESAIAHQYRFYSFGDAMLILDNT

SEQ ID NO: 66440 - protein, 358 aa, Euhalothece sp.
  misc_feature (1)..(358): tr|A0A2K3BDK8|A0A2K3BDK8_9CHRO S-adenosylmethionine:tRN A ribosyltransferase-isomerase OS=Euhalothece sp. KZN 0 01 OX=1884791 GN=queA PE=3 SV=1
MKPDSSPFDRKLSSYDYDLPESYIAQTPVTPRDHSRLLVVDSPTDHQHQHFYDLPQWLQAGDLLVVNNTKVIPARMYGYKTTGATVEVLLLEEKSPNCWLALVKPGKRLQIGAKIQFYPRQDEQLPILEATVMAKDTATGGRLLAFDFGETSLVSVLDAYGEIPFPPYVTEKKAQPEQYQTVYAEELGAVAAPTAGLHFTDRLLRELQEKGVNQTEVTLHVGVGTFRPVETETITDHQMHEEWINVPSEAVKRVQETKAQGGRVVAVGTTVVRALEGAVAAQGHLKAYCGKTDLFIYPGYELQVVDGLITNFHLPRSSLLMLVSAFIGRERLLSLYQSAIEHQYRFYSFGDAMLIINN

SEQ ID NO: 66441 - protein, 359 aa, Euzebya sp.
  misc_feature (1)..(359): tr|A0A346XSX0|A0A346XSX0_9ACTN S-adenosylmethionine:tRN A ribosyltransferase-isomerase OS=Euzebya sp. DY32-46 O X=1608957 GN=DVS28_a0615 PE=3 SV=1
MSALEPRLAFDVPAERIPTSPPERRGLARDGVRLLVADGTAVIHARFHELGRFLRPTDLLVVNTSTTRPAALPGHTVSGDADGRPITRHAVVHFSTRTDEGDWVVELRQPDGSGPILDAASGAVVHLAGGGHLTLGTPASAGPDGDGTRLWSARVDVPGGRVTTHLAEHGRPITYGGAPTWPLEDYQTVFARHPGSAEMPSAARPFSLTLVADLVSRGVVLAPLQLHAGVSSQEAGEAPGAERLRVGERTAALVNHTRASGGRVIAVGTTVTRALETAADATGTVRPIRGWTDLVITPSRGVWVVDGIISGWHEADASHLQLLEAVVGPRVLAAAYRQAIDVGYDWHELGDSALLLPER

SEQ ID NO: 66442 - protein, 349 aa, Euzebyella marina
  misc_feature (1)..(349): tr|A0A3G2L3U4|A0A3G2L3U4_9FLAO S-adenosylmethionine:tRN A ribosyltransferase-isomerase OS=Euzebyella marina OX= 1761453 GN=queA PE=3 SV=1
MKLSNFNFELPNNLLAEYPAENRDESKLMVIHRETGKIEHKMFKDLINYFDEGDVMVLNNTKVFPARLYGNKEKTGARIEVFLLRELNEEQRLWDVLVDPARKIRIGNKLYFGDDETLVAEVIDNTTSRGRTLRFLYDGSYLDFRRKLRDLGQTPLPKYIKRDVEPEDEERYQTIYAKYEGAVAAPTAGLHFSKHLLKRLEIKGIDFAEVTLHVGLGTFNPVEVEDLSKHKMDSEELVIDEKAIETVNKAKSGKKKVCAVGTTVMRGLESAVSSEQTLNTFDGWTNKFIFPPYDFSIANCMITNFHLPKSTLLMMVSAFMGHDLMKKAYKEAILEQYKFYSYGDAMLII

SEQ ID NO: 66443 - protein, 341 aa, Evtepia gabavorous
  misc_feature (1)..(341): tr|A0A3E2B765|A0A3E2B765_9FIRM S-adenosylmethionine:tRN A ribosyltransferase-isomerase OS=Evtepia gabavorous OX =2211183 GN=queA PE=3 SV=1
MKTHDFYYELPPELIAQTPIQRRDASRLLTLDKRTGEIGHHHFYDLPQFLRPGDCLVLNDSRVLPARLLGRREPTGGACEVVLLIDRGENVWECLVRPGKKLREGAKLSFGDGALTAEVTAVLEGGNRLIRFTYEGIFLELLERLGKMPLPPYIKEELQDAERYQTVYSREVGSAAAPTAGLHFTKDLLDSIEKMGVKICYVTLHVGLGTFRPVKAEEITDHAMHSEYCVISAETAETINQTKRDGGRVICVGTTSCRTIESWAEEDGTLRESAGWTNIFIYPGYRFKVLDGLITNFHLPESTLIMLVSALAGREPILAAYEEAVRERYRFFSFGDAMLIV

SEQ ID NO: 66444 - protein, 356 aa, Ewingella americana
  misc_feature (1)..(356): tr|A0A085G7C0|A0A085G7C0_9GAMM S-adenosylmethionine:tRN A ribosyltransferase-isomerase OS=Ewingella americana A TCC 33852 OX=910964 GN=queA PE=3 SV=1
MRVADFSFELPESLIARYPQTQRSGCRLLSLDGPSGELTHGIFTDLLDKLDAGDLLVFNNTRVIPARVFGRKVSGGKIEVLVERVLDSKRILAHVRASKSPKPGAELLLGDNENIKATMVARHDTLFELEFNEDRDVFTLLEEIGHMPLPPYIDRPDEDADRELYQTVYSERLGAVAAPTAGLHFDQPLMDALKEKGVEFAFVTLHVGAGTFQPVRVDTIEDHVMHAEYAEVPQEVVDAVLACKARGKRVIAVGTTSVRSLESAAKAAEDALIAPFFGDTKIFIYPGYHYQVIDALVTNFHLPESTLIMLVSAFAGYKNTMNAYHQAVAEQYRFFSYGDAMFINRNPLAPQEAVGQ

SEQ ID NO: 66445 - protein, 356 aa, Ewingella americana; identical to SEQ ID NO: 66444
  misc_feature (1)..(356): tr|A0A2N0MZA0|A0A2N0MZA0_9GAMM S-adenosylmethionine:tRN A ribosyltransferase-isomerase OS=Ewingella americana O X=41202 GN=queA PE=3 SV=1

SEQ ID NO: 66446 - protein, 347 aa, Exiguobacterium antarcticum
  misc_feature (1)..(347): tr|K0AEU2|K0AEU2_EXIAB S-adenosylmethionine:tRNA ribosy ltransferase-isomerase OS=Exiguobacterium antarcticum ( strain B7) OX=1087448 GN=queA PE=3 SV=1
MDVNLFDFHLPEEQIAQVPLLDRTSSKMMVVNRETGALRHETFHDIVSYFNAGDTLVINDTKVLPARLFGVKEETGGKIELLLLKQTSEDVWETLAKPAKRVKPGTKLSFGDGLLQAECLEALEDGGRILKFSYTGIFYEVLDQLGTMPLPPYIHEQLEDQDRYQTVYARERGSAAAPTAGLHFTPELLKALTDKGVHLAPLTLHVGLGTFRPVSVDDVDSHKMHSEYYELPESSAQILRETRKNGGRIIAVGTTSTRTLETVIRDHGDFVEASGWTDIFIYPGQEIKGIDGLITNFHLPKSTLIMLVSALSTREHILHAYEEAVAQGYRFFSFGDAMFLTREELNR

SEQ ID NO: 66447 - protein, 352 aa, Exiguobacterium aurantiacum
  misc_feature (1)..(352): tr|A0A377FV72|A0A377FV72_9BACL S-adenosylmethionine:tRN A ribosyltransferase-isomerase OS=Exiguobacterium auran tiacum OX=33987 GN=queA PE=3 SV=1
MQDIQLNVNDYDFELPEELIAQVPLLDRTSSRLLVLDRDTGDIEHRHFRDVLDYLHAGDALVVNDSRVLPARLFGAKQETGGKVELLLLKQTEDDVWEALVKPAKKVRVGAIVEFGDGLLRAECVEELPEGGRRFKFDYDGIFYEILDELGTMPLPPYIREQLDDQDRYQTVYAKERGSAAAPTAGLHFTEELLEAAQAKGVKLIPLTLHVGLGTFRPVTADSIEEHTMHSEYFELSAASAEALRDVRANGGRVFAVGTTSTRTLETIVRDHGDFVESSGWTDIFIYPGVELKAIDGLITNFHLPKSTLVMLVSAFASRDIILNAYRTAVQERYRFFSFGDAMLITRKEENK

SEQ ID NO: 66448 - protein, 352 aa, Exiguobacterium chiriqhucha
  misc_feature (1)..(352): tr|U1N0R7|U1N0R7_9BACL S-adenosylmethionine:tRNA ribosy ltransferase-isomerase OS=Exiguobacterium chiriqhucha R W-2 OX=1345023 GN=queA PE=3 SV=1
MQDIQLNVNDYDFDLPEELIAQVPLLDRTSSRLLVLDRDTGDIEHRHFRDVLDYLQAGDALVVNDSRVLPARLFGAKQETGGKVELLLLKQTEDDVWEALVKPAKKVRVGAIVEFGNGLLRAECVEELPEGGRRFKFDYDGIFYEILDELGTMPLPPYIREQLDDQDRYQTVYARERGSAAAPTAGLHFTEELLAAAEAKGVKLIPLTLHVGLGTFRPVTADTIEEHTMHSEYFELSAASAEALRDIRANNGRVFAVGTTSTRTLETIVRDHGDFVESSGWTDIFIYPGVELKAIDGLITNFHLPKSTLVMLVSAFASRDIILNAYRTAVQERYRFFSFGDAMLITRKEENK

SEQ ID NO: 66449 - protein, 346 aa, Exiguobacterium enclense
  misc_feature (1)..(346): tr|A0A0V8GJH4|A0A0V8GJH4_9BACL S-adenosylmethionine:tRN A ribosyltransferase-isomerase OS=Exiguobacterium encle nse OX=1017277 GN=queA PE=3 SV=1
MDVNLFDFHLPEEQIAQVPLLDRTSSKLMVLDRETGAIQHQHFHDIVDHFREGDTLVINDTKVLPARLFGVKEETGGKIELLLLKQTSDDVWETLAKPAKRVKPGTILSFGDGLLRAECVEALEDGGRILKFFYDGIFYEVLDQLGTMPLPPYIHEQLEDQDRYQTVYARERGSAAAPTAGLHFTPELLEALKAKGVRIAPLTLHVGLGTFRPVSVDDVDSHKMHSEYYELPESSAALLRETRKQGGRIIAVGTTSTRTLETVIRDHGDFVEATGWTDIFIFPGQEVKGIDGLITNFHLPKSTLIMLVSALSTREHILHAYEEAVANGYRFFSFGDAMFLTREERN

SEQ ID NO: 66450 - protein, 358 aa, Exiguobacterium mexicanum
  misc_feature (1)..(358): tr|A0A099DGG1|A0A099DGG1_9BACL S-adenosylmethionine:tRN A ribosyltransferase-isomerase OS=Exiguobacterium mexic anum OX=340146 GN=queA PE=3 SV=1
MKRSNDMQDIQLNVNDYDFDLPEELIAQVPLLDRTSSRLLVLDRDTGDIEHRHFRDVLDYLQAGDALVVNDSRVLPARLFGAKQETGGKVELLLLKQTEDDVWEALVKPAKKVRVGAIVEFGNGLLRAECVEELPEGGRRFKFDYDGIFYEILDELGTMPLPPYIREQLDDQDRYQTVYARERGSAAAPTAGLHFTEELLAAAEAKGVKLIPLTLHVGLGTFRPVTADTIEEHTMHSEYFELSATSAEALRDVRASGGRVFAVGTTSTRTLETIVRDHGNFVESSGWTDIFIYPGVELKAIDGLITNFHLPKSTLVMLVSAFASRDIILNAYRTAVQERYRFFSFGDAMLITRKEENK

SEQ ID NO: 66451 - protein, 347 aa, Exiguobacterium sibiricum
  misc_feature (1)..(347): sp|B1YJR0|QUEA_EXIS2 S-adenosylmethionine:tRNA ribosylt ransferase-isomerase OS=Exiguobacterium sibiricum (stra in DSM 17290 / JCM 13490 / 255-15) OX=262543 GN=queA PE =3 SV=1
MDVNLFDFHLPEEQIAQVPLLDRTSSKLMVVNRETGALRHEKFHDIVSYFNAGDTLVINDTKVLPARLFGVKEETGGKIELLLLKQTSDDVWETLAKPAKRVKPGTVLSFGDGLLRAECVEALDDGGRILKFSYTGIFYEVLDQLGTMPLPPYIHEQLEDQDRYQTVYARERGSAAAPTAGLHFTPELLQALTDKGVQLAPLTLHVGLGTFRPVSVDDVDSHKMHSEYYELPESSAKILRETRKNGGRIIAVGTTSTRTLETVIRDHGDFVEASGWTDIFIYPGQEIKGIDGLITNFHLPKSTLIMLVSALSTREHILHAYEEAVAQNYRFFSFGDAMFLTREELNR

SEQ ID NO: 66452 - protein, 346 aa, Exiguobacterium sp.
  misc_feature (1)..(346): tr|A0A031IGF9|A0A031IGF9_9BACL S-adenosylmethionine:tRN A ribosyltransferase-isomerase OS=Exiguobacterium sp. R IT341 OX=1470592 GN=queA PE=3 SV=1
MDVNLFDFHLPEEQIAQVPLLDRTSSKLMVLDRETGAIQHQHFHDIVDHFREGDTLVINDTKVLPARLFGVKGETGGKIELLLLKQTSDDVWETLAKPAKRVKPGTILSFGDGLLRAECVEALEDGGRILKFFYDGIFYEVLDQLGTMPLPPYIHEQLEDQDRYQTVYARERGSAAAPTAGLHFTPELLEALQAKGVRIAPLTLHVGLGTFRPVSVDDVDSHKMHSEYYELPESSAALLRETRKQGGRIIAVGTTSTRTLETVIRDHGDFVEATGWTDIFIFPGQEVKGIDGLITNFHLPKSTLIMLVSALSTREHILHAYEEAVANGYRFFSFGDAMFLTREERN

SEQ ID NO: 66453 - protein, 347 aa, Exiguobacterium sp.
  misc_feature (1)..(347): tr|A0A419DPM7|A0A419DPM7_9BACL S-adenosylmethionine:tRN A ribosyltransferase-isomerase OS=Exiguobacterium sp. R IT452 OX=2315552 GN=queA PE=3 SV=1
MDVNLFDFHLPEEQIAQVPLLDRTSSKLMVINRETGALRHEKFHDIVSHFNAGDTLVINDTKVLPARLFGVKEETGGKIELLLLKQTSDDVWETLAKPAKRVKPGTVLSFGDGLLRAECMEALEDGGRILKFSYTGIFYEVLDQLGTMPLPPYIHEQLEDQDRYQTVYARERGSAAAPTAGLHFTPELLQALTDKGVKLAPLTLHVGLGTFRPVSVDDVDSHKMHSEYYELPESSAQILRDTRKNGGRIIAVGTTSTRTLETVIRDHGDFVEASGWTDIFIYPGQEIKGIDGLITNFHLPKSTLIMLVSALSTREHILHAYEEAVAQGYRFFSFGDAMFLTREELNR

SEQ ID NO: 66454 - protein, 379 aa, Extensimonas vulgaris
  misc_feature (1)..(379): tr|A0A369AIT0|A0A369AIT0_9BURK S-adenosylmethionine:tRN A ribosyltransferase-isomerase OS=Extensimonas vulgaris OX=1031594 GN=queA PE=3 SV=1
MPFPAPTDPGAPRHFTLQDFDFALPPELIAQHPAAERSAARLLDGRGAQPVDRVFRDLPALLQPGDLLVFNDTRVLKARLFGEKASGGKLELLIERVLAGNEVVAHMKVSKKPRVGSTLLLAGGPQRGGFTATLLGRWPDADGPLFRLALHGPADAPDATPYALMERYGHMPLPPYIARAQQSADAAQAAQEAQDAERYQTVFARQPGAVAAPTAALHFDAGVLAALAARGVERANVTLHVGAGTFQPVKTENLAEHRMHSEWYDIPAATLEALARCRARGGRVVAVGTTTVRTLESWARSGHTRGETDIFITPGFAFQVVDLLVTNFHLPKSTLMMLVSAFAGWAHTMALYRHAITQRYRFFSYGDAMLLARCTPQAA

SEQ ID NO: 66455 - protein, 341 aa, Extibacter muris
  misc_feature (1)..(341): tr|A0A4R4FCS3|A0A4R4FCS3_9FIRM S-adenosylmethionine:tRN A ribosyltransferase-isomerase OS=Extibacter muris OX=1 796622 GN=queA PE=3 SV=1
MKRQDFYYELPEELIAQDPLEDRSSSRLLVLGKESGLVSHRVFKDITDYLHRGDCLVINDTKVIPARLIGSKIGTDAKIEVLLLKRKEDNVWETLVKPGKKAKVGTRIRFGDGILIGEVIGVVEEGNRLIQFSYEGIFEEILDRLGQMPLPPYITHQLEDKNRYQTVYAAHSGSAAAPTAGLHFTPELLEEIRQKGIDIAKVTLHVGLGTFRPVKVDDIMEHHMHSEFFQIDEAAAMKINKAKDTGGRVVCVGTTSCRTIESAAGADGHIKAGSGWTDIFIYPGYRFKFLDCLITNFHLPESTLIMLVSALAGRENVLAAYEEAVKERYRFFSFGDAMLIV

SEQ ID NO: 66456 - protein, 348 aa, Fabibacter misakiensis
  misc_feature (1)..(348): tr|A0A1E5SYJ3|A0A1E5SYJ3_9BACT S-adenosylmethionine:tRN A ribosyltransferase-isomerase OS=Fabibacter misakiensi s OX=1563681 GN=queA PE=3 SV=1
MKLSAFKLELPEDRIAKYPVENRDESRLMVLHRDTGEIEHKIFKDIVGYFDEGDVMVNNDTKVFPARLYGQKEKTGAQIEVFLLRELNAEMHLWDVLVDPARKIRVGNKLYFGEGELVAEVIDNTTSRGRTIRFLYDGTDEEFYKTIDTLGETPLPRTIPRETEPEDRERFQTIYAKNVGAVAAPVAGLHFTQQVLKRLEIKGVDVSPITLHIGLGTFRPVDVEDLTKHKMDSENYIIEESTAQIVNRALDNKKRVCSIGTTSMRALESSVSASDRLKANSAWTDKFIFPPYEFKICNALLTNFHLPESTLLMQAAAFGGYDFMMEAYQVAIKENYRFYSYGDAMLIL

SEQ ID NO: 66457 - protein, 401 aa, Fabibacter misakiensis
  misc_feature (1)..(401): tr|A0A1E5T1F4|A0A1E5T1F4_9BACT S-adenosylmethionine:tRN A ribosyltransferase-isomerase OS=Fabibacter misakiensi s OX=1563681 GN=queA PE=3 SV=1
MKLPDSPDLDLINYELPDHKIAKRPLAKRSDAKLLAYRQGNISDNSFEEIEDFLDRKTTLCFNNTKVIPARLYFHKETGAQIEIFLLNPITPSTIMSSVMEETKRVSWQCMIGNFKRWKEDQTLISKLSCNGDTIHLKATIIDRDEKHIAFEWDNSDYSFAEIVELAGEVPLPPYLNRAPEAEDKPRYQTVYSEEEGAVAAPTAGLHFTADILKNLKDKGITESFLTLHVSAGTFQPIKVSDAREHPMHSEQVEITKETVDQIIAAEQVVAVGTTSMRSLESLYWFGVRLINGNDAFAIDKLEIYQEASSLPSRKLAFETIAEWMDRQNLVRIHGTTEIFIMPGYKFKVCDGLITNFHQPGSTLLLLIAAFIGEDWQKVYDHALKNNYRFLSYGDSSILLP

SEQ ID NO: 66458 - protein, 402 aa, Fabibacter pacificus
  misc_feature (1)..(402): tr|A0A1I0QYH7|A0A1I0QYH7_9BACT S-adenosylmethionine:tRN A ribosyltransferase-isomerase OS=Fabibacter pacificus OX=1267423 GN=queA PE=3 SV=1
MNQENAPDNLSLLVYDLPEERIAKHPLDQRDSSQLLVYRDGEIKDSTFSKIGSELPANTTLFFNNTKVIPARLFFHKDTGALIEIFLLKPLQPSEVISQVMEATDAVTWECMVGNFKKWKDGQTLKLSLNDGTVDITLTASIENRSEMCISFTWDNTNYSFAEIVELAGKVPLPPYLNREAIDADKERYQTVYSEKEGAVAAPTAGLHFTDKVLEELANNGVKESFLTLHVSAGTFQPIKVKNPKDHPMHSEQMAVEKQAIEDVINSEFVIPVGTTSMRTLESLYWFGVRLLNGNESFDIQKLEIYNNSENLPARKESFQAILNWMNKGDISQLIGKTEIFIMPGYQFRVCNGLITNFHQPGSTLLLLVSAFLKGNWKKVYNHALENNYRFLSYGDSSLLLP

SEQ ID NO: 66459 - protein, 348 aa, Fabibacter pacificus
  misc_feature (1)..(348): tr|A0A1I0NUZ7|A0A1I0NUZ7_9BACT S-adenosylmethionine:tRN A ribosyltransferase-isomerase OS=Fabibacter pacificus OX=1267423 GN=queA PE=3 SV=1
MKLSAFKFELPEDRIAKYPTENRDDSRLMVLHRDTGEIEHKQFKDIVEYFEEGDVMVNNDTKVFPARLYGQKEKTGAKIEVFLLRELNPEMHLWDVLVDPARKIRVGNKLYFGEGELVAEVIDNTTSRGRTIRFLYDGTDEEFYNTIDQLGETPLPRTIPRETEPEDRERFQTIYAKNVGAVAAPVAGLHFTLQVLKRLEIIGVDVSPITLHIGLGTFRPVDVEDLTKHKMDSENYTITQETADFVNRALDNKKRVCSIGTTSMRALESSVSANGRLKANEAWTDKFIFPPYEFKICNSLVTNFHLPESTLLMQAAAFGGYDLVMEAYQVAIKEKYRFFSYGDAMLIL

SEQ ID NO: 66460 - protein, 400 aa, Fabibacter sp.
  misc_feature (1)..(400): tr|A0A1E5SR80|A0A1E5SR80_9BACT S-adenosylmethionine:tRN A ribosyltransferase-isomerase OS=Fabibacter sp. 4D4 OX =1889784 GN=queA PE=3 SV=1
MSIPESPDLSVFNYHLPDEKIAKRPLANRHDSKLLLYEKGYISDKVFREAPEFLDERTTLFFNNTKVIPARLHFQKDTGAQIEIFLLKPVSPTPIISTVMESTDEVIWECMVGNLKRWKEETVLRRTLNDGNQEVQLKATLVNRDERLVSFKWDNKDYAFAEIVELAGQVPLPPYLNRAAEPEDKPRYQTVYSKEEGAVAAPTAGLHFTDQILEQLKQNGVKESFLTLHVSAGTFQPIKVDDAREHPMHSEQIEVTIDTIKDIVEAKRVVAVGTTSMRSLESLYWFGVRLANGNEQFNIEKLELYQAGDLPSRTEAFQYIHDWMIDKGIDKLSGSTEIFIMPGYQFKVCDGLFTNFHQPGSTLMLLVAAFIGEHWQKVYDHALQNEYRFLSYGDSSLLLP

SEQ ID NO: 66461 - protein, 348 aa, Fabibacter sp.
  misc_feature (1)..(348): tr|A0A1E5SSB8|A0A1E5SSB8_9BACT S-adenosylmethionine:tRN A ribosyltransferase-isomerase OS=Fabibacter sp. 4D4 OX =1889784 GN=queA PE=3 SV=1
MKLSAFKLELPEDKIAKYPVENRDESKLMVLHKDTGEIEHKVFKDIVDYFDEGDVMVNNDTKVFPARLYGQKEKTGAQIEVFLLRELNSEMHLWDVLVDPARKIRVGNKLYFGEGELVAEVIDNTTSRGRTIRFLYDGSDEEFYKTIDTLGETPLPRTIPRETEPEDRERFQTIYAKHVGAVAAPVAGLHFTHQVLKRLEIKGVDVTPITLHIGLGTFRPVDVEDLTKHKMDSENYTILDPTAEIVNRALDNKKRVCSIGTTSMRALESSVSASDRLKANSAWTDKFIFPPYEFKICNALVTNFHLPESTLLMQAAAFAGYDLMMEAYQTAIKEDYRFFSYGDAMLII

SEQ ID NO: 66462 - protein, 345 aa, Facklamia hominis
  misc_feature (1)..(345): tr|K1M1I1|K1M1I1_9LACT S-adenosylmethionine:tRNA ribosy ltransferase-isomerase OS=Facklamia hominis CCUG 36813 OX=883111 GN=queA PE=3 SV=1
MTYTTKDFDYDLPEELIAQTPLKDRSSSRLLVLDRQTNEIQDTDFKHLLDFLEPGDALVINETRVIPARLFGIKADTGGHIEVLLLNNIEGNRWECLVKPGKRAHKGTRLVFGDENLLTAEILEDLEHGGRIIEFSYQGVFLEILEQLGEMPLPPYIKEKLEDPDRYQTVYAKENGSAAAPTAGLHFTQELFDQASQKGIEIIPILLHVGLGTFRPVSVDNIADHHMHSEFYRVSPEAADRIQKVKDNGGKIIAVGTTSVRTLETVAKNHQGNIVAASGWTDIFITPGFKFQVVDHLITNFHLPQSTLVMLVSAFYDRESILKAYQHAVEEHYRFFSFGDAMLIL

SEQ ID NO: 66463 - protein, 344 aa, Facklamia ignava
  misc_feature (1)..(344): tr|A0A2I1JXV9|A0A2I1JXV9_9LACT S-adenosylmethionine:tRN A ribosyltransferase-isomerase OS=Facklamia ignava OX=1 37730 GN=queA PE=3 SV=1
MITTKDFDYHLPEELIAQTPLIDRSASRLMVLNRTQHTIEDTDFKHVIDYLNPGDALVINETRVLPARLMGVKPDTGGHLEVLLLTNIEGNRWETLVKPARRAKIGTRIEFGDQQQITGIVIEELEHGGRIVEFEYEGIFIERLEELGQMPLPPYIKERLDNPERYQTVYAKENGSAAAPTAGLHFTKDLMDQIKAKGIQIIPLTLHVGLGTFRPVSVDNIEDHQMHAEFYSLSEMSAQQINKVQADGGNIIAVGTTSVRTLETIAHRNQGKIVSESGWTDIFITPGFEFKAVDHLITNFHLPQSTLMMLVSAFYSRDAIMEAYQHAVDQEYRFFSFGDAMLIL

SEQ ID NO: 66464 - protein, 344 aa, Facklamia ignava; identical to SEQ ID NO: 66463
  misc_feature (1)..(344): tr|K1LYS4|K1LYS4_9LACT S-adenosylmethionine:tRNA ribosy ltransferase-isomerase OS=Facklamia ignava CCUG 37419 O X=883112 GN=queA PE=3 SV=1

SEQ ID NO: 66465 - protein, 345 aa, Facklamia languida
  misc_feature (1)..(345): tr|H3NGN0|H3NGN0_9LACT S-adenosylmethionine:tRNA ribosy ltransferase-isomerase OS=Facklamia languida CCUG 37842 OX=883113 GN=queA PE=3 SV=1
MTLSTKDFDYELPEDLIAQTPLKDRSSSRLLVLDRQAHTQEDTDFKHILDYLQPGDALVVNETRVIPARLFGVKEDTGGHIEVLLLKNIEGNQWECLVKPGKRARVGTRLTFGQGGPLKGEIIASMDHGGRIIEFSYEGVFLEVLESLGEMPLPPYIKERLDDPDRYQTVYAKENGSAAAPTAGLHFTPELLDQARAKGIQVIPILLHVGLGTFRPVSVDQVEDHQMHAEFYQVSQDAADQIQAVKQGGGKIVAVGTTTVRTLETVAQQHDGQIVAASGWTDIFITPGFEFKLVDHLITNFHLPQSTLVMLVSAFYDRQAILAAYQHAVQAKYRFFSFGDAMLIL

SEQ ID NO: 66466 - protein, 345 aa, Facklamia miroungae
  misc_feature (1)..(345): tr|A0A1G7PN04|A0A1G7PN04_9LACT S-adenosylmethionine:tRN A ribosyltransferase-isomerase OS=Facklamia miroungae O X=120956 GN=queA PE=3 SV=1
MTYTTKDFDYHLPEELIAQTPLKDRSSSRLLVLDRQSHQKTDTDFKHILDYLQKGDALVVNETRVIPARLFGVKPDTGGHIEVLLLNNTQGNQWECLVKPGKRAKVGTVLHFGDQAQLVGTIVEHKADGGRIIEFSYQGVFLEVLESLGQMPLPPYIKEKLDDPDRYQTVYAKQNGSAAAPTAGLHFTQDLLQEARDRGIEIIPIVLHVGLGTFRPVSVEAIDQHQMHAEYYQVSPESAQRIQRVRQKGGKITAVGTTSVRTLETIARDHQGQIVAASGWTDIFITPGFKFCAVDHLITNFHLPQSTLMMLVSAFYDRNKILDAYQHAVAEKYRFFSFGDAMFIL

SEQ ID NO: 66467 - protein, 342 aa, Faecalibacterium cf.
  misc_feature (1)..(342): tr|E2ZIS1|E2ZIS1_9FIRM S-adenosylmethionine:tRNA ribosy ltransferase-isomerase OS=Faecalibacterium cf. prausnit zii KLE1255 OX=748224 GN=queA PE=3 SV=1
MLKKDFWYDLPKELIAQEPADPRDSARLMVLSQKDDSIQHKIFHDLPEFLEPGDLLVVNNSKVLPARIVGVKQPTGAVCELLLLRQVKGDQWECLAKPGKRMQPGTKVSFGDGSLTAVVDETMEDGNKYVTFYYDTETLYEKLDEFGKMPLPPYITKQLEDQSQYQTVYAKELGSAAAPTAGLHFTPELMDTIRAKGVNIAEVTLHVGLGTFRPVQEDEIADHKMHSEWYCIDEKTAQMIRDTKAAGHRVIAVGTTSCRTLEAVAAKYGEIRACSGNTSIFLYPGVKFNCIDGLITNFHLPESTLIMLVSALYGYEKTMAAYKVAVEERYRFFSFGDAMLIL

SEQ ID NO: 66468 - protein, 345 aa, Faecalibacterium prausnitzii
  misc_feature (1)..(345): tr|A8SFA3|A8SFA3_9FIRM S-adenosylmethionine:tRNA ribosy ltransferase-isomerase OS=Faecalibacterium prausnitzii M21/2 OX=411485 GN=queA PE=3 SV=1
MHSMLKKDFWYDLPKELIAQEPASPRDAARLMVLSQKDDSIQHKVFRDLPEFLEPGDLLVVNNSKVLPARIVGVKQPTGAVCELLLLRQVKGDQWECLAKPGKRMQPGTKVSFGDGSLTAVVDETMEDGNKYVTFYYDTETLYEKLDEFGKMPLPPYITKQLEDQSQYQTVYAKELGSAAAPTAGLHFTPELMDTIRAMGVGIAEVTLHVGLGTFRPVQEDEISDHKMHSEWYSISEETARRIRETKAAGHRVIAVGTTSCRTLEAAAAKYGEIKACSGNTSIFLYPGVKFNCIDGLITNFHLPESTLIMLVSALYGYEKTMHAYEVAVAEKYRFFSFGDAMLIV

SEQ ID NO: 66469 - protein, 342 aa, Faecalibacterium prausnitzii; identical to SEQ ID NO: 66467
  misc_feature (1)..(342): tr|A0A2J4JRV6|A0A2J4JRV6_9FIRM S-adenosylmethionine:tRN A ribosyltransferase-isomerase OS=Faecalibacterium prau snitzii OX=853 GN=queA PE=3 SV=1

SEQ ID NO: 66470 - protein, 371 aa, Faecalibacterium sp.
  misc_feature (1)..(371): tr|R6R0N5|R6R0N5_9FIRM S-adenosylmethionine:tRNA ribosy ltransferase-isomerase OS=Faecalibacterium sp. CAG:82 O X=1262898 GN=queA PE=3 SV=1
MQYNKDCLYRFYDNIDTAFVSIIGKANAFMLKKDFWYDLPKELIAQEPADPRDSARLMVLSQKDDSIQHRIFHDLPEYLEPGDLLVVNNSKVLPARIVGVKQPTGAVCELLLLRQVKGDQWECLAKPGKRMQPGTKVSFGDGTLTAVVDETMEDGNKYVTFYYDTETLYEKLDEFGKMPLPPYITKQLEDQSQYQTVYAKELGSAAAPTAGLHFTPELMDTIRAKGVGIAEVTLHVGLGTFRPVMEDEIADHKMHSEWYSISEETAQRIRETKAAGHRVIAVGTTSCRTLEAVAAKYGEIKACSGNTSIFLYPGVKFNCIDGLITNFHLPESTLIMLVSALYGYEKTMAAYKVAVEEKYRFFSFGDAMLIL

SEQ ID NO: 66471 - protein, 357 aa, Faecalibacterium sp.
  misc_feature (1)..(357): tr|R5FHX4|R5FHX4_9FIRM S-adenosylmethionine:tRNA ribosy ltransferase-isomerase OS=Faecalibacterium sp. CAG:1138 OX=1262896 GN=queA PE=3 SV=1
MKRSDFYYDLPEELIAQHPAEPRDSSRLLVLDAESGEIEHTVFREIGKFLKKGDLLVVNNTKVIPARLYGYKEGRKVPEGEKSVPPTRFEFLLLKRLSYTDWECIARPAKKVTVGSKFTFGEGLCCTVKAIGESGIRIVGFEFEGVFEDVLERVGNVPLPPYITEKLEDKNRYQTVYAKTDGSAAAPTAGLHFTTRLIDELKANGVEFVEVLLHVGLGTFRPVKEDDVLDHKMHSEYYEISSEAAEIINRANAEGRRIIAVGTTSGRVLETVADENGFVRPCHGETEIFIYPGYKFKILDGMITNFHLPESTLIMYVSAFCGREQTLKMYETAVKEKYRFFSFGDATFLYNGGRGRK

SEQ ID NO: 66472 - protein, 341 aa, Faecalicatena contorta
  misc_feature (1)..(341): tr|A0A316A2P2|A0A316A2P2_9FIRM S-adenosylmethionine:tRN A ribosyltransferase-isomerase OS=Faecalicatena contort a OX=39482 GN=queA PE=3 SV=1
MKTSDFYYDLPQELIAQDPLEDRAGSRLLVLDKKTGKIEHHAFRDIAEYLESGDCLVINDTKVIPARLIGSKEGTGAKIEVLLLKRKENDVWETLVKPGKKAKPGTRISFGDGLLVGEVMDVVEEGNRLIHFEYEGIFEEILDQLGQMPLPPYITHQLKDKNRYNTVYASHAGSAAAPTAGLHFTPELMEKIREKGIEIARVTLHVGLGTFRPVKVEDVTAHHMHSEFYIIDEEAAEKINSAKKNHKRVICVGTTSCRTIESAADENGHLKACSGWTEIFIYPGYEFKILDCLITNFHLPESTLIMLVSALAGKEHVLNAYEEAVKEKYRFFSFGDAMLIL

SEQ ID NO: 66473 - protein, 341 aa, Faecalicatena contorta
  misc_feature (1)..(341): tr|A0A173Z5W0|A0A173Z5W0_9FIRM S-adenosylmethionine:tRN A ribosyltransferase-isomerase OS=Faecalicatena contort a OX=39482 GN=queA PE=3 SV=1
MKTSDFYYELPQELIAQDPLEDRSGSRLLVLDKETGETKHRHFKDIIEYLNPGDCLVINDTKVIPARLIGSKVGTDAKIEVLLLKRKENDVWETLVKPGRKAKPGTKISFGDGILMGEVVDVVDEGNRLIHFAYEGIFEEILDRLGQMPLPPYITHQLQDKDRYNTVYAVHEGSAAAPTAGLHFTPQLLEDIGKKGVDIARVTLHVGLGTFRPVKVEEVTDHHMHSEFYLIDEDAADKINRAKEQKKRVICVGTTSCRTIESAAGEDGRLKACSGWTEIFIYPGYRFQVLDGLITNFHLPESTLIMLVSALAGREHVLAAYEEAVREEYRFFSFGDAMLIL

SEQ ID NO: 66474 - protein, 341 aa, Faecalicatena orotica
  misc_feature (1)..(341): tr|A0A2Y9BH56|A0A2Y9BH56_9FIRM S-adenosylmethionine:tRN A ribosyltransferase-isomerase OS=Faecalicatena orotica OX=1544 GN=queA PE=3 SV=1
MKTSDFYYDLPEELIAQDPLEDRSGSRLLVLDKETGEIKHRMFRDITEYLRAGDCMVINDTKVIPARLIGSKIGTDAKIEVLLLKRKENDVWETLVKPGRKAKPGTRISFGDGLLVGEVIDVVEEGNRLIHFEYEGIFEEILDRLGQMPLPPYITHQLQDRDRYNTVYAVHEGSAAAPTAGLHFTPELLEEIQEKGIEIARVTLHVGLGTFRPVKVDDVTEHHMHSEFYQIDEEAAGKINRAKDNGGRVVCVGTTSCRTIESAADENGRLKACSGWTEIFIYPGYQFKILDCLITNFHLPESTLIMLVSALAGKEPVLAAYEEAVKERYRFFSFGDAMLIV

SEQ ID NO: 66475 - protein, 341 aa, Faecalimonas umbilicata
  misc_feature (1)..(341): tr|A0A4V2UQ30|A0A4V2UQ30_9FIRM S-adenosylmethionine:tRN A ribosyltransferase-isomerase OS=Faecalimonas umbilica ta OX=1912855 GN=queA PE=3 SV=1
MRKEDFNFDLPEELIAQDPLEDRSSSRLLVLDKETGKTEHHVFREIIDYLEAGDCLVINDTKVIPARLIGSKIGTDAKIEVLLLKRKENDVWETLVKPGKKAKMGTRISFGDGLLVGEVVDIVEEGNRLIHFEYEGIFEEILDRLGQMPLPPYITHQLEDKNRYQTVYAKHSGSAAAPTAGLHFTPELLKKIEEKGVQIARVTLHVGLGTFRPVKVDNILEHHMHSEFYQIEEEAAEKINTAKANGKRVIAVGTTSCRTIESAAKEDGTIAPVSGWTDIFIYPGYQFKVLDCLITNFHLPESTLVMLVSALAGREHVLNAYEEAIKERYRFFSFGDAMFIR

SEQ ID NO: 66476 - protein, 342 aa, Falsibacillus pallidus
  misc_feature (1)..(342): tr|A0A370GQ80|A0A370GQ80_9BACI S-adenosylmethionine:tRN A ribosyltransferase-isomerase OS=Falsibacillus pallidu s OX=493781 GN=queA PE=3 SV=1
MKVDLFDFHLPEELIAQTPLEERTASRLMVLNKEDGSLSHSHFRDITKYLKPGDCLVLNDTRVLPARLFGEKEDTGAAIEILLLKQEEGDAWETLVKPAKRVKEGTIITFGDGRLTAECVGIKDHGGRILEFKYDGIFYEILESLGDMPLPPYIKERLDDSERYQTVFAKERGSAAAPTAGLHFTQELLKEIEDMGVHIAFITLHVGLGTFRPVSVEDLQEHEMHAEFYQISEGTARLLNEVREAGGRIISVGTTSTRTLETVATANDGRFTASSGWTNIFIYPGYEFKAIDGMITNFHLPKSTLIMLVSALAGREHVLHAYETAVKERYRFFSFGDAMFIL

SEQ ID NO: 66477 - protein, 347 aa, Falsibacillus pallidus
  misc_feature (1)..(347): tr|A0A370GF72|A0A370GF72_9BACI S-adenosylmethionine:tRN A ribosyltransferase-isomerase OS=Falsibacillus pallidu s OX=493781 GN=DFR59_105152 PE=3 SV=1
MMTVLSHKNFQVPEYLNASVPAEYRGLTRDGVNLMVIDSNSGNTHHNSFHEIGSYLEPGDVLVLNNSRTIPSVLKGRQDGMEVEVRLSRSISDHEWDVLVVQQDADLSKPIYFEDGIEGSVVGSGSEFPLVTMSFSVGGSELFDFFYRYGKPIRYEYIENPWPLQAFQTVYGSVPGSVEMPSAGRAFSWKILNQLREEGIELAFIQLHAGLSYYGNDLWPNPDGHPEAYEIPEETARLVNEAKERGGKVIAVGTTVVRTLETAADENGNIEAGKGITNLYIKKGTNLKAVDGLLTGFHEPEASHLDMLTAFLPEDILMAAYQEALEHGYLWHEFGDMNLILPLGGKA

SEQ ID NO: 66478 - protein, 347 aa, Falsibacillus sp.
  misc_feature (1)..(347): tr|A0A3L7JSV8|A0A3L7JSV8_9BACI S-adenosylmethionine:tRN A ribosyltransferase-isomerase OS=Falsibacillus sp. GY 10110 OX=2478915 GN=D9X91_18705 PE=3 SV=1
MNATPQKSFQVPDYLNASVPAEYRGLTRDSVNLMVIDSASGQSYHRRFDEIGKFLMPGDLLVLNKSRTIPAVIIGEQDGKKVEVRLSHAHSGNQWEALIASNDFDQQKEISFPDGVNAKVIGTGSEMPLVILAFSVGGAELFNFFYLHGNPIRYEYIHTDWPLDAYQTVYASAPGSVEMASAGRAFTWRLLQELRQKGVKLGFIQLHAGLSYYGNDQWPNPSNHPEAFEIPEQTASHINEAKRNGHRVIAVGTTVVRTLESAATEKGMVKAAKGITNMYITKDTELQIADGLLTGFHEPEASHMDMLTAFLQEGTLLKSYQEAIDHGYLWHEFGDMNLILPMGGVLA

SEQ ID NO: 66479 - protein, 342 aa, Falsibacillus sp.
  misc_feature (1)..(342): tr|A0A3L7K4S2|A0A3L7K4S2_9BACI S-adenosylmethionine:tRN A ribosyltransferase-isomerase OS=Falsibacillus sp. GY 10110 OX=2478915 GN=queA PE=3 SV=1
MKVDLFDFDLPEELIAQTPLEDRTSSRLMVLDKKDGSLTHDHFHGITKYLQEGDCLVLNDTRVLPARLFGEKSDTGASIEILLLKQESGDVWETLVKPAKRVKIGTVITFGDGRLRAECVGLKEHGGRLMEFQYEGIFYEILESLGDMPLPPYIKEKLDDRERYQTVYARERGSAAAPTAGLHFTQELLKEIESMGVHIAFITLHVGLGTFRPVSVEDLQEHEMHAEFYQVTEGTARLLNEVHESGGRIISVGTTSTRTLETIAAANDGKFAADSGWTNIFIYPGYEFKAIDGMITNFHLPKSTLIMLVSALAGRENVLHAYNTAVKERYRFFSFGDAMLIK

SEQ ID NO: 66480 - protein, 356 aa, Falsochrobactrum ovis
  misc_feature (1)..(356): tr|A0A364JYM1|A0A364JYM1_9RHIZ S-adenosylmethionine:tRN A ribosyltransferase-isomerase OS=Falsochrobactrum ovis OX=1293442 GN=queA PE=3 SV=1
MRVDLFDFDLPEEHIALRPVEPRDHAKLLIVNPGMKFEDRQVFELPDLLQPGDALVFNDTKVIPAQLEGMREREGNIAQVNATLHMRVGPYQWKAFLRPAKRIKQGDRIRFGHSGTSCFMGTLDATVVEKSDGGEALLSFDLSGAMLDEAIAAVGHIPLPPYIASKRADDERDRKDYQTVYAREEGAVAAPTAGLHFTPELLKEIRARGIEEHFVTLHVGAGTFLPVKAEDTADHKMHSEVGYVSQQTADALNAVHKRGGRIVCVGTTSLRLIESASSEDGVIHPWSGATDIFITPGYKFRAVDLLMTNFHLPRSTLFMLVAAFSGLETMREAYQYAIENDYRFYSYGDASLLTRA

SEQ ID NO: 66481 - protein, 356 aa, Falsochrobactrum sp.
  misc_feature (1)..(356): tr|A0A316J8N7|A0A316J8N7_9RHIZ S-adenosylmethionine:tRN A ribosyltransferase-isomerase OS=Falsochrobactrum sp. HN4 OX=2201899 GN=queA PE=3 SV=1
MRVDLFDFDLPEERIALRPVEPRDHARLLRIRSGQPFEDRQVYELPDLLQPGDALVFNDTKVIPAQLEGLREREGAIAQIGATLHMRMGPNRWKAFLRPGKRVKEGDRIRFGHSGSSCFLGTLDATVEEKGEAGEALLVFDLSGAILDEAIAAVGHIPLPPYIASKRAEDERDRKDYQTVFAREEGAVAAPTAGLHFTSELLEKIKKRGIEEHFVTLHVGAGTFLPVKADDTGDHKMHSEIGHVSQRTADALNAVHERGGRIVCVGTTSLRLIESATGEDGIVRPWSGATDIFITPGYRFRAVDLLMTNFHLPRSTLFMLVSAFSGLDTMREAYKHAISSNYRFYSYGDASLLERA

SEQ ID NO: 66482 - protein, 357 aa, Fastidiosipila sanguinis
  misc_feature (1)..(357): tr|A0A2S0KML7|A0A2S0KML7_9FIRM S-adenosylmethionine:tRN A ribosyltransferase-isomerase OS=Fastidiosipila sangui nis OX=236753 GN=queA PE=3 SV=1
MKKSDFYYDLPEELIAQHPVEHRDESRLLHLNSETNEIEHLHFRDILDQLNRGDTLVLNDSRVIPARLFGTKASLQNPVEVLLLKRLNETDWETIVNPGRRLKTGAHIVFKEDVLEADIIDVLPDGNRVLRFEFTGIWEEVLDELGEMPLPPYIHERLIDKERYQTVYSKVSGSAAAPTAGLHFTEELLEEIRSKGVNIAFLTLHVGLGTFRPVKEDEIEDHLMHTEEYVISSETCDLINKTRHEGNKVIAVGTTSCRVLESLKQDENYNILPEKSSTDIFIYPGYKFKVIDNLITNFHLPESTLVMLVSALAGKDEILNAYKIAVEEKYRFFSFGDAMYIEGNKDNYTGLHQGKVF

SEQ ID NO: 66483 - protein, 416 aa, Fermentimonas caenicola
  misc_feature (1)..(416): tr|A0A098BZH9|A0A098BZH9_9PORP S-adenosylmethionine:tRN A ribosyltransferase-isomerase OS=Fermentimonas caenico la OX=1562970 GN=ING2E5B_1346 PE=3 SV=1
MKKGDVQNIKISDFNYTLPDEKIAKYPLPQRDSSKLLIYKDSQLSSSNFSSLPDQLPGNSLLIFNNTRVIHARLHFMKATGANIEIFCLSPFSPKDYIMNFQQKGECSWICMIGNAKKWKEDLLSMEIDIKGLRVVLNAQKIDMAEMSNRNGSDVIVRFTWDNSDVTFSELLEVAGKLPIPPYLNRPAEEKDDETYQTLYSHVEGSVAAPTAGLHFTPAVMEGLAAKGVKTAEVTLHVGAGTFKPVKSDNLAGHEMHTEFISVPRETIEKIINHTGDIIVVGTTSMRTVESLYYIGKKLRTNPDTEPYKLSVNQWESYEEDENEDPYIVLRAILDYLENTEQDQLISATRLLIAPGYNFHYPDALITNFHQPQSTLLLLVSAFVGGYWTTIYEYALQNNFRFLSYGDSSLLWKNLK

SEQ ID NO: 66484 - protein, 350 aa, Fermentimonas caenicola
  misc_feature (1)..(350): tr|A0A098C010|A0A098C010_9PORP S-adenosylmethionine:tRN A ribosyltransferase-isomerase OS=Fermentimonas caenico la OX=1562970 GN=queA PE=3 SV=1
MKLSQFKFNLPEELIAKYPSHHRDESRLLVVHKKSNELEHKVFKDVLDYFNPKDFFIFNNTKVFPAKLFGNKEKTGAKIEVFLLRELNPEQHLWDVLVNPARKIRIGNKLYFGDNEELVAEVIDNTTSRGRTLRFLYDGPYDEFKKQLFQIGETPIPEYMERGAEPEDFERYQNIFAEKEGAVVAPAAGLHFSRELMKRMQLKDIEYGFLTLHNGLGAYRMIDVEDLSKHKMESEQIIITEELCERVNKAYDEGHNICAVGTSVLRTIETTVSTDGHLKPREGWTNKFIFPPYDFTLTKSLITNFHLPYSTLLMMTCAFGGYEKIMEVYDIAVKEKYRFGAYGDAMLIID

SEQ ID NO: 66485 - protein, 354 aa, Ferrimicrobium acidiphilum
  misc_feature (1)..(354): tr|A0A0D8FXP3|A0A0D8FXP3_9ACTN S-adenosylmethionine:tRN A ribosyltransferase-isomerase OS=Ferrimicrobium acidip hilum DSM 19497 OX=1121877 GN=queA PE=3 SV=1
MVAQSDDWSVIDSYDYELPSDRIARVPAEPRSSAKLLVGLDDPPSVTTVADLGSLLKEGDVVVVNDSKVVPARFHVRRDTGGQVEVLLLSPHGAMFEALVRPNARVRNGELLYIDGRPVFRVSGIGEQSSGLRTRYVEVLGDAVFALGEIPLPPYLEGVTVDPDRYQTIYANRPGSVAAPTAGLHFDARLLGDLARRGIEVVRVELEVGLGTFAPVKERELANHVMHAERYRVSEDAFERISSARRVVAIGTTVVRTLETISHGGALTGSSELFIVPGFDFRCVDLLLTNFHVPKSTLLALVAAAIGSRWRVLYEYALANDFRLLSLGDAMLIPTGRVDDPSLARFPSHSRGDH

SEQ ID NO: 66486 - protein, 352 aa, Ferrimonas balearica
  misc_feature (1)..(352): tr|E1SRQ9|E1SRQ9_FERBD S-adenosylmethionine:tRNA ribosy ltransferase-isomerase OS=Ferrimonas balearica (strain DSM 9799 / CCM 4581 / PAT) OX=550540 GN=queA PE=3 SV=1
MQVADFDFDLPDELIARYPTQERTASRLLHLDGDTGALHDGQFPDLLELVRPGDLMVFNNTRVIPARLHGQKASGGKIEVLVERVLDSERVLAHVRSSKSPKPGTELQFDDGVTATMVARHDALFELAFHGNDTVLNILDRIGHMPLPPYIDRPDENSDRERYQTVYNQRPGAVAAPTAGLHFDESMLARLKEKGVETAYVTLHVGAGTFQPVRVDKVEDHHMHSEFAEVGSDVVEAVKRTRARGGRVIAVGTTSVRSLESAARAAREHGEVLAPYAQETDIFLYPGCEFLLVDAMITNFHLPESTLIMLVSAFAGQDHVMNAYQHAVAQKYRFFSYGDAMFVTRQEQNTTA

SEQ ID NO: 66487 - protein, 353 aa, Ferrimonas marina
  misc_feature (1)..(353): tr|A0A1M5S6L9|A0A1M5S6L9_9GAMM S-adenosylmethionine:tRN A ribosyltransferase-isomerase OS=Ferrimonas marina OX= 299255 GN=queA PE=3 SV=1
MQVADFQFDLPDELIARYPTEERRASRLLHLDGNSGHLVDGQFPDLLDLVQPGDLMVFNNTRVIPARLHGQKASGGKLEVLVERVLDSRRVLAHVRCSKSPKPGTELQFDQGVTAQMVARHDALFELAFDGGETVLSLLERIGHMPLPPYIDRPDENSDRERYQTVYNQRPGAVAAPTAGLHFDDAMLAALKQKGVETAFVTLHVGAGTFQPVRVDTVEAHKMHSEFAEVDSQVVEAVKRTRARGGRVIAVGTTSVRSLESAALAAREHGEALMPYAAETDIFLYPGKTFHLVDAMVTNFHLPESTLIMLVSAFAGQDNVMNAYRHAVEQRYRFFSYGDAMFITRRDIEQESR

SEQ ID NO: 66488 - protein, 357 aa, Ferrimonas sediminum
  misc_feature (1)..(357): tr|A0A1G8QDP3|A0A1G8QDP3_9GAMM S-adenosylmethionine:tRN A ribosyltransferase-isomerase OS=Ferrimonas sediminum OX=718193 GN=queA PE=3 SV=1
MQVADFQFDLPDELIARFPMAQRSASRLLHLDGNGGHLVDGQFPDLLDLLHDGDLLVFNNTRVIPARVFGKKASGGKIEVLVERVVDAHRVLAHVRSSKSPKVGTELQFEQGVKAIMVARHDALFELEFQGSTPVLSILDAIGHMPLPPYIDRPDDEADRERYQTVYNSRPGAVAAPTAGLHFDDGMLEKLKAKGVRFAYVTLHVGAGTFQPVRVDKIEDHHMHSEWAEVPQEVVDAIIKTKADGGRVVAVGTTSVRSLESAAQASLVKTGELQPFASDTNIFIYPGYRFQLVDAMVTNFHLPESTLIMLVSAFAGQDKVMAAYQHAVDNRYRFFSYGDAMFINRDEKLHSQEDCLD

SEQ ID NO: 66489 - protein, 354 aa, Ferrimonas sp.
  misc_feature (1)..(354): tr|A0A4U1BHK7|A0A4U1BHK7_9GAMM S-adenosylmethionine:tRN A ribosyltransferase-isomerase OS=Ferrimonas sp. IMCC35 001 OX=2569538 GN=queA PE=3 SV=1
MQVADFQFDLPDELIARYPTQERSASRLLHLDGNSGHLVDGQFPELVDLLHDGDLLVFNNTRVIPARVYGNKASGGKIEVLVERVLDTRRVLAHVRSSKSPKPGTELVFEQGVSATMVARHDALFEIEFHGDTPVLSILEAIGHMPLPPYIDRPDEEADKERYQTVYNRRPGAVAAPTAGLHFDDAILERLRAKGVEFAYVTLHVGAGTFQPVRVDKVEDHHMHSEWAEVPQEVVDAVIRTKANGGRVVAVGTTSVRSLESAAQATLAKTGVLEAFAADTSIFIYPGYRFQLVDAMVTNFHLPESTLIMLVSAFAGQDNVMNAYRHAVENRYRFFSYGDAMFINRDEKLHGEVE

SEQ ID NO: 66490 - protein, 357 aa, Ferrimonas sp.
  misc_feature (1)..(357): tr|A0A4U1BSV1|A0A4U1BSV1_9GAMM S-adenosylmethionine:tRN A ribosyltransferase-isomerase OS=Ferrimonas sp. IMCC35 002 OX=2569539 GN=queA PE=3 SV=1
MQVADFKFDLPDELIARHPMPERTASRLLHLDGNSGRLVDAQFPDLLDQLHDGDLMVFNNTRVIPARVFGKKASGGKLEVLVERVLDDKRVLAHVRSSKSPKPGTELHFDNDIKATMVARHDALFEIEFHGDSTVLRILDDIGHMPLPPYIDRPDDDADRERYQTVYNQRPGAVAAPTAGLHFDEAMLAKLKAKGVKFAYVTLHVGAGTFQPVRVDKIEDHHMHSEYAEVPQDVVDAVIRTKANGGRVIAVGTTSVRSLESAAQASLAQTGELKPFASDTNIFIYPGYRFQLVDAMVTNFHLPESTLIMLVSAFAGQDKIMAAYEHAVAEKYRFFSYGDAMFINRDEQLHSNDKSLD

SEQ ID NO: 66491 - protein, 338 aa, Ferriphaselus amnicola
  misc_feature (1)..(338): tr|A0A2Z6G952|A0A2Z6G952_9PROT S-adenosylmethionine:tRN A ribosyltransferase-isomerase OS=Ferriphaselus amnicol a OX=1188319 GN=queA PE=3 SV=1
MRTDLFDFHLPEELIAQHPPAQRGGSRLLHVAGAALTHRQFADLPTLLRPDDLLVLNDTRVLKARLFGQKSSGGQVEVLVERVTGEHEVLAQVRASKSPKLGSRIVLAGELEVEVLGREGEFFCLRFLSDDSAYELLERYGKLPLPPYITHAAGEEDESRYQTVFAREPGAVAAPTAGLHFDDAMLAKLRAQGVRSAHVTLHVGAGTFKPVRAENVSEHVMHSERYSIPQATVDTIRETRARGGRVVAVGTTSLRALESAAAQAELQAGERETNIFITPGYQFQVVDVLLTNFHLPRSTLLMLVCAFGGMDNLLAAYLEAVAQGYHFFSYGDAMLIER

SEQ ID NO: 66492 - protein, 340 aa, Ferrithrix thermotolerans
  misc_feature (1)..(340): tr|A0A1M4SIH2|A0A1M4SIH2_9ACTN S-adenosylmethionine:tRN A ribosyltransferase-isomerase OS=Ferrithrix thermotole rans DSM 19514 OX=1121881 GN=queA PE=3 SV=1
MFGNYRDIAAYDYELPESKIAQTPLEKRSASRLLVSDGSSIEDRYVYDLPNILEPGDLVVVNDSKVFSARLSLQRSTGGAAEVLLLEEISDRFYNALLRPSRKLVTGESLYHDGVKVVRVEKGVRDCEDGELPVVEVLSNALIDKIGEIPLPPYIKTKVDDPSRYQTIYAQNYGSAAAPTAGLHLDEEVFEGFKRRGIEVATVELMVGIDTFKPISEESIDQHKMHSERYIVAPCVWEKVKAAKRVVAIGTTVVRTLESVASSNLLEGRTDLYITPGFRFKVVDLLMTNFHTPRSSLLVLIASFYGPRWRELYSHALRDGYRFLSFGDAMLIARNDDVVW

SEQ ID NO: 66493 - protein, 349 aa, Ferrovibrio sp.
  misc_feature (1)..(349): tr|A0A2M8U069|A0A2M8U069_9PROT S-adenosylmethionine:tRN A ribosyltransferase-isomerase OS=Ferrovibrio sp. OX=19 17215 GN=queA PE=3 SV=1
MLVSDFDFELPPALIAERPAVPREAARLLLHVGSIDRREFTVADLPDLLRPNDLLVFNDTKVIPARLYGRRERDPEVRVEALLLKPIGEQRWTAMARPAKRLKSGDRVLFDDGIVAEAIGREDDQIVLRFDRADGELLTALEDAGAMPLPPYIVAQRKADAQDKIDYQTVFAEKTGAIAAPTAGLHFTPALIETLKARGIGFARVTLHVGAGTFLPVKVDRIEDHKMHAEWGEVTEETVAAIRAAKAKGGRVIAIGTTSLRLLESAARDGGLKPFRGDTDIFITPGFRFGVADGLMTNFHLPKSTLLMLVAAFVGLEGQRAIYAHAVQKGFRFYSYGDTSLLFRQASPR

SEQ ID NO: 66494 - protein, 349 aa, Ferrovibrio sp.
  misc_feature (1)..(349): tr|A0A516H4G0|A0A516H4G0_9PROT S-adenosylmethionine:tRN A ribosyltransferase-isomerase OS=Ferrovibrio sp. K5 OX =2594003 GN=queA PE=3 SV=1
MLVSDFDFELPPALIAERPAVPREAAKLLLHAGGIDPRTLTVADLPGLLQPNDLLVFNDTKVIPARLYGRRERDPEVRVEALLLKPIGERRWTAMAKPAKRLKPGDRVLFDGGLVVEALGREDDQIVLRFDRDDAEVLTALETAGAMPLPPYIVAQRKADAQDRTDYQTVFAEKTGAIAAPTAGLHFTPALIETLKRQGIGFARVTLHVGAGTFLPVKVDRVADHKMHAEWGEVTDGTVAAIRAAKEKGGRVIAIGTTSLRLLESAARDGTLKPFRGDTDIFITPGFRFHVADGLMTNFHLPKSTLLMLVAAFVGLQEQRTIYAHAVEKGFRFYSYGDTSLLFRQAGKK

SEQ ID NO: 66495 - protein, 351 aa, Ferrovum sp.
  misc_feature (1)..(351): tr|A0A149VY81|A0A149VY81_9PROT S-adenosylmethionine:tRN A ribosyltransferase-isomerase OS=Ferrovum sp. Z-31 OX= 1789004 GN=queA PE=3 SV=1
MRSMDFCTSDFDYILPPHLIAQTPTAVRRASRLLHLSARGLRDQWFAQLPELLWAGDLLVFNDTRVIKARVFGQKASGGRIEALVERVVSASEAWVQIRASHAPRAGGLIRFADGRAWEVLEKVEDLYRVALMDGETGPDFHAWLEQVGSLPLPPYIDHAAGVVDAERYQTVYARNPGAVAAPTAGLHFDEAMLETVRAGGVETASLTLHVGAGTFQPVRVERLADHHMHAEWFNLPAETVEAIRRTWARGGRVVAVGTTSLRALESAAAKGELCAGSQETRLFITPGYRFQVVDCLLTNFHLPRSTLLMLVSAFAGMEAVRQAYAHAVAQAYRFFSYGDAMLLEREKDEV

SEQ ID NO: 66496 - protein, 349 aa, Ferrovum sp.
  misc_feature (1)..(349): tr|A0A257UCE2|A0A257UCE2_9PROT S-adenosylmethionine:tRN A ribosyltransferase-isomerase OS=Ferrovum sp. 37-45-19 OX=1970377 GN=queA PE=3 SV=1
MKLRTDDFDYFLPESLIAQTPVPQRTHSRLMVVGESTIEDSYFYHLDQWLRPHDLLILNNTQVLKARLFGKKDSGGKVECLVERVSSPHRALVHFRASHAPKPGSLVYFDHDVALTVTQRVEDLFEVEFVRLSQNSPQDFFVWMEQDGVLPLPPYIDRSQDLQDIERYQTVYAQVPGAIAAPTAGLHFDEELFERLREKGVAVAHVTLHVGAGTFAPVKVDFVEQHVMHKEWYFIPEDTIQAIKHCQERGGRVIAVGTTSMRALESGALNKELQAGSQETDIFITPGFEFKVIDMLVTNFHLPRSTLLMLVSAFSGLKRMRRAYQHAIDQKYRFFSYGDAMLLTRGQDQ

SEQ ID NO: 66497 - protein, 349 aa, Ferruginibacter sp.
  misc_feature (1)..(349): tr|A0A3M9NEC6|A0A3M9NEC6_9BACT S-adenosylmethionine:tRN A ribosyltransferase-isomerase OS=Ferruginibacter sp. B O-59 OX=2294116 GN=queA PE=3 SV=1
MKLSQFKFDLPLNLIAQNPTKRREDSRLMVIERATGKIENKHFKDILDYFDDKDVFVVNNTKVFPARMYGRKEKTGARIEVFLLRELHRQNRLWDVIVDPARKIRVGNKLYFGENDELVAEVIDNTTSRGRTIRFLWDGTEEDFRKMLYFMGETPLPKYIKRKPDEEDRERYQTVYAKHEGAVAAPTAGLHFSPELIKRLEIKGIKFAEVTLHTGLGTFRPIEVEDLSKHKMDAEYYRIDEEACKIVNKAKQTNHRICSVGTTTMRAMESSFTATKLLKPSEGWTNHFIHPPYTFNIADSLITNFHLPKTSLLIMACAFAGYDLIMDAYKKAIKDKYRFFSYGDAMLII

SEQ ID NO: 66498 - protein, 410 aa, Ferruginibacter sp.
  misc_feature (1)..(410): tr|A0A3M9N9R4|A0A3M9N9R4_9BACT S-adenosylmethionine:tRN A ribosyltransferase-isomerase OS=Ferruginibacter sp. B O-59 OX=2294116 GN=EFY79_14990 PE=3 SV=1
MHPKDLTIEDFNYHLPEEKIAIYPLAQRDQSKLLIYKNEKISEDIYRNVAEYLPRNSFLVFNDTKVIKARILFQKPTGGVIEIFCLEPHEKISDYAVVLQQKKSTNWKCMIGGAGKLKEKFLLKKFFIGENEITLKALLIEKLSDAYVVQLSWNPGGYSFAEIMEHAGQTPLPPYIKRKVEESDSEKYQTIYSHYEGSVAAPTAGLHFTEEIFSSLKSKKIGTGFVTLHVGAGTFKPVKADKMEGHEMHAEWIDVSAKFIEQLIQHIPNDIVCVGTTSVRTVESLYWMGLKTFLNPEIEFEKLKINQWEVYEGELLKMKLSAKESLTSLLNYLIIKKTERLLIQTQIIIAPGYEFKIMRCIITNFHQPKSTLLLLVSALIGENWKKIYEYALSHDFRFLSYGDGCLIFKD

SEQ ID NO: 66499 - protein, 341 aa, Fervidicola ferrireducens
  misc_feature (1)..(341): tr|A0A140LCE5|A0A140LCE5_9THEO S-adenosylmethionine:tRN A ribosyltransferase-isomerase OS=Fervidicola ferriredu cens OX=520764 GN=queA PE=3 SV=1
MDVKEFYYELPEELIAQEPLPERDKSRLMVVHRDTRSFEHRIFENIIDYLEEGDCLVLNDTRVIPARLLGTRKDTGGKIEFILLKRIEKDKWEILVKPGRRAKLGSEFTFGDGRLQAKVLDYTDAGGRIVEFYYEGIFEHVLDEVGKMPVPPYIKKELEDKERYQTVYARKPGSAAAPTAGFHFTRELLKKIEQKGVRVCYITLHVGLGTFRPVKEEKVEQHKMHHEYFEVDNETARIINATKQQGRRVIAVGTTSTRTLETVADENGFVKSQSGWTDLFIYPGYRFKVVDGLVTNFHLPESTLLMLVCAFADKELIMSAYKEAIKEKYRFYSFGDAMLIV

SEQ ID NO: 66500 - protein, 347 aa, Fervidobacterium changbaicum
  misc_feature (1)..(347): tr|A0A1G8DY45|A0A1G8DY45_9BACT S-adenosylmethionine:tRN A ribosyltransferase-isomerase OS=Fervidobacterium chan gbaicum OX=310769 GN=queA PE=3 SV=1
MGSVDLFKLEAYDYNLPEELIAQEPVEPRDLSRLMVVDRRTGEIQHKIFRDVIEHLDPGDLLVFNTSKVIPARLFGRKTTGAKVEILLLEKIEQGVWKCLVKPGKAVKERTEIVFDLFNKECGITAKCVGRAEEGTRILEFSTKSDSEIFAIGKVPLPHYIKNENVDFNRYQTVYAKYEGSVAAPTAGLHFTTELLEKIKNKGILTAEVVLHVGIGTFRPVKVEDIRQHKMHEEYYVVPEETVRIIDEVKIRGGRLIAVGTTSVRTLETIARLPKATSYSGKTDIFIYPPFEFKLVDALITNFHLPKSSLLMLVSAFTGYELTMKAYKIAVEERYRFFSFGDAMLIL

SEQ ID NO: 66501 - protein, 348 aa, Fervidobacterium gondwanense
  misc_feature (1)..(348): tr|A0A1M7S075|A0A1M7S075_FERGO S-adenosylmethionine:tRN A ribosyltransferase-isomerase OS=Fervidobacterium gond wanense DSM 13020 OX=1121883 GN=queA PE=3 SV=1
MDKMENSKLYKLDAYDYFLPEELIAQQPIEPRDHSRLMVLDRTTGNIQHRMFKDILEYLSPKDILVFNTSKVIPARIYGKKTTGATVELLLLEKMSLGVWKCLVKPGKAVKEGTEIVFHKPDGNIIGKCVGRAEEGTRIIEFSVSDDHIIFSLGKIPLPHYIKNENIEFERYQTVYAKHEGSVAAPTAGLHFTNELLEKIKSKGVRTAEVILHVGIGTFRPVKAEDIRHHKMHEEYYIVPEETVNLIDEVKSTNGRVIAVGTTSVRTLETIARQPKSGSYSGKTDIFIYPPFEFKIVDALITNFHLPKSSLIMLVSAFAGYELTMQAYKIAVEEKYRFFSFGDAMFIF

SEQ ID NO: 66502 - protein, 347 aa, Fervidobacterium islandicum; identical to SEQ ID NO: 66500
  misc_feature (1)..(347): tr|A0A1B0VLB3|A0A1B0VLB3_FERIS S-adenosylmethionine:tRN A ribosyltransferase-isomerase OS=Fervidobacterium isla ndicum OX=2423 GN=queA PE=3 SV=1

SEQ ID NO: 66503 - protein, 349 aa, Fervidobacterium nodosum
  misc_feature (1)..(349): tr|A7HNS1|A7HNS1_FERNB S-adenosylmethionine:tRNA ribosy ltransferase-isomerase OS=Fervidobacterium nodosum (str ain ATCC 35602 / DSM 5306 / Rt17-B1) OX=381764 GN=queA PE=3 SV=1
MDNINNNSQLYNLEMYDYYLPEELIAQSPVEPRDSSRLMVLNKATGEIQHRIFRDIGEYIHEGDLLVFNTTKVIPARLFGKKTTGANIEILLLEKLGLGIWKCLVKPGKAVKEGTEIIFENTNMKMYGKCLSRAEEGTRVIEFSEKEDEKIFSFGNVPLPHYIKNHNVKIERYQTVYAKHEGSVAAPTAGLHFTTELLNELKNKGVKTAEVVLHVGIGTFKPVKVGDIRQHKMHEEYYIVSGETISAINEVKASGKRVIAVGTTTVRTLETIARLQKSDSYSGKTDIFIYPPFEFKIVDALITNFHLPKSSLIMLVSAFAGYDLTMRAYRIAVQERYRFFSFGDAMFIF

SEQ ID NO: 66504 - protein, 347 aa, Fervidobacterium pennivorans
  misc_feature (1)..(347): tr|A0A172T3Z3|A0A172T3Z3_FERPE S-adenosylmethionine:tRN A ribosyltransferase-isomerase OS=Fervidobacterium penn ivorans OX=93466 GN=queA PE=3 SV=1
MKPVDLYKLEAYDYTLPEELIAQEPVEPRDHSRLMVVNRKTQEIEHRIFKDIVEYLNAGDLLVFNTSKVIPARIIGRKPTGAKVELLLLEKIEPGVWKCLVKPGKAIKEGTEIIFDVHNNEIALTAKCVGRAEEGTRLVEFSTKNDNEIFALGKVPLPHYISNDNIDFERYQTVYAKYEGSVAAPTAGLHFTEQLLERIREKGILTAEVVLHVGIGTFRPVKVEDIRQHKMHEEYYVVPEETVHIIEQVKNEGGKVFAVGTTSVRTLETIARLPKAPSYSGKTDIFIYPSFEFKLVDALITNFHLPKSSLIMLVSAFAGYELIMKAYKIAVEERYRFFSFGDAMLIL

SEQ ID NO: 66505 - protein, 347 aa, Fervidobacterium pennivorans
  misc_feature (1)..(347): tr|H9UEM4|H9UEM4_FERPD S-adenosylmethionine:tRNA ribosy ltransferase-isomerase OS=Fervidobacterium pennivorans (strain DSM 9078 / Ven5) OX=771875 GN=queA PE=3 SV=1
MKPVDLYKLEAYDYDLPEELIAQEPVEPRDHSRLMVVNRKTQEIEHRIFKDIVEYLNAGDLLVFNTSKVIPARIIGKKTTGAKVELLLLEKIEPGVWKCLVKPGKAVKEGTEIIFNVYSNENVVTAKCVGRAEEGTRLVEFSTQNDQEIFAIGKVPLPHYIKNDNIDFERYQTVYAKYEGSVAAPTAGLHFTEQLLEKIREKGILTAEVVLHVGIGTFRPVKVEDIRKHKMHEEYYVVPEETVRIIEQVKNKGGKVFAVGTTSVRTLETIARLPKAPSYSGKTNIFIYTPFEFKLVDALITNFHLPKSSLIMLVSAFAGYELTMKAYKIAVEERYRFFSFGDAMLIL

SEQ ID NO: 66506 - protein, 343 aa, Fervidobacterium sp.
  misc_feature (1)..(343): tr|A0A3D2GEU0|A0A3D2GEU0_9BACT S-adenosylmethionine:tRN A ribosyltransferase-isomerase (Fragment) OS=Fervidobac terium sp. OX=1871331 GN=DE117_06080 PE=3 SV=1
MKKLDLNSFQDKDLHKLESYDYYLPQELIAQSPIEPRDKSRLMVVNKTTGEISHRIFSDIKEYLKEGDLLVFNVSKVIPARLLGKKTTGANVEVLLVEKLEPGIWKCLVKPGKAIKEGTEVLFERNSEKLLARCIDRAEEGTKIFSFSMKGDNDIFFFGTAPLPHYIKTKDIDIDRYQTVYAREEGSIAAPTAGLHFTTDLLEKIRQKGIKFAEVTLHVGIGTFKPVKIGDITQHKMHEEYYIVSEESAKTIEECHKNGGRIVAVGTTSVRTLETIARLPKASSYSGKTNLFIYPPYEFKYVDALITNFHLPKSSLIMLVSAFAGYELTMKAYNIAVEEKYRF

SEQ ID NO: 66507 - protein, 344 aa, Fervidobacterium thailandense
  misc_feature (1)..(344): tr|A0A1E3G4K3|A0A1E3G4K3_9BACT S-adenosylmethionine:tRN A ribosyltransferase-isomerase OS=Fervidobacterium thai landense OX=1008305 GN=queA PE=3 SV=1
MERNLYDLEAYDYHLPEELIAQEPVEPRDASRLMVINRKTGTIEHRIFREIVEYLIPGDTMVFNVSKVIPARLVGRKSTGAKVEVLLLEKLGEGVWKCLVKPGKAIKDGTVLIFGEAQDSLMAKCLGRAEEGTRILEFSAKSDSEIFSFGQVPLPHYIKNQSIDFQRYQTVYAKNEGSVAAPTAGLHFTPELIERIKKKGVNIAEITLHVGIGTFRPVKAKDIREHKMHEEFYVVPKETVQVINETKKSGGRIIAVGTTSVRTLETIARLPLADSYSGKTDIFIYPPFEFKLVDALVTNFHLPKSTLLMLVSAFAGYDLTMKFYNLAVAERYRFFSFGDACFII

SEQ ID NO: 66508 - protein, 398 aa, Fibrella aestuarina
  misc_feature (1)..(398): tr|I0KG27|I0KG27_9BACT S-adenosylmethionine:tRNA ribosy ltransferase-isomerase OS=Fibrella aestuarina BUZ 2 OX= 1166018 GN=FAES_5081 PE=3 SV=1
MLPDLVLDQFQYDLPDERIARFPLSQRDGSKLLVYRQGQLAHHTFRELPDLLPPDSYLVFNNTKVIPARLLFTRATGGIVELFLLNPAPADRPITSAMADLGETMWQCMVGNRKRWKADEVLQMPLGDTVLTAEWADADTNEIRFRWQPAPVSFAEIVQQAGQMPLPPYLKRAATEADSTAYQTVYARQEGAVAAPTAGLHFTDAVFDDLAQRGIAHDTLTLHVGAGTFQPIKTTDVRAHTMHSEQVIYTQENLEKLLPHLGHVIPVGTTSMRSLESLYWFGVRLLRQHPDPFHLDQHYAYNVPSAEQPDTETAVRAVLTYLRETQQATLTAHTGIYITPGYQLRVCRGIITNFHQPGSTLILLIATLVGNDWRTIYNEALSNDYRFLSYGDSSLLLP

SEQ ID NO: 66509 - protein, 347 aa, Fibrella aestuarina
  misc_feature (1)..(347): tr|I0KGP9|I0KGP9_9BACT S-adenosylmethionine:tRNA ribosy ltransferase-isomerase OS=Fibrella aestuarina BUZ 2 OX= 1166018 GN=queA PE=3 SV=1
MKLSEFRFDLPESLIAKYPVERGESRLMVIDRKTKTIEHKKFGDILSYFNDGDSMVINNTKVFPARLYGNKEKTGAKIEVFLLRELNREMKLWDVLVDPARKIRVGNKLYFGDSDLVAEVIDNTTSRGRTIRFLFDGNHEEFMKAVDQLGEMPIPREIMRESVDADREHFQTVFAEHVGAVAAPTAGLHFTRAMMKRMEIKGIHFAPITLHIGLGTFRQVDVEDLTKHKTDSENFRIGPEAANIVNASLDAGKRVCAIGTTALKAIESSVSANARLKPVEGWTDRFIFPPYEFKIANSLLTNLHLPESVLLMMTSAFGGHELIKEAYQVAIKEKYRFFTYGDAMLIL

SEQ ID NO: 66510 - protein, 398 aa, Fibrella sp.
  misc_feature (1)..(398): tr|A0A1W6E370|A0A1W6E370_9BACT S-adenosylmethionine:tRN A ribosyltransferase-isomerase OS=Fibrella sp. ES10-3-2 -2 OX=1834519 GN=queA PE=3 SV=1
MLPDLRLDQFQYDLPDERIARFPLAKRDQSKLLVYKEGQISHHQFVDLPDLLPADSFLVFNNTKVIPARLLFTRSTGATIELFLLNPMPSDRPVGEAMLDKGEAVWQCMIGNRKKWREGETLLLTFGEVVLIAEWEDTDKSLIRFTWQPDDMTFAELIQQAGQMPLPPYLKREPIAADSQTYQTVYARKEGAVAAPTAGLHMTKDVLGTLAERGIGHDALTLHVGAGTFQPIKADDPRQHTMHAEQVVYTRENITNVLKHLGHLIPIGTTSMRSLESLYWFGVRLLASHPDPFHLDQQYAYNVPAEEQPSAHDAVEAVRLYMEQHKLPLLTAHTSIYITPGYQMRMCRGIVTNFHQPGSTLILLIAALVGDDWRTIYTEALSNDYRFLSYGDSSLLLP

SEQ ID NO: 66511 - protein, 347 aa, Fibrella sp.
  misc_feature (1)..(347): tr|A0A1W6E6A6|A0A1W6E6A6_9BACT S-adenosylmethionine:tRN A ribosyltransferase-isomerase OS=Fibrella sp. ES10-3-2 -2 OX=1834519 GN=queA PE=3 SV=1
MKLAEFRFDLPESLIAKYPVERGEARLMVVDRKTKTIEHKKFGDILSYFSDGDVMVINNTKVFPARLYGNKEKTGAKIEVFLLRELNREMKLWDVLVDPARKIRVGNKLYFGDSDLVAEVIDNTTSRGRTIRFLFDGNHDEFMKAVDQLGEMPIPREIMRESVEADREHYQTVFAQHVGAVAAPTAGLHFTRAMMKRMEIKGIHFAPVTLHIGLGTFRQVDVEDLTKHKTDSENFRIEPDATAIVNAGLDAGKRVCAIGTTALKAIESSVSANSRLKPVEGWTDRFIFPPYDFKIANALLTNMHLPESVLLMMTSAFGGHELIKEAYQIAIKEKYRFFTYGDAMLIL

SEQ ID NO: 66512 - protein, 347 aa, Fibrisoma limi
  misc_feature (1)..(347): tr|I2GFM4|I2GFM4_9BACT S-adenosylmethionine:tRNA ribosy ltransferase-isomerase OS=Fibrisoma limi BUZ 3 OX=11858 76 GN=queA PE=3 SV=1
MKLSEFKFDLPESLIAKYPLERGESRLMVVHRKTKQIEHKQFSDILSYFDDGDVMVINNTKVFPARLYGNKEKTGAKIEVFLLRELNREMKLWDVLVDPARKIRVGNKLYFGDSDLVAEVIDNTTSRGRTIRFLFDGNHEEFMKAVDELGETPLPREIKRKTEDADRDRYQTVFAEHIGAVAAPTAGMHFTRAMMKRMEIKGIHFAPVTLHVGLGTFRQVDVEDLTKHKTDSENYRISDDSAQIVNEALDAGKRVCAIGTTSLKAVESSVSANSRLKPVEGWTDKFIFPPYDFKIANSLLTNFHLPESILIMMTSAFGGHDLIRHAYEVAIKEKYRFFSYGDAMLIL

SEQ ID NO: 66513 - protein, 409 aa, Fibrisoma limi
  misc_feature (1)..(409): tr|I2GMX1|I2GMX1_9BACT S-adenosylmethionine:tRNA ribosy ltransferase-isomerase OS=Fibrisoma limi BUZ 3 OX=11858 76 GN=queA PE=3 SV=1
MANVETLRLEQFQYELPDERIARFPLAQRDQSKLLVYRSGEITHTRFNSLPNVLPDGSFLVFNDTKVIPARLIFTRSTGAVIELFLLNPVPLDRPITLAMQDTRSVVWQCMVGNRKRWKQSETLQTILPSKEGDIILEATWEDYEQSTVRLSWQSSASNASPETFAQVIQLAGQIPLPPYLKRDVVDADRDTYQTVYSKQEGAVAAPTAGLHFTKAVFDGLAHRGFDHDYLTLHVGAGTFQPIKTDDVRQHHMHTEQVVYTQLNLRRLMDHHNQILPVGTTSMRALESLYWMGVKLLRGDADPFRLDQHYAYQIPPDEQPTVLESLGAFLHYLEQTGQASVVAHTGIYITPGYTFKLCKGIITNFHQPGSTLILLVAALIGEDWRRVYNEAINEGYRFLSYGDSSLLLP

SEQ ID NO: 66514 - protein, 347 aa, Fibrisoma sp.
  misc_feature (1)..(347): tr|A0A418LX67|A0A418LX67_9BACT S-adenosylmethionine:tRN A ribosyltransferase-isomerase OS=Fibrisoma sp. HYT19 O X=2305895 GN=queA PE=3 SV=1
MKLSEFKFDLPESLIAKYPLERGESRLMVVHRKTKQIEHKQFSDILNYFDDGDVMVINNTKVFPARLYGNKEKTGAKIEVFLLRELNREMKLWDVLVDPARKIRVGNKLYFGDSDLVAEVIDNTTSRGRTIRFLFDGNHEEFMKAVDELGETPLPREIKRKTEDADRDRYQTVFAEHIGAVAAPTAGMHFTRAMMKRMEIKGIHFAPVTLHVGLGTFRQVDVEDLTKHKTDSENYRISDDSAQIVNEALDAGKRVCAIGTTSLKAVESSVSANSRLKPVEGWTDKFIFPPYEFKIANSLLTNFHLPESILIMMTSAFGGHDLIRHAYEVAIKEKYRFFSYGDAMLIL

SEQ ID NO: 66515 - protein, 406 aa, Fibrisoma sp.
  misc_feature (1)..(406): tr|A0A418M157|A0A418M157_9BACT S-adenosylmethionine:tRN A ribosyltransferase-isomerase OS=Fibrisoma sp. HYT19 O X=2305895 GN=queA PE=3 SV=1
MMSAETLRLEQFQYELPDERIARFPLAQRDQSKLLVYRSGQITHSRFINLPDELPDGSFLVFNDTKVIPARLIFTRSTGAVIELFLLNPLPLDRPITLAMQDTGSVVWQCMVGNRKRWKPTETLHTTLPSEAGDILLEATWEDYEQSAVRLSWRSPSGTESFAKVIHLAGQIPLPPYLKRAVVDADRDTYQTVYSRQEGAVAAPTAGLHFTEAVFDELARRGFEHDYLTLHVGAGTFQPIKTDDVRQHHMHTEQVVYTLSNLRRLLDHHDRILPVGTTSMRALESLYWMGVKLLRQEPEPFRLDQHYAYQLPPDEQPTVPESLRAVQHYLEQSGQTSVVAHTGIYITPGYTFRLCKGIITNFHQPGSTLILLIAALIGEKWREVYREALDGDYRFLSYGDSSLLIP

SEQ ID NO: 66516 - protein, 349 aa, Fibrobacter intestinalis
  misc_feature (1)..(349): tr|A0A1T4K3Y0|A0A1T4K3Y0_9BACT S-adenosylmethionine:tRN A ribosyltransferase-isomerase OS=Fibrobacter intestina lis OX=28122 GN=queA PE=3 SV=1
MISDRLSDYAFDFPKELIASRSPGKGKTQILHCPKDGKGPLEIVPAPRIVEFFRPGDCIVVNNTKVIPARLFGRTLHGGQVEILLVQTLFPDEAGNARWEAWVRPGKAFPVGRELEIAGIKTHVEQINPDGARVLRFEATPVELEKVMNEQGHVPLPPYIARPDDEEDKKAYQTIFAKYNGAVAAPTASLHFNSQMLEDLKAKGVKIAEVTLHVGPGTFQNIATENFREHKMHGEHYELTQENADIINGARQNGGRIVPIGTTSTRVIETIAQEDGTLSAQTGVTHAFFYPGYRYKIADGLLTNFHWPKSSLILLVAAFYGRENTLAAYKYAVEHRLHLFSYGDGMLIL

SEQ ID NO: 66517 - protein, 348 aa, Fibrobacter sp.
  misc_feature (1)..(348): tr|A0A1M6U0G0|A0A1M6U0G0_9BACT S-adenosylmethionine:tRN A ribosyltransferase-isomerase OS=Fibrobacter sp. UWH4 OX=1896210 GN=queA PE=3 SV=1
MESHNLSDYNFEFPKELIASRTAGKGKTRILHCPKDGGERHIMKAPEIVDLFKPGDCLVVNNTKVIPARLYGHTMHGGEVETLLVQALIPAEDGSARYEAQVRPGKAFKIGRELDIAGVKTIVEDIKEDGARVLRFAVTPVELEAVMNREGHVPLPPYIDRPDDEDDKKAYQTIFAKYSGAVAAPTASLHFSEEMLEALKAKGVYVAEVTLHVGPGTFQNISVEDFTQHKMHGEHYELTKENAEIINKAKREGGRIVTVGTTSTRVVETIADANGIVKAQSGVTHAFFYPGYRYKIVDGLLTNFHWPKSSLILLVSAFYGRENTLAAYKMAVENKMKLFSYGDGMLIL

SEQ ID NO: 66518 - protein, 348 aa, Fibrobacter sp.
  misc_feature (1)..(348): tr|A0A254SVK2|A0A254SVK2_9BACT S-adenosylmethionine:tRN A ribosyltransferase-isomerase OS=Fibrobacter sp. UWB1 OX=1964355 GN=queA PE=3 SV=1
MESHNLSDYNFEFPKELIASRTAGKGKTRILHCPKNGGERHILKAPEIVDLFKPGDCLVVNNTKVIPARLYGHTMHGGEVETLLVQALIPAEDGSARYEAQVRPGKAFKVGRELDIAGVKTVVEDIKEDGARVLRFAVTPVELEAVMNREGHVPLPPYIDRPDDEDDKKAYQTIFAKYSGAVAAPTASLHFSEEMLEALKAKGVYVAEVTLHVGPGTFQNISVEDFTQHKMHGEHYELTAENADIINKAKREGGRIVTVGTTSTRVVETIADANGFLKPQKGITHAFFYPGYRYKIVDGLLTNFHWPKSSLILLVSAFYGRENTLEAYKMAVENKMKLFSYGDGMLIL

SEQ ID NO: 66519 - protein, 348 aa, Fibrobacter succinogenes
  misc_feature (1)..(348): tr|A0A380S791|A0A380S791_FIBSU S-adenosylmethionine:tRN A ribosyltransferase-isomerase OS=Fibrobacter succinoge nes OX=833 GN=queA PE=3 SV=1
MDYRLSDYNFEFPKELIASRTAGKGKTHILYCPKNGGERRIMKAPEIVDLFRPGDCLVVNNTKVIPARLYGETQFGGQVEVLLVQALNPSEAGEARFEAKVHPGKAFQVGRELKLAGVRTFVEEVHEEDGNRVLRFEKTPAEMEEVMNKEGHVPLPPYIDRPDDEDDKKAYQTIFAKYAGAVAAPTASLHFSEQMLDDLKAKGVYVAEVTLHVGPGTFQNISVEDFTKHKMHGEHYELTKENADIINKAKREGGRIVTVGTTSTRVIETVADANGFLKPQKGVTYAFFYPGYKYKIVDGLLTNFHWPKSSLILLVSAFYGRENTLDAYKMAVENKLKLFSYGDGMLIL

SEQ ID NO: 66520 - protein, 348 aa, Fibrobacter succinogenes
  misc_feature (1)..(348): tr|C9RMW6|C9RMW6_FIBSS S-adenosylmethionine:tRNA ribosy ltransferase-isomerase OS=Fibrobacter succinogenes (str ain ATCC 19169 / S85) OX=59374 GN=queA PE=3 SV=1
MDYHLSDYNFEFPKELIASRTAGKGKTHILYCPKNGGERRIMKAPEIVDLFRPGDCLVVNNTKVIPARLYGETQFGGQVEVLLVQALNPSEAGEARFEAKVHPGKAFQVGRELKLAGVRTFVEEVHEEDGNRVLRFEKTPAEMEEVMNKEGHVPLPPYIDRPDDEDDKKAYQTIFAKYAGAVAAPTASLHFSEQMLEDLKAKGVYVAEVTLHVGPGTFQNISVEDFTQHKMHGEHYELTKENADIINKAKREGGRIVTVGTTSTRVIETVADANGFLKPQKGVTYAFFYPGYKYKIVDGLLTNFHWPKSSLILLVSAFYGRENTLDAYKMAVENKLKLFSYGDGMLIL

SEQ ID NO: 66521 - protein, 195 aa, Fibrobacteres bacterium
  misc_feature (1)..(195): tr|A0A3C0PDB5|A0A3C0PDB5_9BACT S-adenosylmethionine:tRN A ribosyltransferase-isomerase (Fragment) OS=Fibrobacte res bacterium OX=2052160 GN=DCO75_02740 PE=3 SV=1
MKTSDFDYNIPERLIAQFPCRKRDECRLMYIDRSNHSINHNKFCDLPGLLKPGDRLVFNDTKVLPARIFCCKADTGAKIELLFTERISDISWKVLAKPAKRLKKNIRLFIEDIPQVQLEVIDIYEDGGRLVTLCNNRVVATIEELLDRSGRIPLPPYIKRESGQSDKETYRTVYAANAGAIASPTAGLHFTDGLM

SEQ ID NO: 66522 - protein, 347 aa, Fibrobacteres bacterium
  misc_feature (1)..(347): tr|A0A1J5EMM6|A0A1J5EMM6_9BACT S-adenosylmethionine:tRN A ribosyltransferase-isomerase OS=Fibrobacteres bacteri um CG2_30_45_31 OX=1805149 GN=queA PE=3 SV=1
MSCHLSDYDFEFPEELIASRTAGKGKTKILHCPKDGGPRAIIPAPAIVDLFRPGDCLVVNNTKVIPARLFGETEHGGKVETLLVQALIPAANGEARWEAWVRPGKAFPTGRTLNIADIPVTVEDIREDGARVLRFAITPMELESVMNAKGHVPLPPYIARPDDEEDKKAYQTIFAKYAGAVAAPTASLHFNEAMMEAVKAKGVKVAEVTLHVGPGTFQNISVDDFRLHKMHGEHYDLTREDADIINNARAQGGRIITVGTTSTRVLETIAAEDGSLIAQSGVTHAFIYPGYRYKIVDGLLTNFHWPKSSLILLVSALYGRENTLEAYAYAVSQKMKLFSYGDGMLIL

SEQ ID NO: 66523 - protein, 349 aa, Fictibacillus aquaticus
  misc_feature (1)..(349): tr|A0A235FB99|A0A235FB99_9BACI S-adenosylmethionine:tRN A ribosyltransferase-isomerase OS=Fictibacillus aquatic us OX=2021314 GN=queA PE=3 SV=1
MDLNLFDFDLPDELIAQTPLKDRTSSRLMVLDKHTGDVTHDIFSNVTQYLKAGDCLVLNDTRVLPARLYGQKEDTGAKIEVLLLKEQNADEWETLVKPAKRVKVGTKVMFGDGRLSAVCTGELENGGRVLKLLYEGILYEHLDALGEMPLPPYIKEQLEEKDRYQTVFARHQGSAAAPTAGLHFTEELLQELKDKGIHVAFITLHVGLGTFRPVAVENILEHDMHAEFYQLTAGTAALLNKVKEEGGRIYTVGTTSTRTLETVASRHDGRFQEESGWTDIFIYPGYEFKAIDGLITNFHLPKSTLIMLISALAGRENVLNAYRKAVEERYRFFSFGDAMLIHEGGNTLK

SEQ ID NO: 66524 - protein, 342 aa, Fictibacillus arsenicus
  misc_feature (1)..(342): tr|A0A1V3GBG8|A0A1V3GBG8_9BACI S-adenosylmethionine:tRN A ribosyltransferase-isomerase OS=Fictibacillus arsenic us OX=255247 GN=queA PE=3 SV=1
MKVNDFDFLLPEELIAQTPLENRTSSRLMVLDKENKSIEHEHFYDLKNYLKKGDCLVLNDTRVLPARLFGQKADTGAKVEILLLKEEGQDTWETLVKPAKRVKPGTEITFGDGRLKAVCVGESDHGGRNLKFIYSGIFYELLDDLGQMPLPPYIKEQLEEKDRYQTVYAVHQGSAAAPTAGLHFTEEMIEEIKASGVHVTFITLHVGLGTFRPVSVEDIFEHDMHAEFYQITKGTAELLNQVRESGGRIITVGTTSTRTLETVANKFDGKFEEDSGWTDIFIYPGYEFKAIDGLITNFHLPKSTLIMLVSAFASKEFVMEAYKEAVEEKYRFFSFGDAMLIL

SEQ ID NO: 66525 - protein, 341 aa, Fictibacillus arsenicus
  misc_feature (1)..(341): tr|A0A1V3G369|A0A1V3G369_9BACI S-adenosylmethionine:tRN A ribosyltransferase-isomerase OS=Fictibacillus arsenic us OX=255247 GN=UN64_18835 PE=3 SV=1
MEFAMKFELPQELNAKEPPERRGIRRDYVKMMVLNKTTGHTEHTKFYQLDRYLKKGDLLVLNASRTVPAVLKSIREIDGTEIEVRLAHRKNESIWEALPVSGTLMKGEIIRFSPTLTATVVEQSSDTPFVSLAFNLCCSSLYNQIYSLGEPVRYEYIQEPWNLDYYQTVFATIPGSVEMPSAGRAFSWELLFRLQKKGVRIAYITLHTGLSYLLDDKWHKGPDKNFENYEVPEETVNQIRETKDAGGRVVAVGTTVVRALETVALEKNHLQAHTGWTNLYITENTKLQICDGLITGMHEPEASHLQLLSAFVDKDKLYDAYQGAIEQRYLWHEFGDMNLIL

SEQ ID NO: 66526 - protein, 353 aa, Fictibacillus enclensis
  misc_feature (1)..(353): tr|A0A0V8JA50|A0A0V8JA50_9BACI S-adenosylmethionine:tRN A ribosyltransferase-isomerase OS=Fictibacillus enclens is OX=1017270 GN=queA PE=3 SV=1
MDINMFDFDLPEELIAQTPLKDRTASRLMVLDPATGKVEHNTFKNIIDYLNPGDCLVLNDTKVLPARLLGEKEDTKAKIEILLLKETGDDTWETLVKPAKRVKPGTTVVFGNGLLKAVCTGETDQGGRTFKFEYEGIFYEILDALGEMPLPPYIKEQLEERDRYQTVYAKHQGSAAAPTAGLHFTESLLEDIKKKGVHVTFITLHVGLGTFRPVSAENIEEHDMHAEFYQITKGTAELLNHVKKNGGRIVSVGTTSTRTLETVAGKHDEFCEDSGWTDIFIYPGYTFKAIDGMITNFHLPKSTLIMLISALAGREHVLKAYKEAVNERYRFFSFGDAMLILEGENKHDSSRPV

SEQ ID NO: 66527 - protein, 341 aa, Fictibacillus enclensis
  misc_feature (1)..(341): tr|A0A0V8IRG5|A0A0V8IRG5_9BACI S-adenosylmethionine:tRN A ribosyltransferase-isomerase OS=Fictibacillus enclens is OX=1017270 GN=AS030_22135 PE=3 SV=1
MMSAALSFVLPDELNASMPPERRGIRRDYVKMMVIDKKEGTTSHSHFYKLDHYLQEGDVLVLNASRTIPAVLKGNLADGTVIEVRLAHKKSDQNWEALILADEVKNGDTIHFSPVLSATVVTAATDSPFSLLAFNLCCTALYDQIYQIGQPVRYEYIETPWDLDYYQTVFATSPGSVEMPSAGRAFSWELLFRLQKKGVRIEYVELHTGLSYLMDDKWHLEPRENLEEYSIPEKTAAAVRQAKSNGHKVIAVGTTVVRALESAVDTKGHLKAARGWTNLYITGTTKLQVADGLITGLHEPEASHLDLLSAFVPVQHLHVSYKEAIGQKYFWHEFGDMNLII

SEQ ID NO: 66528 - protein, 336 aa, Fictibacillus macauensis
  misc_feature (1)..(336): tr|I8UKQ1|I8UKQ1_9BACI S-adenosylmethionine:tRNA ribosy ltransferase-isomerase OS=Fictibacillus macauensis ZFHK F-1 OX=1196324 GN=A374_00500 PE=3 SV=1
MSFSFALPSQLNAALPPEKRGVRRDYVKMLVINTKTKRTTHDVFFHLSHYLERGDVVVLNASRTLPAVLTATSKDRRYEVRLARRLKAQQWEVLVPHVSLEQGEILHFSKHLTAVVEHVNAHSPFITLFFHLPEPAFFDEVYKIGEPVRYEYIETPWKLDYYQTVFGSVPGSVEMPSAGRAFSWELLFQLQAMGVKIAFVELHTGLSYLMDDRWHIGPRENKEFYNISKETANVIHTAKQKGKRIIAVGTTVVRALESAAASGTLQPKKGWTNLYISEQSKLQIVDGLITGLHEPEASHLDLLTAFVPREFLQAAYSEAVEHRYLWHEFGDMNLII

SEQ ID NO: 66529 - protein, 347 aa, Fictibacillus macauensis
  misc_feature (1)..(347): tr|I8UER6|I8UER6_9BACI S-adenosylmethionine:tRNA ribosy ltransferase-isomerase OS=Fictibacillus macauensis ZFHK F-1 OX=1196324 GN=queA PE=3 SV=1
MDITMFDFNLPDELIAQTPLLDRTASRLMVLNPMTGEVKHETFKHIIDYFQPGDCLVLNDTRVLPARLLGEKEETQAKIEVLLLKEVGNDTWETLVKPAKRVKKGTVVSFGDGRLKATCVDETDQGGRVFQFQYEGIFYEILDALGEMPLPPYIKEQLEERDRYQTVFAKHEGSAAAPTAGLHFTEELLEAIKQKGVHVTFITLHVGLGTFRPVSVDNILEHDMHAEYYEMTRETAELLRSVKANGGRIISVGTTSTRTLETIAQKHGDFTKASGWTDIFIYPGYEFKAIDGMLTNFHLPKSTLIMLISALAGREHVLAAYQKAVEEKYRFFSFGDAMLILEGEKQS

SEQ ID NO: 66530 - protein, 341 aa, Fictibacillus phosphorivorans
  misc_feature (1)..(341): tr|A0A161TNW7|A0A161TNW7_9BACI S-adenosylmethionine:tRN A ribosyltransferase-isomerase OS=Fictibacillus phospho rivorans OX=1221500 GN=AWM68_19125 PE=3 SV=1
MESAMKFELPDELNAKEPPERRGLRRDYVKMMVLDKTTGQTNHTQFYQLDRFLKKGDLLVLNASRTVPAVLKSIKEQDGTEVEVRLAHRKNDSIWEALPVSGSVKKDDVIRFSPTLTATIIEQSDHTPFVTLAFNLCCSSLFNQIYDLGEPVRYEYIEEPWNLDYYQTVFATIPGSVEMPSAGRAFSWELLFRLQKKGVKIAYITLHTGLSYLLDDKWHKGPDKNFENYEVPKETAELILETKHAGGRIIAVGTTVVRTLETVAIEKGMLQEASGWTNLYITENTKLQVCDGLITGMHEPEASHLQLLSAFVDREKLYNAYTDAIHQRYLWHEFGDMNLIL

SEQ ID NO: 66531 - protein, 343 aa, Fictibacillus phosphorivorans
  misc_feature (1)..(343): tr|A0A160IIL4|A0A160IIL4_9BACI S-adenosylmethionine:tRN A ribosyltransferase-isomerase OS=Fictibacillus phospho rivorans OX=1221500 GN=ABE65_001060 PE=3 SV=1
METAMKFEVPEELNAKEPPERRGLRRDYVKMMVLDKDTGVTKHTQFYQLDKYLKKGDLLVLNASRTVPAVLKSHKEADGTEVEIRLAHRKNESIWEALPVSGTVKEGDIIRFSPTLTATIIKQSEDTPFVSLAFNLCCSSLFNQIYDLGEPVRYEYIQKPWNLDYYQTVFATIPGSVEMPSAGRAFSWELLFRLQKKGVRIAYITLHTGLSYLLDDKWHKGPDKNFENYHVSKETADLISETKNSGGRVIAVGTTVVRTLETVAQQNGKVQEASGWTNLYITENTKLRVCDGLITGMHEPEASHLQLLSAFLDRSKLYTAYNDAIQKRYLWHEFGDMNLILGE

SEQ ID NO: 66532 - protein, 340 aa, Fictibacillus solisalsi
  misc_feature (1)..(340): tr|A0A1H0CAG4|A0A1H0CAG4_9BACI S-adenosylmethionine:tRN A ribosyltransferase-isomerase OS=Fictibacillus solisal si OX=459525 GN=SAMN04488137_4852 PE=3 SV=1
MSAALSFVLPDELNASMPPERRGIRRDYVKMMVIDKKEGTTTHSHFYKLDHYLQAGDVLVLNASRTIPAVLKGNLADGTVAEVRLAHKKSDQNWEALILADEVKSGDTIHFSPVLTATVVTAATDRPFSLLAFNLCCTALYDQIYQIGQPVRYEYIETPWDLDYYQTVFATSPGSVEMPSAGRAFSWELLFRLQKKGVRIEYVELHTGLSYLMDDKWHLEPRENLEEYSIPEKTAAAIRKAKRNGHKVIAVGTTVVRALESAVDTKGHLKAARGWTNLYITGATKLQVADGLITGLHEPEASHLDLLSAFVSPQHLHVSYKEAIGQKYFWHEFGDMNLII

SEQ ID NO: 66533 - protein, 345 aa, Fictibacillus solisalsi
  misc_feature (1)..(345): tr|A0A1G9WRS1|A0A1G9WRS1_9BACI S-adenosylmethionine:tRN A ribosyltransferase-isomerase OS=Fictibacillus solisal si OX=459525 GN=queA PE=3 SV=1
MDINMFDFDLPDELIAQTPLKDRTASRLMVLDPATGKVEHNTFKNIIDYLNPGDCLVLNDTRVLPARLLGEKEDTKAKIEILLLKETGDDTWETLVKPAKRVKQGTTVVFGNGLLKAVCTGETDQGGRTFKFEYEGIFYEILDALGEMPLPPYIKEQLEERDRYQTVYAKHQGSAAAPTAGLHFTESLLEDIKKKGVHVTFITLHVGLGTFRPVSAENIEEHDMHAEFYQITKGTAELLNQVKKNGGRIVSVGTTSTRTLETVAGKHGGFCEDSGWTDIFIYPGYTFKAIDGMITNFHLPKSTLIMLISALAGREHVLEAYKEAVNERYRFFSFGDAMLILEGEN

SEQ ID NO: 66534 - protein, 340 aa, Fictibacillus sp.
  misc_feature (1)..(340): tr|A0A4V1QKQ7|A0A4V1QKQ7_9BACI S-adenosylmethionine:tRN A ribosyltransferase-isomerase OS=Fictibacillus sp. S7 OX=2212476 GN=DMO16_15255 PE=3 SV=1
MSAALSFVLPDELNASMPPERRGIRRDYVKMMVIDKKEGTTSHSHFYKLDHYLQEGDVLVLNASRTIPAVLKGNLADGTVIEVRLAHKKSDQNWEALILADEVKNGDTIHFSPVLSATVVTAATDSPFSLLAFNLCCTALYDQIYQIGQPVRYEYIETPWDLDYYQTVFATSPGSVEMPSAGRAFSWELLFRLQKKGVRIEYVELHTGLSYLMDDKWHLEPRENLEEYSIPEKTAAAVRQAKSNGHKVIAVGTTVVRALESAVDTKGHLKAARGWTNLYITGTTKLQVADGLITGLHEPEASHLDLLSAFVPVQHLHVSYKEAIGQKYFWHEFGDMNLII

SEQ ID NO: 66535 - protein, 341 aa, Fictibacillus sp.
  misc_feature (1)..(341): tr|A0A4Q7Q8Z2|A0A4Q7Q8Z2_9BACI S-adenosylmethionine:tRN A ribosyltransferase-isomerase OS=Fictibacillus sp. BK1 38 OX=2512121 GN=EV282_3844 PE=3 SV=1
MESAMKFELPQELNAKEPPERRGIRRDYVKMMVLNKTTGYTEHTKFYQLDRYLKRGDLLVLNASRTVPAVLKSIREIDGTEVEVRLAHRKNESIWEALPVSGTLTKGEIIRFSPTLTATVVEQSSDTPFVSLAFSLCCSSLYNQIYSLGEPVRYEYIQEPWNLDYYQTVFATIPGSVEMPSAGRAFSWELLFRLQKKGVRIAYITLHTGLSYLLDDKWHKGPDKNFENYEVPEETVNLIQETKEAGGRVVAVGTTVVRALETVALEKKELQAHTGWTNLYITENTKLQICDGLITGMHEPEASHLQLLSAFVDKDKLYDAYQGAIEQRYLWHEFGDMNLIL

SEQ ID NO: 66536 - protein, 362 aa, Unknown
  misc_feature (1)..(362): tr|A0A2P8WAX0|A0A2P8WAX0_9CYAN S-adenosylmethionine:tRN A ribosyltransferase-isomerase OS=filamentous cyanobact erium CCT1 OX=2107702 GN=queA PE=3 SV=1
MSPEIPNSSSEYSLAAYQYSLPPEKIAQTPVTPRDASRLLVVDSASTHRHHRFCDLPTLLQPGDLLVLNDTRVIPARLLGYKPSGAQVEVFLLEDQGDNRWLALVRPGRRLKPGATVHFGPNPDQPDLVAQVLDTDPDTSGRLLKFEPQSSESLFALFERLGEVPLPPYITDTAASPEQYQTVYAEAPGAVAAPTAGLHFTPELFERLEEMGVGRSRITLHVGVGTFRPVETDNILDHKMHGEWIDVSAETVAQIHATKARGGRVIAVGTTVVRALEGAAQGGELQPYQGKVNLFIYPGYQYRAIDGLITNFHLPGSSLLMLVSALIGRERLLGLYEDAIAQDYRFYSFGDAMLILPEAVQR

SEQ ID NO: 66537 - protein, 379 aa, Unknown
  misc_feature (1)..(379): tr|A0A2T1G2H8|A0A2T1G2H8_9CYAN S-adenosylmethionine:tRN A ribosyltransferase-isomerase OS=filamentous cyanobact erium Phorm 6 OX=2107706 GN=queA PE=3 SV=1
MTEIDWSLDGYDYELSPEYIAQNPAVPRDSSRLLTVDSPSSHQHRIFRDLPDLLEPGDLLILNNTRVLPARLFGHKPNGPAVEILLMEERQHNCWLALVKPGKRLKLGAKIEFDPIAPACDDSPVAPCCCVPEAQAPEHHRLTATVIARDDATGGRLLEFDLPTEMSLIPFLDEYGHIPLPPYIDKSQAAPEQYQTVYAEKVGAVAAPTAGLHFTEELFSRLEQRGIEKAFVTLHVGVGTFRPVEVADVTTHQMHGEWVEVPLATVEKIRETQARGGRIIAVGTTSVRALEGAAAASDDFSLQPFCGPTNLFIYPGYKWRVVEGMITNFHLPRSTLMMMLSAMIGRSRLLELYREAIEHQYRFYSFGDAMLILPAAKIN

SEQ ID NO: 66538 - protein, 350 aa, Filibacter sp.
  misc_feature (1)..(350): tr|A0A3P5XWS3|A0A3P5XWS3_9BACL S-adenosylmethionine:tRN A ribosyltransferase-isomerase OS=Filibacter sp. TB-66 OX=2483811 GN=queA PE=3 SV=1
MDVHDFDFDLPERLIAQTPLQNRTASRLMVLDKETGQVEHRQFPDLLNELQKGDVLVLNDTRVLPARLMGVKEETGATIEVLLLKETGYDEWETLVKPAKRVKVGTIVTFGDGRLKAQCTGILEQGGRIFKFSYEGIFYEILDALGEMPLPPYITESLDDQSRYQTVFAKERGSAAAPTAGLHFTAEFLEEIRAKGVTVTFITLHVGLGTFRPVSADSIEGHTMHSEYYHVTESTANTINDAKQQGGRIFAVGTTSARTLETIGSANNGKIVPSSGWTSIFIFPGYEFTILDGLLTNFHLPKSTLIMLVSALSSREFVLAAYEEAVKENYRFFSFGDAMFIKPSHRKESY

SEQ ID NO: 66539 - protein, 340 aa, Filifactor alocis
  misc_feature (1)..(340): tr|D6GTP5|D6GTP5_FILAD S-adenosylmethionine:tRNA ribosy ltransferase-isomerase OS=Filifactor alocis (strain ATC C 35896 / D40 B5) OX=546269 GN=queA PE=3 SV=1
MNTKDFYYDLPEACIAQEPLKQRDSSKLLLLDKKTGEIEHKHFKDITQYLKKGDVLVMNNTRVLPARLFGTKEDTGANIELLLLKRMDLTTWEVMAKPAKRLKIGNIIFFHQTLSAVVKEIKDEGIRIIEFIYDGIFEEILDMLGTMPLPPYIHKKLEDKERYQTVYSKVDGSAAAPTAGLHFTKKLLSELQDIGVQLEYVTLHVGLGTFRPVMVEDVTKHHMHTEYYEIQKDVAQRINQAKAEKRRIICVGTTSVRTLESSARDGRISELSGWTDIFIYPPYRFQMADALITNFHLPESTLLMLVSALANKEFIMHAYKTAIEQNYRFFSFGDAMFIHN

SEQ ID NO: 66540 - protein, 410 aa, Filimonas endophytica
  misc_feature (1)..(410): tr|A0A561ID91|A0A561ID91_9BACT S-adenosylmethionine:tRN A ribosyltransferase-isomerase OS=Filimonas endophytica OX=1500311 GN=FHW48_110194 PE=3 SV=1
MAHPGNLSISNYTYSLPDDRIAVHPLEKRDDSKLLIYQNGRISEDRYRMLHQHLPAEAMLVFNNTKVVEARLYFQKHTGSIIEIFCLEPGGFADITSAMQQTGHVLWKCLVGGAKKWKQGPLEKKIEINNQTITLSATLVERKDDYYLIEFRWSDNHLHFAEVLHAAGSLPLPPYLNRQVEEGDKTRYQTIYAKHDGSVAAPTAGLHFTPELLQQLQQKNIEQHFVTLHVGAGTFKPVKASVMQEHEMHAEFIEIQAAFIRRLIQQLQSGQPVIAVGTTSLRTIESLYWMGVARQQASQPMTGNINLSQWDAYELPQNIPATEALHSLLQWMEAQKMEMLFAKTQIIIAPGYTLRVAQALITNFHQPQSTLLLLVAAIIGEDWRKVYDYALNHEFRFLSYGDGSLLWKKA

SEQ ID NO: 66541 - protein, 349 aa, Filimonas endophytica
  misc_feature (1)..(349): tr|A0A561J5H2|A0A561J5H2_9BACT S-adenosylmethionine:tRN A ribosyltransferase-isomerase OS=Filimonas endophytica OX=1500311 GN=queA PE=3 SV=1
MKLSQFKFDLPLNLIAQNPTKRREDSRMMVVDRKTGNIENRFFREILDYFDDKDTFVVNNTKVFPARMYGRKEKTGAKIEVFLLRELNKPNRLWDVIVDPARKIRVGNKLYFGENDELVAEVIDNTTSRGRTIRFLWEDDEESFKKMLEFLGETPLPKYIKRKPDEEDKERYQTVYAKFEGAVAAPTAGLHFSKELIKRCEIKGVRFAEVTLHTGLGTFRPIEVEDLSKHKMDAEYYRIDEAACKIVNKAKETGHRICSIGTTTMRAMESSFTAQKLLKPSEGWTNTFIHPPYDFNVADSLVTNFHLPKTSLLIMACAFAGYDLIMEAYKKAIKDKYRFFSYGDAMLIL

SEQ ID NO: 66542 - protein, 409 aa, Filimonas lacunae
  misc_feature (1)..(409): tr|A0A173MRN5|A0A173MRN5_9BACT S-adenosylmethionine:tRN A ribosyltransferase-isomerase OS=Filimonas lacunae OX= 477680 GN=SAMN05421788_104284 PE=3 SV=1
MAHPGNLSIVDYTYHLPDDRIAIHPLAQRDESKLLVYKSGKIQESQYRNLASFIPSGSLLVFNNTKVVEARLLFQKHTGSTIEIFCLEPAGFADVTTAMQQTEEVLWKCLVGGAKKWKQGPLEKTIDVDGNPVTLSVTLVEKKDDHCVVQFNWSDKHLHFATILHAAGSLPLPPYLNRQVEEEDKERYQTVYAKHDGSVAAPTAGLHFTPELLQQLQQQNIQQAFVTLHVGAGTFKPVKAATMNEHEMHAEFIEVQASFIQQLIQQLQNNQPVITVGTTSLRTTESLYWMGVKAHALLQSGGASVDIAQWDAYELPQHFTAAEALQHLLQWMQQQQMEVLLAKTQIIIAPGYQLRIAQALVTNFHQPQSTLLLLVAAITGNNWRTIYQYAMDHAFRFLSYGDGSLLWKD

SEQ ID NO: 66543 - protein, 349 aa, Filimonas lacunae
  misc_feature (1)..(349): tr|A0A173MAW3|A0A173MAW3_9BACT S-adenosylmethionine:tRN A ribosyltransferase-isomerase OS=Filimonas lacunae OX= 477680 GN=queA PE=3 SV=1
MKLSQFKFDLPLNLIAQNPTKRREDSRMMVIDRKTGNIENRNFKDILDYFDDKDVFVVNNTKVFPARMYGRKEKTGAKIEVFLLRELNKPNRLWDVIVDPARKIRVGNKLYFGENDELVAEVIDNTTSRGRTIRFLWDEDEESFKKMLEFLGETPLPKYIKRKPDEEDKERYQTVYAKYEGAVAAPTAGLHFSKELIKRCEIKGVRFSEVTLHTGLGTFRPIEVEDLSKHKMDAEYYRIDENACKIVNKAKETGHRICSIGTTTMRAMESSFTAQKLLKPSEGWTNTFIHPPYDFNVADSLVTNFHLPKTSLLIMACAFAGYDLIMEAYKRAIKDKYRFFSYGDAMLIL

SEQ ID NO: 66544 - protein, 409 aa, Filimonas sp.
  misc_feature (1)..(409): tr|A0A2U0ZQL1|A0A2U0ZQL1_9BACT S-adenosylmethionine:tRN A ribosyltransferase-isomerase OS=Filimonas sp. YR581 O X=2135469 GN=C7485_105221 PE=3 SV=1
MAHPGNLSITDYTYSLPDSRIAVHPLAKRDESRLLVYKNGNITESRYSFLDEQLPEGAMLVFNNTKVVEARLLFQKHTGSSIEIFCLEPSGFTDITSAMQQTGQVLWKCLVGGAKKWKQGPLEKEIVIDNHTTTLSATLVEKKDDHCVVLFEWPDARYHFAAVLHAAGSLPLPPYLNRQVEEDDKTRYQTVYAKHDGSVAAPTAGLHFTPELLQRLQQKNIQSQYITLHVGAGTFKPVKAATMQEHEMHAEFIEIQVSFINQLLQQLSSGQPVIAVGTTSLRTIESLYWMGVKVHQTPTLEADALNLHQWDAYELPQNISVHDALSSLLQWMQRQQTDILLAKTQIIIAPGYTLRIAQALITNFHQPQSTLLLLVAAITGENWRTIYQYALDHQFRFLSYGDGSLLWKD

SEQ ID NO: 66545 - protein, 416 aa, Filimonas sp.
  misc_feature (1)..(416): tr|A0A4Q1D0E5|A0A4Q1D0E5_9BACT S-adenosylmethionine:tRN A ribosyltransferase-isomerase OS=Filimonas sp. TTM-71 OX=2508721 GN=ESB13_19955 PE=3 SV=1
MTHPKHLTIQDFTYHLPEDRIARYPLPTRDESKLLVYRNGEITEHRYRTLDEHIPAGSLLVFNNTKVVEARLLFQKATGGVIELFCLEPAEATDITTAMTTTGEVRWKCLVGGAKKWKEEPLVKTIGNNGQPFQLTVHKEEKINDYFIVRFQWDAASLNFADVLHAAGVMPLPPYLNRKAEAADQERYQTIYARHDGSVAAPTAGLHFTPALLEKLAAKQVSTAFVTLHVSAGTFKPVKADTMDAHDMHSEFIEVNAAFIETIIKQLPAPVITVGTTSLRTLESLYWMGVKVKAARDKQLSFTNISVQHLEVHQWDAYELPRDIDAATALNELLLWMQAHDLPVLTARTQIMIAPGYQLRIAQALITNFHQPQSTLLLLVAAIIGMDWRKVYDYAMTHDFRFLSYGDGSLLWNSNK

SEQ ID NO: 66546 - protein, 335 aa, Filobacillus milosensis
  misc_feature (1)..(335): tr|A0A4Y8ISI7|A0A4Y8ISI7_9BACI S-adenosylmethionine:tRN A ribosyltransferase-isomerase OS=Filobacillus milosens is OX=94137 GN=E3U55_07850 PE=3 SV=1
MTLKTFEIPKELNASVPAEYRNGSRDQVKLMVTEGEETSFSEFQNLTNYVKSGDVMIFNNTRTIPAGLKATYKQKEVEFRLSQQIDEFTWEGFVLKEEMMIGEQLIVTPDLTFTIVGYGGEKPLVQLQSNMNSKDTMIGVITLGEPIRYDYINHPYPINTYQTVYGSIPGSMEMPSAGRAFTWDMLNKLKSNGVNIGFIQLYTGLSYYEKDQWPNPSNHPERYNVSQEVVDLVNKAKHEGRRVIAVGTTVVRALESAALNGTLFEQNDEYTNLYVNAKYDRQIVDSLLTGLHEPEASHLDMLTNWIEKDHLIDLYHDAMKRRFLWHEFGDLHLIL

SEQ ID NO: 66547 - protein, 342 aa, Filobacillus milosensis
  misc_feature (1)..(342): tr|A0A4Y8IWX6|A0A4Y8IWX6_9BACI S-adenosylmethionine:tRN A ribosyltransferase-isomerase OS=Filobacillus milosens is OX=94137 GN=queA PE=3 SV=1
MNIEDFDFELPEELIAQTPLENRANSRLMVLNRKEESIDHRNFYHILDYFNEGDCLVLNNTKVLPARLFGHKEDTGGKVEVLLLNQQEGDEWEVLVKPAKKVKEGTRIVFGDGLLSAECIGLKEHGGRVIRFEYNGIFLEVLDQLGEMPLPPYIKEQLDDRDRYQTVYAEEVGSAAAPTAGLHFTEELLDQIKQKGVKIAYITLHVGLGTFRPVQVDNIEEHDMHSEFYQMSEDTASLLNDVKNSGNKIYAVGTTSVRTLETIARDESGQFKAKSGWTDIFIYPPYQFRAIDAMITNFHLPKSTLIMLVSAFANKEFILEAYYKAVEERYRFFSFGDAMLIL

SEQ ID NO: 66548 - protein, 357 aa, Filomicrobium sp.
  misc_feature (1)..(357): tr|A0A2D7FDK0|A0A2D7FDK0_9RHIZ S-adenosylmethionine:tRN A ribosyltransferase-isomerase OS=Filomicrobium sp. OX= 2024831 GN=queA PE=3 SV=1
  misc_feature (43)..(43): Xaa can be any naturally occurring amino acid
  misc_feature (50)..(50): Xaa can be any naturally occurring amino acid
  misc_feature (81)..(81): Xaa can be any naturally occurring amino acid
  misc_feature (93)..(93): Xaa can be any naturally occurring amino acid
  misc_feature (240)..(240): Xaa can be any naturally occurring amino acid
  misc_feature (334)..(334): Xaa can be any naturally occurring amino acid
  misc_feature (357)..(357): Xaa can be any naturally occurring amino acid
MRTDQFDFDLPDDLIALRPAEPRDSARLLVVGQDATGDRSVRXLPNELRXGDVLVFNNTRVIPAALEGVRIRGDTQARIQXNLHKRIAADRWXAFARPARKLNVGDRVRFGDGNSSCLMGALDATVAGRYQGGEIEFQFDLSGPTLDDAISNVGAMPLPPYIASRRQADVQDASSYQTVYAEHDGAVAAPTAGLHFTEELFSNLADRGIETAYLTLHVGAGTFLPVKADEIDAHKMHAEXGEVPPELAARLNEIRSSGGRLIAVGTTVVRLLESATTTDGEIQPFIGDTDIFISPGHSFRAIDGMMTNFHLPRSTLFMLVSAFVGLERMQQAYXHAIQSKYRFYSYGDSSLLWPKAX

SEQ ID NO: 66549 - protein, 368 aa, Fimbriiglobus ruber
  misc_feature (1)..(368): tr|A0A225DWT9|A0A225DWT9_9BACT S-adenosylmethionine:tRN A ribosyltransferase-isomerase OS=Fimbriiglobus ruber O X=1908690 GN=FRUB_04687 PE=3 SV=1
MIAADSPVQRPPLAKLLVVDRFGAMTHAVRSALVEFLRPGDLVVANDAATLPASLQGVHVRSGEPVEVRLAGRRSLAADDVRQFVAVVFGAGDYHARTEDRPPPPVLDPGDRLTLSPLVATVERRLGHARLVGLRFDGTPDAIWAGLARHGRPIQYAHMPVPLALWDVWTPVAGPPVAFESPSAGFALDWHVLEGFRARGVGFATLTHAAGISSTGDPELDRRLPFDEPYHIPAATALAVRLTRARGSRVVAIGTTVVRALEHAALADGRVRAGDGVATQRIGAATRLCVADAILSGTHEPDTSHYELLRAFAADAVLDRVNVALQAGDYRTHEFGDSVFIEREYGRREYFSPQICADERGSESGILF

SEQ ID NO: 66550 - protein, 343 aa, Fimbriiglobus ruber
  misc_feature (1)..(343): tr|A0A225DGB5|A0A225DGB5_9BACT S-adenosylmethionine:tRN A ribosyltransferase-isomerase OS=Fimbriiglobus ruber O X=1908690 GN=queA PE=3 SV=1
MSDLFFDYDLPEHLVAQEPAHPRDAARLLVARRDTGTLEHRVFHDLPDLLRPGDLIVLNDTKVLPARVIGRRAKTGGKWEGLFLHENPSGEWELLAQTRGFPEVGETLIVEPGELKLVLTGRTTDRHWLVRPDPPGTPADLLARHGQVPLPPYIRKGRARTDDQARYQTVYAAHTGSVAAPTAGLHFTPELFERLTATGIRTARVTLHVGLGTFAPVKTQDPTAHPIHAEWCEVGPETVAAVVETRARGGRVVAVGTTTTRTLESAARGGTLVPWRGDTSLFIRPPFNFQVLGGLVTNFHLPKTTLLLLAQAFAGTDLLRAAYREAVAREYRFYSYGDAMVIL

SEQ ID NO: 66551 - protein, 316 aa, Fimbriimonas ginsengisoli
  misc_feature (1)..(316): tr|A0A068NRL0|A0A068NRL0_9BACT S-adenosylmethionine:tRN A ribosyltransferase-isomerase OS=Fimbriimonas ginsengi soli Gsoil 348 OX=661478 GN=queA PE=3 SV=1
MDRAASRLLHLDRSTGEVRHRAFREVVDLLREGDLLVLNDTRVSAVRLIGHKPTGGTVEALLLREEAPGVYEALIKPGRRMRPGAEVLFEGELQAEVLEEREEGRKLLQFAPQADLKDRLSTFGLAPLPPYIHEALRDKERYQTVYGRHEGSAAAPTAGLHFTPEIFDVLARKGVETARVTLHVGLDTFRPVQAEDPSDHPIHGERCDISQETASKINGARGRIIAVGTTSVRTLETFAVDRRRVEPGERVSRLYIRPGYDFRIVDGMFTNFHMPRTTMLMMISAMAGRENVMKAYREALSESYRFLSFGDSMLIL

SEQ ID NO: 66552 - protein, 345 aa, Finegoldia magna
  misc_feature (1)..(345): sp|B0S1J2|QUEA_FINM2 S-adenosylmethionine:tRNA ribosylt ransferase-isomerase OS=Finegoldia magna (strain ATCC 2 9328) OX=334413 GN=queA PE=3 SV=1
MNTDDFDYELDEKFIAQTPLDKRDESKLMVMDRFNGNTEIKKFYNIIDYLNPGDVLVCNNTRVIPARLFGHRPEKEEKIEVLLLQQTEDKWECLVKPGKKMKLNQVIEFSDSVSAKVVDITEDGSRILKFEYEGIFEERLDELGNMPLPPYIKEKLNDKERYQTVYSKHNGSAAAPTAGLHFTNELLEKIKDKGIYVVFLTLHVGLGTFRPVKVDDVKDHHMHSEYYTISQETVDIINRQKSKGHNIIAVGTTSVRTLETVTHNNNSKLVAESGWTDIFIYPGFEFNIVDSLITNFHLPKSTLMMLVSAFSKKEYIFDAYEKAKQNDFRFFSFGDAMFINGGRNV

SEQ ID NO: 66553 - protein, 345 aa, Finegoldia magna
  misc_feature (1)..(345): tr|A0A233VPP5|A0A233VPP5_FINMA S-adenosylmethionine:tRN A ribosyltransferase-isomerase OS=Finegoldia magna OX=1 260 GN=queA PE=3 SV=1
MNTDDFDYELDEKFIAQTPLDKRDESKLMVMDRFNGNTEIKKFYNIIDYLNPGDVLVCNNTRVIPARLFGHRPGKEEKIEVLLLQQTEDKWECLVKPGKKMKLGQVIEFSDKVSAKVVDITEDGSRILKFDYEGIFEERLDELGNMPLPPYIKEKLDDKERYQTVYSKHKGSAAAPTAGLHFTNELLEKIKEKGIYVVFLTLHVGLGTFRPVKVDDVKDHHMHSEYYTISQEAVDIINRQKSEGHKIIAVGTTSVRTLETVTHNNNSKLVAESGWTDIFIYPGFEFNIVDSLITNFHLPKSTLMMLVSAFSKKEYIFDAYEKAKQNDFRFFSFGDAMFINGGKNV

SEQ ID NO: 66554 - protein, 341 aa, Firmicutes bacterium
  misc_feature (1)..(341): tr|A0A373Q3S2|A0A373Q3S2_9FIRM S-adenosylmethionine:tRN A ribosyltransferase-isomerase OS=Firmicutes bacterium AM55-24TS OX=2292896 GN=queA PE=3 SV=1
MKRTDFYYDLPEELIAQEPLKDRSSSRLMILDKNTGEIEHKHFYDIVDELNEGDALILNDTKVLPARLYGQKEGTGGAIEFLLLHKHTLDTWEVILKPGRKAKPGARFVFGNGELKAEVLDVINDGNRLVKFEYEGVFEEVLDKLGEMPLPHYITHKLEDKNRYQTVYAKNPGSAAAPTAGLHFTPELLEKIKAKGVNIGYVTLHVGLGTFRPVKADDILEHKMHSEFYILPQETADLVNKTKSNGKRVISVGTTATRVLETVGMENEKLEQKTGWTNIFIYPGKEFHVIDALITNFHLPESTLIMLVSALAGRENVLNAYKTAVQEKYRFFSFGDAMLIK

SEQ ID NO: 66555 - protein, 353 aa, Firmicutes bacterium
  misc_feature (1)..(353): tr|A0A1Q6S181|A0A1Q6S181_9FIRM S-adenosylmethionine:tRN A ribosyltransferase-isomerase OS=Firmicutes bacterium CAG:65_45_313 OX=1897036 GN=queA PE=3 SV=1
MAETTELKKSDFYFDLPQELIAQDPLEDRSSSRLLVLDKNTGEISHHIFRDIIDYLHPGDCLVLNNTKVIPARLLGEREGTGGHVEVLLLKRKEADVWETLVKPGKKCKPGQRLSFGDGLLKAEVLETVEEGNRLIRFEYEGIFEEVLDKLGEMPLPPYITHKLKDKNRYQTVYAKYEGSAAAPTAGLHFTRELLQQIADKGIKIAYVTLHVGLGTFRPVKEENVLEHHMHSEYYQVTEEAANTINETKRNGGRVICVGTTSCRTVESAADEQGMVQPGCDNTEIFIYPGYRFKVLDALITNFHLPESTLVMLVSALAGREHILHAYEEAIREKYRFFSFGDAMFIADLKGEK

SEQ ID NO: 66556 - protein, 408 aa, Fischerella major
  misc_feature (1)..(408): tr|A0A1U7H583|A0A1U7H583_9CYAN S-adenosylmethionine:tRN A ribosyltransferase-isomerase OS=Fischerella major NIE S-592 OX=210994 GN=queA PE=3 SV=1
MQEQLAKTNSHLTSKQKIENSELDLSLAGYDYELPTELIAQNPAVPRDSSRLLVVSSPNVDKDDTLQHRIFRDLPEILRPGDLLVMNNTRVIPARLYGEKLTGAEVEVLLLEERQHNCWLALVKPGKRFKHGSKIVFTAKGKTDGEIGRWGENFHPTTPPPHLPITEAPLPHHLLTATVLETDAATGGRLLQFDLPQGVSLLQLLDVFGEVPLPPYITNTEAQSEQYQTVYAQNPGAVAAPTAGLHFTPELLEKLRQQNINQAFVTLHVGVGTFRPVEVENVTTHTMHEEWIEVPPSTVEQIRATKAAGGRIIAVGTTVVRALEGAATTGELQPFCGKTNLFIYPGYQWRVVEGMITNFHLPRSSLLMLVSALIGRQRLLNIYQEAIVSRYRFYSFGDAMLILPEARI

SEQ ID NO: 66557 - protein, 398 aa, Fischerella muscicola
  misc_feature (1)..(398): tr|A0A2N6JUK0|A0A2N6JUK0_FISMU S-adenosylmethionine:tRN A ribosyltransferase-isomerase OS=Fischerella muscicola CCMEE 5323 OX=2019572 GN=queA PE=3 SV=1
MQEQLAKTNSHLTSKQKTENSELDLSLAGYDYELPTELIAQNPAVPRDSSRLLVVNSPNVGKENTLQHRIFRELPEILRPGDLLVMNNTRVIPARLYGEKSTGAEVEVLLLEERQHNCWLALVKPGKRFKHGSKIVFTAKVDTDKEIGRWGERFHPTTPLPDRLLSATVLETDAATGGRLLQFDLPEEVSLLQLLDVFGEVPLPPYITTTEAQSEQYQTVYAQNPGAVAAPTAGLHFTPQLLEKLRQQNINQAFVTLHVGVGTFRPVEVENVTTHTMHEEWIEVPPSTVEQIRATKAAGGRIIAVGTTVVRALEGAATTGELQPFCGKTNLFIYPGYQWRVVEGMITNFHLPRSSLLMLVSALIGRQRLLNIYQEAIASRYRFYSFGDAMLVLPEARI

SEQ ID NO: 66558 - protein, 408 aa, Fischerella sp.
  misc_feature (1)..(408): tr|A0A0S3TSX2|A0A0S3TSX2_9CYAN S-adenosylmethionine:tRN A ribosyltransferase-isomerase OS=Fischerella sp. NIES- 3754 OX=1752063 GN=queA PE=3 SV=1
MQEQLAKTNSHLTSKQKTENSELDLSLAGYDYELPTELIAQNPAVPRDSSRLLVVSSPNVDKDDTLQHRIFRDLPEILRPGDLLVMNNTRVIPARLYGEKLTGAEVEVLLLEERQHNCWLALVKPGKRFKHGSKIVFTAKGKTDGEIGRWGENFHPTTPPPHLPITEAPLPHHLLTATVLETDAATGGRLLQFDLPQGVSLLQLLDVFGEVPLPPYITNTEAQSEQYQTVYAQNPGAVAAPTAGLHFTPELLEKLRQQNINQAFVTLHVGVGTFRPVEVENVTTHTMHEEWIEVPPSTVEQIRATKAAGGRIIAVGTTVVRALEGAATTGELQPFCGKTNLFIYPGYQWRVVEGMITNFHLPRSSLLMLVSALIGRQRLLNIYQEAIVSRYRFYSFGDAMLILPEARI

SEQ ID NO: 66559 - protein, 390 aa, Fischerella sp.
  misc_feature (1)..(390): tr|A0A1Z4TN12|A0A1Z4TN12_9CYAN S-adenosylmethionine:tRN A ribosyltransferase-isomerase OS=Fischerella sp. NIES- 4106 OX=2005456 GN=queA PE=3 SV=1
MQEQLTKTNSHLRSEQTPENSELDLSLAGYDYELPTELIAQNPVVPRDSSRLLVVNSLNVGIDTIPQHRIFRNLPEILRPGDLLVMNNTRVLPARLYGKKLTGAEVEVLLLEERQHNRWLALVKPGKRFKRGSQIVFTAKVNTDGDHPTTPLPYHSLTATVIATDTATGGRLLQFELPEEVSLLQLLDVFGEIPLPPYITTTEAQSEQYQTVYAQNPGAVAAPTAGLHFTPELLQKLREQNINQAFVTLHVGVGTFRPVEVENLTTHTMHEEWIEVPQNTVEQIRATKAAGGRIIAVGTTVVRALEGSATKDELQPFCGKTNLFIYPGYKWRVVEGMITNFHLPRSSLLMLVSALIGRQRLLNIYQEAIASRYRFYSFGDAMLILPEATI

SEQ ID NO: 66560 - protein, 416 aa, Fischerella thermalis
  misc_feature (1)..(416): tr|A0A2N6LIW5|A0A2N6LIW5_9CYAN S-adenosylmethionine:tRN A ribosyltransferase-isomerase OS=Fischerella thermalis CCMEE 5319 OX=2019665 GN=queA PE=3 SV=1
MQEQLAKTNSHLTSKQKIENSELDLSLAGYDYELPTELIAQNPAFPRDSSRLLVVSSANVDKDDTLQHRIFRDLPEILRPGDLLVMNNTRVIPARLYGEKLTGAEVEVLLLEERQHNCWLALVKPGKRFKHGSKIVFTAKGKTDEEMGKLGDGEIGRWGEKFHPTTPPPHLPITEAPSPHHLLTATVLETDAATGGRLLQFDLPEEVSLLQLLEVFGEVPLPPYITNTEAQSEQYQTVYAQNPGAVAAPTAGLHFTPELLEKLRQQNINQAFVTLHVGVGTFRPVEVENVTTHTMHEEWIEVPPSTVEQIRATKAAGGRIIAVGTTVVRALEGAATTGELQPFCGKTNLFIYPGYQWRVVEGMITNFHLPRSSLLMLVSALIGRQRLLNIYQEAIASRYRFYSFGDAMLILPEARI

SEQ ID NO: 66561 - protein, 416 aa, Fischerella thermalis
  misc_feature (1)..(416): tr|A0A2N6MBQ5|A0A2N6MBQ5_9CYAN S-adenosylmethionine:tRN A ribosyltransferase-isomerase OS=Fischerella thermalis CCMEE 5205 OX=2019671 GN=queA PE=3 SV=1
MQEQLAKTNSHLTSKQKIENSELDLSLAGYDYELPTELIAQNPAFPRDSSRLLVVNSPNVDKDNTLQHRIFRDLPEILRPGDLLVMNNTRVIPARLYGEKLTGAEVEVLLLEERQHNCWLALVKPGKRFKHGSKIVFTAKGKTDEEMGRLGYGEIGRWGEKFHPTTPPPHLPITEAPSPHHLLTATVLETDAATGGRLLQFDLPEGVSLLQLLDVFGEVPLPPYITNTEAQSEQYQTVYAQNPGSVAAPTAGLHFTPELLEKLRQQNINQAFVTLHVGVGTFRPVEVENVTTHTMHEEWIEVPPSTVEQIRATKAAGGRIIAVGTTVVRALEGAATTGELQPFCGKTNLFIYPGYQWRVVEGMITNFHLPRSSLLMLVSALIGRQRLLNIYQEAIASRYRFYSFGDAMLILPEARI

SEQ ID NO: 66562 - protein, 349 aa, Flagellimonas aquimarina
  misc_feature (1)..(349): tr|A0A316KUH5|A0A316KUH5_9FLAO S-adenosylmethionine:tRN A ribosyltransferase-isomerase OS=Flagellimonas aquimar ina OX=2201895 GN=queA PE=3 SV=1
MKLSNFNFELPKELLAEYPAENRDESKLMVIHRETGKIEHKMFKDLIDYFDEGDVMALNNTKVFPARLYGNKEKTGARIEVFLLRELNQEQRLWDVLVDPARKIRIGNKLYFGEDESLVAEVIDNTTSRGRTLRFLYDGSYTDFRRKLRELGETPLPKYIKRGVEPEDEERYQTIYAKHEGAVAAPTAGLHFSKHLLKRLEIKGINFAEVTLHVGLGTFNPVEVEDLSKHKMDSEELVIDEKATEIINNAKENKKRICAVGTTVMRGLESAVSSGHTLNTFEGWTNKFIFPPYDFSIANCMITNFHLPKSTLLMMVSAFIGHDLMKKAYKQAILEGYRFYSYGDAMLVI

SEQ ID NO: 66563 - protein, 349 aa, Flagellimonas eckloniae
  misc_feature (1)..(349): tr|A0A0Q1H823|A0A0Q1H823_9FLAO S-adenosylmethionine:tRN A ribosyltransferase-isomerase OS=Flagellimonas eckloni ae OX=346185 GN=queA PE=3 SV=1
MKLSNFNFELPTELLAEYPAENRDESKLMVIHKDTGKIEHKMFKDLINYFDEGDVMVLNNTKVFPARLFGNKEKTGARIEVFLLRELNQEQRLWDVLVDPARKIRIGNKLYFGDDESVVAEVIDNTTSRGRTLRFLYDGSYIDFRRKLRELGETPLPKYIKRGVEPEDEERYQTIYAKYEGAVAAPTAGLHFSKHLLKRLEIKGVDFAEVTLHVGLGTFNPVEVEDLSKHKMDSEELVIDEKATEVVNNAQKEKKKICAVGTTVMRGLESAVSSGHTLNTFEGWTNKFIFPPYDFSIANCMITNFHLPKSTLLMMVSAFMGHDLMKKAYKQAILEGYRFYSYGDAMLII

SEQ ID NO: 66564 - protein, 349 aa, Flagellimonas flava
  misc_feature (1)..(349): tr|A0A1M5N543|A0A1M5N543_9FLAO S-adenosylmethionine:tRN A ribosyltransferase-isomerase OS=Flagellimonas flava O X=570519 GN=queA PE=3 SV=1
MKLSNFNFELPKELLAEYPAENRDESKLMVIHRDTGKIEHKMFKDLINYFDEGDVMVLNNTKVFPARLYGNKEKTGARIEVFLLRELNQEQRLWDVLVDPARKIRIGNKLYFGEDESLVAEVIDNTTSRGRTLRFLYDGSYTDFRRKLRQLGETPLPKYIKRDVEPEDEERYQTIYAKYEGAVAAPTAGLHFSKHLLKRLEIKGVDFAEVTLHVGLGTFNPVEVEDLSKHKMDSEELVIDEKATEVVNNAKQSKRRICAVGTTVMRGLESAVSSEHTLNTFEGWTNKFIFPPYDFSIANCMITNFHLPKSTLLMMVSAFIGHDLMKKAYKQAILEQYRFYSYGDAMLII

SEQ ID NO: 66565 - protein, 349 aa, Flagellimonas maritima
  misc_feature (1)..(349): tr|A0A2Z4LVC2|A0A2Z4LVC2_9FLAO S-adenosylmethionine:tRN A ribosyltransferase-isomerase OS=Flagellimonas maritim a OX=1383885 GN=queA PE=3 SV=1
MKLSNFNFELPKELLAEYPAENRDESKLMVIHRETGKIEHKMFKDLIDYFDEGDVMALNNTKVFPARLYGNKEKTGARIEVFLLRELNQEQRLWDVLVDPARKIRIGNKLYFGDDESLVAEVIDNTTSRGRTLRFLYDGSYTDFRRKLRELGETPLPKYIKRDVEPEDEKRYQTIYAKHEGAVAAPTAGLHFSKHLLKRLEIKGVDFAEVTLHVGLGTFNPVEVEDLSKHKMDSEELVIDEKATEIINNAKKNKQRVCAVGTTVMRGLESAVSSDHTLNTFEGWTNKFIFPPYEFSIANCMITNFHLPKSTLLMMVSAFVGHDLMKKAYKQAILEGYRFYSYGDAMLVL

SEQ ID NO: 66566 - protein, 349 aa, Flagellimonas pacifica
  misc_feature (1)..(349): tr|A0A285MUK0|A0A285MUK0_9FLAO S-adenosylmethionine:tRN A ribosyltransferase-isomerase OS=Flagellimonas pacific a OX=1247520 GN=queA PE=3 SV=1
MKLSNFNFELPKELLAEYPAENRDESKLMVIHRETGKIEHKMFKDLIDYFDEDDVMVLNNTKVFPARLYGNKEKTGARIEVFLLRELNQEQRLWDVLVDPARKIRIGNKLYFGEDESLVAEVIDNTTSRGRTLRFLYDGSYTDFRRKLRELGETPLPKYIKRDVEPEDEERYQTIYAKYEGAVAAPTAGLHFSKHLLKRLEIKGVDFAEVTLHVGLGTFNPVEVEDLSKHKMDSEELVIDEKATEVVNNAKTNKKRVCAVGTTVMRGLESAVSSEHTLNTFEGWTNKFIFPPYDFSIANCMITNFHLPKSTLLMMVSAFVGHDLMKKAYKQAILEGYRFYSYGDAMLVI

SEQ ID NO: 66567 - protein, 349 aa, Flagellimonas sp.
  misc_feature (1)..(349): tr|A0A5C8V5C5|A0A5C8V5C5_9FLAO S-adenosylmethionine:tRN A ribosyltransferase-isomerase OS=Flagellimonas sp. 176 CP5-101 OX=2603628 GN=queA PE=3 SV=1
MKLSNFSFELPKELLAEYPAENRDESKLMVIHRESGKIEHKMFKDLINYFDEGDVMALNNTKVFPARLYGNKEKTGARIEVFLLRELNQEQRLWDVLVDPARKIRIGNKLYFGDDESLVAEVIDNTTSRGRTLRFLYDGSYTDFRRKLRELGETPLPKYIKRGVEPEDEERYQTIYAKHEGAVAAPTAGLHFSKHLLKRLEIKGVKFAEVTLHVGLGTFNPVEVEDLSKHKMDSEELVIDEKATEIINNAKQEKRRICAVGTTVMRGLESAVSSGHTLNTFEGWTNKFIFPPYEFSIANCMITNFHLPKSTLLMMVSAFIGHDLMKKAYKQAILEGYRFYSYGDAMLII

SEQ ID NO: 66568 - protein, 348 aa, Flammeovirga kamogawensis
  misc_feature (1)..(348): tr|A0A553GF20|A0A553GF20_9BACT S-adenosylmethionine:tRN A ribosyltransferase-isomerase OS=Flammeovirga kamogawe nsis OX=373891 GN=queA PE=3 SV=1
MKLSQFQFDLPTDLIAQYPAENRDESRLMVLHRATGKIEHKMFKDIVDYFDEGDVLVMNNTKVFPARLYGNKEKTGAKIEVFLLRELNKESHLWDVLVDPARKIRVGNKLYFGDGSLVAEVIDNTTSRGRTIRFLVDGEDEEFYKTIEELGETPIPRDLEREAEASDRDRYQTIFAEKKGAVAAPSAGLHFTPQIAKRLEIKSVEMTPITLHVGLGAFRDVDVEDLTKHKMDSEHYEVGAETVDVVNKALGEKKNVCAIGTTALRSLETSVSASNTLKANEGWTDKFIFPPYDFKIVSSMVTGFHKPKSTLLMMAAAFGGYDLMMKAYEEAIKEKYRFLSYGDAMLIL

SEQ ID NO: 66569 - protein, 409 aa, Flammeovirga kamogawensis
  misc_feature (1)..(409): tr|A0A553GJI0|A0A553GJI0_9BACT S-adenosylmethionine:tRN A ribosyltransferase-isomerase OS=Flammeovirga kamogawe nsis OX=373891 GN=queA PE=3 SV=1
MDKDIQLPQIDLNNYQYDLPTGRIAKHPHSPRDESKLMLYKNGNISHKVFKDIVGELDADYTLFFNNTKVLPARLYFQKETGANIEVFLLNPIKPTRDISAAMLAESGTVWECAIGNYKRWKDQSLVSAVNVEGEIVKLTVSHDDRTKRFVKFEWDNPSLKFVDIISAAGNTPLPPYIKRAATEEDKDTYQTVYSKNEGAVAAPTAGLHFTKDVLAKLAAKGVKEEEVTLHVSAGTFKPISADIVTDHEMHNEQVIVTQENIKALIDAKKVACVGTTSMRTLESTYWFGVRLIHEGDTATFDIHKLEAYQKVAEHSSLPSRQESFRAVLDYMIKKDISTLSGETSIFIMPGYQFRVIDALVTNFHLPSTTLVLLIAAFIGEDWRKVYNQALDNEYRFLSYGDSSLLFRN

SEQ ID NO: 66570 - protein, 348 aa, Flammeovirga pacifica
  misc_feature (1)..(348): tr|A0A1S1Z1S3|A0A1S1Z1S3_9BACT S-adenosylmethionine:tRN A ribosyltransferase-isomerase OS=Flammeovirga pacifica OX=915059 GN=queA PE=3 SV=1
MKLSQFQFDLPSDLIAQYPAENRDEARLMVLHRKTGEIEHRLFKDIVEYFDEGDCLVMNDTKVFPARLYGNKEKTGAKIEVFLLRELNKESHLWDVLVDPARKIRVGNKLYFGDGSLVAEVIDNTTSRGRTIRFLVDGEDEEFYKTIEELGETPIPRDLEREAEPSDRDRYQTIFAEKKGAVAAPSAGLHFTPQIAKRMEIKSVEITPITLHVGLGAFRDVDVEDLTKHKMDSEHYSVGQETVDIVNQALTEKKNICAVGTTALRSLETSVSASNTLKANEGWTDKFIFPPYDFKIVSSMVTGFHKPKSTLLMMASAFGGYDLMMRAYEEAIKEKYRFLSYGDAMLIL

SEQ ID NO: 66571 - protein, 404 aa, Flammeovirga pacifica
  misc_feature (1)..(404): tr|A0A1S1Z5E5|A0A1S1Z5E5_9BACT S-adenosylmethionine:tRN A ribosyltransferase-isomerase OS=Flammeovirga pacifica OX=915059 GN=queA PE=3 SV=1
MKLPEINLDDYQYELPNERIAAHPANPRDSSKLMMYKEGEIEHKVFKEITNELNSDYTLFFNNTKVLPARLYFKKPTGAQIEVFLLNPIAPTRDISAAMLEKSGTIWECAIGNFKRWKEDKLEAAVQTEKGIVKLTVSHEDRDKRFVKFEWEEESLNFVDIISAAGNTPLPPYIKRTATEDDKETYQTVYSKNEGAVAAPTAGLHFTNEVLDILKNQGVDEQEVTLHVSAGTFKPITADKVTDHEMHNEQIIITKENVKALINAHKVACVGTTSMRTLESSYWYGVRLLLDNNTTFDIHKLEAYERMESGATLPTRQESFSAILKYMEENNLDNIHGETSIFIMPGYQFQVIDTLVTNFHLPSTTLVLLIAAFIGEDWRKVYQAALDNDYRFLSYGDSSILFRK

SEQ ID NO: 66572 - protein, 371 aa, Flammeovirga sp.
  misc_feature (1)..(371): tr|A0A1B1FPZ9|A0A1B1FPZ9_9BACT S-adenosylmethionine:tRN A ribosyltransferase-isomerase OS=Flammeovirga sp. MY04 OX=1191459 GN=MY04_0839 PE=3 SV=1
MVYKEGNIEHKVFREITKELNSDYTLFFNNTKVLPARLYFKKPTGAQIEVFLLNPIAPTRDISAAMLEKSGTIWECAIGNFKRWKEDKLEAAVQTEKGIVKLTVSHEDREKRYVKFEWEEESLNFVDIISAAGNTPLPPYIKRTATEDDKETYQTVYSKNEGAVAAPTAGLHFTNEVLDVLKNQGVDEQEVTLHVSAGTFKPITADKVTDHDMHNEQIIITKENVKALIEANKVACVGTTSMRTLESSYWYGVRLLLDNNSTFDIQKLEAYERMESGVTLPSRQESFGAILKHMEEHNLDTIHGETSIFIMPGYQFQVIDTLVTNFHLPSTTLVLLIAAFIGEDWRKVYQAALDNDYRFLSYGDSSILFRK

SEQ ID NO: 66573 - protein, 348 aa, Flammeovirga sp.
  misc_feature (1)..(348): tr|A0A150AEM5|A0A150AEM5_9BACT S-adenosylmethionine:tRN A ribosyltransferase-isomerase OS=Flammeovirga sp. SJP9 2 OX=1775430 GN=queA PE=3 SV=1
MKLSQFQFDLPKDLIAQYPEENRDDARLMVLHRKTGEIEHRKFRDIVEYFDDGDVLVMNDTKVFPARLYGNKEKTGAKIEVFLLRELNKESHLWDVLVDPARKIRVGNKLYFGDGSLVAEVIDNTTSRGRTIRFLVDGEEEEFYRTIEELGETPIPRDLGREAEPSDKDRYQTIFAAKKGAVAAPSAGLHFTPQIAKRFEIKSVDITPITLHVGLGAFRDVDVEDLTKHKMDSEHYRVGEETVEIVNKALENKKNVCAIGTTVLRSLETSVSASNSLKGNEGWTDKFIFPPYDFKIVNSMVTGFHKPKSTLLMMATAFGGYDLVMRAYEEAIKEKYRFLSYGDAMLIL

SEQ ID NO: 66574 - protein, 255 aa, Flammeovirga yaeyamensis
  misc_feature (1)..(255): tr|B1A197|B1A197_9BACT S-adenosylmethionine:tRNA ribosy ltransferase-isomerase (Fragment) OS=Flammeovirga yaeya mensis OX=367791 PE=3 SV=1
EWEEESLNFVDIISAAGNTPLPPYIKRTATEDDKETYQTVYSKNEGAVAAPTAGLHFTNEVLDVLKNQGVDEQEVTLHVSAGTFKPITADKVTDHDMHNEQIIITKENVKALIEANKVACVGTTSMRTLESSYWYGVRLLLDNNSTFDIQKLEAYERMESGVTLPSRQESFGAILKHMEEHNLDTIHGETSIFIMPGYQFQVIDTLVTNFHLPSTTLVLLIAAFIGEDWRKVYQAALDNDYRFLSYGDSSILFRK

SEQ ID NO: 66575 - protein, 158 aa, Flammeovirgaceae bacterium
  misc_feature (1)..(158): tr|A0A2D9TP25|A0A2D9TP25_9BACT S-adenosylmethionine:tRN A ribosyltransferase-isomerase OS=Flammeovirgaceae bact erium OX=2026740 GN=CMB87_04630 PE=3 SV=1
  misc_feature (17)..(17): Xaa can be any naturally occurring amino acid
  misc_feature (92)..(92): Xaa can be any naturally occurring amino acid
MIIKCILKKLLFQKKNXSNLKKSKNIIAVGTTSLRTLESLYFLGIKLSNKNTDINIEQYPYMKNHKKYNKNEICNIILKYMNSNNLNFIKFXSSLFIIPGYNFKFCNQLITNFHYPKSTLILLIAAFVGEDWKKIYKFATKKNFRFLSYGDSSLLFKK

SEQ ID NO: 66576 - protein, 348 aa, Flammeovirgaceae bacterium
  misc_feature (1)..(348): tr|A0A1Z9SD10|A0A1Z9SD10_9BACT S-adenosylmethionine:tRN A ribosyltransferase-isomerase OS=Flammeovirgaceae bact erium TMED262 OX=1986699 GN=queA PE=3 SV=1
  misc_feature (68)..(68): Xaa can be any naturally occurring amino acid
MKLSEFDFKLAATRTAIHPAANRDESRLMILHKKTGKIEHKQFKDIIKFFKEDDVLVLNDTKVFPARXYGQKEKTGAKIEVFLLRELNPELNLWDVLVDPARKIRVGNKLYFGEGELVAEVIDNTTSRGRTIRFIPEDTERDFHDIIQEYGETPLPKEIKRKVDKKDEERFQTVYAKNIGAVAAPAAGLHFTDILLKKLILKGVKIVKITSHTGLGTFKDIDVEDLTKHKMDSENFSVPVETEIEVNRALDNGNRIFAVGTSTMKTLETAVSASNRLKAKSGWTDKFIFPPYDFKICGAMITNFHSPKSTLLMMASAYGGFDQVMKVYKVAIKEKYMFHTYGDALMII

SEQ ID NO: 66577 - protein, 400 aa, Flaviaesturariibacter sp.
  misc_feature (1)..(400): tr|A0A4R4E2U8|A0A4R4E2U8_9BACT S-adenosylmethionine:tRN A ribosyltransferase-isomerase OS=Flaviaesturariibacter sp. 17J68-15 OX=2545761 GN=queA PE=3 SV=1
MTDFPISAFDYPLPDDRIAAFPLAERDASRLLVWESGKISDRHFHNLAEELPGGATLVVNDTRVIEARIFFQKASGGIIELFLLEPQQPAEMTAALQSEGPVQWRCLIGGASKWKAGQVLTKTLTVQGADCVLEARFVSKEPDEFIVDLRWAPPLPFAEVLHAAGAIPLPPYIRRAAEGADAERYQTIFARQQGSVAAPTAALHFTPRVLEALEAKSIRRTPVTLNVGAGTFKPVKSDTIGGHPMHGEYFSVMASSLRELVDATRLVAVGTTSLRTLESLYWLGVKTAAAGMLQTELGQWEAYELETPFSYRDSLTVLLRELEKNGWNELHGRTSLLIRPGYRFQSAEALLTNFHQPKSTLVCLVAAFIGEDWRRVYTHALEQGYRFLSYGDSSLLWRKS

SEQ ID NO: 66578 - protein, 349 aa, Flaviaesturariibacter sp.
  misc_feature (1)..(349): tr|A0A4R1B6Q4|A0A4R1B6Q4_9BACT S-adenosylmethionine:tRN A ribosyltransferase-isomerase OS=Flaviaesturariibacter sp. 17J68-12 OX=2502780 GN=queA PE=3 SV=1
MKLSQFKFDLPLNLIAQNPSKKREDSRMMVINRKTGEIENRNFRDILDYFDDKDAFVVNNTKVFPARMYGRKEKTGAKIEVFLLRELNKEHRLWDVIVDPARKIRVGNKLYFGDDEDLVAEVIDNTTSRGRTIKFLFDGDDNAFRLILEKHGETPLPKYIKRKPDDEDRERYQTVYAKYEGAVAAPTAGLHFSRELIKRCEIKGVRFAEVTLHTGLGTFRPIEVEDLSKHKMDAEYYRIEDTACKIVNKAKETGHRVCSIGTTTMRALESSFTAQRMLKPSEGWTNTFIHPPYEFNIADALVTNFHLPKTSLLIMACAFAGYDLMMEAYKKAIKEKYRFFSYGDAMLII

SEQ ID NO: 66579 - protein, 419 aa, Flavihumibacter petaseus
  misc_feature (1)..(419): tr|A0A0E9N6J6|A0A0E9N6J6_9BACT S-adenosylmethionine:tRN A ribosyltransferase-isomerase OS=Flavihumibacter petas eus NBRC 106054 OX=1220578 GN=queA PE=3 SV=1
MKSAPNHPKSISIAAYQYALPDNRIASFPLSDRDASKLLVFREGNIRDGQYRDLPAEIPSGYLLVFNQTRVVRARMVFTKPSGGRIEVFCLEPTSDYAEMTTALAQTGKVNWTCLVGGAAKWKPGMVLEKSVSLPDGTSLMLKASISHREQETFVIQFTWEPGYIAFAEVLEVAGAIPIPPYLKRESTESDLERYQTIYAREEGSVAAPTAGLHFTPNLLQRLTEKNINSAFVTLHVGAGTFKPVKAEKIEGHEMHAEWIEVEKHVIETLLHAGNKVIAVGTTSLRTLESIYWMGCKAYADPDTPLDQLEVHQWDPYDGAVPSQMPVEAALRALLQRMETEKAMKIVSKTSLLIAPGYRVRMVEALITNFHQPQSTLLLLVAAMVGADWKKIYEHALKSDYRFLSYGDGSILWKSASQF

SEQ ID NO: 66580 - protein, 349 aa, Flavihumibacter petaseus
  misc_feature (1)..(349): tr|A0A0E9MTX0|A0A0E9MTX0_9BACT S-adenosylmethionine:tRN A ribosyltransferase-isomerase OS=Flavihumibacter petas eus NBRC 106054 OX=1220578 GN=queA PE=3 SV=1
MKLSQFKFDLPLNLIAQHPTKKREDSRMMVVHRKTGQIENKNFRDILDYFDDKDVFVVNNTKVFPARMYGRKEKTGAKIEVFLLRELNKPNRLWDVIVDPARKIRVGNKLYFGDNDELVAEVIDNTTSRGRTIRFLWEGTDAEFRTMLEFLGETPLPKYIKRKPDEEDKERYQTVYAKHEGAVAAPTAGLHFSRELIKRLEIKGVRFAEVTLHTGLGTFRPIEVEDLSKHKMDAEYYRIDDNSCQIVNKAKTTGHRICSIGTTTMRAIESSFTAEKLLKPSEGWTNHFIHPPYQFSIADALVTNFHLPKTSLLIMTCAFAGYDLAMEAYKKAIKDKYRFFSYGDAMLVI

SEQ ID NO: 66581 - protein, 349 aa, Flavihumibacter solisilvae
  misc_feature (1)..(349): tr|A0A0C1LJS8|A0A0C1LJS8_9BACT S-adenosylmethionine:tRN A ribosyltransferase-isomerase OS=Flavihumibacter solis ilvae OX=1349421 GN=queA PE=3 SV=1
MKLSQFKFDLPLNLIAQHPAKKREDSRMMVVHRKTGNIENKNFRDILEYFDDKDVFVVNNTKVFPARMYGRKEKTGAKIEVFLLRELNKPNRLWDVIVDPARKIRVGNKLYFGDNDELVAEVIDNTTSRGRTIRFLWDGTDEEFRQMLEFLGETPLPKYIKRKPDEEDKERFQTVYAKHEGAVAAPTAGLHFSRELIKRLEIKGVRFAEVTLHTGLGTFRPIEVEDLSKHKMDAEYYRIEDNACQIVNKAKTTGHRLCSIGTTTMRAIESSFTAEKLLKPSEGWTNHFIHPPYEFSIADALVTNFHLPKTSLLIMTCAFAGYDLAMEAYRKAIKDKYRFFSYGDAMLVI

SEQ ID NO: 66582 - protein, 415 aa, Flavihumibacter solisilvae
  misc_feature (1)..(415): tr|A0A0C1LBK0|A0A0C1LBK0_9BACT S-adenosylmethionine:tRN A ribosyltransferase-isomerase OS=Flavihumibacter solis ilvae OX=1349421 GN=queA PE=3 SV=1
MNGTNSPKTLAIADYTYDLPDHRIASYPLSNRDASRLLVYESGNIHETTYRQLADQVPAGHLLVFNKTKVVEARIYFTKPTGGVIELFCLEPHPDYPDVTTAMLQTGQVRWNCLVGGASKWKHGTILEKSVTYGDTTVHLTAAIDARNQDTFSILFTWAPDTLSFAELLHAVGVIPIPPYLKRDSNKQDSDRYQTIYAEMEGSVAAPTAGLHFTDQVFKELSDKGISRSFVTLHVGAGTFKPVKSEYIADHDMHAEFIEVDIATIEELLSYEGRILAVGTTSLRTLESLYWMGVKAYVNPRINIEGLEMKQWEVYEELGRHQLTAGQSLISLLSWMKKHQMVRILCKTQILIAPGYYVRMIRGLITNFHQPQSTLLLLVAALIGNDWKKVYAYALENDFRFLSYGDGSLLWCNKP

SEQ ID NO: 66583 - protein, 349 aa, Flavihumibacter sp.
  misc_feature (1)..(349): tr|A0A162PBW6|A0A162PBW6_9BACT S-adenosylmethionine:tRN A ribosyltransferase-isomerase OS=Flavihumibacter sp. C ACIAM 22H1 OX=1812911 GN=queA PE=3 SV=1
MKLSQFKFDLPLNLIAQNPAKKREDSRLMVVHRKTGNIENKTFRDILDYFDDKDVFVVNNTKVFPARMYGRKEKTGAKIEVFLLRELNKPNRLWDVIVDPARKIRVGNKLYFGENDELVAEVIDNTTSRGRTIRFLWEGTDEEFRQMLEFLGETPLPKYIKRKPDEEDKERYQTVYAKHEGAVAAPTAGLHFSRELIKRLEIKGVRFAEVTLHTGLGTFRPIEVEDLSKHKMDAEYYRIDEMACQIVNKAKTNNHRICSIGTTTMRAIESSFTAEKLLKPSEGWTNHFIHPPYEFSIADALVTNFHLPKTSLLIMTCAFAGYDLAMEAYKKAIKDKYRFFSYGDAMLVI

SEQ ID NO: 66584 - protein, 413 aa, Flavihumibacter sp.
  misc_feature (1)..(413): tr|A0A0C1IQ11|A0A0C1IQ11_9BACT S-adenosylmethionine:tRN A ribosyltransferase-isomerase OS=Flavihumibacter sp. Z G627 OX=1463156 GN=queA PE=3 SV=1
MKNIKNPYTLQIADFSYELIDDRIAKFPLEERDASRLLVYRKGEITESVYRDLADEIPAGSLLVFNDTRVVRARLVFKKNNGRDIEIFCLEPDQRYTDISSAMAVSGEVYWNCLVGGASKWKQGMTLEMKLEHDGIPVLLSASIHSRNNNSFTIHFCWSPVEITFAEILNIAGKMPIPPYLHRKSEDSDTTRYQTIFANKEGSVAAPTAGLHFTDHVFESLREKGITSTFVTLHVGAGTFKPVKSEIIGDHEMHAEFIDVQRQILEELLRFDGNIIAAGTTSMRTLESLYWMGVKVAVCPEAHLEDISVKQWDPYIQQLENHIPPTEAILHLLRWMDRNNLTRIICKTQIFIAPGYKVKMVNALITNFHQPQSTLLLLVAALIGEDWRKVYDYALENRYRFLSYGDGSLLWGN

SEQ ID NO: 66585 - protein, 350 aa, Flavimaricola marinus
  misc_feature (1)..(350): tr|A0A238LE04|A0A238LE04_9RHOB S-adenosylmethionine:tRN A ribosyltransferase-isomerase OS=Flavimaricola marinus OX=1819565 GN=queA PE=3 SV=1
MKLSDFDFDLPEQLIAVRPARPRSSSRLLVARGPETVEAHAIDLPRFLNPGDRLVLNDTKVIPARLTGQRHRPGAPGEGTAKIEVTLLEPRANGAWAALVKPLRKWREGETVVFSPDLSAVLEAREADAALVRFNLTGDDFDAALNAAGAMPLPPYIAAKRPSDEADKADYQTLWADKLGAVAAPTASLHFDEALMAALAERGVDLTYVTLHVGAGTFLPVKVDDISEHKMHAEWGEVSEAAADEINATRAAGGRVIPVGTTALRLIESAASEAGVAPWRGDTDIFITPGYQFRAADGLMTNFHLPKSTLMMLVSALMGPERIREIYAHAIAQGYRFFSYGDASLLLPKG

SEQ ID NO: 66586 - protein, 349 aa, Flavipsychrobacter stenotrophus
  misc_feature (1)..(349): tr|A0A2S7SZ93|A0A2S7SZ93_9BACT S-adenosylmethionine:tRN A ribosyltransferase-isomerase OS=Flavipsychrobacter st enotrophus OX=2077091 GN=queA PE=3 SV=1
MKLSQFKFELPLNLIAQHPAKKREESRLMVVDRATGKIEHKVFKDVLGYFHDKDVMVVNNTKVFPARLYGRKEKTGAKIEVFLLRELNKPNHLWDVIVDPARKIRVGNKLYFGDNDELVAEVIDNTTSRGRTIRFLFDGTDQEFRNMLDILGETPLPKYIKRKPEEEDKERYQTVYAKYEGAVAAPTAGMHFSRELIKRLEIVGVKFAEATLHTGLGTFRPIEVEDLSKHKMDAEYFKVDEYAANIVNKAKIEKRHVCSVGTTTMRALESSVTAQGLLKPEEGWTNLFIHPPYEFSIADSLITNFHLPKTSLMIMACAFAGFDLMMHTYETAIKEKYRFFSYGDAMLII

SEQ ID NO: 66587 - protein, 407 aa, Flavipsychrobacter stenotrophus
  misc_feature (1)..(407): tr|A0A2S7SXH1|A0A2S7SXH1_9BACT S-adenosylmethionine:tRN A ribosyltransferase-isomerase OS=Flavipsychrobacter st enotrophus OX=2077091 GN=queA PE=3 SV=1
MHPRNLRIEDYTYDLPDARIAQYPLQQRDASKLLIYTNGQIAEDTYSHLADHIPVNTLMVFNQTKVVHARLPFAKPTGGAIEIFCLEPHSSHSDIQTAMLQKGQVWWNCLVGSAKKWKDSITLTLPCPEAGFTLSATMVNKSESYYTIQLDWDNPDMTFAEVLHHAGKVPLPPYLNRLADVKDEERYQTIFAKDEGSVAAPTAGLHFTDAVMNELAAKDVDKAFVTLHVGAGTFKPVKSETMQEHDMHAEWIEVNASTIQQLLQHGDNKIVAVGTTSLRTLESLYWIGCKLFKGMAVDMEGIAINQWDAYEITDPCPKEEALNALLNHMAVNGTNKIVTRTRILIAPGYTFRIIDGLVTNFHQPQSTLLLLVSALIGENWRKVYGYAMAHDFRFLSYGDGSLLWKQK

SEQ ID NO: 66588 - protein, 349 aa, Flaviramulus basaltis
  misc_feature (1)..(349): tr|A0A1K2IEX3|A0A1K2IEX3_9FLAO S-adenosylmethionine:tRN A ribosyltransferase-isomerase OS=Flaviramulus basaltis OX=369401 GN=queA PE=3 SV=1
MKLSHFGFNLPDELLAEYPAENRDESRLMVLDRKKQTIEHKMFKDIIDYFDEDDVLILNNTKVFPARLYGNKEKTGARIEVFLLRELNEEQRLWDVLVDPARKIRIGNKLYFGDDDTLVAEVIDNTTSRGRTLRFLYDGSYREFRLKLTQLGETPLPKYIKRGVEAEDEERYQTIFAKNEGAVAAPTAGLHFSKHLLKRLEIKGVNFAEVTLHVGLGTFNPVEVEDLSKHKMDSEELKIDEKAVNIVNTGIKNKKRVCAVGTTAMRAIETAVSSSGKLNEIDGWTNKFIFPPYDFSIANCMITNFHTPKSTLLMMVSAFAGHDFIKRAYEEAVKEKYKFYSYGDAMLII

SEQ ID NO: 66589 - protein, 349 aa, Flavisolibacter ginsengisoli
  misc_feature (1)..(349): tr|A0A1M4ULR4|A0A1M4ULR4_9BACT S-adenosylmethionine:tRN A ribosyltransferase-isomerase OS=Flavisolibacter ginse ngisoli DSM 18119 OX=1121884 GN=queA PE=3 SV=1
MKLSQFKFDLPLNLIAQHPAKKREDARMMVVHRKTGQIENKLFKDILEYFDDKDVFTVNNTKVFPARMYGRKEKTGAKIEVFLLRELNKEHRLWDVIVDPARKIRVGNKLYFGDTEELVAEVIDNTTSRGRTIKFLHEGSEDEFRLVLEKYGETPLPKYIKRKPDEEDRERYQTVYAKHEGAVAAPTAGLHFSRELIKRCEIKGIRFAEVTLHTGLGTFRPIEVEDLSKHKMDAEYYRIEDAACNIVNKAKETSHRICSIGTTTMRALESSVTAQKLLKPSEGWTNIFIHPPYDFNIADSLVTNFHLPKTSLLIMTCAFAGYDLTMEAYKKAIKDKYRFFSYGDALLIV

SEQ ID NO: 66590 - protein, 404 aa, Flavisolibacter ginsengisoli
  misc_feature (1)..(404): tr|A0A1M5CS94|A0A1M5CS94_9BACT S-adenosylmethionine:tRN A ribosyltransferase-isomerase OS=Flavisolibacter ginse ngisoli DSM 18119 OX=1121884 GN=queA PE=3 SV=1
MKISPETVYISDYNYELPSANIAEVPLLNRDDSKLLIYEKGKIIDSVFHQLPSYIEPGSTLILNNTRVIEARLLFQKDTGATIELFCLEPYELSIEQAMQQHEKIIWKCLIGGASKWKPGQLLTKPIGENSGYILTARYIEKREDYFLIEFSWNNAAASFVEVLHETGAIPLPPYIKRKAEKLDWERYQTVFSEQEGSVAAPTAALHFTQNTFQQLKERNVAYDYITLHVGAGTFKPVKSATIAGHSMHAEPFSVKKQVIEELIKAAKIIATGTTSLRTLESLYWISLKLKLSPNAELMLDQWEAYAIDEQLPNIPAKESFEYLLQWMNEHAVTELHCRTSLIIIPGYQFKVAHGLITNFHQPHSTLLLLIAAFIGDNWKKVYSHALQNNYRFLSYGDSSLLWR

SEQ ID NO: 66591 - protein, 401 aa, Flavisolibacter ginsenosidimutans
  misc_feature (1)..(401): tr|A0A5B8UP79|A0A5B8UP79_9BACT S-adenosylmethionine:tRN A ribosyltransferase-isomerase OS=Flavisolibacter ginse nosidimutans OX=661481 GN=FSB75_09090 PE=3 SV=1
MNAEKILIEDYTYNLPNERISAYPLPKRDDSKLLVYKSGKITHDRFYNLPQQLPPNSLLILNNTKVIEARLLFKKQSGGVIEIFCLEPHLQSMENALQQQGSCKWQCLIGGASKWKPGQVLEKSLSVEDKKVILQARYLGKVEDSFIIQFDWQPEDFHFVQVLHAAGAIPLPPYIKRGAEEIDAARYQTIFGKYEGSVAAPTAALHFTDAVFEALRKKNMQTEFVTLNVGAGTFKPVKSSAIADHQMHGEDFTVEKAALQKIIEANTIVAVGTTSLRTLESIYWLGVKLLNGSLADEWILGQWEVYSLSSDVDYKKSLEAIVQWMDERAITQLHCRTSLLIVPGYQFKIPSALVTNFHQPQSTLLLLVAAFIGEDWKKVYEHALQNDYRFLSYGDSSLLFR

SEQ ID NO: 66592 - protein, 349 aa, Flavisolibacter ginsenosidimutans
  misc_feature (1)..(349): tr|A0A5B8UFE5|A0A5B8UFE5_9BACT S-adenosylmethionine:tRN A ribosyltransferase-isomerase OS=Flavisolibacter ginse nosidimutans OX=661481 GN=queA PE=3 SV=1
MKLSQFKFDLPLNLIAQHPAKRREDARMMVVNRKTGEMENKHFRDILDYFDDKDVFVVNNTKVFSARMYGRKEKTGAKIEVFLLRELNKEHRLWDVIVDPARKIRVGNKLYFGDTEELVAEVIDNTTSRGRTIKFLHEGTEEEFKATLEKYGETPLPKYIKRKPDDEDRERYQTVYAKYEGAVAAPTAGLHFSRELIKRCEIKGIRFAEVTLHTGLGTFRPIEVEDLSKHKMDAEYYRIDEPAVKVVNKAKETSRRICSIGTTTMRSLESSVTAQGFLKPSEGWTNMFIHPPYNFSIADALVTNFHLPKTSLLIMTCAFAGYDLTMEAYKKAIKDKYRFFSYGDALLVI

SEQ ID NO: 66593 - protein, 421 aa, Flavisolibacter tropicus
  misc_feature (1)..(421): tr|A0A172U2D5|A0A172U2D5_9BACT S-adenosylmethionine:tRN A ribosyltransferase-isomerase OS=Flavisolibacter tropi cus OX=1492898 GN=queA PE=3 SV=1
MITNPSTVYISEYDYELPANQIAEFPLAQRDSSRLLVYEQGQIKDDCFTSLPSYLPNASTLVLNNTRVIEARLFFKKDTGAIIEIFCLGPHTPASMEQALSSHHETLWYCLIGGASKWKHGQILHKEVTINGVSVILNARFVGKSGDQFIIAFTWDTNHSFSEVLHVAGSIPLPPYIKRKAENEDSERYQTVFAKHEGSVAAPTAALHFTESVFDELKAKDIFPHYITLHVGAGTFKPVKTETIEGHNMHAEKFSVSATLLKKLISAKTIVAVGTTSLRTLESLHWFGIKVKQGQFDFTLHQWEAYELPDASISYNESLQILLDYLRENKLEELHCETSLLIMPGYEFKSAKALVTNFHQPKSTLLLLVAAFIGIEWKKLYEHALQNNYRFLSYGDSSLLWRETPPSNSPEGEGSHGTRPA

SEQ ID NO: 66594 - protein, 349 aa, Flavisolibacter tropicus
  misc_feature (1)..(349): tr|A0A172TU84|A0A172TU84_9BACT S-adenosylmethionine:tRN A ribosyltransferase-isomerase OS=Flavisolibacter tropi cus OX=1492898 GN=queA PE=3 SV=1
MKLSQFKFDLPLNLIAQNPAKKREDARLMVVHRKTGEIENKHFRDILDYFDDKDTFVVNNTKVFPARMYGRKEKTGAKIEVFLLRELNKEQRLWDVIVDPARKIRVGNKLYFGDDEDLVAEVIDNTTSRGRTIKFLFEGDDEGFRQILEKHGETPLPKYIKRKPDEEDRERYQTVYAKHEGAVAAPTAGLHFSRELIKRCEIKGIRFSEVTLHTGLGTFRPIEVEDLSKHKMDAEYYRIEEQACKIVNKAKETNHRICSIGTTTMRALESSFTAQRLLKPSEGWTNNFIHPPYDFSIADSLVTNFHLPKTSLLIMACAFAGYDLMMEAYQKAIKDKYRFFSYGDAMLII

SEQ ID NO: 66595 - protein, 349 aa, Flavivirga eckloniae
  misc_feature (1)..(349): tr|A0A2K9PTI4|A0A2K9PTI4_9FLAO S-adenosylmethionine:tRN A ribosyltransferase-isomerase OS=Flavivirga eckloniae OX=1803846 GN=queA PE=3 SV=1
MKLSHFGFNLPNELLAEHPAENRDESRLMVLNRKEQTIEHRMFKDLIDYFEEDDVLILNNTKVFPARLYGNKEKTGARIEVFLLRELNEEQRLWDVLVDPARKIRIGNKLYFGDDDTLVAEVIDNTTSRGRTLRFLYDGSYSEFRRKLTELGETPLPKYIKRDVEPEDEERYQTIYAKNEGAVAAPTAGLHFSKHLLKRLEIKGIDFAEVTLHVGLGTFNPVEVEDLSKHKMDSEELKINETAVNIVNKGIDNKRRVCAVGTTAMRAIESSVSSNGRLNEIDGWTNKFIFPPYDFSIANCMITNFHTPKSTLLMMVSAFAGHDFIKKAYEEAVKEKYKFYSYGDAMLIL

SEQ ID NO: 66596 - protein, 349 aa, Flavivirga sp.
  misc_feature (1)..(349): tr|A0A4S1E2S7|A0A4S1E2S7_9FLAO S-adenosylmethionine:tRN A ribosyltransferase-isomerase OS=Flavivirga sp. RZ03 O X=2559571 GN=queA PE=3 SV=1
MKLSNFGFNLPDELLAEYPAENRDESRLMVLNRKEQTIEHKMFKDLIDYFDEEDVLILNNTKVFPARLYGNKEKTGARIEVFLLRELNEEQRLWDVLVDPARKIRIGNKLYFGDDDTLVAEVIDNTTSRGRTLRFLYDGSYTEFRRKLNELGETPLPKYIKRDVEPDDEDRYQTIYAKNEGAVAAPTAGLHFSKHLLKRLEIKGIDFAEVTLHVGLGTFNPVEVEDLSKHKMDSEELKIDEKAVNIVNKGIENKKRVCAVGTTAMRAIESSVSSNGKLNEIDGWTNKFIFPPYDFSIANCMITNFHTPKSTLLMMVSAFAGHDFIKKAYEEAVKEKYKFYSYGDAMLII

SEQ ID NO: 66597 - protein, 350 aa, Flavobacteria bacterium
  misc_feature (1)..(350): tr|Q26G50|Q26G50_FLABB S-adenosylmethionine:tRNA ribosy ltransferase-isomerase OS=Flavobacteria bacterium (stra in BBFL7) OX=156586 GN=queA PE=3 SV=1
MKLSQFGYKLPENLIAQHPAENRDESRLMVLHKKTGEIEHKMFKDVLDYFEEDDVFVTNNTRVFPARLYGNKEKTGARIEVFLLRELNPTTKLWDVLVDPARKIRIGNKLYFGEDESLVAEVIDNTTSRGRTLRFLFDGSYEEFRQKLKDLGETPLPRELGREVEEEDEERYQTIYATNEGAVAAPVAGLHFSKHLLKRLEIKGIHRTAITMHIGLGTFAPVEVEDLSKHKMDSEQAEITEETCAIVNKAIDTRKNVCAVGTTTMRTLESAVSSDGHLNTFDGWTNKFIFPPYDFSIANAMITNFHHPKSTLMMQAAAFAGYDLLKKAYDVAIKEEYKFSTYGDAMLIVD

SEQ ID NO: 66598 - protein, 349 aa, Flavobacteria bacterium
  misc_feature (1)..(349): tr|A3J295|A3J295_9FLAO S-adenosylmethionine:tRNA ribosy ltransferase-isomerase OS=Flavobacteria bacterium BAL38 OX=391598 GN=queA PE=3 SV=1
MKLSHFQFNLPEELLAEFPTENRDESRLMVVNRKTGTIEHKLFKDVIDYFDDGDVMVLNNTKVFPARLYGNKEKTGARIEVFLLRELNAEQRLWDVLVDPARKIRIGNKLYFGDDDSLVAEVIDNTTSRGRTLRFLYDGSYEEFREKLVELGETPIPKYINREVTPEDAERYQTIYAKVEGAVAAPTAGLHFSKHLLKRLEIKGVDFAEVTLHVGLGTFNPVEVEDLSKHKMDSEEMKISQEACDIINNAKTKKKKVCCVGTTAMRAMESSVSSQRTLNPFEGWTNKFIYPPYDFSLADAMITNFHTPKSTLLMMISAFCGHDLMKKAYEEAVKEKYRFYSYGDAMLII

SEQ ID NO: 66599 - protein, 349 aa, Flavobacteriaceae bacterium
  misc_feature (1)..(349): tr|A0A3L9MFE3|A0A3L9MFE3_9FLAO S-adenosylmethionine:tRN A ribosyltransferase-isomerase OS=Flavobacteriaceae bac terium YIM 102668 OX=2479857 GN=queA PE=3 SV=1
MKTSDFDFNLPEELLAEHPAENRDESRLMVVHRDTGEIEHRLFKDVIEYFDEGDVMIRNNTKVFPARLMGNKEKTGANIEVFLLRELDAETRLWDVLVDPARKIRIGNKLFFDNDDTLVAEVVDNTTSRGRTLRFLFDGSYEEFRAKLKELGETPLPKYILREVEPEDAERYQTIYAKHEGAVAAPTAGLHFSKHLLKRLEIKGVDFAELTLHIGLGTFIPVEVEDLSKHKMESEQVIIPQESVDLVNNAIDNKKKVCAIGTTTMRSIESSVSADGHLNAYDGWTNKFIHPPYDFSIANCMITNFHTPKSTLIMMISAFAGHDLTMKAYNEAVKEGYKFYSYGDAMLIL

SEQ ID NO: 66600 - protein, 349 aa, Flavobacteriaceae bacterium
  misc_feature (1)..(349): tr|A0A2M7NQ53|A0A2M7NQ53_9FLAO S-adenosylmethionine:tRN A ribosyltransferase-isomerase OS=Flavobacteriaceae bac terium CG_4_10_14_3_um_filter_31_253 OX=1973987 GN=queA PE=3 SV=1
MKLSHYEFKLPDELLAEYPAEHRDESRLMVLNRKTQTIEHKLFKDIIDYFEEGDVLMLNNTKVFPARMYGNKEKTGAKIEVFLLRELNAENRLWDVLVDPARKIRIGNKLFFGDDDSLVAEVIDNTTSRGRTLRFLFDGSYEAFREKLIELGETPLPKYINRKLTPEDEERYQTIYAKHEGAVAAPTAGLHFSKHLMKRLEIKGIEFAEMTLHVGLGTFSPVEVEDLSKHKMDSEQIIITANAAQKINQAKKEKRRICAVGTTVMRTVESSVSANHLLNPYEGWTNKFIFPPYDFSIADSMITNFHTPKSTLMMMTAAFAGYDFLMKAYKEAIKEKYRFYSYGDAMLII

SEQ ID NO: 66601 - protein, 351 aa, Flavobacteriales bacterium
  misc_feature (1)..(351): tr|A0A1Z9PXQ5|A0A1Z9PXQ5_9FLAO S-adenosylmethionine:tRN A ribosyltransferase-isomerase OS=Flavobacteriales bact erium TMED228 OX=1986725 GN=queA PE=3 SV=1
  misc_feature (121)..(121): Xaa can be any naturally occurring amino acid
  misc_feature (123)..(123): Xaa can be any naturally occurring amino acid
  misc_feature (126)..(127): Xaa can be any naturally occurring amino acid
  misc_feature (240)..(240): Xaa can be any naturally occurring amino acid
MKYKLSMFNFDLPEKLITDTPAKNRDDAKLMVLHRDSGEIEHKKVSDLIDYFDDGDVVCINNTKVFPARLYANKEKTGARIEVFLLRELNKKNRLWDVLVDPARKIRIGNKLFFGENDELXAXVIXXTTSRGRTLRFLYDGTHEEFKETLNSLGQTPLPRFIKREPTPNDTERYQTVFAKNEGAVAAPTAGLHLSKTQMLKMQIKGIEFAETTLHVGLGTFSPIMVEDLSKHKMESEQMXINSTASTIINNALVNRKKVCAVGTTVMRSLETSVSTKNMVIPYDGWTNIFIFPPYDFKIGSCMLTNFHLPKSSLMMQVSAFSGYDLLMKAYKEAVKKKYKFHTFGDAMLII

SEQ ID NO: 66602 - protein, 349 aa, Flavobacteriales bacterium
  misc_feature (1)..(349): tr|A0A2G6F5Y6|A0A2G6F5Y6_9FLAO S-adenosylmethionine:tRN A ribosyltransferase-isomerase OS=Flavobacteriales bact erium OX=2021391 GN=queA PE=3 SV=1
MKLSHFKYDLPEKLLAEYPSEVRDEARLMVLNRKDQTIEHKLFKDLVNYFEEDDVMVFNNTKVFPARLFGNKEKTGARIEVFLLRELNPETRLWDVLVDPARKIRIGNKLFFGENEDLVAEVIDNTTSRGRTLRFLFDGAYEDFRKKLKELGQTPLPKYIKRAVEPLDEERYQTIYAKHEGAVAAPTAGLHFSKHLLKRLEIKGVDLAEVTLHVGLGTFQPVEVEDLSKHKMDSEEIYIPEIAVKKINKAIDNNRRICAIGTTVIRTLESSVSTDGHLNKYNGWTNKFIFPPYEFNIANAMVTNFHTPKSTLMMMTSAFAGHDFLKEAYAEAIKEKYKFYSYGDAMLIL

SEQ ID NO: 66603 - protein, 274 aa, Flavobacteriia bacterium
  misc_feature (1)..(274): tr|A0A432J3V9|A0A432J3V9_9BACT S-adenosylmethionine:tRN A ribosyltransferase-isomerase (Fragment) OS=Flavobacte riia bacterium OX=2044941 GN=DSY83_04685 PE=3 SV=1
MKLSNFNFELPKELLAEYPAENRDESKLMVIHRDSGKIEHKMFKDLIDYFDEGDVMVLNNTKVFPARLYGNKEKTGARIEVFLLRELNQEQRLWDVLVDPARKIRIGNKLYFGDDESLVAEVIDNTTSRGRTLRFLYDGSYTDFRRKLRELGETPLPKYIKREVTPDDEERYQTIYAKHEGAVAAPTAGLHFSKHLLKRLEIKGIDFAEVTLHVGLGTFNPVEVEDLSKHKMDSEELVIDEKATEVVNKAKIKKKRICAVGTTVMRGLESAVSS

SEQ ID NO: 66604 - protein, 349 aa, Flavobacteriia bacterium
  misc_feature (1)..(349): tr|A0A1Q3ZJR3|A0A1Q3ZJR3_9BACT S-adenosylmethionine:tRN A ribosyltransferase-isomerase OS=Flavobacteriia bacter ium 40-80 OX=1895763 GN=queA PE=3 SV=1
MKLSDFNFNLPDELIAEYPSKNRDEARLMVVHRESGKIEHKLFKDIITYFDDGDVMITNNTKVFPARMYGNKEKTGAKIEVFLLRELNRESLLWDVLVDPARKIRIGNKLYFGDDDSLVAEVIDNTTSRGRTLRFLFDGTYEEFKAKITELGETPLPKYIKRDVEKDDEERYQTIYASIEGAVAAPTAGLHFSRELLKRLELKGVNFAEVTLHVGLGTFRTVEVEDLTKHKMDSEQVIITEKAAKVVNEAKLKKKKVCAIGTTSMRAIESSVSSDGLLKPYDGWTNKFIFPPYDFSVANCMVTNFHTPLSTLLMMISAFCGHELMMEAYGQAIKEKYNFYSYGDAMLIL

SEQ ID NO: 66605 - protein, 349 aa, Flavobacterium aciduliphilum
  misc_feature (1)..(349): tr|A0A328YMV7|A0A328YMV7_9FLAO S-adenosylmethionine:tRN A ribosyltransferase-isomerase OS=Flavobacterium acidul iphilum OX=1101402 GN=queA PE=3 SV=1
MKLSHFNFNLPAELLAEFPAENRDESRLMVVDRKKGTIEHKLFKDIIDYFDDGDVMILNNTKVFPARMYGNKEKTGARIEVFLLRELNAEQRLWDVLVDPARKIRIGNKLYFGDDDSLVAEVIDNTTSRGRTLRFLYDGTYEEFRNKLTELGETPIPKYINREVTEEDAERYQTIYAKEEGAVAAPTAGLHFSKHLLKKLEIKGINFAEVTLHVGLGTFNPVEVEDLSKHKMDSEELKITQEACDIVNAAKANKKRICCIGTTSMRAIESSVSSAKTLNPYEGWTNKFIFPPYDFSIADCMVTNFHTPKSTLLMMISAFCGHDLMKKAYEEAVKEKYKFYSYGDAMLIL

SEQ ID NO: 66606 - protein, 349 aa, Flavobacterium akiainvivens
  misc_feature (1)..(349): tr|A0A0M9VID8|A0A0M9VID8_9FLAO S-adenosylmethionine:tRN A ribosyltransferase-isomerase OS=Flavobacterium akiain vivens OX=1202724 GN=queA PE=3 SV=1
MKLSNFNFNLPKELLAEFPTENRDESRLMVVDRKTKTIEHKLFKDIIDYFDEGDVMVLNNTKVFPARLYGNKEKTGARIEVFLLRELNSEQRLWDVLVDPARKIRIGNKLYFGDDDSLVAEVIDNTTSRGRTLRFLYDGSYEEFRQKLTELGETPIPKYINREVTPEDAERYQTIYAKEEGAVAAPTAGLHFSKHLLKKLEIKGIDFAEITLHVGLGTFNPVEVEDLSKHKMDSEELIITQQACDVVNKAKTNKHKVCAIGTTTMRAMESSVSSSKTLNPYVGWTNKFIFPPYDFSVADCMVTNFHTPKSTLLMMISAFMGHDLMKKAYEEAIKENYRFYTYGDAMLIL

SEQ ID NO: 66607 - protein, 349 aa, Flavobacterium album
  misc_feature (1)..(349): tr|A0A2S1QX80|A0A2S1QX80_9FLAO S-adenosylmethionine:tRN A ribosyltransferase-isomerase OS=Flavobacterium album OX=2175091 GN=queA PE=3 SV=1
MKLSNFNFNLPKELLAEYPAENRDEARLMVIDRKTKKIEHKLFKDVLDYFEEGDVMVLNNTKVFPARLYGNKEKTGARIEVFLLRELNSEQRLWDVLVDPARKIRIGNKLYFGDDDSLVAEVIDNTTSRGRTLRFLYDGSYEEFRNKLTELGETPIPKYINREVVPEDAERYQTIYAKEEGAVAAPTAGLHFSKHLLKRLEIKGIDFAEITLHVGLGTFNPVEVEDLSKHKMDSEELIIRQEACDIVNKAKLSRKKVCAVGTTTMRAMESSVSSAKTLNPYVGWTNKFIFPPYDFSVADCMITNFHTPKSTLLMMISAFMGHDLMRAAYDEAIKEGYRFYTYGDAMLIL

SEQ ID NO: 66608 - protein, 349 aa, Flavobacterium alvei
  misc_feature (1)..(349): tr|A0A2S5AD47|A0A2S5AD47_9FLAO S-adenosylmethionine:tRN A ribosyltransferase-isomerase OS=Flavobacterium alvei OX=2080416 GN=queA PE=3 SV=1
MKLSHFQFNLPKELLAEYPAENRDESRLMVIDRKKGTIEHKMFKDVINYFDEGDVMILNNTKVFPARLYGNKEKTGARIEVFLLRELNAEQRLWDVLVDPARKIRIGNKLYFGDDDSLVAEVIDNTTSRGRTLRFLYDGSYDEFRNKLTELGETPIPKYINRDVTPEDADRYQTIYAKEEGAVAAPTAGLHFSKHLLKRLEIKGVKFAEVTLHVGLGTFNPVEVEDLSKHKMDSEELKITQEACDVVNEAKGKRKRICAVGTTSMRAIESSVSSQRTLNPYDGWTNKFIFPPHDFSVATCMITNFHTPKSTLLMMISAFCGHDLMRKAYDEAIKEGYKFYSYGDAMLII

SEQ ID NO: 66609 - protein, 349 aa, Flavobacterium anhuiense
  misc_feature (1)..(349): tr|A0A1G5K634|A0A1G5K634_9FLAO S-adenosylmethionine:tRN A ribosyltransferase-isomerase OS=Flavobacterium anhuie nse OX=459526 GN=queA PE=3 SV=1
MKLSHFNFNLPKELLAEFPAENRDESRLMVIDRKKNTIEHKMFKDVINYFDDGDVLILNNTKVFPARLYGNKEKTGARIEVFLLRELNSEQRLWDVLVDPARKIRIGNKLYFGDDDSLVAEVIDNTTSRGRTLRFLYDGSYEEFRNKLTELGETPIPKYINRDVTPEDAERYQTIYAKEEGAVAAPTAGLHFSKHLLKKLEIKGVNFAEVTLHVGLGTFNPVEVEDLSKHKMDSEELIITQKACDIVNEGKAKKKRICAVGTTSMRAIESSVSSANTLNPYEGWTNKFIFPPHDFSIANCMITNFHTPKSTLLMMISAFCGHDLMKKAYEEAIKEGYKFYSYGDAMLIL

SEQ ID NO: 66610 - protein, 349 aa, Flavobacterium aquaticum
  misc_feature (1)..(349): tr|A0A327YIX5|A0A327YIX5_9FLAO S-adenosylmethionine:tRN A ribosyltransferase-isomerase OS=Flavobacterium aquati cum OX=1236486 GN=queA PE=3 SV=1
MKLSHFNFNLPEELLAEFPAENRDESRLMVVNRKTNTIEHKLFKDVIDYFDDGDVMVLNNTKVFPARLYGNKEKTGARIEVFLLRELNAEQRLWDVLVDPARKIRIGNKLYFGDDDSLVAEVIDNTTSRGRTLRFLYDGSYEEFREKLVELGETPIPKYINREVTPEDAERYQTIYAKEEGAVAAPTAGLHFSKHLLKRLEIKGVDFAEVTLHVGLGTFNPVEVEDLSKHKMDSEEMIITQEACDIVNNAKAKKKKICCVGTTSMRAMESSVSSQRTLNPYTGWTNKFIYPPYDFSIADCMITNFHTPKSTLLMMISAFCGHDLMKKAYEEAIKEKYRFYSYGDAMLII

SEQ ID NO: 66611 - protein, 349 aa, Flavobacterium aquatile
  misc_feature (1)..(349): tr|A0A095U452|A0A095U452_9FLAO S-adenosylmethionine:tRN A ribosyltransferase-isomerase OS=Flavobacterium aquati le LMG 4008 = ATCC 11947 OX=1453498 GN=queA PE=3 SV=1
MKLSHFQFNLPTELLAEYPAENRDESRLMVIDRKTGTIEHKMFKDIINYFDDGDVMILNNTKVFPARMFGNKEKTGARIEVFLLRELNAEQRLWDVLVDPARKIRIGNKLYFGDDDSLVAEVIDNTTSRGRTLRFLYDGSYEEFRNKLTELGETPIPKYINREVNEDDAERYQTIYAKEEGAVAAPTAGLHFSKHLLKRLEIKGINFAEVTLHVGLGTFNPVEVEDLSKHKMDSEELKINQEACDIVNDAKAKKKRICCIGTTSMRAIESAVSSQRTLNPFDGWTNKFIFPPYDFSIADCMVTNFHTPKSTLLMMISAFCGHDLMKKAYEEAIKEKYKFYSYGDAMLII

SEQ ID NO: 66612 - protein, 349 aa, Flavobacterium aquicola
  misc_feature (1)..(349): tr|A0A3E0EDH7|A0A3E0EDH7_9FLAO S-adenosylmethionine:tRN A ribosyltransferase-isomerase OS=Flavobacterium aquico la OX=1682742 GN=queA PE=3 SV=1
MKLSHFNFNLPKELLAEYPAENRDESRLMIVDRKNQTITHKMFKDVIDYFDDGDVLILNNTKVFPARLYGNKEKTGARIEVFLLRELNAEQRLWDVLVDPARKIRIGNKLYFGDDDSLVAEVIDNTTSRGRTLRFLYDGSYEEFRNKLTELGETPIPKYINRDVTPEDAERYQTIYAKEEGAVAAPTAGLHFSKHLLKRLEIKGVKFAEVTLHVGLGTFNPVEVEDLSKHKMDSEELKITQEACDIVNTAKAAKKRICTVGTTSMRAVESSVSSQNTLNPYDGWTNKFVFPPHDFSIPTCMITNFHTPKSTLLMMVSAFCGHDLMKRAYEEAIKEEYKFYSYGDAMLII

SEQ ID NO: 66613 - protein, 349 aa, Flavobacterium aquidurense
  misc_feature (1)..(349): tr|A0A1H3TFD4|A0A1H3TFD4_9FLAO S-adenosylmethionine:tRN A ribosyltransferase-isomerase OS=Flavobacterium aquidu rense OX=362413 GN=queA PE=3 SV=1
MKLSHFQFNLPKELLAEFPAENRDESRLMVIDRAKQTIEHKMFKDVINYFDDGDVLILNNTKVFPARLYGNKEKTGARIEVFLLRELNSEQRLWDVLVDPARKIRIGNKLYFGDDDSLVAEVIDNTTSRGRTLRFLYDGSYEEFRNKLTELGETPIPKYINREVTAEDAERYQTIYAKEEGAVAAPTAGLHFSKHLLKKLEIKGVNFAEVTLHVGLGTFNPVEVEDLSKHKMDSEELIIKQEACDIVNEAKAKKKRICAVGTTSMRAIESSVSSQNTLNPYEGWTNKFIFPPHDFSIANCMITNFHTPKSTLLMMISAFCGHDLMKRAYEEAIKEGYKFYSYGDAMLII

SEQ ID NO: 66614 - protein, 349 aa, Flavobacterium aquidurense
  misc_feature (1)..(349): tr|A0A0Q0WWZ9|A0A0Q0WWZ9_9FLAO S-adenosylmethionine:tRN A ribosyltransferase-isomerase OS=Flavobacterium aquidu rense OX=362413 GN=queA PE=3 SV=1
MKLSHFQFNLPKELLAEFPAENRDESRLMVIDRQKQTIEHKMFKDVINYFDDGDVLILNNTKVFPARLYGNKEKTGARIEVFLLRELNSEQRLWDVLVDPARKIRIGNKLYFGDDDSLVAEVIDNTTSRGRTLRFLYDGSYEEFRNKLTELGETPIPKYISREVTAEDAERYQTIYAKEEGAVAAPTAGLHFSKHLLKKLEIKGINFAEVTLHVGLGTFNPVEVEDLSKHKMDSEELIIKQEACDIVNAAKANKKRICAVGTTSMRAIESSVSSQNTLNPYEGWTNKFIFPPHDFSIANCMITNFHTPKSTLLMMISAFCGHDLMKRAYDEAIKEEYKFYSYGDAMLII

SEQ ID NO: 66615 - protein, 349 aa, Flavobacterium araucananum
  misc_feature (1)..(349): tr|A0A227P5H2|A0A227P5H2_9FLAO S-adenosylmethionine:tRN A ribosyltransferase-isomerase OS=Flavobacterium arauca nanum OX=946678 GN=queA PE=3 SV=1
MKLSHFQFNLPKELLAEFPAENRDESRLMVIDRQKQTIEHKMFKDVINYFDDGDVLILNNTKVFPARLYGNKEKTGARIEVFLLRELNSEQRLWDVLVDPARKIRIGNKLYFGDDDSLVAEVIDNTTSRGRTLRFLYDGSYEEFRNKLTELGETPIPKYISREVTPEDAERYQTIYAKEEGAVAAPTAGLHFSKHLLKKLEIKGINFAEVTLHVGLGTFNPVEVEDLSKHKMDSEELIIKQEACDIVNAAKVAKKRICAVGTTSMRAIESSVSSQNTLNPYEGWTNKFIFPPHDFSIANCMITNFHTPKSTLLMMISAFCGHDLMKRAYEEAIKEEYKFYSYGDAMLII

SEQ ID NO: 66616 - protein, 349 aa, Flavobacterium arcticum
  misc_feature (1)..(349): tr|A0A345H9M5|A0A345H9M5_9FLAO S-adenosylmethionine:tRN A ribosyltransferase-isomerase OS=Flavobacterium arctic um OX=1784713 GN=queA PE=3 SV=1
MKLSNFNFNLPNELLAEFPAESRDEARLMVINRKTKTIEHKLFKDVLDYFDEGDVMVLNNTKVFPARLYGNKEKTGARIEVFLLRELNAEQRLWDVLVDPARKIRIGNKLYFGEDDSLVAEVIDNTTSRGRTLRFLYDGSYEEFRAKLTELGETPIPKYISRDVTPEDAERYQTIYAKEEGAVAAPTAGLHFSKHLLKRLEIKGVDFAEVTLHVGLGTFNPVEVEDLSKHKMDSEELIINQEACDIVNNAKSAKRRICAVGTTSMRAMESSVSSQHTLNPYVGWTNKFIFPPYDFSIADCMITNFHTPKSTLLMMISAFMGHDLMREAYDEAVKEKYRFYTYGDAMLIL

SEQ ID NO: 66617 - protein, 349 aa, Flavobacterium aurantiibacter
  misc_feature (1)..(349): tr|A0A255ZW14|A0A255ZW14_9FLAO S-adenosylmethionine:tRN A ribosyltransferase-isomerase OS=Flavobacterium aurant iibacter OX=2023067 GN=queA PE=3 SV=1
MKLSHFNFNLPKELLAEFPAENRDESRLMVVNRATKTIEHRMFKDIIEYFDEGDVMIINNTKVFPARLYGNKEKTGARIEVFLLRELNSEQRLWDVLVDPARKIRIGNKLYFGDDDSLVAEVIDNTTSRGRTLRFLYDGSYEEFRAKLKELGETPIPKYINRDVQPEDADWYQTIYAKEEGAVAAPTAGLHFSKHLLKRLEIKGIDFAEVTLHVGLGTFNPVEVEDLSKHKMDSEELRITQEACDIVNRAKANRKKVCAIGTTSMRAIESSVSSARTLNPYDGWTNKFIFPPYDFSIADCMVTNFHTPKSTLLMMISAFCGHDLMKKAYEEAVKEQYKFFSYGDAMLIL

SEQ ID NO: 66618 - protein, 349 aa, Flavobacterium beibuense
  misc_feature (1)..(349): tr|A0A444WC62|A0A444WC62_9FLAO S-adenosylmethionine:tRN A ribosyltransferase-isomerase OS=Flavobacterium beibue nse OX=657326 GN=queA PE=3 SV=1
MKLSNFNFNLPKELLAEFPAENRDESRLMVVNRKTKTIEHRLFKDILEYFDEGDVMVLNNTKVFPARLYGNKEKTGARIEVFLLRELNSEQRLWDVLVDPARKIRIGNKLYFGDDDSLVAEVIDNTTSRGRTLRFLYDGSYEEFRAKLTELGETPIPKYINREVVPEDAERYQTIYAKEEGAVAAPTAGLHFSKHLLKRLEIKGIDFAEITLHVGLGTFNPVEVEDLSKHKMDSEELMITQEACDIVNKAKVNKKKVCAVGTTTMRAMESSVSSQKTLNPYVGWTNKFIFPPYDFSVADCMITNFHTPKSTLLMMISAFMGHDLMKKAYEEAVKEEYRFYTYGDAMLIL

SEQ ID NO: 66619 - protein, 349 aa, Flavobacterium beibuense
  misc_feature (1)..(349): tr|A0A0A2LMJ8|A0A0A2LMJ8_9FLAO S-adenosylmethionine:tRN A ribosyltransferase-isomerase OS=Flavobacterium beibue nse F44-8 OX=1406840 GN=queA PE=3 SV=1
MKLSNFNFNLPKELLAEFPAENRDESRLMVVNRKTNTIEHRLFKDILEYFDEGDVMVLNNTKVFPARLYGNKEKTGARIEVFLLRELNSEQRLWDVLVDPARKIRIGNKLYFGDDDSLVAEVIDNTTSRGRTLRFLYDGSYEEFRAKLNELGETPIPKYINREVVPEDADRYQTIYAKEEGAVAAPTAGLHFSKHLLKRLEIKGIDFAEVTLHVGLGTFNPVEVEDLSKHKMDSEELIITQDACDIVNKAKAAKRKVCAVGTTTMRAMESSVSSQKTLNPYVGWTNKFIFPPYDFSVADCMITNFHTPKSTLLMMISAFMGHDLMKKAYEEAVKEGYKFYSYGDAMLIL

SEQ ID NO: 66620 - protein, 349 aa, Flavobacterium branchiophilum
  misc_feature (1)..(349): tr|G2Z083|G2Z083_FLABF S-adenosylmethionine:tRNA ribosy ltransferase-isomerase OS=Flavobacterium branchiophilum (strain FL-15) OX=1034807 GN=queA PE=3 SV=1
MKLSQFQFNLPKELLAEFPAENRDESRLMVVNRKTQTIEHRMFKDIIDYFDDGDVFVINNTRVFPARLYGNKEKTGARIEVFLLRELNAEQRLWDVLVDPARKIRIGNKLYFGDDDSLVAEVIDNTTSRGRTLRFLFDGSYTEFREKLKELGETPIPKYINREVVPEDEERYQTIYAKEEGAVAAPTAGLHFSKHLMKRLEIKGVHFAEVTLHVGLGTFNPVEVEDLSKHKMDSEELKITQDACDIVNAAKTRKSKVCAIGTTSMRAIESSVSSAATLNPYDGWTNKFIFPPHDFSIADAMVTNFHTPKSTLLMMISAFCGHDLMRKAYDEAIKEEYKFYSYGDAMLII

SEQ ID NO: 66621 - protein, 349 aa, Flavobacterium branchiophilum; identical to SEQ ID NO: 66620
  misc_feature (1)..(349): tr|A0A2H3KDK9|A0A2H3KDK9_9FLAO S-adenosylmethionine:tRN A ribosyltransferase-isomerase OS=Flavobacterium branch iophilum OX=55197 GN=queA PE=3 SV=1

SEQ ID NO: 66622 - protein, 349 aa, Flavobacterium caeni
  misc_feature (1)..(349): tr|A0A1G5JTF6|A0A1G5JTF6_9FLAO S-adenosylmethionine:tRN A ribosyltransferase-isomerase OS=Flavobacterium caeni OX=490189 GN=queA PE=3 SV=1
MKLSHFNFNLPKELLADYPAENRDESRLMVIHRDTKKIEHRMFKDIIDYFEDGDVLVLNNTKVFPARLYGNKEKTGARIEVFLLRELNSEQRLWDVLVDPARKIRIGNKLYFGDDDSLVAEVIDNTTSRGRTLRFLYDGSYDEFRNKLTELGETPIPKYINREVNEDDAERYQTIYAKEEGAVAAPTAGLHFSKHLLKRLEIKGVNFAEITLHVGLGTFNPVEVEDLSKHKMDSEELVITQEACDIVNAAKGKRKKVCAVGTTSMRAIESSVSSNKTLNPYEGWTNKFIFPPHDFAVANCMITNFHTPKSTLLMMVSAFIGHDLMKKAYEEAIKEQYRFYSYGDAMLIL

SEQ ID NO: 66623 - protein, 349 aa, Flavobacterium cauense
  misc_feature (1)..(349): tr|V6S4J3|V6S4J3_9FLAO S-adenosylmethionine:tRNA ribosy ltransferase-isomerase OS=Flavobacterium cauense R2A-7 OX=1341154 GN=queA PE=3 SV=1
MKLSNFNFNLPAELLAEYPAENRDEARLMVVNRKTQTIEHKLFKDVLDYFGEGDVMVLNNTKVFPARLYGNKEKTGARIEVFLLRELNAEQRLWDVLVDPARKIRIGNKLYFGDDDSLVAEVIDNTTSRGRTLRFLYDGSYEEFRAKLLELGETPIPKYINREVTPEDAERYQTIYAKEEGAVAAPTAGLHFSKHLMKRLEIKGVEFAEVTLHVGLGTFNPVEVEDLSKHKMDSEELKISQEACDIVNKAKVNKKRVCAVGTTTMRAMESSVSSSRTLNAFEGWTNKFIFPPYDFSVADCMITNFHTPKSTLLMMISAFCGHDLMRKAYDEAIKEGYKFYSYGDAMLIL

SEQ ID NO: 66624 - protein, 349 aa, Flavobacterium cheniae
  misc_feature (1)..(349): tr|A0A562KFB5|A0A562KFB5_9FLAO S-adenosylmethionine:tRN A ribosyltransferase-isomerase OS=Flavobacterium chenia e OX=295428 GN=queA PE=3 SV=1
MKLSHFNFNLPNELLAEFPTENRDESRLMVVNRKTNTIEHKLFKDVIDYFDDGDVMVLNNTKVFPARLYGNKEKTGARIEVFLLRELNAEQRLWDVLVDPARKIRIGNKLYFGDDDSLVAEVIDNTTSRGRTLRFLYDGSYEEFREKLVELGETPIPKYIEREVTPEDAERYQTIYAKVEGAVAAPTAGLHFSKHLLKRLEIKGVDFAEVTLHVGLGTFNPVEVEDLSKHKMDSEEMIISQEACDIVNNAKAKKKKVCCVGTTAMRAMESSVSSQRTLNPYTGWTNKFIYPPYDFSLADCMITNFHTPKSTLLMMISAFCGHDLMKKAYEEAIKEKYRFYSYGDAMLII

SEQ ID NO: 66625 - protein, 349 aa, Flavobacterium chilense
  misc_feature (1)..(349): tr|A0A1M7E4G3|A0A1M7E4G3_9FLAO S-adenosylmethionine:tRN A ribosyltransferase-isomerase OS=Flavobacterium chilen se OX=946677 GN=queA PE=3 SV=1
MKLSHFQFNLPKELLAEFPAENRDESRLMVIDRQKQTIEHKMFKDVINYFDDGDVLILNNTKVFPARLYGNKEKTGARIEVFLLRELNSEQRLWDVLVDPARKIRIGNKLYFGDDDSLVAEVIDNTTSRGRTLRFLYDGSYEEFRNKLTELGETPIPKYINREVTAEDAERYQTIYAKEEGAVAAPTAGLHFSKHLLKKLEIKGVNFAEVTLHVGLGTFNPVEVEDLSKHKMDSEELIIKQEACDIVNEAKGKKKRICAVGTTSMRAIESSVSSQNTLNPYEGWTNKFIFPPHDFSIANCMITNFHTPKSTLLMMISAFCGHDLMKRAYEEAIKEEYKFYSYGDAMLIL

SEQ ID NO: 66626 - protein, 349 aa, Flavobacterium circumlabens
  misc_feature (1)..(349): tr|A0A4Y7U8B2|A0A4Y7U8B2_9FLAO S-adenosylmethionine:tRN A ribosyltransferase-isomerase OS=Flavobacterium circum labens OX=2133765 GN=queA PE=3 SV=1
MKLSHFQFNLPKELLAEFPAENRDESRLMVIDRQKQTIEHKMFKDVINYFDDGDVLILNNTKVFPARLYGNKEKTGARIEVFLLRELNSEQRLWDVLVDPARKIRIGNKLYFGDDDSLVAEVIDNTTSRGRTLRFLYDGSYEEFRNKLTELGETPIPKYINREVTAEDAERYQTIYAKEEGAVAAPTAGLHFSKHLLKKLEIKGINFAEVTLHVGLGTFNPVEVEDLSKHKMDSEELIIKQEACDIVNAAKVNKKRICAVGTTSMRAIESSVSSQNTLNPYEGWTNKFIFPPHDFSIANCMITNFHTPKSTLLMMISAFCGHDLMKRAYEEAIKEEYKFYSYGDAMLII

SEQ ID NO: 66627 - protein, 349 aa, Flavobacterium columnare
  misc_feature (1)..(349): tr|G8X5B5|G8X5B5_FLACA S-adenosylmethionine:tRNA ribosy ltransferase-isomerase OS=Flavobacterium columnare (str ain ATCC 49512 / CIP 103533 / TG 44/87) OX=1041826 GN=q ueA PE=3 SV=1
MKLSNFNFNLPAELLAEYPAENRDESRLMVVHRKTGEIEHKLFKDIIEYFDEGDVMVVNNTKVFPARLYGNKEKTGARIEVFLLRELNAEQRLWDVLVDPARKIRIGNKLYFGDDDSLVAEVIDNTTSRGRTLRFLYDGSYEEFRQKLVDLGETPIPKYINREVTEEDAERYQTIYAKEEGAVAAPTAGLHFSKHLMKRLEIKGINFAEVTLHVGLGTFNPVEVEDLSKHKMDSEEVLISDEACETVNKAKLNKKRVCAIGTTTMRAMESSVSSNKTLNSYQGWTNKFIFPPYDFSVADCMVTNFHTPKSTLLMMISAFCGHDLMMKAYKEAVEQKYRFYSYGDAMLIL

SEQ ID NO: 66628 - protein, 349 aa, Flavobacterium columnare
  misc_feature (1)..(349): tr|A0A246GAN7|A0A246GAN7_9FLAO S-adenosylmethionine:tRN A ribosyltransferase-isomerase OS=Flavobacterium column are OX=996 GN=queA PE=3 SV=1
MKLSNFNFNLPAELLAEYPAENRDESRLMVVHRKTGEIEHKLFKDIIEYFDEGDVMVVNNTKVFPARLYGNKEKTGARIEVFLLRELNAEQRLWDVLVDPARKIRIGNKLYFGDDDSLVAEVIDNTTSRGRTLRFLYDGSYEEFRQKLVDLGETPIPKYINREVTEEDAERYQTIYAKEEGAVAAPTAGLHFSKHLMKRLEIKGINFAEVTLHVGLGTFNPVEVEDLSKHKMDSEEVVISDEACEVVNKAKVGKKRVCAIGTTTMRAMESSVSSNKTLNPYQGWTNKFIFPPYDFSVADCMVTNFHTPKSTLLMMISAFCGHDLMMKAYKEAVEQKYRFYSYGDAMLIL

SEQ ID NO: 66629 - protein, 349 aa, Flavobacterium commune
  misc_feature (1)..(349): tr|A0A1D9P983|A0A1D9P983_9FLAO S-adenosylmethionine:tRN A ribosyltransferase-isomerase OS=Flavobacterium commun e OX=1306519 GN=queA PE=3 SV=1
MKLSHFNFDLPKELLAEFPAENRDEARLMVIDRKKQTIEHKMFKDVIDYFDDGDVMILNNTKVFPARLYGNKEKTGARIEVFLLRELNAEQRLWDVLVDPARKIRIGNKLYFGDDDSLVAEVIDNTTSRGRTLRFLYDGSYEEFRNKLTELGETPIPKYINREVTPEDAERYQTIYAKEEGAVAAPTAGLHFSKHLLKRLEIKGVNFAEVTLHVGLGTFNPVEVEDLSKHKMDSEELKITQEACDIVNEAKGKRKRVCAVGTTSMRAIESSVSSANTLNPYEGWTNKFIFPPHDFSVANCMITNFHTPKSTLLMMISAFCGHDLMKKAYDEAIKEKYKFYSYGDAMLIL

SEQ ID NO: 66630 - protein, 349 aa, Flavobacterium crassostreae
  misc_feature (1)..(349): tr|A0A1B9DZX2|A0A1B9DZX2_9FLAO S-adenosylmethionine:tRN A ribosyltransferase-isomerase OS=Flavobacterium crasso streae OX=1763534 GN=queA PE=3 SV=1
MKLSHFQFDLPKELLAEFPSENRDEARLMVIDRKAQTIEHKMFKDVIDYFDDGDVLILNNTKVFPARLYGNKEKTGARIEVFLLRELNAEQRLWDVLVDPARKIRIGNKLYFGEDDSLVAEVIDNTTSRGRTLRFLYDGSYEEFRKKLTELGETPIPKYISRDVTPEDAERYQTIYAKEEGAVAAPTAGLHFSKHLLKKLEIKGIKFAEVTLHVGLGTFNPVEVEDLSKHKMDSEELKISQEACDIVNTAKSQKKRICTVGTTSMRAVESSVSSHATLNPFDGWTNKFVFPPHDFTIPTCMITNFHTPKSTLLMMVSAFCGHDLMKRAYAEAIEEKYKFYSYGDAMLII

SEQ ID NO: 66631 - protein, 349 aa, Flavobacterium croceum
  misc_feature (1)..(349): tr|A0A2S4NA46|A0A2S4NA46_9FLAO S-adenosylmethionine:tRN A ribosyltransferase-isomerase OS=Flavobacterium croceu m DSM 17960 OX=1121886 GN=queA PE=3 SV=1
MKLSNFNFNLPQELLAEFPAENRDESRLMVVNRKTKTIEHKLFKDIIDYFDDGDVMILNNTKVFPARMYGNKEKTGARIEVFLLRELNAEQRLWDVLVDPARKIRIGNKLYFGDDDSLVAEVIDNTTSRGRTLRFLYDGTYEEFREKLIELGETPIPKYINREVTPEDAERYQTIYAKEEGAVAAPTAGLHFSKHLLKRLEIKGVDFAEVTLHVGLGTFNPVEVEDLSKHKMDSEELKITQEACDIVNKAKAEKKKICCIGTTSMRAIESSVSSNRTLNPYDGWTNKFIYPPYDFSIADCMVTNFHTPKSTLLMMISAFCGHDLMKKAYEEAIKEGYKFYSYGDAMLII

SEQ ID NO: 66632 - protein, 349 aa, Flavobacterium crocinum
  misc_feature (1)..(349): tr|A0A2S1YGK7|A0A2S1YGK7_9FLAO S-adenosylmethionine:tRN A ribosyltransferase-isomerase OS=Flavobacterium crocin um OX=2183896 GN=queA PE=3 SV=1
MKLSHFNFNLPKELLAEFPAENRDESRLMVIDRKKNTIEHKMFKDVINYFDDGDVLILNNTKVFPARLYGNKEKTGARIEVFLLRELNSEQRLWDVLVDPARKIRIGNKLYFGDDDSLVAEVIDNTTSRGRTLRFLYDGSYEEFRNKLTELGETPIPKYINRDVTPEDAERYQTIYAKEEGAVAAPTAGLHFSKHLLKKLEIKGVNFAEVTLHVGLGTFNPVEVEDLSKHKMDSEELIITQEACDIVNEGKAKKKRICAVGTTSMRAIESSVSSANTLNPYEGWTNKFIFPPHDFSIANCMITNFHTPKSTLLMMISAFCGHDLMKKAYEEAIKEGYKFYSYGDAMLIL

SEQ ID NO: 66633 - protein, 349 aa, Flavobacterium cucumis
  misc_feature (1)..(349): tr|A0A1M7ZVK0|A0A1M7ZVK0_9FLAO S-adenosylmethionine:tRN A ribosyltransferase-isomerase OS=Flavobacterium cucumi s OX=416016 GN=queA PE=3 SV=1
MKLSHFNFNLPEELLAEFPTENRDESRLMVVNRKTGTIEHKLFKDVIDYFDDGDVMVLNNTKVFPARLYGNKEKTGARIEVFLLRELNAEQRLWDVLVDPARKIRIGNKLYFGDDDSLVAEVIDNTTSRGRTLRFLYDGSYEEFREKLVELGETPIPKYINREVTPEDAERYQTIYAKEEGAVAAPTAGLHFSKHLLKRLEIKGVDFAEVTLHVGLGTFNPVEVEDLSKHKMDSEEMIITQEACDIVNNAKANKKKICCVGTTSMRAMESSVSSQRTLNPYTGWTNKFIYPPYDFSIADCMITNFHTPKSTLLMMISAFCGHDLMMKAYKEAIQEKYRFYSYGDAMLII

SEQ ID NO: 66634 - protein, 349 aa, Flavobacterium cupreum
  misc_feature (1)..(349): tr|A0A434A1F9|A0A434A1F9_9FLAO S-adenosylmethionine:tRN A ribosyltransferase-isomerase OS=Flavobacterium cupreu m OX=2133766 GN=queA PE=3 SV=1
MKLSHFQFNLPKELLAEFPAENRDESRLMVIDRQKQTIEHKMFKDVINYFDDGDVLILNNTKVFPARLYGNKEKTGARIEVFLLRELNSEQRLWDVLVDPARKIRIGNKLYFGDDDSLVAEVIDNTTSRGRTLRFLYDGSYEEFRNKLTELGETPIPKYINREVTAEDAERYQTIYAKEEGAVAAPTAGLHFSKHLLKKLEIKGVNFAEVTLHVGLGTFNPVEVEDLSKHKMDSEELIIKQEACDIVNTAKANKKRICAVGTTSMRAIESSVSSQNTLNPYEGWTNKFIFPPHDFSIANCMITNFHTPKSTLLMMISAFCGHDLMKRAYEEAIKEEYKFYSYGDAMLIL

SEQ ID NO: 66635 - protein, 349 aa, Flavobacterium cutihirudinis
  misc_feature (1)..(349): tr|A0A3D9FWM5|A0A3D9FWM5_9FLAO S-adenosylmethionine:tRN A ribosyltransferase-isomerase OS=Flavobacterium cutihi rudinis OX=1265740 GN=queA PE=3 SV=1
MKLSHFNFNLPKELLAEFPAENRDESRLMVIDRKKNTIEHKMFKDVINYFDDGDVLILNNTKVFPARLYGNKEKTGARIEVFLLRELNSEQRLWDVLVDPARKIRIGNKLYFGDDDSLVAEVIDNTTSRGRTLRFLYDGSYEEFRNKLTELGETPIPKYINREVTAEDAERYQTIYAKEEGAVAAPTAGLHFSKHLLKKLEIKGVNFAEVTLHVGLGTFNPVEVEDLSKHKMDSEELIITQQACDIVNEGKTKKKRICAVGTTSMRAIESSVSSANTLNPYEGWTNKFIFPPHDFSIANCMITNFHTPKSTLLMMISAFCGHDLMKKAYDEAIKEGYKFYSYGDAMLIL

SEQ ID NO: 66636 - protein, 349 aa, Flavobacterium cyanobacteriorum
  misc_feature (1)..(349): tr|A0A255Z0R0|A0A255Z0R0_9FLAO S-adenosylmethionine:tRN A ribosyltransferase-isomerase OS=Flavobacterium cyanob acteriorum OX=2022802 GN=queA PE=3 SV=1
MKLSNFNFNLPKELLAEFPAENRDESRLMVVNRKTKTIEHRLFKDILEYFDEGDVMVLNNTKVFPARLYGNKEKTGARIEVFLLRELNSEQRLWDVLVDPARKIRIGNKLYFGDDDSLVAEVIDNTTSRGRTLRFLYDGSYEEFRNKLTELGETPIPKYINREVVPEDAERYQTIYAKEEGAVAAPTAGLHFSKHLLKRLEIKGINFAEITLHVGLGTFNPVEVEDLSKHKMDSEELMIKQEACDIVNKAKLNKKRVCAIGTTVMRAMESSVSSQKTLNPYVGWTNKFIFPPYDFSVADCMVTNFHTPKSTLLMMISAFMGHDLMKKAYEEAVNEKYRFYSYGDAMLIL

SEQ ID NO: 66637 - protein, 349 aa, Flavobacterium daejeonense
  misc_feature (1)..(349): tr|A0A0Q0S4B6|A0A0Q0S4B6_9FLAO S-adenosylmethionine:tRN A ribosyltransferase-isomerase OS=Flavobacterium daejeo nense OX=350893 GN=queA PE=3 SV=1
MKLSHFNFDLPKELLAEFPAENRDEARLMVIDRKKQTIEHRMFKDIIDYFDDGDVMILNNTKVFPARLYGNKEKTGARIEVFLLRELNAEQRLWDVLVDPARKIRIGNKLYFGDDDSLVAEVIDNTTSRGRTLRFLYDGSYEEFRNKLTELGETPIPKYINREVTPEDAERYQTIYAKEEGAVAAPTAGLHFSKHLLKRLEIKGVNFAEVTLHVGLGTFNPVEVEDLSKHKMDSEELKITQEACDIVNEAKAKRKRICAVGTTSMRAIESSVSSQNTLNPYEGWTNKFIFPPHDFSVANCMVTNFHTPKSTLLMMISAFCGHDLMKKAYEEAIKEKYKFYSYGDAMLIL

SEQ ID NO: 66638 - protein, 349 aa, Flavobacterium dankookense
  misc_feature (1)..(349): tr|A0A4R6Q944|A0A4R6Q944_9FLAO S-adenosylmethionine:tRN A ribosyltransferase-isomerase OS=Flavobacterium dankoo kense OX=706186 GN=queA PE=3 SV=1
MKLSHFNFNLPTELLAEYPAENRDESRLMVVHRKTGQIEHKLFKDIIDYFDDGDVMILNNTKVFPARMYGNKEKTGARIEVFLLRELNAEQRLWDVLVDPARKIRIGNKLYFGDDDSLVAEVIDNTTSRGRTLRFLYDGSYEDFRIKLLELGETPIPKYINREVTDEDAERYQTIYAKEEGAVAAPTAGLHFSKHLLKRLEIKGIDFAEVTLHVGLGTFNPVEVEDLSKHKMDSEELKITQEACDIVNDAKAKKKKICCIGTTSMRAIESSVSSQRTLNPFDGWTNKFIFPPYDFSIADAMVTNFHTPKSTLLMMVSAFCGHDLMKKAYEEAIKEKYKFYSYGDAMLIL

SEQ ID NO: 66639 - protein, 349 aa, Flavobacterium defluvii
  misc_feature (1)..(349): tr|A0A1M5M4R7|A0A1M5M4R7_9FLAO S-adenosylmethionine:tRN A ribosyltransferase-isomerase OS=Flavobacterium defluv ii OX=370979 GN=queA PE=3 SV=1
MKLSHFNFNLPKELLAEFPAENRDESRLMVIDRKKNTIEHKMFKDVINYFDDGDVLILNNTKVFPARLYGNKEKTGARIEVFLLRELNSEQRLWDVLVDPARKIRIGNKLYFGDDDSLVAEVIDNTTSRGRTLRFLYDGSYEEFRNKLTELGETPIPKYINRDVTPEDAERYQTIYAKEEGAVAAPTAGLHFSKHLLKKLEIKGVNFAEVTLHVGLGTFNPVEVEDLSKHKMDSEELIITQAACDIVNEGKAKKKRICAVGTTSMRAIESSVSSANTLNPYEGWTNKFIFPPHDFSIANCMITNFHTPKSTLLMMISAFCGHDLMKKAYEEAIKEGYKFYSYGDAMLIL

SEQ ID NO: 66640 - protein, 349 aa, Flavobacterium degerlachei
  misc_feature (1)..(349): tr|A0A1H2XVQ7|A0A1H2XVQ7_9FLAO S-adenosylmethionine:tRN A ribosyltransferase-isomerase OS=Flavobacterium degerl achei OX=229203 GN=queA PE=3 SV=1
MKLSQFQFDLPKELLAEFPSEHRDEARLMVIDRKKQTIEHKTFKDVIDYFDDGDVLILNNTKVFPARLYGNKEKTGARIEVFLLRELNAEQRLWDVLVDPARKIRIGNKLYFGDDDSLVAEVIDNTTSRGRTLRFLYDGSYEEFRKKLTELGETPIPKYISRDVTPEDADRYQTIYAKEEGAVAAPTAGLHFSKHLLKKLEIKGIKFAEVTLHVGLGTFNPVEVEDLSKHKMDSEELKITEEACDIVNDAKAKKKRICTVGTTSMRAVESSVSSHGTLNPFDGWTNKFVFPPHEFTIPTCMITNFHTPKSTLLMMVSAFCGHDLMKRAYEEAIKEEYKFYSYGDAMLII

SEQ ID NO: 66641 - protein, 349 aa, Flavobacterium endophyticum
  misc_feature (1)..(349): tr|A0A495MLM3|A0A495MLM3_9FLAO S-adenosylmethionine:tRN A ribosyltransferase-isomerase OS=Flavobacterium endoph yticum OX=1540163 GN=queA PE=3 SV=1
MKLSHFNFNLPKELLAEYPAENRDESRLMVVNRKTKTIEHKMFKDVIDYFEEGDVMVLNNTKVFPARLYGNKEKTGARIEVFLLRELNAEQRLWDVLVDPARKIRIGNKLYFGDDDSLVAEVIDNTTSRGRTLRFLYDGSYEEFRNKLTELGETPIPKYINREVTPEDAERYQTIYAKEEGAVAAPTAGLHFSKHLLKRLEIKGIDFAEVTLHVGLGTFNPVEVEDLSKHKMDSEELKITQEACDIVNEAKAKKKKICAVGTTSMRAIESSVSSAKTLNPYDGWTNKFIFPPHDFSIADCMITNFHTPKSTLLMMISAFTGHDLMKKAYEEAIKEGYKFYSYGDAMLIL

SEQ ID NO: 66642 - protein, 349 aa, Flavobacterium enshiense
  misc_feature (1)..(349): tr|V6S323|V6S323_9FLAO S-adenosylmethionine:tRNA ribosy ltransferase-isomerase OS=Flavobacterium enshiense DK69 OX=1107311 GN=queA PE=3 SV=1
MKLSNFNFNLPAELLAEFPAENRDEARLMVVNRKTQTIEHKLFKDVLDYFGEGDVMVLNNTKVFPARLYGNKEKTGARIEVFLLRELNAEQRLWDVLVDPARKIRIGNKLYFGDDDSLVAEVIDNTTSRGRTLRFLYDGSYEEFRAKLLELGETPIPKYINREVTPEDAERYQTIYAKEEGAVAAPTAGLHFSKHLMKRLEIKGVEFAEITLHVGLGTFNPVEVEDLSKHKMDSEELKITQEACDIVNKAKLAKKRVCAVGTTTMRAMESSVSSSKTLNPYEGWTNKFIFPPYDFSVADCMITNFHTPKSTLLMMISAFCGHDLMRKAYDEAVKEKYKFYSYGDAMLIL

SEQ ID NO: 66643 - protein, 349 aa, Flavobacterium faecale
  misc_feature (1)..(349): tr|A0A2S1LC10|A0A2S1LC10_9FLAO S-adenosylmethionine:tRN A ribosyltransferase-isomerase OS=Flavobacterium faecal e OX=1355330 GN=queA PE=3 SV=1
MKLSHFQFDLPKELLAEFPSENRDEARLMVIDRKKQTIEHKMFKDVIDYFDDGDVMILNNTKVFPARLYGNKEKTGARIEVFLLRELNAEQRLWDVLVDPARKIRIGNKLYFGDDDSLVAEVIDNTTSRGRTLRFLYDGSYEEFRSKLTELGETPIPKYINRDVTPEDADRYQTIYAKEEGAVAAPTAGLHFSKHLLKRLEIKGIKFAEVTLHVGLGTFNPVEVEDLSKHKMDSEELKINQEACDIVNDAKVKKKRICAVGTTSMRAIESAVSSQATLNPFDGWTNKFIFPPHEFSIATCMITNFHTPKSTLLMMISAFCGHDLMRLAYDEAIKEEYKFYSYGDAMLII

SEQ ID NO: 66644 - protein, 349 aa, Flavobacterium flevense
  misc_feature (1)..(349): tr|A0A4Y4B4J0|A0A4Y4B4J0_9FLAO S-adenosylmethionine:tRN A ribosyltransferase-isomerase OS=Flavobacterium fleven se OX=983 GN=queA PE=3 SV=1
MKLSHFQFDLPKELLAEFPAENRDEARLMVIDRKKQTIEHKMFKDVIDYFDDGDVMILNNTKVFPARLYGNKEKTGARIEVFLLRELNAEQRLWDVLVDPARKIRIGNKLYFGDDDSLVAEVIDNTTSRGRTLRFLYDGSYEEFRNKLTELGETPIPKYINREVTPEDAERYQTIYAKEEGAVAAPTAGLHFSKHLLKRLEIKGVKFAEVTLHVGLGTFNPVEVEDLSKHKMDSEELKITQEACDIVNEAKGKRKRVCAVGTTSMRAIESSVSSQNTLNPFEGWTNKFIFPPHDFSVATCMITNFHTPKSTLLMMISAFCGHDLMKKAYEEAIKEKYKFYSYGDAMLII

SEQ ID NO: 66645 - protein, 349 aa, Flavobacterium fluvii
  misc_feature (1)..(349): tr|A0A1M5DPM2|A0A1M5DPM2_9FLAO S-adenosylmethionine:tRN A ribosyltransferase-isomerase OS=Flavobacterium fluvii OX=468056 GN=queA PE=3 SV=1
MKLSHFQFNLPKELLAEFPAENRDESRLMVIDRKKQTIEHKTFKDVIDYFDEGDVLILNNTKVFPARLYGNKEKTGARIEVFLLRELNAEQRLWDVLVDPARKIRIGNKLYFGDDDSLVAEVIDNTTSRGRTLRFLYDGSYEEFRNKLTELGETPIPKYISRDVTPEDADRYQTIYAKEEGAVAAPTAGLHFSKHLLKKLEIKGVKFAEVTLHVGLGTFNPVEVEDLSKHKMDSEELKITQEACDVVNDAKAKRKRICAVGTTSMRAIESSVSSQRTLNPFDGWTNKFIFPPHDFSVATCMITNFHTPKSTLLMMISAFCGHDLMKKAYEEAIKEEYKFYSYGDAMLII

SEQ ID NO: 66646 - protein, 349 aa, Flavobacterium fontis
  misc_feature (1)..(349): tr|A0A1M4XRF1|A0A1M4XRF1_9FLAO S-adenosylmethionine:tRN A ribosyltransferase-isomerase OS=Flavobacterium fontis OX=1124188 GN=queA PE=3 SV=1
MKLSHFNFHLPPELLAEFPAENRDESRLMVVHRSTGQIEHKLFKDIIDYFDDGDVMILNNTKVFPARMYGNKEKTGARIEVFLLRELNAEQRLWDVLVDPARKIRIGNKLYFGDDDSLVAEVIDNTTSRGRTLRFLYDGSYEEFRYKLKELGETPIPKYINREVTEEDAERYQTIYAKEEGAVAAPTAGLHFSKHLLKRLEIKGINFAEVTLHVGLGTFNPVEVEDLSKHKMDSEELRISQEACDTVNKAIENKRRVCCIGTTSMRAIESSVSSNRTLNPYDGWTNKFIFPPYDFSIANCMVTNFHTPKSTLLMMISAFCGHDLMKKAYEEAVKERYRFYSYGDAMLIL

SEQ ID NO: 66647 - protein, 349 aa, Flavobacterium frigidimaris
  misc_feature (1)..(349): tr|A0A1M5TWU3|A0A1M5TWU3_FLAFR S-adenosylmethionine:tRN A ribosyltransferase-isomerase OS=Flavobacterium frigid imaris OX=262320 GN=queA PE=3 SV=1
MKLSHFQFNLPKELLAEFPAENRDESRLMVIDRQKQTIEHKMFKDVINYFDDGDVLILNNTKVFPARLYGNKEKTGARIEVFLLRELNSEQRLWDVLVDPARKIRIGNKLYFGDDDSLVAEVIDNTTSRGRTLRFLYDGSYEEFRNKLTELGETPIPKYISREVTAEDAERYQTIYAKEEGAVAAPTAGLHFSKHLLKKLEIKGINFAEVTLHVGLGTFNPVEVEDLSKHKMDSEELIIKQEACDIVNTAKANKKRICAVGTTSMRAIESSVSSQNTLNPFEGWTNKFIFPPHDFSIANCMITNFHTPKSTLLMMISAFCGHDLMKRAYEEAIKEEYKFYSYGDAMLII

SEQ ID NO: 66648 - protein, 349 aa, Flavobacterium frigoris
  misc_feature (1)..(349): tr|H7FMT6|H7FMT6_FLAFP S-adenosylmethionine:tRNA ribosy ltransferase-isomerase OS=Flavobacterium frigoris (stra in PS1) OX=1086011 GN=queA PE=3 SV=1
MKLSQFQFDLPKELLAEFPSEHRDEARLMVIDRKKQTIEHKTFKDVIDYFDDGDVLILNNTKVFPARLYGNKEKTGARIEVFLLRELNAEQRLWDVLVDPARKIRIGNKLYFGDDDSLVAEVIDNTTSRGRTLRFLYDGSYEEFRKKLTELGETPIPKYISRDVTPEDADRYQTIYAKEEGAVAAPTAGLHFSKHLLKKLEIKGIKFAEVTLHVGLGTFNPVEVEDLSKHKMDSEELKITEQACDIVNDAKAKKKRICTVGTTSMRAVESSVSSHGTLNPFDGWTNKFVFPPHEFTIPTCMITNFHTPKSTLLMMVSAFCGHDLMKRAYEEAIKEEYKFYSYGDAMLII

SEQ ID NO: 66649 - protein, 349 aa, Flavobacterium frigoris
  misc_feature (1)..(349): tr|A0A1H9E0Q5|A0A1H9E0Q5_FLAFI S-adenosylmethionine:tRN A ribosyltransferase-isomerase OS=Flavobacterium frigor is OX=229204 GN=queA PE=3 SV=1
MKLSHFQFDLPKELLAEFPSEHRDEARLMVIDRKKQTIEHKTFKDVIDYFDDGDVLILNNTKVFPARLYGNKEKTGARIEVFLLRELNAEQRLWDVLVDPARKIRIGNKLYFGDDDSLVAEVIDNTTSRGRTLRFLYDGSYEEFRKKLTELGETPIPKYISRDVTPEDAERYQTIYAKEEGAVAAPTAGLHFSKHLLKKLEIKGIKFAEVTLHVGLGTFNPVEVEDLSKHKMDSEELKITQAACDIVNDAKVHKKRICTVGTTSMRAVESSVSSHGTLNPFDGWTNKFVFPPHEFTIPTCMITNFHTPKSTLLMMVSAFCGHDLMKRAYEEAIKEEYKFYSYGDAMLII

SEQ ID NO: 66650 - protein, 349 aa, Flavobacterium fryxellicola
  misc_feature (1)..(349): tr|A0A167TYT4|A0A167TYT4_9FLAO S-adenosylmethionine:tRN A ribosyltransferase-isomerase OS=Flavobacterium fryxel licola OX=249352 GN=queA PE=3 SV=1
MKLSHFQFDLPKELLAEYPAENRDEARLMVIDRKKQTIEHKMFKDVIDYFDEGDVLILNNTKVFPARLYGNKEKTGARIEVFLLRELNSEQRLWDVLVDPARKIRIGNKLYFGDDDSLVAEVIDNTTSRGRTLRFLYDGSYEEFRNKLTELGETPIPKYISRDVTPEDAERYQTIYAKEEGSVAAPTAGLHFSKHLLKKLEIKGIKFAEVTLHVGLGTFNPVEVEDLSKHKMDSEELKISQEACDIVNGAKAKKKRICTVGTTSMRAVESSVSSQNTLNPFDGWTNKFVFPPHDFAIPTCMITNFHTPKSTLLMMVSAFCGHDLMKKAYAEAIEEKYKFYSYGDAMLII

SEQ ID NO: 66651 - protein, 349 aa, Flavobacterium gillisiae; identical to SEQ ID NO: 66649
  misc_feature (1)..(349): tr|A0A1H4CGP8|A0A1H4CGP8_9FLAO S-adenosylmethionine:tRN A ribosyltransferase-isomerase OS=Flavobacterium gillis iae OX=150146 GN=queA PE=3 SV=1

SEQ ID NO: 66652 - protein, 349 aa, Flavobacterium gilvum
  misc_feature (1)..(349): tr|A0A085EJS7|A0A085EJS7_9FLAO S-adenosylmethionine:tRN A ribosyltransferase-isomerase OS=Flavobacterium gilvum OX=1492737 GN=queA PE=3 SV=1
MKLSHFNFNLPKELLAEYPAENRDESRLMVVDRKKQTIEHKMFKDLIDYFDDGDVLILNNTKVFPARLYGNKEKTGARIEVFLLRELNAEQRLWDVLVDPARKIRIGNKLYFGDDDSLVAEVIDNTTSRGRTLRFLYDGSYEEFRNKLTELGETPIPKYINRDVTPEDAERYQTIYAKEEGAVAAPTAGLHFSKHLLKRLEIKGVKFAEVTLHVGLGTFNPVEVEDLSKHKMDSEELKITQEACDIVNAAKVAKKRICTVGTTSMRAVESSVSSQNTLNPYDGWTNKFVFPPHDFAIPNCMITNFHTPKSTLLMMVSAFCGHDLMKRAYEEAIKEQYRFYSYGDAMLII

SEQ ID NO: 66653 - protein, 349 aa, Flavobacterium glaciei
  misc_feature (1)..(349): tr|A0A562PL13|A0A562PL13_9FLAO S-adenosylmethionine:tRN A ribosyltransferase-isomerase OS=Flavobacterium glacie i OX=386300 GN=queA PE=3 SV=1
MKLSHFQFDLPKELLAEYPAENRDESRLMVIDRKKGTIEHKMFKDVIDYFDDGDVLILNNTKVFPARLYGNKEKTGARIEVFLLRELNSEQRLWDVLVDPARKIRIGNKLYFGDDDSLVAEVIDNTTSRGRTLRFLYDGSYEEFRNKLTELGETPIPKYISRDVTPEDAERYQTIYAKEEGAVAAPTAGLHFSKHLLKKLEIKGIKFAEVTLHVGLGTFNPVEVEDLSKHKMDSEELKITQEACDIVNEAKAKKKRICTVGTTSMRAVESSVSSQNTLNPFDGWTNKFVFPPHDFTIPTCMITNFHTPKSTLLMMVSAFCGHDLMKKAYAEAIKEEYKFYSYGDAMLII

SEQ ID NO: 66654 - protein, 349 aa, Flavobacterium glycines
  misc_feature (1)..(349): tr|A0A1B9DN55|A0A1B9DN55_9FLAO S-adenosylmethionine:tRN A ribosyltransferase-isomerase OS=Flavobacterium glycin es OX=551990 GN=queA PE=3 SV=1
MKLSHFNFDLPKELLAEFPAENRDEARLMVIDRKKQTIEHRMFKDIIEYFDDGDVMILNNTKVFPARLYGNKEKTGARIEVFLLRELNAEQRLWDVLVDPARKIRIGNKLYFGDDDSLVAEVIDNTTSRGRTLRFLYDGSYEEFRNKLTELGETPIPKYINREVTPEDAERYQTIYAKEEGAVAAPTAGLHFSKHLLKRLEIKGVNFAEVTLHVGLGTFNPVEVEDLSKHKMDSEELKITQEACDIVNEAKAKRKRVCAVGTTSMRAIESSVSSQNTLNPYEGWTNKFIFPPHDFSVANCMITNFHTPKSTLLMMISAFCGHDLMKKAYEEAIKEKYKFYSYGDAMLIL

SEQ ID NO: 66655 - protein, 349 aa, Flavobacterium granuli
  misc_feature (1)..(349): tr|A0A1M5PRB8|A0A1M5PRB8_9FLAO S-adenosylmethionine:tRN A ribosyltransferase-isomerase OS=Flavobacterium granul i OX=280093 GN=queA PE=3 SV=1
MKLSHFQFDLPKELLAEFPAENRDEARLMVIDRKKQTIEHKMFKDVIDYFDDGDVLILNNTKVFPARLYGNKEKTGARIEVFLLRELNAEQRLWDVLVDPARKIRIGNKLYFGDDDSLVAEVIDNTTSRGRTLRFLYDGSYEEFRNKLTELGETPIPKYISRDVTPEDAERYQTIYAKEEGAVAAPTAGLHFSKHLMKKLEIKGVKFAEVTLHVGLGTFNPVEVEDLSKHKMDSEELKITQEACDIVNEAKAKKKRICTVGTTSMRAVESSVSSQNTLNPFDGWTNKFVFPPHDFTIPTCMITNFHTPKSTLLMMVSAFCGHDLMKKAYEEAIKEKYKFYSYGDAMLII

SEQ ID NO: 66656 - protein, 349 aa, Flavobacterium haoranii
  misc_feature (1)..(349): tr|A0A1M6DDI0|A0A1M6DDI0_9FLAO S-adenosylmethionine:tRN A ribosyltransferase-isomerase OS=Flavobacterium haoran ii OX=683124 GN=queA PE=3 SV=1
MKLSHFNFNLPAELLAEFPAENRDESRLMVVHRKTGQIEHKMFKDIIDYFDDGDVMVLNNTKVFPARLYGNKEKTGARIEVFLLRELNAEQRLWDVLVDPARKIRIGNKLYFGDDDSLVAEVIDNTTSRGRTLRFLYDGSYEEFRQKLVDLGETPIPKYINREVTPEDADRYQTIYAKEEGAVAAPTAGLHFSKHLMKRLEIKGINFAEVTLHVGLGTFNPVEVEDLSKHKMDSEEMVITQEACDIVNQAKAKKSKVCCIGTTSMRAMESSVSSMKTLNPYVGWTNKFIYPPYDFSIADAMVTNFHTPKSTLLMMISAFCGHDLMKKAYDEAVKEGYKFYSYGDAMLIL

SEQ ID NO: 66657 - protein, 349 aa, Flavobacterium hercynium
  misc_feature (1)..(349): tr|A0A226GXA1|A0A226GXA1_9FLAO S-adenosylmethionine:tRN A ribosyltransferase-isomerase OS=Flavobacterium hercyn ium OX=387094 GN=queA PE=3 SV=1
MKLSHFQFNLPKELLAEFPAENRDESRLMVIDRQKQTIEHKMFKDVINYFDDGDVLILNNTKVFPARLYGNKEKTGARIEVFLLRELNSEQRLWDVLVDPARKIRIGNKLYFGDDDSLVAEVIDNTTSRGRTLRFLYDGSYEEFRNKLTELGETPIPKYINREVTAEDAERYQTIYAKEEGAVAAPTAGLHFSKHLLKKLEIKGINFAEVTLHVGLGTFNPVEVEDLSKHKMDSEELIINQQACDIVNTAKAAKKRICAVGTTSMRAIESSVSSQNTLNPYEGWTNKFIFPPHDFSIANCMITNFHTPKSTLLMMISAFCGHDLMKRAYEEAIKEEYKFYSYGDAMLII

SEQ ID NO: 66658 - protein, 349 aa, Flavobacterium hibernum
  misc_feature (1)..(349): tr|A0A0D0EKR4|A0A0D0EKR4_9FLAO S-adenosylmethionine:tRN A ribosyltransferase-isomerase OS=Flavobacterium hibern um OX=37752 GN=queA PE=3 SV=1
MKLSHFQFNLPKELLAEFPAENRDESRLMVIDRQKQTIEHKMFKDVINYFDDGDVLILNNTKVFPARLYGNKEKTGARIEVFLLRELNSEQRLWDVLVDPARKIRIGNKLYFGDDDSLVAEVIDNTTSRGRTLRFLYDGSYEEFRNKLTELGETPIPKYISRDVTPEDAERYQTIYAKEEGAVAAPTAGLHFSKHLLKKLEIKGVNFAEVTLHVGLGTFNPVEVEDLSKHKMDSEELIIKQEACDIVNDAKAKKKRICAVGTTSMRAIESSVSSQNTLNPYEGWTNKFIFPPHDFSIANCMITNFHTPKSTLLMMISAFCGHDLMKRAYEEAIKEGYKFYSYGDAMLII

SEQ ID NO: 66659 - protein, 349 aa, Flavobacterium hydatis
  misc_feature (1)..(349): tr|A0A086AU33|A0A086AU33_FLAHY S-adenosylmethionine:tRN A ribosyltransferase-isomerase OS=Flavobacterium hydati s OX=991 GN=queA PE=3 SV=1
MKLSHFQFNLPKELLAEFPAENRDESRLMVIDRKKQTIEHKMFKDVINYFDDGDVLILNNTKVFPARLYGNKEKTGARIEVFLLRELNSEQRLWDVLVDPARKIRIGNKLYFGDDDSLVAEVIDNTTSRGRTLRFLYDGSYEEFRNKLTELGETPIPKYISRDVTPEDAERYQTIYAKEEGAVAAPTAGLHFSKHLLKKLEIKGVNFAEVTLHVGLGTFNPVEVEDLSKHKMDSEELIITEEACEIVNLAKQNKKRICAVGTTSMRAIESSVSSQNTLNPFEGWTNKFIFPPHDFSIANCMITNFHTPKSTLLMMISAFCGHDLMKRAYEEAIKEGYKFYSYGDAMLII

SEQ ID NO: 66660 - protein, 349 aa, Flavobacterium indicum
  misc_feature (1)..(349): tr|H8XSJ9|H8XSJ9_FLAIG S-adenosylmethionine:tRNA ribosy ltransferase-isomerase OS=Flavobacterium indicum (strai n DSM 17447 / CIP 109464 / GPTSA100-9) OX=1094466 GN=qu eA PE=3 SV=1
MKLSNFNFNLPDELLAEFPSENRDESRLMVVNRKTGTIEHKMFKDIIDYFDDGDVMVLNNTKVFPARLYGNKEKTGARIEVFLLRELNAEQRLWDVLVDPARKIRIGNKLYFGDDDSLVAEVIDNTTSRGRTLRFLYDGSYEEFRQKLVELGETPIPKYINREVTPEDAERYQTIYAKEEGAVAAPTAGLHFSKHLMKRLEIKGINFAEVTLHVGLGTFNPVEVEDLSKHKMDSEEMYVTQEACDIVNKAKANKKKVCCIGTTSMRAMESSVSSMKTLNPYVGWTNKFIYPPYDFSIADCMVTNFHTPKSTLLMMISAFCGHDLMMKAYKEAIEEKYRFYSYGDAMLII

SEQ ID NO: 66661 - protein, 349 aa, Flavobacterium johnsoniae
  misc_feature (1)..(349): sp|A5FMM5|QUEA_FLAJ1 S-adenosylmethionine:tRNA ribosylt ransferase-isomerase OS=Flavobacterium johnsoniae (stra in ATCC 17061 / DSM 2064 / UW101) OX=376686 GN=queA PE= 3 SV=1
MKLSHFNFNLPKELLAEFPAENRDESRLMVIDRQKNTIEHKMFKDVINYFDDGDVLILNNTKVFPARLYGNKEKTGARIEVFLLRELNSEQRLWDVLVDPARKIRIGNKLYFGDDDSLVAEVIDNTTSRGRTLRFLYDGSYEEFRNKLTELGETPIPKYINRDVTPEDAERYQTIYAKEEGAVAAPTAGLHFSKHLLKKLEIKGVNFAEVTLHVGLGTFNPVEVEDLSKHKMDSEELIITQEACDIVNEGKAKKKRICAVGTTSMRAIESSVSSANTLNPYEGWTNKFIFPPHDFSIANCMITNFHTPKSTLLMMISAFCGHDLMKKAYEEAIKEGYKFYSYGDAMLIL

SEQ ID NO: 66662 - protein, 349 aa, Flavobacterium johnsoniae
  misc_feature (1)..(349): tr|A0A2W5RSM4|A0A2W5RSM4_FLAJO S-adenosylmethionine:tRN A ribosyltransferase-isomerase OS=Flavobacterium johnso niae OX=986 GN=queA PE=3 SV=1
MKLSHFNFNLPKELLAEYPAENRDESRLMVVNRKTKTIEHKMFKDIIDYFEEGDVMVLNNTKVFPARLYGNKEKTGARIEVFLLRELNAEQRLWDVLVDPARKIRIGNKLYFGDDDSLVAEVIDNTTSRGRTLRFLYDGSYEEFRNKLTELGETPIPKYINREVTPEDAERYQTIYAKEEGAVAAPTAGLHFSKHLLKRLEIKGIDFAEVTLHVGLGTFNPVEVEDLSKHKMDSEELKITQEACDIVNKAKANKKKVCAVGTTSMRAIESSVSSAKTLNPYDGWTNKFIFPPHDFSIADCMITNFHTPKSTLLMMISAFTGHDLMKKAYEEAIKEGYRFYSYGDAMLIL

SEQ ID NO: 66663 - protein, 349 aa, Flavobacterium kingsejongi
  misc_feature (1)..(349): tr|A0A2S1LN54|A0A2S1LN54_9FLAO S-adenosylmethionine:tRN A ribosyltransferase-isomerase OS=Flavobacterium kingse jongi OX=1678728 GN=queA PE=3 SV=1
MKLSHFQFNLPKELLAEYPAENRDEARLMVVDRKNKTIEHKMFKDVIDYFDEGDVLVLNNTKVFPARLYGNKEKTGARIEVFLLRELNSEQRLWDVLVDPARKIRIGNKLYFGDDDSLVAEVIDNTTSRGRTLRFLYDGSYEEFRNKLTELGETPIPKYINREVTPEDAERYQTIYAKEEGAVAAPTAGLHFSKHLLKRLEIKGVDFAEVTLHVGLGTFNPVEVEDLSKHKMDSEELKVTQEACDIVNNAKAKKKKICAVGTTSMRALESSVSSAKTLNPFDGWTNKFIFPPHDFSIADCMITNFHTPKSTLLMMISAFTGHDLMKKAYEEAINEGYKFYSYGDAMLII

SEQ ID NO: 66664 - protein, 349 aa, Flavobacterium lacus
  misc_feature (1)..(349): tr|A0A328X0V1|A0A328X0V1_9FLAO S-adenosylmethionine:tRN A ribosyltransferase-isomerase OS=Flavobacterium lacus OX=1353778 GN=queA PE=3 SV=1
MKLSHFQFNLPTELLAEYPAENRDESRLMVIDRAKKTIEHKTFKDIINYFDDGDVMIMNNTKVFPARLYGNKEKTGARIEVFLLRELNAEQRLWDVLVDPARKIRIGNKLYFGDDDSLVAEVIDNTTSRGRTLRFLYDGSYDEFRNKLTELGETPIPKYITREVTPEDEERYQTIYAKVEGAVAAPTAGLHFSKHLMKRLEIKGVDFAEVTLHVGLGTFNPVEVEDLSKHKMDSEELIITQQACDIVNNALTHKKRICCVGTTSMRAIESSVSSARTMNPFEGWTNKFIYPPYDFSIANCMVTNFHTPKSTLLMMISAFCGHDLMKKAYEEAIKEKYKFYSYGDAMLII

SEQ ID NO: 66665 - protein, 349 aa, Flavobacterium limicola
  misc_feature (1)..(349): tr|A0A495S3Q3|A0A495S3Q3_9FLAO S-adenosylmethionine:tRN A ribosyltransferase-isomerase OS=Flavobacterium limico la OX=180441 GN=queA PE=3 SV=1
MKLSHFQFDLPKELLAEYPAENRDESRLMVIDRKKGTIEHKMFKDVIDYFDEGDVLILNNTKVFPARLYGNKEKTGARIEVFLLRELNSEQRLWDVLVDPARKIRIGNKLYFGDDDSLVAEVIDNTTSRGRTLRFLYDGSYEEFRNKLTELGETPIPKYISRDVTPEDAERYQTIYAKEEGAVAAPTAGLHFSKHLLKKLEIKGIKFAEVTLHVGLGTFNPVEVEDLSKHKMDSEELKITQEACDIVNEAKAKKKRICTVGTTSMRAVESSVSSQNTLNPFDGWTNKFVFPPHDFTIPTCMITNFHTPKSTLLMMVSAFCGHDLMKKAYAEAIEKEYKFYSYGDAMMII

SEQ ID NO: 66666 - protein, 349 aa, Flavobacterium limnosediminis
  misc_feature (1)..(349): tr|V6SS75|V6SS75_9FLAO S-adenosylmethionine:tRNA ribosy ltransferase-isomerase OS=Flavobacterium limnosediminis JC2902 OX=1341181 GN=queA PE=3 SV=1
MKLSNFNFNLPAELLAEFPAENRDESRLMVVNRKTQTIEHKLFKDVLDYFGEGDVMVLNNTKVFPARLYGNKEKTGARIEVFLLRELNAEQRLWDVLVDPARKIRIGNKLYFGDDDSLVAEVIDNTTSRGRTLRFLYDGSYEEFRAKLLELGETPIPKYINREVTPEDAERYQTIYAKEEGAVAAPTAGLHFSKHLMKRLEIKGVEFAEVTLHVGLGTFNPVEVEDLSKHKMDSEELKITQEACDIVNKAKLNKKRVCAVGTTTMRAMESSVSSSKTLNSFEGWTNKFIFPPYDFSVADCMITNFHTPKSTLLMMISAFCGHDLMRKAYDEAIKEGYKFYSYGDAMLIL

SEQ ID NO: 66667 - protein, 349 aa, Flavobacterium lindanitolerans; identical to SEQ ID NO: 66662
  misc_feature (1)..(349): tr|A0A497V5S5|A0A497V5S5_9FLAO S-adenosylmethionine:tRN A ribosyltransferase-isomerase OS=Flavobacterium lindan itolerans OX=428988 GN=queA PE=3 SV=1

SEQ ID NO: 66668 - protein, 349 aa, Flavobacterium macacae
  misc_feature (1)..(349): tr|A0A3P3WAY0|A0A3P3WAY0_9FLAO S-adenosylmethionine:tRN A ribosyltransferase-isomerase OS=Flavobacterium macaca e OX=2488993 GN=queA PE=3 SV=1
MKLSHFQFNLPKELLAEYPAENRDESRLMVIDRKKQTIEHKMFKDVIDYFDEGDVMVLNNTKVFPARLYGNKEKTGARIEVFLLRELNAEQRLWDVLVDPARKIRIGNKLYFGDDDSLVAEVIDNTTSRGRTLRFLYDGSYEEFRGKLTELGETPIPKYINREVTPEDADRYQTIYAKEEGAVAAPTAGLHFSKHLLKKLEIKGIDFAEVTLHVGLGTFNPVEVEDLSKHKMDSEELKITQEACDIVNSAKERKKRICAVGTTSMRAIESSVSSARTLNPFDGWTNKFIFPPHDFSIADCMITNFHTPKSTLLMMISAFCGHDLMKRAYDEAIKEEYKFYSYGDAMLII

SEQ ID NO: 66669 - protein, 349 aa, Flavobacterium magnum
  misc_feature (1)..(349): tr|A0A2S0RDP3|A0A2S0RDP3_9FLAO S-adenosylmethionine:tRN A ribosyltransferase-isomerase OS=Flavobacterium magnum OX=2162713 GN=queA PE=3 SV=1
MKLSHFNFNLPKELLAEFPAENRDESRLMVVNRKDKTIEHKMFKDIIDYFDEGDVMILNNTKVFPARLYGNKEKTGARIEVFLLRELNAEQRLWDVLVDPARKIRIGNKLYFGDDDSLVAEVIDNTTSRGRTLRFLYDGSYEEFRNKLTELGETPIPKYINREVVPEDAERYQTIYAKEEGAVAAPTAGLHFSKHLLKRLEIKGVNFAEVTLHVGLGTFNPVEVEDLSKHKMDSEELKITQEACDIVNEAKANRKRVCAIGTTSMRAIESSVSSAKMLNPYDGWTNKFIFPPHDFSIADCMVTNFHTPKSTLLMMISAFTGHDLMKKAYEEAIKEEYKFYSYGDAMLIL

SEQ ID NO: 66670 - protein, 349 aa, Flavobacterium marinum
  misc_feature (1)..(349): tr|A0A1H6K252|A0A1H6K252_9FLAO S-adenosylmethionine:tRN A ribosyltransferase-isomerase OS=Flavobacterium marinu m OX=1159016 GN=queA PE=3 SV=1
MKLSNFNFNLPPELLAEFPAENRDEARLMVVNRKAGTIEHKLFKDLIDYFDEGDVMVLNNTKVFPARLYGNKEKTGARIEVFLLRELNEEQRLWDVLVDPARKIRIGNKLYFGNDDSLVAEVIDNTTSRGRTLRFLYDGSYEEFRLKLRELGETPIPKYINREVTPEDEERYQTIYATEEGAVAAPTAGLHFSKHLLKRLEIKGVDFAKVTLHIGLGTFNPVEVEDLSKHKMDSEELIITQEACDIVNKAKANKKKICAVGTTSMRALESSVSSNQTLNPFEGWTNKFIFPPYDFSIADCMVTNFHMPKSTLLMMISAFTGHDLMMKAYDEAVKEGYKFYSYGDAMLIL

SEQ ID NO: 66671 - protein, 349 aa, Flavobacterium micromati
  misc_feature (1)..(349): tr|A0A1M5F9J8|A0A1M5F9J8_9FLAO S-adenosylmethionine:tRN A ribosyltransferase-isomerase OS=Flavobacterium microm ati OX=229205 GN=queA PE=3 SV=1
MKLSHFQFDLPKELLAEYPAENRDEARLMVIDRKKQTIEHKLFKDVIDYFDEGDVLILNNTKVFPARLYGNKEKTGARIEVFLLRELNSEQRLWDVLVDPARKIRIGNKLYFGDDDSLVAEVIDNTTSRGRTLRFLYDGSYEEFRNKLTELGETPIPKYISRDVTPEDAERYQTIYAKEEGSVAAPTAGLHFSKHLLKKLEIKGINFAEVTLHVGLGTFNPVEVEDLSKHKMDSEELKITQEACDIVNQAKAKKKRICTVGTTSMRAVESSVSSQNTLNPFDGWTNKFVFPPHDFAIPTCMITNFHTPKSTLLMMVSAFCGHDLMKRAYAEAIEEKYKFYSYGDAMLII

SEQ ID NO: 66672 - protein, 349 aa, Flavobacterium nitrogenifigens
  misc_feature (1)..(349): tr|A0A521D731|A0A521D731_9FLAO S-adenosylmethionine:tRN A ribosyltransferase-isomerase OS=Flavobacterium nitrog enifigens OX=1617283 GN=queA PE=3 SV=1
MKLSHFNFNLPKELLAEFPAENRDESRLMVIDRKKNTIEHKMFKDVINYFDDGDVLILNNTKVFPARLYGNKEKTGARIEVFLLRELNSEQRLWDVLVDPARKIRIGNKLYFGDDDSLVAEVIDNTTSRGRTLRFLYDGSYEEFRNKLTELGETPIPKYINREVTAEDAERYQTIYAKEEGAVAAPTAGLHFSKHLLKKLEIKGVNFAEVTLHVGLGTFNPVEVEDLSKHKMDSEELIITQEACDIVNEGKAKKKRICAVGTTSMRAIESSVSSANTLNPYEGWTNKFIFPPHDFSIANCMITNFHTPKSTLLMMISAFCGHDLMKKAYEEAIKEGYKFYSYGDAMLIL

SEQ ID NO: 66673 - protein, 349 aa, Flavobacterium noncentrifugens
  misc_feature (1)..(349): tr|A0A1G9B3B4|A0A1G9B3B4_9FLAO S-adenosylmethionine:tRN A ribosyltransferase-isomerase OS=Flavobacterium noncen trifugens OX=1128970 GN=queA PE=3 SV=1
MKLSHFNFNLPKELLAEYPAENRDESRLMVINREKKTIEHKMFKDVIDYFGDGDVLVLNNTKVFPARLYGNKEKTGARIEVFLLRELNSEQRLWDVLVDPARKIRIGNKLYFGDDDSLVAEVIDNTTSRGRTLRFLYDGSYEEFRNKLTELGETPIPKYISREVTPEDAERYQTIYAKEEGAVAAPTAGLHFSKHLLKRLEIKGVNFAEVTLHVGLGTFNPVEVEDLSKHKMDSEELIITQQACDIVNDAKIKKKRICAVGTTSMRAIESSVSSAKTLNPFEGWTNKFIFPPHDFSVANCMITNFHTPKSTLLMMVSAFCGHDLMKKAYEEAIKEGYKFYSYGDAMLIL

SEQ ID NO: 66674 - protein, 349 aa, Flavobacterium omnivorum
  misc_feature (1)..(349): tr|A0A1G7Y0I3|A0A1G7Y0I3_9FLAO S-adenosylmethionine:tRN A ribosyltransferase-isomerase OS=Flavobacterium omnivo rum OX=178355 GN=queA PE=3 SV=1
MKLSHFQFDLPKELLAEYPAENRDEARLMVIDRKKGTIEHKMFKDVIDYFDEGDVLILNNTKVFPARLYGNKEKTGARIEVFLLRELNSEQRLWDVLVDPARKIRIGNKLYFGDDDSLVAEVIDNTTSRGRTLRFLYDGSYEEFRNKLTELGETPIPKYISRDVTPEDAERYQTIYAKEEGSVAAPTAGLHFSKHLLKKLEIKGIKFAEVTLHVGLGTFNPVEVEDLSKHKMDSEELKISQEACDIVNGAKAKKKRICTVGTTSMRAVESSVSSQNTLNPFDGWTNKFVFPPHDFAIPTCMITNFHTPKSTLLMMVSAFCGHDLMKKAYAEAIEEGYKFYSYGDAMLII

SEQ ID NO: 66675 - protein, 349 aa, Flavobacterium oncorhynchi
  misc_feature (1)..(349): tr|A0A226HZP6|A0A226HZP6_9FLAO S-adenosylmethionine:tRN A ribosyltransferase-isomerase OS=Flavobacterium oncorh ynchi OX=728056 GN=queA PE=3 SV=1
MKLSHFNFNLPKELLAEFPAENRDESRLMVIDRQKQTIEHKMFKDVINYFDDGDVLILNNTKVFPARLYGNKEKTGARIEVFLLRELNSEQRLWDVLVDPARKIRIGNKLYFGDDDSLVAEVIDNTTSRGRTLRFLYDGSYEEFRNKLTELGETPIPKYISREVTAEDAERYQTIYAKEEGAVAAPTAGLHFSKHLLKKLEIKGVNFAEVTLHVGLGTFNPVEVEDLSKHKMDSEELIIRQEACDIVNEAKAKKKRICAVGTTSMRAIESSVSSANTLNPYEGWTNKFIFPPHDFSIANCMITNFHTPKSTLLMMISAFCGHDLMKKAYDEAIKEGYKFYSYGDAMLIL

SEQ ID NO: 66676 - protein, 349 aa, Flavobacterium pallidum
  misc_feature (1)..(349): tr|A0A2S1SGJ0|A0A2S1SGJ0_9FLAO S-adenosylmethionine:tRN A ribosyltransferase-isomerase OS=Flavobacterium pallid um OX=2172098 GN=queA PE=3 SV=1
MKLSHFNFNLPKELLAEYPAENRDESRLMVINRKEKTIEHKMFKDIIDYFDEGDVMILNNTKVFPARLYGNKEKTGARIEVFLLRELNAEQRLWDVLVDPARKIRIGNKLYFGDDDSLVAEVIDNTTSRGRTLRFLYDGSYEEFRNKLTELGETPIPKYINREVVPEDAERYQTIYAKEEGAVAAPTAGLHFSKHLLKRLEIKGINFAEVTLHVGLGTFNPVEVEDLSKHKMDSEELKITQEACDVVNEAKSQKKRVCAVGTTSMRAIESSVSSAKLLNPYDGWTNKFIFPPHDFSIADCMVTNFHTPKSTLLMMISAFTGHDLMKKAYEEAIKENYKFYSYGDAMLIL

SEQ ID NO: 66677 - protein, 349 aa, Flavobacterium pectinovorum
  misc_feature (1)..(349): tr|A0A1M7P356|A0A1M7P356_9FLAO S-adenosylmethionine:tRN A ribosyltransferase-isomerase OS=Flavobacterium pectin ovorum OX=29533 GN=queA PE=3 SV=1
MKLSHFQFNLPKELLAEFPAENRDESRLMVIDRQKQTIEHKMFKDVINYFDDGDVLILNNTKVFPARLYGNKEKTGARIEVFLLRELNSEQRLWDVLVDPARKIRIGNKLYFGDDDSLVAEVIDNTTSRGRTLRFLYDGSYEEFRNKLTELGETPIPKYINREVTAEDAERYQTIYAKEEGAVAAPTAGLHFSKHLLKKLEIKGVNFAEVTLHVGLGTFNPVEVEDLSKHKMDSEELIIKQEACDIVNAAKVAKKRICAVGTTSMRAIESSVSSQNTLNPYEGWTNKFIFPPHDFSIANCMITNFHTPKSTLLMMISAFCGHDLMKKAYEEAIKEGYKFYSYGDAMLIL

SEQ ID NO: 66678 - protein, 349 aa, Flavobacterium pectinovorum
  misc_feature (1)..(349): tr|A0A502EPE7|A0A502EPE7_9FLAO S-adenosylmethionine:tRN A ribosyltransferase-isomerase OS=Flavobacterium pectin ovorum OX=29533 GN=queA PE=3 SV=1
MKLSHFQFNLPKELLAEFPAENRDESRLMVIDRQKQTIEHKMFKDVINYFDDGDVLILNNTKVFPARLYGNKEKTGARIEVFLLRELNSEQRLWDVLVDPARKIRIGNKLYFGDDDSLVAEVIDNTTSRGRTLRFLYDGSYEEFRNKLTELGETPIPKYINREVTAEDAERYQTIYAKEEGAVAAPTAGLHFSKHLLKKLEIKGINFAEVTLHVGLGTFNPVEVEDLSKHKMDSEELIIKQEACDIVNAAKIAKKRICAVGTTSMRAIESSVSSQNTLNPFEGWTNKFIFPPHDFSIANCMITNFHTPKSTLLMMISAFCGHDLMKRAYEEAIKEGYKFYSYGDAMLII

SEQ ID NO: 66679 - protein, 349 aa, Flavobacterium phragmitis; identical to SEQ ID NO: 66639
  misc_feature (1)..(349): tr|A0A1I1S419|A0A1I1S419_9FLAO S-adenosylmethionine:tRN A ribosyltransferase-isomerase OS=Flavobacterium phragm itis OX=739143 GN=queA PE=3 SV=1

SEQ ID NO: 66680 - protein, 349 aa, Flavobacterium psychrolimnae; identical to SEQ ID NO: 66665
  misc_feature (1)..(349): tr|A0A366AW19|A0A366AW19_9FLAO S-adenosylmethionine:tRN A ribosyltransferase-isomerase OS=Flavobacterium psychr olimnae OX=249351 GN=queA PE=3 SV=1

SEQ ID NO: 66681 - protein, 349 aa, Flavobacterium psychrophilum
  misc_feature (1)..(349): sp|A6GW82|QUEA_FLAPJ S-adenosylmethionine:tRNA ribosylt ransferase-isomerase OS=Flavobacterium psychrophilum (s train JIP02/86 / ATCC 49511) OX=402612 GN=queA PE=3 SV= 1
MKLSHFQFNLPDELLAEYPAENRDESRLMVVNRAKGTIEHKMFKDVLDYFDEGDVLVLNNTKVFPARLYGNKEKTGARIEVFLLRELNAEQRLWDVLVDPARKIRIGNKLYFGDDDSLVAEVIDNTTSRGRTLRFLYDGSYEEFRNKLTELGETPIPKYISREVTPEDAERYQTIYAKEEGAVAAPTAGLHFSKHLMKRLEIKGIQFAEVTLHVGLGTFNPVEVEDLSKHKMDSEELKITQEACDIVNAAKERKSRICAVGTTSMRAIESSVSSARTLNPYDGWTNKFIFPPHDFSLATCMITNFHTPKSTLMMMISAFCGHDLMKEAYAEAIKEKYKFYSYGDAMLII

SEQ ID NO: 66682 - protein, 349 aa, Flavobacterium psychrophilum; identical to SEQ ID NO: 66681
  misc_feature (1)..(349): tr|A0A076NYU2|A0A076NYU2_FLAPS S-adenosylmethionine:tRN A ribosyltransferase-isomerase OS=Flavobacterium psychr ophilum OX=96345 GN=queA PE=3 SV=1

SEQ ID NO: 66683 - protein, 349 aa, Flavobacterium reichenbachii
  misc_feature (1)..(349): tr|A0A085ZKK4|A0A085ZKK4_9FLAO S-adenosylmethionine:tRN A ribosyltransferase-isomerase OS=Flavobacterium reiche nbachii OX=362418 GN=queA PE=3 SV=1
MKLSHFNFNLPKELLAEFPAENRDESRLMVIDRQKQTIEHKMFKDVINYFDDGDVLILNNTKVFPARLYGNKEKTGARIEVFLLRELNSEQRLWDVLVDPARKIRIGNKLYFGDDDSLVAEVIDNTTSRGRTLRFLYDGSYEEFRNKLTELGETPIPKYINREVTAEDAERYQTIYAKEEGAVAAPTAGLHFSKHLLKKLEIKGVNFAEVTLHVGLGTFNPVEVEDLSKHKMDSEELIINQEACDIVNEAKAKKKRICAVGTTSMRAIESSVSSQNTLNPYEGWTNKFIFPPHDFSIANCMITNFHTPKSTLLMMISAFCGHDLMKKAYDEAIKEGYKFYSYGDAMLII

SEQ ID NO: 66684 - protein, 349 aa, Flavobacterium resistens
  misc_feature (1)..(349): tr|A0A521EFQ6|A0A521EFQ6_9FLAO S-adenosylmethionine:tRN A ribosyltransferase-isomerase OS=Flavobacterium resist ens OX=443612 GN=queA PE=3 SV=1
MKLSHFNFNLPKELLAEFPAENRDESRLMVIDRKKNTIEHKMFKDVINYFDDGDVLILNNTKVFPARLYGNKEKTGARIEVFLLRELNSEQRLWDVLVDPARKIRIGNKLYFGDDDSLVAEVIDNTTSRGRTLRFLYDGSYEEFRNKLTELGETPIPKYINREVTAEDAERYQTIYAKEEGAVAAPTAGLHFSKHLLKKLEIKGVNFAEVTLHVGLGTFNPVEVEDLSKHKMDSEELIITQQACDIVNEGKAKKKRICAVGTTSMRAIESSVSSANTLNPYEGWTNKFIFPPHDFSIANCMITNFHTPKSTLLMMISAFCGHDLMKKAYDEAIKEGYKFYSYGDAMLIL

SEQ ID NO: 66685 - protein, 349 aa, Flavobacterium rivuli
  misc_feature (1)..(349): tr|A0A0A2M668|A0A0A2M668_9FLAO S-adenosylmethionine:tRN A ribosyltransferase-isomerase OS=Flavobacterium rivuli WB 3.3-2 = DSM 21788 OX=1121895 GN=queA PE=3 SV=1
MKLSNFNFNLPKELLAEYPSENRDESRLMVIDRKTKTIEHRQFKDVIDYFGEGDVMVLNNTKVFPARLYGNKEKTGARIEVFLLRELNSEQRLWDVLVDPARKIRIGNKLYFGDDDSLVAEVIDNTTSRGRTLRFLYDGSYEEFRNKLTELGETPIPKYINREVEPEDAERYQTIYAKEEGAVAAPTAGLHFSKHLLKRLEIKGVDFAEITLHVGLGTFNPVEVEDLSKHKMDSEELIITQKACDIVNNAKAKKGKICAVGTTSMRGMESSVSSQRTLNPYVGWTNKFIFPPYDFSVADCMITNFHTPKSTLLMMISAFMGHDLMKRAYEEAIAEGYKFYTYGDAMLIL

SEQ ID NO: 66686 - protein, 349 aa, Flavobacterium saccharophilum
  misc_feature (1)..(349): tr|A0A1M6YX32|A0A1M6YX32_9FLAO S-adenosylmethionine:tRN A ribosyltransferase-isomerase OS=Flavobacterium saccha rophilum OX=29534 GN=queA PE=3 SV=1
MKLSHFQFNLPKELLAEFPAENRDESRLMVIDRQKQTIEHKMFKDVINYFDDGDVLILNNTKVFPARLYGNKEKTGARIEVFLLRELNSEQRLWDVLVDPARKIRIGNKLYFGDDDSLVAEVIDNTTSRGRTLRFLYDGSYEEFRNKLTELGETPIPKYINREVTAEDAERYQTIYAKEEGAVAAPTAGLHFSKHLLKKLEIKGVNFAEVTLHVGLGTFNPVEVEDLSKHKMDSEELIIKQEACDIVNEAKAKKKRICAVGTTSMRAIESSVSSQNTLNPYEGWTNKFIFPPHDFSIANCMITNFHTPKSTLLMMISAFCGHDLMKKAYDEAIKEGYKFYSYGDAMLII

SEQ ID NO: 66687 - protein, 349 aa, Flavobacterium saliperosum
  misc_feature (1)..(349): tr|A0A1G4VV63|A0A1G4VV63_9FLAO S-adenosylmethionine:tRN A ribosyltransferase-isomerase OS=Flavobacterium salipe rosum OX=329186 GN=queA PE=3 SV=1
MKLSNFNFNLPAELLAEYPAENRDEARLMVVNRKTQTIEHKLFKDVLEYFGEGDVMVLNNTKVFPARLYGNKEKTGARIEVFLLRELNAEQRLWDVLVDPARKIRIGNKLYFGDDDSLVAEVIDNTTSRGRTLRFLYDGSYEEFRAKLLELGETPIPKYINREVTPEDAERYQTIYAKEEGAVAAPTAGLHFSKHLMKRLEIKGVEFAEVTLHVGLGTFNPVEVEDLSKHKMDSEELKISQEACDIVNKAKVNKKRVCAVGTTTMRAMESSVSSSRTLNAFEGWTNKFIFPPYDFSVADCMITNFHTPKSTLLMMISAFCGHDLMRKAYDEAIKEGYKFYSYGDAMLIL

SEQ ID NO: 66688 - protein, 349 aa, Flavobacterium segetis
  misc_feature (1)..(349): tr|A0A1M5FTA8|A0A1M5FTA8_9FLAO S-adenosylmethionine:tRN A ribosyltransferase-isomerase OS=Flavobacterium segeti s OX=271157 GN=queA PE=3 SV=1
MKLSHFQFDLPKELLAEYPAENRDEARLMVIDRKKQTIEHKMFKDVIDYFDEGDVLILNNTKVFPARLYGNKEKTGARIEVFLLRELNSEQRLWDVLVDPARKIRIGNKLYFGDDDSLVAEVIDNTTSRGRTLRFLYDGSYEEFRNKLTELGETPIPKYISRDVTPEDAERYQTIYAKEEGSVAAPTAGLHFSKHLLKKLEIKGINFAEVTLHVGLGTFNPVEVEDLSKHKMDSEELKITQEACDIVNNAKAKKKRICTVGTTSMRAVESSVSSQNTLNPFDGWTNKFVFPPHDFTIPTCMITNFHTPKSTLLMMVSAFCGHDLMKRAYAEAIEEKYKFYSYGDAMLII

SEQ ID NO: 66689 - protein, 349 aa, Flavobacterium seoulense
  misc_feature (1)..(349): tr|A0A066WUC1|A0A066WUC1_9FLAO S-adenosylmethionine:tRN A ribosyltransferase-isomerase OS=Flavobacterium seoule nse OX=1492738 GN=queA PE=3 SV=1
MKLSHFNFDLPKELLAEFPAENRDEARLMVIDRKKQTIEHKMFKDVIDYFDDGDVMILNNTKVFPARLYGNKEKTGARIEVFLLRELNAEQRLWDVLVDPARKIRIGNKLYFGDDDSLVAEVIDNTTSRGRTLRFLYDGSYEEFRNKLTELGETPIPKYINREVTPEDAERYQTIYAKEEGAVAAPTAGLHFSKHLLKRLEIKGVNFAEVTLHVGLGTFNPVEVEDLSKHKMDSEELKITQEACDIVNEAKGKRKRVCAVGTTSMRAIESSVSSQNTLNPYEGWTNKFIFPPHDFSVATCMITNFHTPKSTLLMMISAFCGHDLMKKAYEEAIKEKYKFYSYGDAMLIL

SEQ ID NO: 66690 - protein, 349 aa, Flavobacterium sinopsychrotolerans; identical to SEQ ID NO: 66665
  misc_feature (1)..(349): tr|A0A1H8QS82|A0A1H8QS82_9FLAO S-adenosylmethionine:tRN A ribosyltransferase-isomerase OS=Flavobacterium sinops ychrotolerans OX=604089 GN=queA PE=3 SV=1

SEQ ID NO: 66691 - protein, 349 aa, Flavobacterium sp.
  misc_feature (1)..(349): tr|A0A2N0HEA3|A0A2N0HEA3_9FLAO S-adenosylmethionine:tRN A ribosyltransferase-isomerase OS=Flavobacterium sp. 5 OX=2035199 GN=queA PE=3 SV=1
MKLSHFQFNLPKELLAEYPAENRDESRLMVVDRKNQTITHKMFKDVIDYFDDGDVLILNNTKVFPARLYGNKEKTGARIEVFLLRELNAEQRLWDVLVDPARKIRIGNKLYFGDDDSLVAEVIDNTTSRGRTLRFLYDGSYEEFRNKLTELGETPIPKYINREVTPEDAERYQTIYAKEEGAVAAPTAGLHFSKHLLKRLEIKGIKFAEVTLHVGLGTFNPVEVEDLSKHKMDSEELKITQEACDIVNTAKAAKKRICTVGTTSMRAVESSVSSQNTLNPYDGWTNKFVFPPHDFSIPTCMITNFHTPKSTLLMMVSAFCGHDLMKRAYEEAIKEEYKFYSYGDAMLII

SEQ ID NO: 66692 - protein, 349 aa, Flavobacterium sp.
  misc_feature (1)..(349): tr|A0A0J0YD04|A0A0J0YD04_9FLAO S-adenosylmethionine:tRN A ribosyltransferase-isomerase OS=Flavobacterium sp. AB G OX=1423322 GN=queA PE=3 SV=1
MKLSHFQFNLPKELLAEFPAENRDESRLMVIDRQKQTIEHKMFKDVINYFDDGDVLILNNTKVFPARLYGNKEKTGARIEVFLLRELNSEQRLWDVLVDPARKIRIGNKLYFGDDDSLVAEVIDNTTSRGRTLRFLYDGSYEEFRNKLTELGETPIPKYINREVTAEDAERYQTIYAKEEGAVAAPTAGLHFSKHLLKKLEIKGINFAEVTLHVGLGTFNPVEVEDLSKHKMDSEELIINQEACDIVNAAKANRKRICAVGTTSMRAIESSVSSQNTLNPYEGWTNKFIFPPHDFSIANCMITNFHTPKSTLLMMISAFCGHDLMKRAYEEAIKEEYKFYSYGDAMLII

SEQ ID NO: 66693 - protein, 349 aa, Flavobacterium spartansii
  misc_feature (1)..(349): tr|A0A1S1J8D4|A0A1S1J8D4_9FLAO S-adenosylmethionine:tRN A ribosyltransferase-isomerase OS=Flavobacterium sparta nsii OX=1278819 GN=queA PE=3 SV=1
MKLSHFQFNLPKELLAEFPAENRDESRLMVIDRQKQTIEHKMFKDVINYFDDGDVLILNNTKVFPARLYGNKEKTGARIEVFLLRELNSEQRLWDVLVDPARKIRIGNKLYFGDDDSLVAEVIDNTTSRGRTLRFLYDGSYEEFRNKLTELGETPIPKYINREVTAEDAERYQTIYAKEEGAVAAPTAGLHFSKHLLKKLEIKGVNFAEVTLHVGLGTFNPVEVEDLSKHKMDSEELIIRQEACDIVNAAKTGRKRICAVGTTSMRAIESSVSSQNTLNPYEGWTNKFIFPPHDFSIANCMITNFHTPKSTLLMMISAFCGHDLMKRAYEEAIKEEYKFYSYGDAMLIL

SEQ ID NO: 66694 - protein, 349 aa, Flavobacterium subsaxonicum
  misc_feature (1)..(349): tr|A0A0A2MNI1|A0A0A2MNI1_9FLAO S-adenosylmethionine:tRN A ribosyltransferase-isomerase OS=Flavobacterium subsax onicum WB 4.1-42 = DSM 21790 OX=1121898 GN=queA PE=3 SV =1
MKLSNFNFNLPKELLAEHPTENRDESKLMVINRKTKTIEHRLFKDVIEYFEEGDVMVLNNTKVFPARLYGNKEKTGARIEVFLLRELNSEQRLWDVLVDPARKIRIGNKLYFGDDDSLVAEVIDNTTSRGRTLRFLYDGSYEEFRNKLTELGETPIPKYINREVEPEDAERYQTIYAKEEGAVAAPTAGLHFSKHLLKRLEIKGIDFAEITLHVGLGTFNPVEVEDLSKHKMDSEELIISQEACDIVNKAKVNKHKICAVGTTSMRAMESSVSSARTLNPYVGWTNKFIFPPYDFSVADCMITNFHTPKSTLLMMISAFMGHDLMRKAYDEAIKEGYRFYTYGDAMLIL

SEQ ID NO: 66695 - protein, 349 aa, Flavobacterium succinicans
  misc_feature (1)..(349): tr|A0A1I4VJL5|A0A1I4VJL5_9FLAO S-adenosylmethionine:tRN A ribosyltransferase-isomerase OS=Flavobacterium succin icans OX=29536 GN=queA PE=3 SV=1
MKLSHFNFNLPKELLAEYPAENRDESRLMVIDRKKQTIEHKMFKDVIDYFDDGDVMILNNTKVFPARLYGNKEKTGARIEVFLLRELNAEQRLWDVLVDPARKIRIGNKLYFGDDDSLVAEVIDNTTSRGRTLRFLYDGSYEEFRNKLTELGETPIPKYINREVNEDDAERYQTIYAKEEGAVAAPTAGLHFSKHLLKRLEIKGVKFAEVTLHVGLGTFNPVEVEDLSKHKMDSEELKITQEACDIVNEGKEKKKRICAVGTTSMRAVESAVSSQSTLNPFDGWTNKFIFPPHDFSIATCMITNFHTPKSTLLMMISAFCGHDLMKRAYEEAIKEEYKFYSYGDAMLII

SEQ ID NO: 66696 - protein, 349 aa, Flavobacterium succinicans
  misc_feature (1)..(349): tr|A0A199XV33|A0A199XV33_9FLAO S-adenosylmethionine:tRN A ribosyltransferase-isomerase OS=Flavobacterium succin icans OX=29536 GN=queA PE=3 SV=1
MKLSHFNFNLPKELLAEFPAENRDESRLMVIDRKKQTIEHKMFKDVIDYFDDGDVLILNNTKVFPARLYGNKEKTGARIEVFLLRELNAEQRLWDVLVDPARKIRIGNKLYFGDDDSLVAEVIDNTTSRGRTLRFLYDGSYEEFRNKLTELGETPIPKYINREVTPEDADRYQTIYAKEEGAVAAPTAGLHFSKHLLKRLEIKGVKFAEVTLHVGLGTFNPVEVEDLSKHKMDSEELKITQEACDIVNDAKARKKRICTVGTTSMRAVESSVSSQNTLNPFDGWTNKFIFPPHDFSIATCMITNFHTPKSTLLMMISAFCGHDLMRKAYDEAIKEGYKFYSYGDAMLIL

SEQ ID NO: 66697 - protein, 349 aa, Flavobacterium suncheonense
  misc_feature (1)..(349): tr|A0A0A2MA21|A0A0A2MA21_9FLAO S-adenosylmethionine:tRN A ribosyltransferase-isomerase OS=Flavobacterium sunche onense GH29-5 = DSM 17707 OX=1121899 GN=queA PE=3 SV=1
MKLSNFNFNLPAELLAEFPAENRDEARLMVVNRKTQTIEHKLFKDILDYFDEGDVMVLNNTKVFPARLYGNKEKTGARIEVFLLRELNAEQRLWDVLVDPARKIRIGNKLYFGDDDSLVAEVIDNTTSRGRTLRFLYDGSYEEFRAKLLELGETPIPKYINREVTPEDAERYQTIYAKEEGAVAAPTAGLHFSKHLMKRLEIKGVEFAEVTLHVGLGTFNPVEVEDLSKHKMDSEEMIISQEACDVVNKAKLNKKRVCAIGTTTMRAMESSVSSSKTLNPFTGWTNKFIYPPYDFSVADCMVTNFHTPKSTLLMMISAFCGHDLMRKAYDEAIKEGYKFYSYGDAMLIL

SEQ ID NO: 66698 - protein, 349 aa, Flavobacterium swingsii
  misc_feature (1)..(349): tr|A0A1I0XTD7|A0A1I0XTD7_9FLAO S-adenosylmethionine:tRN A ribosyltransferase-isomerase OS=Flavobacterium swings ii OX=498292 GN=queA PE=3 SV=1
MKLSHFQFNLPAELLAEYPAENRDESRLMVVDRQKGTIEHKMFKDVLEYFDEGDVLVLNNTKVFPARLYGNKEKTGARIEVFLLRELNAEQRLWDVLVDPARKIRIGNKLYFGDDDSLVAEVIDNTTSRGRTLRFLYDGSYEEFRAKLTELGETPIPKYISREVTPEDAERYQTIYAKEEGAVAAPTAGLHFSKHLLKRLEIKGVQFAEVTLHVGLGTFNPVEVEDLSKHKMDSEELKITQEACDIVNAAKVRKSRICAVGTTSMRAIESSVSSARTLNPYDGWTNKFIFPPHDFSLATCMITNFHTPKSTLMMMISAFCGHDLMKEAYAEAIKEKYKFYSYGDAMLII

SEQ ID NO: 66699 - protein, 349 aa, Flavobacterium terrae
  misc_feature (1)..(349): tr|A0A1M6BR83|A0A1M6BR83_9FLAO S-adenosylmethionine:tRN A ribosyltransferase-isomerase OS=Flavobacterium terrae OX=415425 GN=queA PE=3 SV=1
MKLSNFNFNLPAELLAEYPAENRDESRLMVVNRKTGEIEHRLFKDIIEYFDEGDVMVVNNTKVFPARLYGNKEKTGARIEVFLLRELNAEQRLWDVLVDPARKIRIGNKLYFGDDDSLVAEVIDNTTSRGRTLRFLYDGSYEEFRQKLVDLGETPIPKYINREVNEDDAERYQTIYAKEEGAVAAPTAGLHFSKHLMKRLEIKGVDFAEVTLHVGLGTFNPVEVEDLSKHKMDSEELKITQEACDVVNKAKVSKKKVCAIGTTSMRAMESSVSSNKTLNPYEGWTNKFIFPPYDFSVADCMVTNFHTPKSTLLMMISAFCGHDLMMKAYKEAIEQKYRFYSYGDAMLIL

SEQ ID NO: 66700 - protein, 349 aa, Flavobacterium terrigena
  misc_feature (1)..(349): tr|A0A1H6WNM3|A0A1H6WNM3_9FLAO S-adenosylmethionine:tRN A ribosyltransferase-isomerase OS=Flavobacterium terrig ena OX=402734 GN=queA PE=3 SV=1
MKLSHFQFNLPEELLAEFPSENRDESRLMVVHRKTGEIEHKMFKDIIDYFDDGDVMVLNNTKVFPARLYGNKEKTGARIEVFLLRELNAEQRLWDVLVDPARKIRIGNKLYFGDDDSLVAEVIDNTTSRGRTLRFLYDGSYEEFREKLIELGETPIPKFINREVTPEDAERYQTIYAKEEGAVAAPTAGLHFSKHLMKRLEIKGINFAEVTLHVGLGTFNPVEVEDLSKHKMDSEEMVVTQEACDIINGARAKKRKVCCIGTTSMRAMESTVSSMRTLNPYTGWTNKFIYPPYDFSLADAMVSNFHTPKSTLLMMVSAFCGHDLMKKAYDIAIKEKYNFYSYGDAMLIL

SEQ ID NO: 66701 - protein, 349 aa, Flavobacterium tibetense
  misc_feature (1)..(349): tr|A0A365P294|A0A365P294_9FLAO S-adenosylmethionine:tRN A ribosyltransferase-isomerase OS=Flavobacterium tibete nse OX=2233533 GN=queA PE=3 SV=1
MKLSHFQFNLPEELLAEFPAENRDESRLMVIHRKTGLIEHKLFKDVLEYFNEGDVMVLNNTKVFPARLYGNKEKTGARIEVFLLRELNAEQRLWDVLVDPARKIRIGNKLYFGDDDSLVAEVIDNTTSRGRTLRFLYDGSYEEFRIKLTELGETPIPKYINREVTPEDAERYQTIYAKEEGAVAAPTAGLHFSKHLLKRLEIKGVDFAEVTLHVGLGTFNPVEVEDLSKHKMDSEEMIITQEACDIVNKAKVKKNKVCCVGTTSMRAMESSVSSQRTLNPYTGWTNKFIYPPYDFSIADAMITNFHTPKSTLLMMISAFCGHDLMKKAYAEAIEQKYKFYSYGDAMLIL

SEQ ID NO: 66702 - protein, 349 aa, Flavobacterium ummariense
  misc_feature (1)..(349): tr|A0A1I5AJA7|A0A1I5AJA7_9FLAO S-adenosylmethionine:tRN A ribosyltransferase-isomerase OS=Flavobacterium ummari ense OX=913024 GN=queA PE=3 SV=1
MKLSNFNFNLPNELLAEFPAENRDESRLMVVNRKTGTIEHKFFKDLIDYFDEGDVMVLNNTKVFPARLYGNKEKTGARIEVFLLRELNSEQRLWDVLVDPARKIRIGNKLYFGDDDSLVAEVIDNTTSRGRTLRFLYDGSYEEFRLKLRELGETPIPKYINRDVTPEDEDRYQTIYATEEGAVAAPTAGLHFSKHLLKRLEIKGVDFAKITLHIGLGTFNPVEVEDLSKHKMDSEELIITQEACDVVNKAKANKNKICAVGTTSMRALESSVSSNHTLNPYEGWTNKFIFPPYDFSIADCMITNFHMPKSTLLMMISAFTGHDLMMKAYDEAVKEGYKFYSYGDAMLIL

SEQ ID NO: 66703 - protein, 349 aa, Flavobacterium urocaniciphilum
  misc_feature (1)..(349): tr|A0A1H9C3C8|A0A1H9C3C8_9FLAO S-adenosylmethionine:tRN A ribosyltransferase-isomerase OS=Flavobacterium urocan iciphilum OX=1299341 GN=queA PE=3 SV=1
MKLSHFNFNLPEELLAEFPAENRDESRLMVVNRKTGEIEHKMFKDIIDYFDDGDVMVLNNTKVFPARLYGNKEKTGARIEVFLLRELNAEQRLWDVLVDPARKIRIGNKLYFGDDDSLVAEVIDNTTSRGRTLRFLYDGSYEEFREKLVELGETPIPKYINREVTPEDADRYQTIYAKEEGAVAAPTAGLHFSKHLMKRLEIKGINFAEVTLHVGLGTFNPVEVEDLSKHKMDSEEMIITQEACDIINAAKARKNKVCCVGTTSMRAMESSVSSMKTLNPYVGWTNKFIYPPYDFSLADCMITNFHTPKSTLLMMISAFCGHDLMRKAYDEALKEKYRFYSYGDAMLII

SEQ ID NO: 66704 - protein, 349 aa, Flavobacterium urumqiense
  misc_feature (1)..(349): tr|A0A1H5RUD9|A0A1H5RUD9_9FLAO S-adenosylmethionine:tRN A ribosyltransferase-isomerase OS=Flavobacterium urumqi ense OX=935224 GN=queA PE=3 SV=1
MKLSHFQFDLPKELLAEYPAENRDEARLMVIDRKKGTIEHKMFKDVIDYFDDGDVLILNNTKVFPARLYGNKEKTGARIEVFLLRELNSEQRLWDVLVDPARKIRIGNKLYFGDDDSLVAEVIDNTTSRGRTLRFLYDGSYEEFRNKLTELGETPIPKYISRDVTPEDAERYQTIYAKEEGAVAAPTAGLHFSKNLLKKLEIKGIKFAEVTLHVGLGTFNPVEVEDLSKHKMDSEELKITQEACDIVNDAKVKKKRICAVGTTSMRAAESAVSSQRTLNPFDGWTNKFVFPPHDFSIATCMITNFHTPKSTLLMMVSAFCGHDLMKKAYAEAIKEGYKFYSYGDAMLII

SEQ ID NO: 66705 - protein, 349 aa, Flavobacterium weaverense
  misc_feature (1)..(349): tr|A0A3M0ADZ9|A0A3M0ADZ9_9FLAO S-adenosylmethionine:tRN A ribosyltransferase-isomerase OS=Flavobacterium weaver ense OX=271156 GN=queA PE=3 SV=1
MKLSHFQFDLPKELLAEYPAENRDEARLMVIDRKKQTIEHKMFKDVIDYFDEGDVLILNNTKVFPARLYGNKEKTGARIEVFLLRELNSEQRLWDVLVDPARKIRIGNKLYFGDDDSLVAEVIDNTTSRGRTLRFLYDGSYEEFRNKLTELGETPIPKYISRDVTPEDAERYQTIYAKEEGAVAAPTAGLHFSKHLLKKLEIKGIKFAEVTLHVGLGTFNPVEVEDLSKHKMDSEELKITQEACDIVNDAKAKKKRICTVGTTSMRAVESSVSSHETLNPFDGWTNKFVFPPHEFTIPTCMITNFHTPKSTLLMMVSAFCGHDLMKKAYADAIEKEYKFYSYGDAMLII

SEQ ID NO: 66706 - protein, 349 aa, Flavobacterium xanthum; identical to SEQ ID NO: 66674
  misc_feature (1)..(349): tr|A0A1M7H482|A0A1M7H482_9FLAO S-adenosylmethionine:tRN A ribosyltransferase-isomerase OS=Flavobacterium xanthu m OX=69322 GN=queA PE=3 SV=1

SEQ ID NO: 66707 - protein, 349 aa, Flavobacterium xinjiangense
  misc_feature (1)..(349): tr|A0A1M7G2E8|A0A1M7G2E8_9FLAO S-adenosylmethionine:tRN A ribosyltransferase-isomerase OS=Flavobacterium xinjia ngense OX=178356 GN=queA PE=3 SV=1
MKLSHFQFDLPKELLAEFPAENRDEARLMVIDRKKGTIEHKMFKDVIDYFDDGDVLILNNTKVFPARLYGNKEKTGARIEVFLLRELNSEQRLWDVLVDPARKIRIGNKLYFGDDDSLVAEVIDNTTSRGRTLRFLYDGSYEEFRNKLTELGETPIPKYISRDVTPEDAERYQTIYAKEEGAVAAPTAGLHFSKNLLKKLEIKGIKFAEVTLHVGLGTFNPVEVEDLSKHKMDSEELKITQEACDIVNDAKVKKKRICAVGTTSMRAVESAVSSQRTLNPFDGWTNKFVFPPHDFSIATCMITNFHTPKSTLLMMVSAFCGHDLMKKAYAEAIKEGYKFYSYGDAMLII

SEQ ID NO: 66708 - protein, 349 aa, Flavobacterium xueshanense
  misc_feature (1)..(349): tr|A0A1I2E0D8|A0A1I2E0D8_9FLAO S-adenosylmethionine:tRN A ribosyltransferase-isomerase OS=Flavobacterium xuesha nense OX=935223 GN=queA PE=3 SV=1
MKLSHFQFDLPKELLAEYPAENRDEARLMVIDRKKGTIEHKMFKDVIDYFDEGDVLILNNTKVFPARLYGNKEKTGARIEVFLLRELNSEQRLWDVLVDPARKIRIGNKLYFGDDDSLVAEVIDNTTSRGRTLRFLYDGSYEEFRNKLTELGETPIPKYISRDVTPEDAERYQTIYAKEEGSVAAPTAGLHFSKHLLKKLEIKGIKFAEVTLHVGLGTFNPVEVEDLSKHKMDSEELKITQEACDIVNEAKAKKKRICTVGTTSMRAVESSVSSHNTMNPFDGWTNKFVFPPHEFTIPTCMITNFHTPKSTLLMMVSAFCGHDLMKKAYAEAIEEGYKFYSYGDAMLII

SEQ ID NO: 66709 - protein, 301 aa, Flavonifractor plautii
  misc_feature (1)..(301): tr|A0A096DEP6|A0A096DEP6_FLAPL S-adenosylmethionine:tRN A ribosyltransferase-isomerase OS=Flavonifractor plauti i 1_3_50AFAA OX=742738 GN=queA PE=3 SV=1
MHFFDLPTLLRPGDCLVLNDSRVLPARLLGHREPTGGAVEVLLLIDRGDKVWECLVRPGRKLKPGTRLSFGDGSLKAEVVEVCEGGNRLVRFEYEGIFLETLERLGKMPLPPYIKAELNDPERYQTVYSRAVGSAAAPTAGLHFTRALLEQVQEMGVKVCYVTLHVGLGTFRPVKEEEITDHEMHSEYCMISAETAETINRTKREGGRVICVGTTSCRTIESWAAEDGTLKECAGWTNIFIYPGYRFKALDCLITNFHLPESTLIMLVSALAGREHVLAAYKEAVEQRYRFFSFGDAMFIG

SEQ ID NO: 66710 - protein, 312 aa, Flavonifractor plautii
  misc_feature (1)..(312): tr|G9YNH4|G9YNH4_FLAPL S-adenosylmethionine:tRNA ribosy ltransferase-isomerase OS=Flavonifractor plautii ATCC 2 9863 OX=411475 GN=queA PE=3 SV=1
MLDKETGATRHMHFFDLPTLLRPGDCLVLNDSRVLPARLLGHREPTGGAVEVLLLIDRGDKVWECLVRPGRKLKPGTRLSFGDGSLKAEVVEVCEGGNRLVRFEYEGIFLETLERLGKMPLPPYIKAELNDPERYQTVYSRAVGSAAAPTAGLHFTRALLEQVQEMGVKVCYVTLHVGLGTFRPVKEEEITDHEMHSEYCMISAETAETINRTKREGGRVICVGTTSCRTIESWAAEDGTLKECAGWTNIFIYPGYRFKALDCLITNFHLPESTLIMLVSALAGREHVLAAYKEAVEQRYRFFSFGDAMFIG

SEQ ID NO: 66711 - protein, 341 aa, Flavonifractor sp.
  misc_feature (1)..(341): tr|A0A1Y3XMI2|A0A1Y3XMI2_9FIRM S-adenosylmethionine:tRN A ribosyltransferase-isomerase OS=Flavonifractor sp. An 52 OX=1965642 GN=queA PE=3 SV=1
MKTSDFDFYLPEELIAQTPLEKRDSSRLLVLDKHTGETKHMHFFDLPTLLRPGDCLVLNDSRVLPARLIGHRDPGGGAVEVLLLIDRGNKTWECLVRPGRKMRPGTKVSFGEGQLTAEVTEVLEGGNRLVRFDYEGIFLEKLEQLGKMPLPPYIKAELQDPERYQTVYSREVGSAAAPTAGLHFTKELLKQVEDMGVRLAYVTLHVGLGTFRPVKEEDILDHEMHSEYCMISAETAETINRTRAEGGRVICVGTTSCRTIESWAAEDGTLKESAGWTNIFIYPGYKFKALDCLITNFHLPESTLIMLVSALAGREHILAAYKEAVEQKYRFFSFGDAMFIC

SEQ ID NO: 66712 - protein, 341 aa, Flavonifractor sp.
  misc_feature (1)..(341): tr|A0A1Y4WEW6|A0A1Y4WEW6_9FIRM S-adenosylmethionine:tRN A ribosyltransferase-isomerase OS=Flavonifractor sp. An 10 OX=1965537 GN=queA PE=3 SV=1
MKTADFDFYLPEELIAQTPLERRDASRLMVLDKETGATRHLHFYDLPTLLRPGDCLVLNDSRVLPARLIGHREPGGGAVEVLLLIDRGNKTWECLVRPGRKLKPGARVSFGNGELKAEVVEVCEGGNRLVRFEYEGIFLETLERLGKMPLPPYIKAELQDPERYQTVYSREAGSAAAPTAGLHFTPELLEQVRAMGVKTCFVTLHVGLGTFRPVKEEEITDHDMHSEYCMISAETAETINQTKREGGRVICVGTTSCRTIESWAAEDGTLKESAGWTKIFIYPGYRFKVLDGLITNFHLPESTLIMLVSALAGREHVLAAYNEAVEQKYRFFSFGDAMFIS

SEQ ID NO: 66713 - protein, 408 aa, Flectobacillus sp.
  misc_feature (1)..(408): tr|A0A267T276|A0A267T276_9BACT S-adenosylmethionine:tRN A ribosyltransferase-isomerase OS=Flectobacillus sp. BA B-3569 OX=1509483 GN=queA PE=3 SV=1
MNELSITDIKLSDYTYELPDERIAKFPLSERDQSKLQVYHQGEITHTQFYQIADYLPEGSLLVFNNTKVIPARIHFQKPTGATIQIFLLHPIAPTAVINLAMEVSDSCIWECMIGNKKRFKKNDILQRTLLVNGNEVVVSAKLADEEQNHVELSWQNLSNDTPILFVDLIQSLGEIPLPPYLNRETESSDYETYQTVYSEKKGAVAAPTAGLHFTERVLQKLQQAGFKQDFLTLHVGAGTFQPIKVENIVEHRMHNEQIVFSRKNLQTLVQHEGPIIPVGTTSMRALESLYWFGVKLGKGDSDFLIEKLYPYHHTETLPSRQESFVTILNFMESNDIEELTGETEIFIFPGYQFKVCRGIITNYHQPESTLVLLIAALIGEDWRKVYQEAMEKDYRFLSYGDSSLLLP

SEQ ID NO: 66714 - protein, 350 aa, Flectobacillus sp.
  misc_feature (1)..(350): tr|A0A267T556|A0A267T556_9BACT S-adenosylmethionine:tRN A ribosyltransferase-isomerase OS=Flectobacillus sp. BA B-3569 OX=1509483 GN=queA PE=3 SV=1
MKLSEFRFDLPQSLIALYPSENRGESRLMVVNRKTKQIEHKMFSDIINYFEDGDVMVTNNTKVFPARLFGQKEKTGAKIEVFLLRELNREHRLWDVLVDPARKIRVGNKLYFGDSDLVAEVIDNTTSRGRTIRFLYDGDHDALMKAIHELGETPLPDEIRFKRKVETSDEERYQTIYAEHVGAVAAPTAGLHFNKIIMKRMELKGVAFTPLTLHVGLGTFRQVDVEDLTKHKTDSENFFIPEDTCKLVNDGIDTNKRICAIGTTALKALESSVSADGHLKPIEGWTDKFIFPPYDFRIPNALLTNFHLPESILIMMTSAFGGYELIKEAYEIAIKEKYKFFSYGDAMLII

SEQ ID NO: 66715 - protein, 402 aa, Flexibacter flexilis
  misc_feature (1)..(402): tr|A0A1I1JSJ7|A0A1I1JSJ7_9BACT S-adenosylmethionine:tRN A ribosyltransferase-isomerase OS=Flexibacter flexilis DSM 6793 OX=927664 GN=queA PE=3 SV=1
MLDPIRKEDFLYTLPDEKIARFPLPQRDTAKLLVYRQGQIQHSQFRHLGEFLPPDSFLFFNNTKVIAARMAFQRDTGAHVEIFLLNPTEPTPVVALAMQQTGFCVWHCMIGNKKRLKTNEILTKNIQTETGQSLQLRAQLIDLENMLVRFEWSPADISFAQVVEQAGQMPLPPYLKRSEEAADKLRYQTVYAQNEGAVAAPTAGLHFTPAVFEDLQQRGMAHDYVTLHVSAGTFRPLQADNVLEHEMHAEQLIFSVKNLENLLANERIIAVGTTSMRALESLYWFGVKLLKTNDKDFRIDQYLPYQFEAASLPTRAQSLTAVLDFMKENNLEELGGQTQIYIVPSYEFKICKGIVTNYHQPESTLILLVAAFVGENWRKIYDEALNNDYRFLSFGDSSLLLP

SEQ ID NO: 66716 - protein, 348 aa, Flexibacter flexilis
  misc_feature (1)..(348): tr|A0A1I1DLJ7|A0A1I1DLJ7_9BACT S-adenosylmethionine:tRN A ribosyltransferase-isomerase OS=Flexibacter flexilis DSM 6793 OX=927664 GN=queA PE=3 SV=1
MKLSEFKFNLPSDLIALYPNENRDEARMLVLHRQTGKIEHKVFKDIIEYFNEGDVMVLNDTKVFPARLYGNKEKTGAKIEVSLLRELNKEYHLWDVIVDPARKIRVGNKLYFGDSDLVAEVIDNTTSRGRTIRFLYDGSDDEFYKTLDALGETPLPPQIRRKVEAADRDRYQTIYAQHTGAVAAPSAGMHFTRQVMKRLELKGVDITPITLHVGLGTFKKVEVEDLTKHKPESENFKVPEVTADKVNASLDVKKRVCAVGTTTLRALESSVSANARLKPNEGWTDRFIFPPYDFKIANALITNFHMPESTLLMMACAFGGYDKVMNAYQEAIKEKYRFFSYGDAMLII

SEQ ID NO: 66717 - protein, 359 aa, Flexibacter sp.
  misc_feature (1)..(359): tr|A0A2M7NHA0|A0A2M7NHA0_9BACT S-adenosylmethionine:tRN A ribosyltransferase-isomerase OS=Flexibacter sp. CG_4_ 10_14_3_um_filter_32_15 OX=1975530 GN=queA PE=3 SV=1
MKAPGYKSTKRYKLSSFKFDLPQELTAQYPTDNRDDSRLMVVHRDTGVIEHKMFKDVLDYFGEGDKMIVNDTMVFPARLYGYKEKTNAKIEVFLLRELNPTSHLWDVLVDPARKIRVGNKLFFGEGELVAEVIDNTTSRGRTIRFLYDGEPEEFYKTLEELGETPLPREIGREAEESDKERYQTIFATQKGAVAAPTAGLHFTPQLQKRLQLQGTSFHPITLHLGLGMFRQVEVEDLTKHKMDSENFDVGEETVKAVNEAIDAKKKICAVGTTSLRALESSVSANDHLKPNGGWTDKFIFPPYEFKICNALISNFHYPQSTLLMMNCAFGGYDLVMEAYELAIKEKYRFFSYGDAMLII

SEQ ID NO: 66718 - protein, 343 aa, Flexilinea flocculi
  misc_feature (1)..(343): tr|A0A0S7BQE2|A0A0S7BQE2_9CHLR S-adenosylmethionine:tRN A ribosyltransferase-isomerase OS=Flexilinea flocculi O X=1678840 GN=queA PE=3 SV=1
MKTTDFDYELPLERIAQTPLEPRDSSRLFVYDRKTGKIDHSHFYNLSDFLYPGDLLVLNQTRVLPARIYARKDGTGGLVEVLLLRRLGEQNWEALVGGKKVTQGKKLILSDEIQAEIVECYEGSRRLIHFSGSIDDFMKKNGQMPLPPYIHSRLDNPERYQTVYAHETGSAAAPTAGLHFTESLIEKIQEKGVRFTYVTLHVGLDTFQPVTEDDPEQHKIHQEWCELSPETAELIVQTKKAGHRVIAVGTTSARTLESAALAAKNAGSDACVIPISGDTGIYILPGYQFKAVDAMITNFHLPKSTLIMMVSAFAGRETILSLYRQAIDLQYRFFSFGDAMFLQ

SEQ ID NO: 66719 - protein, 106 aa, Flexistipes sinusarabici
  misc_feature (1)..(106): tr|A0A5D0MY44|A0A5D0MY44_FLESI S-adenosylmethionine:tRN A ribosyltransferase-isomerase (Fragment) OS=Flexistipe s sinusarabici OX=2352 GN=FXF49_00410 PE=3 SV=1
YERINRLKKEGKNLIAVGTTTLRALESASHNGQLIKYGELSTNIFIKPGYSFKIIDKMITNFHLPKSTLFILMCALCGSDKMKFVYKHAVNENYRFFSYGDAMFIK

SEQ ID NO: 66720 - protein, 274 aa, Flexistipes sinusarabici
  misc_feature (1)..(274): tr|A0A5D0MPZ8|A0A5D0MPZ8_FLESI S-adenosylmethionine:tRN A ribosyltransferase-isomerase (Fragment) OS=Flexistipe s sinusarabici OX=2352 GN=queA PE=3 SV=1
MKTPVDKFDFHLPENNIAQYPPDKRDESRLLIYDRESGEIKDSIFKDILSEITEKDFLVINNTKVLKARLFGRKETGGKIEILVLNIISPEECESITKGNIKKGDKIFLENSSAEILDTDTSGRRRILFSDNIYRIMEKEGHVPLPPYVKREDEKIDEKRYQTVYSSNPGSIAAPTAGLHFTDELMKKIKQKGVEVLEITLNVGIGTFRPIKTKYIEDHQMHEEYFHIPQNTYERINRLKKEGKNLIAVGTTTLRALESASHNGQLIKYGELST

SEQ ID NO: 66721 - protein, 351 aa, Flexivirga sp.
  misc_feature (1)..(351): tr|A0A3M9M1Q2|A0A3M9M1Q2_9MICO S-adenosylmethionine:tRN A ribosyltransferase-isomerase OS=Flexivirga sp. BO-16 OX=2294115 GN=EFY87_16795 PE=3 SV=1
MTTLAVQPRTEFVRPAEQTAPAPAEHRGLPRDGVRMLVGTRDGIEHVTFDRLPDQLNAGDLVVVNNSATMPWQVDARLDGAGEVVLHAATPLDDGSWVVELRSAPDASRAILDARVGDHLEVGALVVTLRAAYPFASSPTGYGNRLWRAGVDADLGAYLARAGRPISYGYLDHRYPLSDYQSVFATVPGSAEMPSAGRPFTPEVVTRLVAAGIGLAPVTLHTGVSSQEAGEGPQAERFEVPDATARQVNATRAAGGRVIAVGTTVTRALESAVARDGTVAGTTGWTERVVTRADPPRVVNGLITGWHDPQASHLLLVEAVAGEELTQAAYDAAVCEGYQWHEFGDSALLLP

SEQ ID NO: 66722 - protein, 342 aa, Floricoccus penangensis
  misc_feature (1)..(342): tr|A0A1E8GFG5|A0A1E8GFG5_9LACT S-adenosylmethionine:tRN A ribosyltransferase-isomerase OS=Floricoccus penangens is OX=1859475 GN=queA PE=3 SV=1
MNTNDFDFELPEELIAQTPLENRSESRLLVIDRESETMQDKHFYDIIDELEPGDALVMNNTRVLPARLFGVKPDTGGHVELLLLKNIEGDKWETLAKPAKRLRVGSKVSFGDGRLVATVTEELEHGGRIVEFEYDGIFLETLESLGEMPLPPYIHEKLEDQERYQTVYAKENGSAAAPTAGLHFTPELLKKIEDKGVNLVELTLHVGLGTFRPVSVDNVDEHEMHSEFYQLSEDAAAKLNEVKASGGRIVAVGTTSIRTLETIGTKFNGEIKADSGWTNIFIKPGYEFKVVDAFSTNFHLPKSTLVMLVSAFAGRDFVLDAYKHAVDEKYRFFSFGDAMFVK

SEQ ID NO: 66723 - protein, 342 aa, Floricoccus tropicus
  misc_feature (1)..(342): tr|A0A1E8GQQ9|A0A1E8GQQ9_9LACT S-adenosylmethionine:tRN A ribosyltransferase-isomerase OS=Floricoccus tropicus OX=1859473 GN=queA PE=3 SV=1
MNTNDFDFELPEELIAQTPLENRSESRLLVIDRESGTMQDKHFYDIIDELEPGDALVMNNTRVLPARLFGVKPDTGGHVELLLLKNIEGDKWETLAKPAKRLRVGSKVSFGDGRLVATVTEELEHGGRIVEFEYDGIFLETLESLGEMPLPPYIHEKLEDQERYQTVYAKENGSAAAPTAGLHFTPELLKKIEDKGVNLVELTLHVGLGTFRPVSVDNVDEHEMHSEFYQLSEDAAAKLNEVKANGGRIVAVGTTSIRTLETIGTKFNGEIKADSGWTNIFIKPGYEFKVVDAFSTNFHLPKSTLVMLVSAFAGRDFVLDAYKHAVDEKYRFFSFGDAMFVK

SEQ ID NO: 66724 - protein, 337 aa, Fluoribacter bozemanae
  misc_feature (1)..(337): tr|A0A0W0RJQ3|A0A0W0RJQ3_FLUBO S-adenosylmethionine:tRN A ribosyltransferase-isomerase OS=Fluoribacter bozemana e OX=447 GN=queA PE=3 SV=1
MNKQDFYFDLPPELIAQYPLAHRSDSRLLIYNRQKDEYGHYQFREIADFLNPGDLLVMNDSKVIPARLYGHKTTGGKVELLVERITGEFTFLAHIKASKALKAGSIIKLEHNKELEVLDRKDDLFICKADIDVLQLLNGIGHIPLPPYITRNDEILDQDRYQTVYAKYEGSVAAPTAGLHFDESVLSSLHSRGVAVAYLTLHVGAGTFRPVRCDNIKDHKMHSEQFTISPELCAAVHATKAAGNRVIAVGTTALRSLESAAQNGVLTACSRDTDIFIYPGYEFKICDGLMTNFHLPESTLLMLVSAFIGHKQAMKLYQEAIKKRYRFFSYGDTSLLL

SEQ ID NO: 66725 - protein, 337 aa, Fluoribacter dumoffii
  misc_feature (1)..(337): tr|A0A377G8P8|A0A377G8P8_9GAMM S-adenosylmethionine:tRN A ribosyltransferase-isomerase OS=Fluoribacter dumoffii OX=463 GN=queA PE=3 SV=1
MNKQDFYFDLPPELIAQYPLANRSDSRLLIYNRQKEEYGHYQFREIADFLNPGDLLVMNDSKVIPARLYGHKTTGGKVELLVERITGEFTFLAHIKASKALKAGSIIQLEQNKELEILDRQDDLFVCKADMDVLTLLNGIGHIPLPPYITRNDENLDQDRYQTVYAKYEGSVAAPTAGLHFDEAVLSSVRSRGVSVAYLTLHVGAGTFRPVRCEDIKDHKMHSERFTIGAELCEAVHSTKAAGNRVIAVGTTAMRSLESAAQNGTLTPCSRDTDIFIYPGYEFKICDGLMTNFHLPESTLLMLVSAFIGHKQAMKLYQEAIEKKYRFFSYGDTSLLL

SEQ ID NO: 66726 - protein, 337 aa, Fluoribacter gormanii
  misc_feature (1)..(337): tr|A0A377GHC8|A0A377GHC8_9GAMM S-adenosylmethionine:tRN A ribosyltransferase-isomerase OS=Fluoribacter gormanii OX=464 GN=queA PE=3 SV=1
MNKQDFYFDLPPELIAQYPLANRSDSRLLIYNRKNGEYGHRQFREIADFLNPGDLLVMNDSKVIPARLYGHKTTGGKVELLVERITGEFTFLAHIKASKALRSGSTIQLEQGKEIKVLDRQDDLFLCQADMDVLNLLNGIGHIPLPPYITRSDETLDQNRYQTVYAKYEGSVAAPTAGLHFDEHVLSSVRSRGVTVAYLTLHVGAGTFRPVRCDNIKDHKMHSERFTISPELCEAVHATKAAGNRVIAVGTTTLRSLESAAQNGALTPCSRDTDIFIFPGYEFKICDGLMTNFHLPESTLLMLVSAFIGHKQAMMLYQEAIEKRYRFFSYGDTSLLL

SEQ ID NO: 66727 - protein, 354 aa, Fluviibacterium aquatile
  misc_feature (1)..(354): tr|A0A4R6B1F4|A0A4R6B1F4_9RHOB S-adenosylmethionine:tRN A ribosyltransferase-isomerase OS=Fluviibacterium aquat ile OX=2552766 GN=queA PE=3 SV=1
MTLDDFDFDLPEDLIATRPAQPRSSARLLVAHGEDVIDANVGDLPGFLRPGDRLVLNDTRVLPVRLTGIRSRETVSGSGEARIEVTLLEPQADSSWTALVKPLRKLRDGERIVFTDDLSAVMLGRTEDGAARLDLTLTGDALEAELAEAGAMPLPPYIAAKRPADAQDLVDYQSVFARRTGAVAAPTASLHFDEALLSSIEAAGVDFTHVTLHVGAGTFLPVKVDDPAEHKMHAEWGEITPAAAAEIEATRAAGGRIIPVGTTALRLLETAARKTGRVEPMAEPTDIFIYPGFEFRAADGLMTNFHLPKSTLMMLVSALMGTDRMRNVYAHAIAQRYRFFSYGDASLLLPRGPV

SEQ ID NO: 66728 - protein, 348 aa, Fluviicoccus keumensis
  misc_feature (1)..(348): tr|A0A4V2G650|A0A4V2G650_9GAMM S-adenosylmethionine:tRN A ribosyltransferase-isomerase OS=Fluviicoccus keumensi s OX=1435465 GN=queA PE=3 SV=1
MQLTDFSYELPDELIARFPLAERSASRLLHLAADGLQHRMVRDLASLLQPGDLLVFNDTRVLAARLFGQKSSGGKVEVLVERIVADDTALVHLRASKSPKPGARLTFAEGKVRADMLERVDDLFKLKFSRPVREVLAEHGEMPLPPYLGRTVEASDSERYQTVYSKPEKTASVAAPTAGLHFDEALLASLRERGCDFAYVTLHVGAGTFQPVRAADIREHRMHAEWLSVPPETVEAIRRTRERGGRVVAVGTTSVRALESAAQAHGGELQAWSGDTQIFIYPGYDWRVVDVLFTNFHLPESTLLMLVSAFAGRDRVMAAYQAAVENRYRFFSYGDAMLLERPGVNHAV

SEQ ID NO: 66729 - protein, 349 aa, Fluviicola sp.
  misc_feature (1)..(349): tr|A0A1G0C702|A0A1G0C702_9FLAO S-adenosylmethionine:tRN A ribosyltransferase-isomerase OS=Fluviicola sp. RIFCSP HIGHO2_12_FULL_43_24 OX=1798019 GN=queA PE=3 SV=1
MKLSEFSFDLPDELIAEYPSPNRDEAKLMVIHRETGKIEHRLFKDIINYFTDGDVMIMNNTRVFPARMYGNKEKTGAKIEVFLLRELNRESLLWDVLVDPARKIRIGNKLYFGEDDSLVAEVIDNTTSRGRTLRFLFDGPYEEFKAKITELGETPLPKYIKREVEESDEDRYQTIYAKEEGAVAAPTAGLHFSRELLKRLELKGVNFAEVTLHVGLGTFRPVEVEDLTKHKMDSEQVIIDKKCADIVNIGKQNKKRICAVGTTSMRAIETSVSTDGMLKPYDGWTNKFIFPPYEFSIADCMITNFHTPLSTLLMMISAFVGHDLMMEAYQTAIKEKYKFYSYGDAMLIL

SEQ ID NO: 66730 - protein, 349 aa, Fluviicola sp.
  misc_feature (1)..(349): tr|A0A2G2F1G3|A0A2G2F1G3_9FLAO S-adenosylmethionine:tRN A ribosyltransferase-isomerase OS=Fluviicola sp. OX=191 7219 GN=queA PE=3 SV=1
MKLSQFQFDLPDELIAEYPAENRDESRLMVIHRDTGEIEHKMFKDIIDYIDEEDVLVMNNTKVFPARMYGNKEKTGAKIEVFLLRELNKETLLWDVLVDPARKIRIGNKLYFGEDESLVAEVIDNTTSRGRTLRFLFDGSYEEFKEKITELGETPLPKYIKRDVEESDEERYQTIYAKEIGAVAAPTAGLHFSRQLMKRLELKGVNFAEVTLHIGLGTFRPVEVEDLTKHKMDSEQAFIDQKCADEVNKAKRNKKKVIAVGSTAMRSIETSVSTEGMLKPYEGWTNKFIFPPYEFSIADALITNFHTPLSTLLMMVSAFGGHELMMGAYKEAVKEKYRFYSYGDAMLIL

SEQ ID NO: 66731 - protein, 352 aa, Fluviicola taffensis
  misc_feature (1)..(352): tr|F2IK25|F2IK25_FLUTR S-adenosylmethionine:tRNA ribosy ltransferase-isomerase OS=Fluviicola taffensis (strain DSM 16823 / NCIMB 13979 / RW262) OX=755732 GN=queA PE=3 SV=1
MNKMKLSEFSFDLPDELIAEYPSEHRDEARLMVIHRETGKIEHRLFKDIINYFGEGDVMIMNNTRVFPARMYGNKEKTGAKIEVFLLRELNRESLLWDVLVDPARKIRIGNKLYFGDDDSLVAEVIDNTTSRGRTLRFLFDGPYEEFKAKITELGETPLPKYIKREVEETDEERYQTIYAKEEGAVAAPTAGLHFSRELLKRLELKGINFAEVTLHVGLGTFRSVEVEDLTKHKMDSEQVIITDKAARIVNEAKKNKKRVCAIGTTSMRAVETSVSTDNMLKAFDGWTNKFIFPPYDFSIADSLVTNFHTPLSTLLMMISAFCGHDLMMEAYHEAIKEKYKFYSYGDAMLIL

SEQ ID NO: 66732 - protein, 336 aa, Fodinibius salinus
  misc_feature (1)..(336): tr|A0A5D3YLE2|A0A5D3YLE2_9BACT S-adenosylmethionine:tRN A ribosyltransferase-isomerase OS=Fodinibius salinus OX =860790 GN=queA PE=3 SV=1
MSYTLSDFDYDLPDERIAQEPAHPRDHARLLVYDRATGEITDDRFYNLLEYLPQQTTLVLNNSKVKKCRLLFDEGKKEVFILERLNNKTVRAMVRPGKKFKKGKTTQLTDDISATVIDIDDEGIRTLELSPSLDHPAYSQHKYTPFPPYIEQNESLSEEYQTVYADSQESGASKAAPTAGLHFSDKLLSDITASSISRAEVTLHVGLGTFAPVKTETIEEHTMHSEWFEITEQTADKLQKADHITAVGTTSVRVLETCLRQQDQFSAINMDTDIFIRPGFEFQATDALITNFHLPKSTLLMLVAAFTGYEEMQKIYQHAIDGEYRFYSFGDAMLIL

SEQ ID NO: 66733 - protein, 348 aa, Fodinibius salinus
  misc_feature (1)..(348): tr|A0A5D3YKT4|A0A5D3YKT4_9BACT S-adenosylmethionine:tRN A ribosyltransferase-isomerase OS=Fodinibius salinus OX =860790 GN=queA PE=3 SV=1
MKLTDFKFETEDFNVPEKPVSPRDAAKLMVLDREEQTISHEKFSDIHKYLDEGDVLVYNDTKVFPARLKGKKEKTDADIEVFLLRELVPENMLWDVLVEPARKIRIGNKLYFGPNLMAEVIDNTTSRGRTIRFLFEGSNEELYEILDNIGEMPLPPYIEREADEDDKEEYQTIFAKERGSVAAPFAAMHFTEELVEKLEDKGVQMLPITMHIGWGTFRPCEVEDLTKHRTDSENYYLSEETSEKINEALLSEDNRVVACGTTAVRTIETSITASGISKPGTGWTDEFIFPPYQFNVTEGVITNFHRPESTMLMLGAAFAGYDFLMEAYEEAQENDYRFFAFGDAMIII

SEQ ID NO: 66734 - protein, 342 aa, Fontibacillus panacisegetis
  misc_feature (1)..(342): tr|A0A1G7Q5A1|A0A1G7Q5A1_9BACL S-adenosylmethionine:tRN A ribosyltransferase-isomerase OS=Fontibacillus panacis egetis OX=670482 GN=queA PE=3 SV=1
MNVELYDFDLPEELIAQTPLTDRSASRLLTLNKNDGSVEHHTFSDILEYLRPGDTLVLNDTRVIPARLFGVKEDTGAKAEVLLLKNLGEDCWEALVKPGKKLKTGSVIVFSDELKATIESEGEMGGRVLRFLYTGIFNEILDRLGQMPLPPYIKERLEDQERYQTVYSKHEGSAAAPTAGLHFTESLLQQISDQGIDIAFVTLHVGLGTFRPMSVDRVEDHVMHEEYYVLPQETADLLNATKARGGRVVAVGTTSARTLETVAQKCGNGPVVKSSGWTGIFIYPGYEFGLVDALITNFHLPKSTLVMLVSALAGRENILNAYKEAIEQKYRFFSFGDAMFIY

SEQ ID NO: 66735 - protein, 342 aa, Fontibacillus phaseoli
  misc_feature (1)..(342): tr|A0A369BP74|A0A369BP74_9BACL S-adenosylmethionine:tRN A ribosyltransferase-isomerase OS=Fontibacillus phaseol i OX=1416533 GN=queA PE=3 SV=1
MNVDLYDFELPEELIAQTPLVERSASRLLTLNKRDGGIRHQLFSDIVEYLQPGDTLVLNDTRVIPARLFGVKEDTGAKAEVLLLKSLGDDRWEALVKPGKKLKIGAVIIFGEELKATIESEGDMGGRVLRFAYQGIFNEILDRLGQMPLPPYIKEKLDDRERYQTVYSKHEGSAAAPTAGLHFTESLLEDIRAKGIDIAFVTLHVGLGTFRPMSVNRVEDHVMHEEYYVLPQETADLLNETQARGGRIIAVGTTSARTLETVAQKCGDGPVVKSSGWTGIFIYPGYEFGLVDAMITNFHLPKSTLVMLVSALAGRENILKAYQEAIERKYRFFSFGDAMFIY

SEQ ID NO: 66736 - protein, 342 aa, Fonticella tunisiensis
  misc_feature (1)..(342): tr|A0A4V3ERV5|A0A4V3ERV5_9CLOT S-adenosylmethionine:tRN A ribosyltransferase-isomerase OS=Fonticella tunisiensi s OX=1096341 GN=queA PE=3 SV=1
MKVQDFYFDLPEELIAQEPLPERDMSRLMVLHKSDGRVEHKIFRDIIEYLDEGDCLVLNNSRVIPARLYGIKEDTGANMEFVLLKRIDKDKWETLVKPGKKAKIGSRFVFGEGELKCTVLDSTEAGGRIIEFEYQGVFEQILDKLGQMPLPPYIKKRLEDKERYQTVYSKIEGSAAAPTAGLHFTKELLQKIEEKGVKIAYITLHVGLGTFRPVKVQNIEEHQMHAEFYMIDEENAEIINSAKRNGKRIISVGTTSCRTLETAANEDGYVRPGSGWTDIFIYPGYRFKILDNLITNFHLPESTLIMLVSALAGREKIINAYRIAVEERYRFFSFGDAMFITD

SEQ ID NO: 66737 - protein, 344 aa, Fontimonas thermophila
  misc_feature (1)..(344): tr|A0A1I2K5X4|A0A1I2K5X4_9GAMM S-adenosylmethionine:tRN A ribosyltransferase-isomerase OS=Fontimonas thermophil a OX=1076937 GN=queA PE=3 SV=1
MRRSDFDYVLPPELIAQHPAERRSASRLLHVGPGDVLDDRQMTDLPDLLAPGDLLVFNDTRVIPARVFGIKPTGGRVEILVERVLDAQEFLAQLGASKKPKPGSQILVGADERLTVMGREDDLFRLRYEGADGVMAFLERAGQMPLPPYIAHAPSAEDRERYQTIFAREPGAVAAPTAGLHFDTPLLEALRARGIATATLTLHIGAGTFQPVRVENISEHRMHAEWYRIDAPLCAAIEAARARGGRVVAVGTTVTRALESAALEQGRERTVAPISGETRLFITPGFRFRIIDRLLTNFHLPQSTLLMLVCAFGGRERMLRAYDHAVAQRYRFFSYGDAMLIDPV

SEQ ID NO: 66738 - protein, 341 aa, Formivibrio citricus
  misc_feature (1)..(341): tr|A0A1I4WU79|A0A1I4WU79_9NEIS S-adenosylmethionine:tRN A ribosyltransferase-isomerase OS=Formivibrio citricus OX=83765 GN=queA PE=3 SV=1
MQVSDFDYFLPERLIAQFPPAERGASRLLHVDGSRLEDVFFSDLPRFLCAGDLLVFNDTKVVKARLFGKKGSGGQIEALVERVLDRHTALAHVRASKAPKPGTKLIFAENWVAEMVERRGDLFLLRFAGEESVLDILEAAGLLPLPPYITHTPDDEDAKRYQTVYARDPGAVAAPTAGLHFTDALLEKIRAAGVQTAFVTLHVGAGTFQPVRVENVAEHVMHHERYSIPAETCELIRKTREAGGRVIAVGTTSLRALEAASRNGLLAEPEGDTDIFITPGYQFRVVDRLITNFHLPKSTLLMLVAAFAGYDTIMAAYRHAIAGEYRFFSYGDAMLLERARA

SEQ ID NO: 66739 - protein, 349 aa, Formosa agariphila
  misc_feature (1)..(349): tr|T2KI41|T2KI41_FORAG S-adenosylmethionine:tRNA ribosy ltransferase-isomerase OS=Formosa agariphila (strain DS M 15362 / KCTC 12365 / LMG 23005 / KMM 3901) OX=1347342 GN=queA PE=3 SV=1
MKLSHFNFNLPPELLAEDPSENRDESRLMVLDRKNQTIEHKQFKDIINYFDEDDVMILNDTKVFPARLFGNKEKTGARIEVFLLRELNEEQRLWDVLVDPARKIRIGNKLYFGDDDTLVAEVIDNTTSRGRTLRFLYDGSYTEFRNKLKILGETPLPKYIQREVKPEDEERYQTIYAKKEGAVAAPTAGLHFSKHLLKRLEIKGVKFADVTLHVGLGTFNPVEVEDLSKHKMDSEEAIIEEKAVNIINTGIKEKRRVCAVGTTSMRAIESSVSSHGTLNEFDGWTNKFIFPPYDFSIANCMITNFHTPKSTLLMMVSAFAGHDFLKRAYDEAVKEGYKFYSYGDAMLII

SEQ ID NO: 66740 - protein, 349 aa, Formosa algae
  misc_feature (1)..(349): tr|A0A2K2ZED7|A0A2K2ZED7_9FLAO S-adenosylmethionine:tRN A ribosyltransferase-isomerase OS=Formosa algae OX=2258 43 GN=queA PE=3 SV=1
MKLSHFNFKLPDELLAEDPCENRDESRLMVLDRKNQTIEHKQFKDIINYFDEDDVMILNDTKVFPARLFGNKEKTGARIEVFLLRELNEEQRLWDVLVDPARKIRIGNKLYFGDDDTLVAEVIDNTTSRGRTLRFLYDGSYTEFRNKLKILGETPLPKYIKREVKPEDEERYQTIYAKHEGAVAAPTAGLHFSKHLLKRLEIKGVKFADVTLHVGLGTFNPVEVEDLSKHKMDSEEVIIEEKAVNTINTGIKEKRRVCAVGTTSMRAIESSVSSHGTLNEFDGWTNKFIFPPYDFSIANCMITNFHTPKSTLLMMVSAFAGHDFIKRAYEEAVKEEYKFYSYGDAMLII

SEQ ID NO: 66741 - protein, 349 aa, Formosa sp.
  misc_feature (1)..(349): tr|A0A2E0I2X4|A0A2E0I2X4_9FLAO S-adenosylmethionine:tRN A ribosyltransferase-isomerase OS=Formosa sp. OX=201846 7 GN=queA PE=3 SV=1
MKLSHFSFELPEEFLAEYPSEQRDEARLMVLNREKQTIEHKQFKDLINYFDEDDVMVLNNTKVFPARLFGNKEKTGARIEVFLLRELNPEQRLWDVLVDPARKIRIGNKLYFGEDESLVAEVIDNTTSRGRTLRFLFDGSYDEFRSKLNELGQTPLPKYIKRDVEPEDEIRYQTIYAKNEGAVAAPTAGLHFSKHLLKRLEIKGINFAEVTLHVGLGTFNPVEVEDLSKHKMDSEEIIIDTNATKSINLALKEKRKICAVGTTVMRSIESSVSSSGTLNDYSGWTNKFIFPPYDFSIANCMITNFHTPKSTLLMMTAAFGGYDFIMKAYEEAVKEKYKFYSYGDAMLIL

SEQ ID NO: 66742 - protein, 349 aa, Formosa sp.
  misc_feature (1)..(349): tr|A0A5D0GGT5|A0A5D0GGT5_9FLAO S-adenosylmethionine:tRN A ribosyltransferase-isomerase OS=Formosa sp. 1494 OX=2 592046 GN=queA PE=3 SV=1
MKLSHFNFNLPEELLAEYPSENRDESRLMVLNREKQTIEHKMFKDLIDYFDKDDVMILNNTKVFPARLFGNKEKTGARIEVFLLRELNEEQRLWDVLVDPARKIRIGNKLYFGEGESLVAEVIDNTTSRGRTLRFLYDGSYRDFRLKLRELGETPLPKYIKREVEPEDEERYQTIFAKNEGAVAAPTAGLHFSKHLLKRLEIKGVNLAEVTLHVGLGTFNPVEVEDLSKHKMDSEEIIIKKDAVDIINTAIKNRKRVCAVGTTAMRSIESSVSSSGTLNEFDGWSNKFIFPPYDFSIANCMITNFHTPKSTLLMMASAFAGHDFIKKAYDEAIKEKYKFYSYGDAMLII

SEQ ID NO: 66743 - protein, 349 aa, Formosa spongicola
  misc_feature (1)..(349): tr|A0A316DWR5|A0A316DWR5_9FLAO S-adenosylmethionine:tRN A ribosyltransferase-isomerase OS=Formosa spongicola OX =570520 GN=queA PE=3 SV=1
MKLSHFSFDLPEELLAEYPSEHRDESRLMVLNREKQTIEHKMFKDLIDYFDKDDVMILNNTKVFPARLFGNKEKTGARIEVFLLRELNEEQRLWDVLVDPARKIRIGNKLYFGEGESLVAEVIDNTTSRGRTLRFLYDGSYRDFRMKLQELGETPLPKYIKRDVEPEDEERYQTIYAKNEGAVAAPTAGLHFSKHLLKRLEIKGINFAEVTLHVGLGTFNPVEVEDLSKHKMDSEEIIIKKDAVDIINTGIKTKRRVCAVGTTAMRSIESAVSSSGTLNEFDGWSNKFIFPPYDFSIANCMITNFHTPKSTLLMMASAFAGHDFIKKAYDEAIKEKYKFYSYGDAMLII

SEQ ID NO: 66744 - protein, 342 aa, Fournierella massiliensis
  misc_feature (1)..(342): tr|A0A4R1R0E2|A0A4R1R0E2_9FIRM S-adenosylmethionine:tRN A ribosyltransferase-isomerase OS=Fournierella massilie nsis OX=1650663 GN=queA PE=3 SV=1
MLKKDFWFDLPQELIAQEPCSPRDAARLMCLDRSNDQIQHRVFRDLVDLLEPGDLLVVNNSKVLPARLIGQKEHTGAVCELLLLHQESNDVWECLARPGKRLKPGMRILFGDGSLIATIQETKEDGNKLVSFEYNTQTLYEKLDEFGKMPLPPYITKQLEDQSQYQTVYAKELGSAAAPTAGLHFTPELMQRLQDKGIKITEVTLHVGLGTFRPVKEDEIEDHLMHSEWYSVSEETARLINETKEAGHRVIAVGTTSCRTLESVAAKYGKIQACSGDTSIFLYPGCKFLCLDGLITNFHLPESTLIMLVSAFYGYEKTMAAYKTAVEQRYRFFSFGDAMLIL

SEQ ID NO: 66745 - protein, 338 aa, Francisella adeliensis
  misc_feature (1)..(338): tr|A0A2Z4XYD1|A0A2Z4XYD1_9GAMM S-adenosylmethionine:tRN A ribosyltransferase-isomerase OS=Francisella adeliensi s OX=2007306 GN=queA PE=3 SV=1
MKTDDFDYTLPEELIASYPLESRDASRLLKLSKQTGDIIDHKFTDFIDFVTDKDLLIFNDSKVMLARLYGKKTTGAKLEFLVEKIKTPKIFETHIKSNRSPAIGSEIFIEDTPAKVLEKDGSVYLLELQGDADIYQIMNEFGHIPLPQYMKREDEEFDAERYQTVYAKDLGSVAAPTAGLHFSDELMQAIKDKGVDTAYITLHVGSGTFKPVQVDDVNNHKMHSEVISVSEEVCEKIRQTKVNGGRVIAIGTTSVRSLETAGQSGQIEGYQGETDIFLYPGKKFNVVDAMITNFHLPKSTLIMLVSAFADKEKIMKAYEHAIENKYRFFSYGDAMFIC

SEQ ID NO: 66746 - protein, 338 aa, Francisella endosymbiont
  misc_feature (1)..(338): tr|A0A1X1BF78|A0A1X1BF78_9GAMM S-adenosylmethionine:tRN A ribosyltransferase-isomerase OS=Francisella endosymbi ont of Ornithodoros moubata OX=1981171 GN=queA PE=3 SV= 1
MKTDDFDYKLPEELIASYPLENRDASRLLKLNKQTGEIADHKFTDFIDFITPKDLLVLNNSKVMLACLYGSKTTGAKVEYLIERIKTPKVFEAHIKANRSPAVGSEIYIEDTLAKVLDKDGGMYLLELQGDEDIYQLMEEFGHIPLPPYMKREDEEFDAERYQTVYAKDLGSVAAPTAGLHFSQQLMQQIKAKGVDIAYIVLHVGSGTFKPVQVDDVESHKMHAEVISVPADVCQKIRQTKANGGRVIAIGTTSVRSLETAGQNGQIGTYQGETDIFLYPGKKFNVVDAMITNFHLPKSTLIMLVSAFANKHKIMQAYHHAIAKKYRFFSYGDAMFIY

SEQ ID NO: 66747 - protein, 338 aa, Francisella halioticida
  misc_feature (1)..(338): tr|A0A2Z2L0R1|A0A2Z2L0R1_9GAMM S-adenosylmethionine:tRN A ribosyltransferase-isomerase OS=Francisella haliotici da OX=549298 GN=queA PE=3 SV=1
MKTDDFDYKLLEELIASYPLENRDASKLLKLNKQTGQIADHKFTDFLDFITSKDLLIFNNSRVMLARLYGKKATGAKLEYLIEKIKSPKVFETHIKANRSPAIGSEIYVQDTLAKVLEKDGGMYLLELVGNKDIYRLMNEFGHIPLPPYMKREDEEFDAERYQTVYAKDLGSVAAPTAGLHFSEELMQQIKDKGVDIAYVTLHVGSGTFKPVQVDDVNNHKMHSEVISVPEDVCEKVRQTKVNGGRVIAIGTTSVRSLETAGQNGKIKSYQGETDIFLYPGKKFNIVDAMVTNFHLPKSTLIMLVSAFADKQKIMKAYEHAIIKKYRFFSYGDAMFIY

SEQ ID NO: 66748 - protein, 338 aa, Francisella hispaniensis
  misc_feature (1)..(338): tr|F4BGL1|F4BGL1_9GAMM S-adenosylmethionine:tRNA ribosy ltransferase-isomerase OS=Francisella hispaniensis OX=6 22488 GN=queA PE=3 SV=1
MKTDDFDYKLPEELIASYPLENRDASKLLKLNRQTGEIADHKFTDLIDFITPKDLLVFNNSKVMLARLYGSKTTGAKLEYLIERIKTPKLFETHIKANRSPAIGSEIYVEDTLAKVLDKDGGMYLLEIQGDKDIYHLMEEFGHIPLPPYMKREDEEFDAERYQTVYAKDLGSVAAPTAGLHFSQQLMQQIKDKGIDIAYITLHVGSGTFKPVQVDNVESHKMHAEVISVPADVCEKIRQTKANGGRVIAIGTTSVRSLETAGQNGQIEPYQGETDIFLYPGKKFNVVDAMITNFHLPKSTLIMLVSAFADKHKIMQAYHHAIAQKYRFFSYGDAMFIY

SEQ ID NO: 66749 - protein, 338 aa, Francisella hispaniensis
  misc_feature (1)..(338): tr|A0A153JSC1|A0A153JSC1_9GAMM S-adenosylmethionine:tRN A ribosyltransferase-isomerase OS=Francisella hispanien sis FSC454 OX=1088883 GN=queA PE=3 SV=1
MKTDDFDYKLPEGLIASYPLENRDASRLLKLNKKTGEIADHKFTDLIDFITPKDLLVFNNSKVMLARLYGSKTTGAKLEYLIERIKTPKLFETHIKANRSPAIGSEIYVEDTLAKVLDKDGGMYLLEIQGDKDIYHLMEEFGHIPLPPYMKREDEEFDAERYQTVYAKDLGSVAAPTAGLHFSQQLMQQIKDKGIDIAYITLHVGSGTFKPVQVDNVESHKMHAEVISVPADVCEKIRQTKANGGRVIAIGTTSVRSLETAGQNGQIEPYQGETDIFLYPGKKFNVVDAMITNFHLPKSTLIMLVSAFADKHKIMQAYHHAIAQKYRFFSYGDAMFIY

SEQ ID NO: 66750 - protein, 338 aa, Francisella marina
  misc_feature (1)..(338): tr|A0A5C2BYZ3|A0A5C2BYZ3_9GAMM S-adenosylmethionine:tRN A ribosyltransferase-isomerase OS=Francisella marina OX =2249302 GN=queA PE=3 SV=1
MRTDDFDYKLPEELIASYPLENRDASRLLKLNKQTGEILDYKFTDFIDFINPEDLLIFNNSKVMLARLYGEKTTGAKLEYLIERVKTPKIFETHIKANRSPTIGSEIYVQDTLAKVLEKDGGMYLLELQGNKDIYQLMEEFGHIPLPPYMKRDDEEFDAERYQTVYAKDLGSVAAPTAGLHFSEELIRQIKAKGTDIAYITLHVGSGTFKPVQVDDVNNHKMHSEVISVPEEVCNKIRQTKANGGRVIAIGTTSVRSLETAGQSGEIEPYQGETDIFLYPGKKFHVVDAMITNFHLPKSTLIMLVSAFTDKEKIMKAYEHAIASKYRFFSYGDAMFIF

SEQ ID NO: 66751 - protein, 338 aa, Francisella noatunensis
  misc_feature (1)..(338): tr|I2B0M3|I2B0M3_FRANT S-adenosylmethionine:tRNA ribosy ltransferase-isomerase OS=Francisella noatunensis subsp . orientalis (strain Toba 04) OX=1163389 GN=queA PE=3 S V=1
MKTDDFDYKLPEELIACYPLDKRDESRLLKLNKDTGEIRDFIFKDFFEFITPKDLLVFNNSKVMLARLYGEKTTGGKLEFLIEKIKSPKVFETHIKANRSPVAGMEIYVQDTLAKVLEKDGGMYLLELQGEKDIYQLMEEFGHIPLPPYMKRDEEAFDAERYQTVYAKDLGSVAAPTAGLHFSEELMQQIKAKGVDIAYITLHVGSGTFKPVQVDDVNNHKMHAEVISVSEDVCEKIRQTKANGGRVIAIGTTSVRSLETAGQSGEIQPYQGQTDIFLYPGKKFNIVDAMITNFHLPKSTLIMLVSAFSDKEKVMKAYEHAIAEKYRFFSYGDAMFIF

SEQ ID NO: 66752 - protein, 338 aa, Francisella noatunensis; identical to SEQ ID NO: 66751
  misc_feature (1)..(338): tr|A0A5C1RU75|A0A5C1RU75_9GAMM S-adenosylmethionine:tRN A ribosyltransferase-isomerase OS=Francisella noatunens is subsp. orientalis OX=299583 GN=queA PE=3 SV=1

SEQ ID NO: 66753 - protein, 338 aa, Francisella novicida
  misc_feature (1)..(338): tr|A0A2L1CHT5|A0A2L1CHT5_FRANO S-adenosylmethionine:tRN A ribosyltransferase-isomerase OS=Francisella novicida OX=264 GN=queA PE=3 SV=1
MKTDDFDYKLPEELIASYPLENRDASRLLKLNKQTGEIADYKFTDFIDFISPGDLLVFNNSKVMLARLYGSKTTGAKLEYLIERIKTPKLFETHIKANRSPAIGSEIYVEDTLAKVLDKDGGMYLLEIQGVKDIYQLMEEFGHIPLPPYMKRDDEEFDAERYQTVYAQDLGSVAAPTAGLHFSKELMQQIKDKGVDIAYITLHVGSGTFKPVQVDDVESHKMHAEVISVPVEVCQKIRQTKANGGRVIAIGTTSVRSLETAGQNGQIEPYQGETDIFLYPGKKFNVVDAMITNFHLPKSTLIMLVSAFADKEKIIKAYEHAIAERYRFFSYGDAMFIF

SEQ ID NO: 66754 - protein, 338 aa, Francisella persica
  misc_feature (1)..(338): tr|A0A0K2JRZ4|A0A0K2JRZ4_9GAMM S-adenosylmethionine:tRN A ribosyltransferase-isomerase OS=Francisella persica A TCC VR-331 OX=1086726 GN=queA PE=3 SV=1
MKTDDFNYKLPEELIARYPLKNRDASRLLKLNKQTGEIADHKFTDFIDFITPKDLLIFNNSKVMLARLYGSKTTGAKLEYLIERIKTPKVFETHIKANRSPAIGSEIYIEDTLAKVLDKDGVMYLLELQGDKDIYQLMEEFGHIPLPPYMKREDEEFDAERYQTVYAKDLGSVAAPTAGLHFSQQLMRQIKAKGVGIAYITLHVGSGTFKPVKVDDIESHKMHAEVISVPADVCQKIRQTKANGGRVIAIGTTSVRSLETAGQNGQIETYQGETDIFLYPGKKFNVIDAVITNFHLPKSTLIILISAFADKHKIMQAYHHAIAKKYRFFSYGDAMFIY

SEQ ID NO: 66755 - protein, 338 aa, Francisella philomiragia
  misc_feature (1)..(338): tr|A0A0B6D0U3|A0A0B6D0U3_9GAMM S-adenosylmethionine:tRN A ribosyltransferase-isomerase OS=Francisella philomira gia OX=28110 GN=queA PE=3 SV=1
MKTDDFDYKLPEELIASYPLENRDASRLLKLNKQTGDIVDHKFTDFIDFINPKDLLVFNNSKVMLARLYGEKTTGAKLEYLIERVKTPKIFETHIKANRSPAIGSEIYVQDTLAKVLEKDGGMYLLELQGDKDIYQLMEEFGHIPLPPYMKRGDEEFDAERYQTVYAKDLGSVAAPTAGLHFSEKLMQQIKAKGVDIAYITLHVGSGTFKPVQVDDVNNHKMHAEVISVSEAVCEKIRQTKANGGRVIAIGTTSVRSLETAAQSGEIQPYQGETDIFLYPGKKFNVVDAMITNFHLPKSTLIMLVSAFADKEKIMKAYEHAIAEKYRFFSYGDAMFIF

SEQ ID NO: 66756 - protein, 338 aa, Francisella philomiragia
  misc_feature (1)..(338): sp|B0TYS6|QUEA_FRAP2 S-adenosylmethionine:tRNA ribosylt ransferase-isomerase OS=Francisella philomiragia subsp. philomiragia (strain ATCC 25017) OX=484022 GN=queA PE= 3 SV=1
MRTDDFDYKLPEELIASYPLENRDASRLLKLNKQTGEILDHKFTDFIDFINPEDLLIFNNSKVMLARLYGEKITGAKLEYLIERVKTPKIFETHIKANRSPAIGSEIYVQDTLAKILEKDGGMYLLELQGNKDIYQLMEEFGHIPLPPYMKRDDEEFDAERYQTVYAKDLGSVAAPTAGLHFSEELMQQIKAKGTDIAYITLHVGSGTFKPVQVDDVNNHKMHSEVISVSEDVCEKIRQTKANGGRVIAIGTTSVRSLETAGQSGEIQPYQGETDIFLYPGKKFNIVDAMITNFHLPKSTLIMLVSAFADKEKIMKAYEHAIAEKYRFFSYGDAMFIF

SEQ ID NO: 66757 - protein, 339 aa, Francisella sp.
  misc_feature (1)..(339): tr|A0A2W6SQW8|A0A2W6SQW8_9GAMM S-adenosylmethionine:tRN A ribosyltransferase-isomerase OS=Francisella sp. OX=20 47875 GN=queA PE=3 SV=1
MQLHDFDFDLPPKLIAQVPAKNREDSRLLVCQKNVMTDSMFRDIGLYFQAGDVLVLNNTKVMKARLQGKKASGGQIEVLVEKVLDTTTALCLLKASHAPKETSMIYFAYNISARIIKRQNDLFYLKFKLPLTEVINAIGHLPLPPYIHHEANQYDEARYQTVFSRHEGAIAAPTAGLHFTAEILDKLKVKGVSIVELTLHVGAGTFQPIRTENIEVHRMHKEWFSIPSATAKIINQALLEKRRICAVGTTSLRALESAFATGKIKKLTQETDIFIRPGYRFQVVDRLLTNFHLPKSTLIILVSAFAGLQNIKNIYAHAIKERYRFFSYGDCMLLERSQN

SEQ ID NO: 66758 - protein, 338 aa, Francisella sp.
  misc_feature (1)..(338): tr|A0A097EN54|A0A097EN54_9GAMM S-adenosylmethionine:tRN A ribosyltransferase-isomerase OS=Francisella sp. FSC10 06 OX=1547445 GN=queA PE=3 SV=1
MKTDDFDYKLPEELIASYPLENRDASRLLKLSKQTGEIVDHKFTDFIDFINEGDLLVFNNSKVMLARLYGEKITGAKLEYLIEKVKTPKLFETHIKANRAPAVGSEIYVQDTPAIVLEKDGGMYLLELQGEKDIYQLMEEFGHIPLPPYMKRDDEEFDAERYQTVYAKDLGSVAAPTAGLHFSDELMQQIKAKGVDTAYITLHVGSGTFKPVQVDDVNNHKMHSEVISVPEDVCEKIRQTKANDGRVIAIGTTSVRSLETAGQSGEIQPYQGETDIFLYPGKKFNVVDAMITNFHLPKSTLIMLVSAFADKEKIMKAYEHAIASKYRFFSYGDAMFIY

SEQ ID NO: 66759 - protein, 340 aa, Francisella tularensis
  misc_feature (1)..(340): sp|Q5NFL9|QUEA_FRATT S-adenosylmethionine:tRNA ribosylt ransferase-isomerase OS=Francisella tularensis subsp. t ularensis (strain SCHU S4 / Schu 4) OX=177416 GN=queA P E=3 SV=1
MFMKTDDFDYKLPEELIASYPLENRDASRLLKLNKQTGEIADYKFTDFIDFINPGDLLVFNNSKVMLARLYGSKTTGAKLEYLIERIKTPKLFETHIKANRSPAIGSEIYVEDTLAKVLDKDGGMYLLEIQGDKDIYQLMEEFGHIPLPPYMKRDDEEFDAERYQTVYAQDLGSVAAPTAGLHFSKELMQQIKDKGVDIAYITLHVGSGTFKPVQVDDVESHKMHAEVISVPVEVCQKIRQTKENGGRVIAIGTTSVRSLETAGQNGQIEPYQGETDIFLYPGKKFNVVDAMITNFHLPKSTLIMLVSAFADKEKIIKAYEHAIAERYRFFSYGDAMFIF

SEQ ID NO: 66760 - protein, 338 aa, Francisella tularensis
  misc_feature (1)..(338): sp|A0Q7A0|QUEA_FRATN S-adenosylmethionine:tRNA ribosylt ransferase-isomerase OS=Francisella tularensis subsp. n ovicida (strain U112) OX=401614 GN=queA PE=3 SV=1
MKTDDFDYKLPEELIASYPLENRDASRLLKLNKQTGEIADHKFTDFIDFISPGDLLVFNNSKVMLARLYGSKTTGAKLEYLIERIKNPKLFETHIKANRSPAIGSEIYVEDTLAKVLDKDGGMYLLEIQGDKDIYQLMEEFGHIPLPPYMKRDDEEFDAERYQTVYAQDLGSVAAPTAGLHFSKELMQQIKNKGVDIAYITLHVGSGTFKPVQVDDVESHKMHAEVISVPVEVCQKIRQTKENGGRVIAIGTTSVRSLETAGQNGQIEPYQGETDIFLYPGKKFNVVDAMITNFHLPKSTLIMLVSAFADKEKIIKAYEHAIAERYRFFSYGDAMFIY

SEQ ID NO: 66761 - protein, 356 aa, Franconibacter pulveris
  misc_feature (1)..(356): tr|A0A0J8VTE8|A0A0J8VTE8_9ENTR S-adenosylmethionine:tRN A ribosyltransferase-isomerase OS=Franconibacter pulver is OX=435910 GN=queA PE=3 SV=1
MRVADFSFELPESLIAHYPQPQRSACRLLSLDGPTGQLTHGTFTDLLDKLKPGDLLVFNNTRVIPARLYGRKASGGKIELLVERMLDETRVLAHIRASKAPKPGAELLLGDDESVQATMVARHDALFEVKFNDERPVLDILNAIGHMPLPPYIERPDEEADRELYQTVYSQKPGAVAAPTAGLHFDEPLLAALREKGIEMAFVTLHVGAGTFQPVRVDSIEDHIMHSEYAEVPQDVVDAVLAAKARGNNVVAVGTTSVRSLESAAQAAKNSLIEPFFGDTQIFIYPGYQWKVVDALVTNFHLPESTLIMLVSAFAGYQHTMRAYKEAVKAEYRFFSYGDAMFITHNPQAVNERPGE

SEQ ID NO: 66762 - protein, 343 aa, Frankia asymbiotica
  misc_feature (1)..(343): tr|A0A1V2I7P0|A0A1V2I7P0_9ACTN S-adenosylmethionine:tRN A ribosyltransferase-isomerase OS=Frankia asymbiotica O X=1834516 GN=BL253_21210 PE=3 SV=1
MSAVAFDLPTGLEASAPPERRDGVRLLVARADGVRHARFDEFGEHLAPGDLVVVNTSAMLPAAVSGSRHGGRSGDRAVVVHFATALDDGDWVVEVRESDPAATGPVNDLRPGERIALPSGVWLTVRAAHPAGQDRLWRASVPVDGGVVPYLRHVGRPIRYAYVPDPQPMDAYRTVFGRDPGSAEMPSAGRPFSTGLVTDLVTRGILVAPVLLHTGVSSQEPGEPPQPERFRVDAHTARLVNATRRWGGRVVAVGTTATRALESAAGPDGAVRAAAGWTDLVLGPGRPARTVTGLVTGWHAPGASHLDLLEAVAGPDLVATAYREALRERYLWHEFGDSCLLLP

SEQ ID NO: 66763 - protein, 368 aa, Frankia inefficax
  misc_feature (1)..(368): tr|E3J490|E3J490_FRAIE S-adenosylmethionine:tRNA ribosy ltransferase-isomerase OS=Frankia inefficax (strain DSM 45817 / CECT 9037 / EuI1c) OX=298654 GN=FraEuI1c_5020 PE=3 SV=1
MTGPSAAGATRTAPPTGVLGGTAEHGHDVTGTVVFDLPAGLEAAAPPPSRDGVRLLVARPGDLRHARFSDLGDQLAPGDLVVVNTSGTLPAAVAGVRAGGETVAVHFATALDDGDWVVEVRPAGEAVTGPVADLRPGEQLALPAGVRLTVRGPHPAGQRRLWRAYVPVDGGVVAYLAHVGRPIRYSYVPDPQPIEAYRTVFGRDPGSAEMPSAGRPFSTELVTDLVSRGIGVTPVLLHTGVSSQEPGEPPQPERFRVGPQTARLVNATRRWGGRVVAVGTTVTRALESAAAPDGTVRPTAGWTDLVLGPDRPARAVTGLVTGWHAPGASHLDLLVAVAGPSLVADAYREAVRARYLWHEFGDSCLLLP

SEQ ID NO: 66764 - protein, 356 aa, Frankia sp.
  misc_feature (1)..(356): tr|A0A1S1RXR8|A0A1S1RXR8_9ACTN S-adenosylmethionine:tRN A ribosyltransferase-isomerase OS=Frankia sp. BMG5.36 O X=1834512 GN=BCD48_08290 PE=3 SV=1
MSAVAFDLPTGLEASAPPERRDGVRLLVARPNGVRHARFDEFGEHLAPGDLVVVNTSAMLPAAVSGSRHGDRAGNRAVVVHFATALDDGDWVLEVRAADPAGVPAGSAKPIWEVGTGPVDDLRRGERIALPHGVWLTVHAPHPAGQDRLWRASVPIDGGVVPYLRHVGRPIRYAYVLDPQPMDAYRTVFGRDPGSAEMPSAGRPFSTDLVTDLVTRGILVAPVLLHTGVSSQEPGEPPQAERFRVDAHTARLVNATRRWGGRVVAVGTTATRALESATGPDGTVRAAAGWTDLVLDPRRAARTVTGLVTGWHAPGASHLDLLEAVAGPDLVAAAYREALRERYLWHEFGDSCLLLP

SEQ ID NO: 66765 - protein, 342 aa, Frankia sp.
  misc_feature (1)..(342): tr|A0A4R1D566|A0A4R1D566_9ACTN S-adenosylmethionine:tRN A ribosyltransferase-isomerase OS=Frankia sp. BMG5.11 O X=222540 GN=queA PE=3 SV=1
MRVDLFDFELPPELIALRPAAPRDAARLLVVQGAEAFADRIVRDLPTLLNPGDVLVFNDTRVIPAQLEGRRGEARIGATLHKRIDLRRWQAFVRNAKRLREGDTVVFGADVAAVAEARHPDGSWTLAFAGDEPVEVLLERAGRMPLPPYIAGKRPTDQRDRSDYQTMFAARDGAVAAPTAALHFTPELIAALEAAGVAREILTLHVGAGTFLPVKADDTDDHAMHAEWGRIDAPTAARLNAAREAGGRVIAVGTTSLRLLESATGQDGIIRDFAGDTSIFITPGYRFRAVDGLMTNFHLPKSTLFMLVSALMGRERMQAVYARAIESGYRFYSYGDSSLLLP

SEQ ID NO: 66766 - protein, 337 aa, Frankiales bacterium
  misc_feature (1)..(337): tr|A0A3A3ZMA1|A0A3A3ZMA1_9ACTN S-adenosylmethionine:tRN A ribosyltransferase-isomerase OS=Frankiales bacterium YIM 75000 OX=2339232 GN=D5H78_01430 PE=3 SV=1
MSALRFELPAALSATVPPEVRGVPRDGVRLLVADGQGLRHRAFHEIGEVLRPGDLLVVNTSATLPAAVDGTLDGRPVTVHLSTRRDDGTWLVEVRPPGRATGPLGGDLAGARVDLPGPAALHLGAPHGRLWQAAVTARGGAEEVMRRHGRPVSYAYVEGRWPLSAYQTAFARVPGSAEMPSAARPFTPELVTELVADGVAVAPVVLHCGVSSLEEGEGALPERYAVPPATARLVATTRAAGGRVVAVGTTVVRALETAAAGTGTVAPSAGWTDLVLGPDRPARVVDGLVTGWHAPGASHLSLLEAVVGPERVAAAYASALREGYLWHEFGDSALLLR

SEQ ID NO: 66767 - protein, 360 aa, Frankineae bacterium
  misc_feature (1)..(360): tr|A0A1G8QJV9|A0A1G8QJV9_9ACTN S-adenosylmethionine:tRN A ribosyltransferase-isomerase OS=Frankineae bacterium MT45 OX=1882833 GN=SAMN05444157_1472 PE=3 SV=1
MTALLQKPSTIFRLTDDLTAAEPPEQRGLSRDGVRLLVAEHSADGTDRVIHRRFRELPEYLRAGDLLVVNTSATLAGEIDGTWRGGAPVVVHFATELDDGSWVVELRSAPDGATPLLAAGVGDEILLPRRVSLRLLEPYGGRTASPTGEGNRLWRGDVRSASRLAAYLARYGRPISYGYLSRHWPLSDYQTVFSREPGSAEMPSAGRPFTTELVTDLVRRGIGVAPITLHTGVSSQDAGEPPQPERFAVSASTARLVNQTRLAGGRVVAVGTTVTRALESAADAAGEVRPAAGWTEHIVGGENPARVVTGLITGLHNPEASHLLLVESIAGARLTQLAYDAAVAERYLWHEFGDSCLLLP

SEQ ID NO: 66768 - protein, 344 aa, Frateuria aurantia
  misc_feature (1)..(344): tr|H8L5Z0|H8L5Z0_FRAAD S-adenosylmethionine:tRNA ribosy ltransferase-isomerase OS=Frateuria aurantia (strain AT CC 33424 / DSM 6220 / NBRC 3245 / NCIMB 13370) OX=76743 4 GN=queA PE=3 SV=1
MDKSDFDFELPPGLIAQAPLAQRSASRLLWLNPDDGHIEDKVFRDLPTFCQPGDLLVFNNTKVLPARLHGHKPSGGAVEIMIERVCGTHEVIAQLRASKKPREGGEIVLADGSRATMQGREGSFFRLRFDTALDDLLPRVGKMPLPPYITRQADDSDDSRYQTVYAREPGAVAAPTAGLHFDQALLDQLSGQGIEFGYVTLHVGAGTFQPVREGRLEDHVMHREYLEVDTDLVERIAATRARGNRVIAVGTTVVRALESATVDGKLGAYAGETQIFIYPGYRITSIDGLVTNFHLPQSTLLMLISALAGRDRIMQAYQHAVAAGYRFFSYGDAMLILPGSAAEV

SEQ ID NO: 66769 - protein, 344 aa, Frateuria sp.
  misc_feature (1)..(344): tr|A0A0Q9PCV0|A0A0Q9PCV0_9GAMM S-adenosylmethionine:tRN A ribosyltransferase-isomerase OS=Frateuria sp. Soil773 OX=1736407 GN=queA PE=3 SV=1
MKKSDFDFALPPELIAQAPLAERSASRLLLLDVPAQSMADRHFRELPEFLRPGDLLVFNDTRVLPARLYGRKETGGAVEILIERVTGAHEAIVQLGVSKKPKTGGRIELADGSHAVVLGREEAFFRLRFESPEPLERLLSRLGEMPLPPYIERHANASDMERYQTVFAREPGAVAAPTAGLHFDEPMLDALRARGVDSGYVTLHVGAGTFQPMRAEEVQDHVMHREWLNVGAELVERIRRTRAGGGRVIAVGTTVVRALESATVDGRLHPFAGETQIFIFPGYRFSSIDGLITNFHLPQSTLLMLVSALAGREFILDAYRHAVAQRYRFFSYGDAMLILPHGCV

SEQ ID NO: 66770 - protein, 342 aa, Frateuria terrea
  misc_feature (1)..(342): tr|A0A1H6XW84|A0A1H6XW84_9GAMM S-adenosylmethionine:tRN A ribosyltransferase-isomerase OS=Frateuria terrea OX=5 29704 GN=queA PE=3 SV=1
MKKSDFDFDLPPELIAQAPLPERSASRLLWLDPATCTLADRQFRELPSFLRAGDLLVFNDTRVLPARLYGRKDSGGAVEILIERVTGAHEATVQLGVSKKPKQGGRIELGDGSHATVLGRDGAFFRLRFESPEPLEGLLSKLGEMPLPPYIERHADAADLERYQTVYAREPGAVAAPTAGLHFDEPLLARLRELGVDSGYVTLHVGAGTFQPMRVQDIHQHTMHREWLNVGAALVEKVRRTRAAGGRVIAVGTTVVRALEAASRDGQLQPFAGETQIFIFPGYRITSIDGLVTNFHLPQSTLLMLVSALAGREFVLEAYRHAVRERYRFFSYGDAMLILPRT

SEQ ID NO: 66771 - protein, 361 aa, Frederiksenia canicola
  misc_feature (1)..(361): tr|A0A3N4XFN3|A0A3N4XFN3_9PAST S-adenosylmethionine:tRN A ribosyltransferase-isomerase OS=Frederiksenia canicol a OX=123824 GN=queA PE=3 SV=1
MLVSDFHFDLPDELIARYPTAERTASRLLYLNGETGLFQDQHFTDLLSHLNAGDLLIFNNTRVIPARLYGRKASGGKLEVLVERVLDAHRCLAHIRASKSPKIDTEIWLGEDKLGEGNGFKATMVARHDALFELHFAAEQPLFDLLQQAGHMPLPPYIDRPDEDTDQERYQTVYSQVLGAVAAPTAGLHFDENTLQKIAEKGVNTAFVTLHVGAGTFQPVRVESIEDHKMHAEYAEVSQEVVDKILATKANGKRVICVGTTSVRSIESAAQAAEASGQLIAPFYADTAIFLHPGKSFRIVDALVTNFHLPESTLIMLVSAFAGYRQCMNAYRHAVEAKYRFFSYGDAMFITKNANALNDTP

SEQ ID NO: 66772 - protein, 384 aa, Fremyella diplosiphon
  misc_feature (1)..(384): tr|A0A1Z4MEJ3|A0A1Z4MEJ3_MICDP S-adenosylmethionine:tRN A ribosyltransferase-isomerase OS=Fremyella diplosiphon NIES-3275 OX=1973485 GN=queA PE=3 SV=1
MEQQLTPAALTPNSNNDVVNTELDRSLSAYDYELPPELIAQNPAIPRDSSRLLVVNSRSIHHIFRDLPHLLKAGDLLVMNNTSVIPARLYGRKATGAEIEVLLLEERQYNCWLALVKPGKRFKVGSKIIFEPRGALKQGSKGAGGDEEVNSSLSLTATVLETDPATGGRLLQFDVPGEVPLVQILEVFGEVPLPPYITASEATDEQYQTVYAQHPGAIAAPTAGLHFTPELLENLRDRGINQAFITLHVGVGTFRPVEVEDVTTHQMHEEWIEVPAATVEQIRATKAAGGRVIAVGTTAVRSLEGAAQSGELQPFCGKTNLFIYPGYQWRVVDGLITNFHLPRSSLLMLVSALIGRERLLNLYQEAIAARYRFYSFGDAMLILP

SEQ ID NO: 66773 - protein, 368 aa, Fretibacterium sp.
  misc_feature (1)..(368): tr|A0A3P1Y5B0|A0A3P1Y5B0_9BACT S-adenosylmethionine:tRN A ribosyltransferase-isomerase OS=Fretibacterium sp. OH 1220_COT-178 OX=2491047 GN=queA PE=3 SV=1
MSSSVQRALVHEDLFDLNAYDYPLPEDRIAQMPAEPRDSSRLLDWRVGDGRVEHRRFRDILEFLRPNDLLVLNDTRVLPARLLGRRLPGGGGVELLLLSPCSQDFQTWKALVRPGRKLHPGAEVLVGDRKIGIEALAEGGTRIVRVGSGREDVLSFLDAFGRMPLPPYIHGDGDWKEAYQTVFALREGSVAAPTASLHFTRKLLEDIDALGVRRAWVTLHVGLGTFRPVRSADIRDHDIHDEYCEIPRATALAIRECRAAGGRVVAAGTTVARTLESMSDGNGVRSGRMDTRLFIYPGFEFRVVDALITNFHLPKSSLLMLVAAFAAGLGGWRGEEERALSALHEVYALAVAEGYRFFSFGDAMLLHR

SEQ ID NO: 66774 - protein, 342 aa, Frischella perrara
  misc_feature (1)..(342): tr|A0A318N7A3|A0A318N7A3_FRIPE S-adenosylmethionine:tRN A ribosyltransferase-isomerase OS=Frischella perrara OX =1267021 GN=queA PE=3 SV=1
MQLSDFHFDLPNELIARYPLENRSECRLLCLDGPSGQLENGIFTDILDKLHEGDLLVFNNTRVIPARLYGRKASGGKIEILVERILDNNRVLAHVKASKSPKVGAELLLGEHDQYQITMLARHDALFELQFPDDVLTILNQIGHIPLPPYIDRPDDEHDREVYQTVYNKVPGAVAAPTAGLHFDDGLLNQLKQKGVEMAFVTLHVGAGTFQPVRVDNITDHVMHAEYAQVPQEVVDAVLACKARGKRVIAVGTTSVRALESAAQKTGHIAPFFADTRIFIYPGYHFNVVDALITNFHLPESTLIMLVSAFAGYENTMHAYQQAVQERYRFFSYGDAMFITKK

SEQ ID NO: 66775 - protein, 342 aa, Frischella perrara
  misc_feature (1)..(342): tr|A0A0A7S2Q0|A0A0A7S2Q0_FRIPE S-adenosylmethionine:tRN A ribosyltransferase-isomerase OS=Frischella perrara OX =1267021 GN=queA PE=3 SV=1
MQLSDFHFDLPNELIARYPLENRSECRLLCLDGPSGQLENGIFTDILDKLHEGDLLVFNNTRVIPARLYGRKASGGKIEILVERILDNNRVLAHVKASKSPKVGAELLLGEHDQYQITMLARHDALFELQFPDDVLTILNQIGHIPLPPYIDRPDDEHDREVYQTVYNKVPGAVAAPTAGLHFDDGLLNQLKQKGVEMAFVTLHVGAGTFQPVRVDHITDHVMHAEYAQVPQEVVDAVLACKARGKRVIAVGTTSVRALESAAQKTGHIAPFFADTRIFIYPGYHFNVVDALITNFHLPESTLIMLVSAFAGYENTMHAYQQAVQERYRFFSYGDAMFITKK

SEQ ID NO: 66776 - protein, 341 aa, Frisingicoccus caecimuris
  misc_feature (1)..(341): tr|A0A4R2M0H3|A0A4R2M0H3_9FIRM S-adenosylmethionine:tRN A ribosyltransferase-isomerase OS=Frisingicoccus caecim uris OX=1796636 GN=queA PE=3 SV=1
MKTSDFYYDLPEELIAQDPLTDRSSSRLMILDKETGDIRHKIFKDIIDELNPEDCLVINDTKVIPARLHGVKEDTGAHIEVLLLKRKSDSVWETLVKPGKKARPGARISFGDGLLVGEVMEVVEEGNRLIRFEYDGIFEEILDQLGEMPLPPYISHKLQDKNRYQTVYAKHEGSAAAPTAGLHFTEELLDAIQKKGVRIARVTLHVGLGTFRPVKVEDVNDHHMHSEFYMIGQEAADIINDTKRRGGRVISVGTTSTRTLESVADEQGFVRETSGWTEIFIYPGYRFKCIDALITNFHLPESTLLMLVSALAGKEAILNAYETAVKEGYRFFSFGDAMFIE

SEQ ID NO: 66777 - protein, 353 aa, Fructobacillus durionis
  misc_feature (1)..(353): tr|A0A1I1F344|A0A1I1F344_9LACT S-adenosylmethionine:tRN A ribosyltransferase-isomerase OS=Fructobacillus durion is OX=283737 GN=queA PE=3 SV=1
MTEAPHYQLSDFDYDLPEELIAQTPLKDRSSSRLLVLNALTGAYEDKHFYDIIDYLNPGDALVMNNSRVLPARLHGIRPTTGGHAEVLLLRQDHDDVWEVLVKPAKKSPVGSTIVFGDDPENPVMTGTIVKELEHGGRYIEFSYQGIFMERLEELGEMPLPPYIKEKLDDQERYQTVYSKVDGSAAAPTAGLHWTPELLQKVADKGVELVELTLHVGLGTFRPVDEENIEDHKMHSEFYQLSEEAAEKLNKVRANGGRVVATGTTSIRTLETIGTKFHGDLKADSGWTDIFIKPGYDWQVVDAFITNFHLPKSTLVMLVAAFTGRDNILNAYKHAVADKYRFFSFGDAMFVHK

SEQ ID NO: 66778 - protein, 345 aa, Fructobacillus ficulneus
  misc_feature (1)..(345): tr|A0A0K8MHL7|A0A0K8MHL7_9LACT S-adenosylmethionine:tRN A ribosyltransferase-isomerase OS=Fructobacillus ficuln eus OX=157463 GN=queA PE=3 SV=1
  misc_feature (323)..(333): Xaa can be any naturally occurring amino acid
MTEEKHYQLADFDYDLPQELIAQTPLKDRDTSRLLVLNAETGAYEDRHFYDILDYLNPGDALVMNNSRVLPARLHGIRPETGGHAEVLLLRQDHDDVWETLVKPAKKSPIGSTILFGDDPENPVMTGIIVGELEHGGRYVEFTYNGIFMERLNELGEMPLPPYIKEKLADQERYQTVYSKVDGSAAAPTAGLHWTPELLQKVANKGVDLVELTLHVGLGTFRPVEEENIEDHQMHSEFYQLTAEAAAQLNATRARGGRIVATGTTSIRTLETIGSKFEGEIQADSGWTDIFIKPGYQWQVVDAFITNFHLPKSTLVMLVAAFXXXXXXXXXXXPRTHPQCLPACG

SEQ ID NO: 66779 - protein, 353 aa, Fructobacillus fructosus
  misc_feature (1)..(353): tr|A0A3F3HXN0|A0A3F3HXN0_9LACT S-adenosylmethionine:tRN A ribosyltransferase-isomerase OS=Fructobacillus fructo sus KCTC 3544 OX=930946 GN=queA PE=3 SV=1
MGDAPHYQLSDFDYDLPEELIAQTPLKDRSSSRLLVLNALTGNYEDKHFYDILEYLNPGDALVMNNSRVLPARLHGVRPSTGGHAEVLLLRQDHDDVWEVLVKPAKKSPVGSTIVFGDDPKHPVMTGTIVKELDHGGRYIQFDYQGIFMERLEELGEMPLPPYIKEKLDDQERYQTVYSKVDGSAAAPTAGLHWTPELLQKVADKGVELVELTLHVGLGTFRPVDEENIEDHQMHSEFYQLSAEAAAKLNKVRSNGGRIVATGTTSIRTLETIGTKFNGELQADSGWTDIFIKPGYHWQVVDAFITNFHLPKSTLVMLVAAFTGRDNILKAYQHAVLDKYRFFSFGDAMFVHK

SEQ ID NO: 66780 - protein, 353 aa, Fructobacillus pseudoficulneus
  misc_feature (1)..(353): tr|A0A3F3GTG4|A0A3F3GTG4_9LACT S-adenosylmethionine:tRN A ribosyltransferase-isomerase OS=Fructobacillus pseudo ficulneus OX=220714 GN=queA PE=3 SV=1
MTEEKHYQLSDFDYHLPQELIAQTPLKDRDTSRLLVLNADTGAYEDKHFYDILEYLQPGDALVMNNSRVLPARLHGVRPETGGHAEVLLLRQDHDDVWETLVKPAKKSPIGSTIVFGDDPAHPVMTATVVGELEHGGRFVEFSYDGIFMERLNELGEMPLPPYIKEKLDDQERYQTVYSKVDGSAAAPTAGLHWTPELLQKVADKGVDLVELTLHVGLGTFRPVEEDNIEDHKMHSEFYQLSEDAAAKLNQTRARGGRIVATGTTSIRTLETIGSKFAGEIQADSGWTDIFIKPGYQWQVVDAFITNFHLPKSTLVMLVAAFTGRENILNAYEHAVEEKYRFFSFGDAMYIHR

SEQ ID NO: 66781 - protein, 353 aa, Fructobacillus sp.
  misc_feature (1)..(353): tr|A0A0J5PCR2|A0A0J5PCR2_9LACT S-adenosylmethionine:tRN A ribosyltransferase-isomerase OS=Fructobacillus sp. EF B-N1 OX=1658766 GN=queA PE=3 SV=1
MTEEKHYQLSDFDYDLPQELIAQTPLKERDTSRLLVLNAETGAYEDRHFYDILDYLNPGDALVMNNSRVLPARLHGIRPETGGHAEVLLLRQDHGDVWETLVKPAKKSPIGSTILFGDDPEKPVMTATIVGELEHGGRYVEFSYDGIFMERLNELGEMPLPPYIKKKLADQERYQTVYSKVDGSAAAPTAGLHWTPELLQKVADKGVELVELTLHVGLGTFRPVEEENIEDHQMHSEFYQLSAEAAATLNKVRKQSGRIVATGTTSIRTLETIGSKFDGQLQADSGWTEIFIKPGYQWRVVDAFITNFHLPKSTLVMLVAAFTGRENILNAYHHAVEAKYRFFSFGDAMFIHK

SEQ ID NO: 66782 - protein, 353 aa, Fructobacillus tropaeoli
  misc_feature (1)..(353): tr|A0A3F3HDJ6|A0A3F3HDJ6_9LACT S-adenosylmethionine:tRN A ribosyltransferase-isomerase OS=Fructobacillus tropae oli OX=709323 GN=queA PE=3 SV=1
MTEEKHYQLSDFDYDLPQELIAQTPLKERDTSRLLVLNAETGAYEDRHFYDILDYLNPGDALVMNNSRVLPARLHGIRPETGGHAEVLLLRQDHGDVWETLVKPAKKSPIGSTILFGDDPENPVMTATIVGELEHGGRYVEFSYDGIFMERLNELGEMPLPPYIKEKLADQERYQTVYSKVDGSAAAPTAGLHWTPELLQKVADKGVELVELTLHVGLGTFRPVEEENIEDHQMHSEFYQLSAEAADTLNKVREQGGRIVATGTTSIRTLETIGSKFDGQLQADSGWTDIFIKPGYKWQVVDAFITNFHLPKSTLVMLVAAFTGRENILNAYHHAVEAKYRFFSFGDAMFIHK

SEQ ID NO: 66783 - protein, 377 aa, Fuerstia marisgermanicae
  misc_feature (1)..(377): tr|A0A1P8WA34|A0A1P8WA34_9PLAN S-adenosylmethionine:tRN A ribosyltransferase-isomerase OS=Fuerstia marisgermani cae OX=1891926 GN=queA PE=3 SV=1
MVDPDPKNVDPDLDHIAAWQFELPPELIAARPTSQRDGGRLLVVRRQTGQIEHRQIVDLPNILQTGDRLVFNNTKVLPARLFGFRTSTGGRWEGLFLEQTDDKRWRITGQTRGRLLEDECLTIVQATEFSPSRTIDDYSAAETLQLRLVERCSDGSWLAEPDLNLQTLQLLEEFGTLPLPPYIGRKVADSADSERYQTVFASQTGAIAAPTAGLHFTPGLLSMCSARGISRSEVTLHVGIGTFRPVSTDRLSEHQMHSEWCRLTAESAADINTTKASGNNVVAVGTTSVRTLEASAAEVMSRDGSLVEWQGATNLFIQPGFRFRAVDQLLTNFHLPGSTLIVLVAALAGYDLTMEAYRKAVEEKYRFYSYGDAMLIL

SEQ ID NO: 66784 - protein, 363 aa, Fulvimarina manganoxydans
  misc_feature (1)..(363): tr|A0A1W1YLD9|A0A1W1YLD9_9RHIZ S-adenosylmethionine:tRN A ribosyltransferase-isomerase OS=Fulvimarina manganoxy dans OX=937218 GN=queA PE=3 SV=1
MRVDLFDFDLPEERIALRPAEPRESARLLQVAPSGLTDRRVADLPDCLRPDDILVFNDTRVIPAQLVGIRRREGLPEGQGVAEIEATLHMRLGPEKWAAFVRPAKRLRPGDRIVFGHEGETCLHGSLQANVEERGEAGEAVLAFDLSGPVLDEAIAAVGHVPLPPYIASKRPEDAQDRTDYQTVYAKDPGAVAAPTAGLHFTPSLFVALKARGVSTEFLTLHVGAGTFLPVKAETTEDHRMHAEIGHIDAALATRLTDAKRAGRRIVSVGTTSLRLLESAAEPDGTIKPFSGPTDIFITPGYRFRAVDALMTNFHLPRSTLFMLVSAFSGLERMRAAYTHAIGAGYRFYSYGDACLLERATDA

SEQ ID NO: 66785 - protein, 358 aa, Fulvimarina pelagi
  misc_feature (1)..(358): tr|Q0G038|Q0G038_9RHIZ S-adenosylmethionine:tRNA ribosy ltransferase-isomerase OS=Fulvimarina pelagi HTCC2506 O X=314231 GN=queA PE=3 SV=1
MRVDLFDFELPPERIALRPAEPRESAMLLGVSLTGLSDLRIADLPALIEPGDVLVFNDTKVIPAQLFGTRVREDSRDGEGVAQVEATLHMRLSPGSWAAFVRPGKRIKVGDTLVFASDDAETLAAEVTARGEGGEATLTFEHSGPDLDAAIAAVGHVPLPPYIAARRGDDARDWTDYQTIYAREAGAVAAPTAGLHFTDNLLEKLHERGVATEFLTLHVGAGTFLPVKADDTEDHRMHAEIGTIDAAMADRLNAARSAGGRIISVGTTSLRLLESAAGDDGRIAPFTGPTDIFITPGYRFKAVDRLMTNFHLPRSTLFMLVSAFCGLERMRRAYEHAIENGYRFYSYGDACLLDRIEE

SEQ ID NO: 66786 - protein, 358 aa, Fulvimarina pelagi; identical to SEQ ID NO: 66785
  misc_feature (1)..(358): tr|A0A0P0ZAL9|A0A0P0ZAL9_9RHIZ S-adenosylmethionine:tRN A ribosyltransferase-isomerase OS=Fulvimarina pelagi OX =217511 GN=queA PE=3 SV=1

SEQ ID NO: 66787 - protein, 362 aa, Fulvimarina sp.
  misc_feature (1)..(362): tr|A0A2E1H803|A0A2E1H803_9RHIZ S-adenosylmethionine:tRN A ribosyltransferase-isomerase OS=Fulvimarina sp. OX=19 69479 GN=queA PE=3 SV=1
MRVDLFDFELPEERIALRPAVPREAARLLHVGPGDRLADHHVGDLPDLLEPGDVLVFNDTRVIPARLSGVRRREGAVAGEGVARIEATLHMRMAPDRWKAFLRPAKRVKLGDRIVFGSEADNACLLAGLAATVEERGEGGETTLRFELEGPALDEAIAAVGHMPLPPYIASKRAEDAADLADYQTIFARESGAVAAPTAGLHFTPELMARLETRGLLTEFLTLHVGAGTFLPVKAEDTDEHKMHAEIGVVDAATAARLNAVRQKGGRLVAVGTTSLRLLESATGEDGVIRPFAGPTDIFITPGYRFRAVDRLVTNFHLPRSTLFMLVSAFSGLEAMRAAYAHAVDSGYRFYSYGDACLLERA

SEQ ID NO: 66788 - protein, 363 aa, Fulvimarina sp.
  misc_feature (1)..(363): tr|A0A371X7D9|A0A371X7D9_9RHIZ S-adenosylmethionine:tRN A ribosyltransferase-isomerase OS=Fulvimarina sp. 85 OX =2293836 GN=queA PE=3 SV=1
MKVDLFDFELPPERIALRPASPRESARLLEVRADGLSDRTIADLPDLLNPGDILVFNDTRVIPAQLVGMRTREGNREGEGTARIDTTLHMRLAGDRWAAFVRPAKRVKPGDSIVFSRGEAEPLRAEVSERGEAGEAVLVFERSGPDLDAAIAAVGHVPLPPYIAAKRGEDEQDRTDYQTIYAKDPGAVAAPTAGLHFTETLLETLRKRGIETAFLTLHVGAGTFLPVKADDTSDHRMHAEIGHIDRATADRLNAVRNAGGRIVAVGTTSLRLLESAAGEDGIIAPFSGATDIFITPGYRFRAIDRLLTNFHLPRSTLFMLVSALSGTKRMHAAYAHAIASGYRFYSYGDACLLDRIPEDIARP

SEQ ID NO: 66789 - protein, 343 aa, Fulvimonas soli
  misc_feature (1)..(343): tr|A0A316II69|A0A316II69_9GAMM S-adenosylmethionine:tRN A ribosyltransferase-isomerase OS=Fulvimonas soli OX=15 5197 GN=queA PE=3 SV=1
MKKSDFDFHLPPELIAQAPLPERSASRLLVLDVPARSLADRMFRELPALLRKGDLLVFNDTRVLPARLHGRKESGGAVEILIERVTGAHEAIVQLGVSKKPKEGGRIALGDGSLATVLGREDAFFRLRFESPEPLERLLAKLGEMPLPPYIARHADASDLERYQTVYAREPGAVAAPTAGLHFDEALLGSLRDMGVEFGYVTLHVGAGTFQPVRTENIHEHRMHREWLNVGASLVEKIRRTRAAGGRVIAVGTTVVRALESATVDGELRPFAGETQIFIFPGYRITSIDGLVTNFHLPQSTLLMLVSALAGREFVLEAYRHAVERRYRFFSYGDAMLVLPRGA

SEQ ID NO: 66790 - protein, 404 aa, Fulvivirga imtechensis
  misc_feature (1)..(404): tr|L8JXP8|L8JXP8_9BACT S-adenosylmethionine:tRNA ribosy ltransferase-isomerase OS=Fulvivirga imtechensis AK7 OX =1237149 GN=queA PE=3 SV=1
MLDKELPEIRLQDYKYDLPEERIAKFPLKERKDSKLLVYQTGNIEHTHFHQLEKHIPENTSLFFNDTRVIPARLHFKKETGAHIEVFLLEPVSPTRDVAQSMWVKDNCQWKCLVGNLKKWKDDQALTLILPVGNEEVTLKAFVADRSLQLVTFEWSGDHTFVDIIQAAGKIPLPPYINREVSDEDKERYQTIYSHHAGAVAAPTAGLHFSDQILKNLKAKGVSLNYLTLHVSAGTFQPVKEENVLHHPMHSEQIVVTMDNIDALLSNDQVIAVGTTSMRTLESLYWYGVKILLKKDAKFIIEKLLPYEFDCARLPEPQEAFKVIKRWMQQNNLHTIIGNTEIFIFPGYEFKVCKGLITNYHLPGSTLILLVAAFIGEDWRKVYKEALDNEYRFLSYGDSSLLMP

SEQ ID NO: 66791 - protein, 320 aa, Fulvivirga imtechensis
  misc_feature (1)..(320): tr|L8JZY3|L8JZY3_9BACT S-adenosylmethionine:tRNA ribosy ltransferase-isomerase OS=Fulvivirga imtechensis AK7 OX =1237149 GN=queA PE=3 SV=1
MVVHKDTKEIEHRSFKDIVEYFGDGDVLVTNDTQVFPARLYGNKEKTGAKIEVFLLRELNQEMHLWDVLVDPARKIRVGNKLYFGEGDLVAEVIDNTTSRGRTIRFLYDGSDEEFYKTIDSLGETPLPKYIKRETEPEDRERFQTIYAKHKGAVAAPTAGLHFTRQLLKRLEIKNVKMSAITLHIGLGTFRPVDVEDLTKHKMDSENFRVSEETVSTVNHALDNKKRVCAVGTTSMRALESSVSANGRLKPKEGWTDKFIFPPYDFKICNAMITNFHMPESTLLMMASAFGGYDLIMKAYETAIKEKYRFLTYGDAMLII

SEQ ID NO: 66792 - protein, 414 aa, Fulvivirga sp.
  misc_feature (1)..(414): tr|A0A553F5W0|A0A553F5W0_9BACT S-adenosylmethionine:tRN A ribosyltransferase-isomerase OS=Fulvivirga sp. M361 O X=2594266 GN=queA PE=3 SV=1
MTQDLPNIDLKKFQYNLPEEKIAKFPLKERSDSKLLCYQKGTIEHHQFKDISELLPENATLFFNNTRVIPARLHFFKETGALIEVFLLEPVSPTPDVASAMLIKGQCQWKCMIGNLKKWKDNIPLSLYLDEVLTISASIVDRDEQIVEFNWKSDHSFVDLLQLAGKIPLPPYIRREVSETDKERYQTVYSAQEGAVAAPTAGLHFDNKVLANLHLKGIKTDYLTLHVSAGTFQPIKSDNIMKHPMHHEQVTVTKANLESIMASDDIIAVGTTSLRTLESLYWYGVDLLLKNKQDFHIEKLRPYVLNESLPNAKTAIKAVLDHMTDTELDEISGSTEIFIFPGYSFKICNGLVTNYHLPGSTLILLIAAFIGEDWRKVYEEALQNNYRFLSYGDSSLLIPSSSSGQGNEKKLSLF

SEQ ID NO: 66793 - protein, 348 aa, Fulvivirga sp.
  misc_feature (1)..(348): tr|A0A553FG59|A0A553FG59_9BACT S-adenosylmethionine:tRN A ribosyltransferase-isomerase OS=Fulvivirga sp. M361 O X=2594266 GN=queA PE=3 SV=1
MKLSEFKFDLPTGLVALYPAENRDESRLMVLHRDSGEIEHKVFKDIVNYFDEGDVMVSNDTMVFPARLYGNKEKTGAKIEVFLLRELNEEMHLWDVLVDPARKIRVGNKLYFGDGDLVAEVIDNTTSRGRTIRFLFDGTDEEFYKTIENLGETPLPKYIKRDTEPEDKDRFQTIYAKNKGAVAAPTAGLHFTRQLLKRLEIKGVEMDHITLHIGLGTFRPVDVEDLTKHKMDSENFNVGDHTVEKVNLALDSKKKVCAVGTTTMRALESSVSANNRLKPRTGWTDKFIFPQYDFKICSAMVTNFHMPESTLLMMAAAFGGYELVMEAYQVAMKEKYRFLTYGDAMLIV

SEQ ID NO: 66794 - protein, 340 aa, Fusibacter sp.
  misc_feature (1)..(340): tr|A0A4Q1ZVZ3|A0A4Q1ZVZ3_9FIRM S-adenosylmethionine:tRN A ribosyltransferase-isomerase OS=Fusibacter sp. A1 OX= 2283630 GN=queA PE=3 SV=1
MKTSDFYFDLPDEQIAQTPLENRSSSKLMVLNRKNHTIEHKVFKDILDHLNKGDCLVLNNTRVLPARLFGQKDTGATVEFLLLTRTGTDEWECLVKPGRKAKVGAKFVFGDDRLRGEIIGLGEEGTRIIKFEYEGVFEAVLDELGTMPLPPYITEKLEDSERYQTVYNKHSGSAAAPTAGLHFTDELMKAIEEKGVKLAYVTLHVGLGTFRPVKVDDVNDHQMHAEWYELDEPNAQIIKEAKMTGNRIVAVGTTSTRTLETIGSNHGEVAPCSGWTDIFIYPGYEFKIVDALITNFHLPESTLLMLISALYDKEEIMKAYQVAVAMNYRFFSFGDAMFIE

SEQ ID NO: 66795 - protein, 340 aa, Fusibacter sp.
  misc_feature (1)..(340): tr|A0A1B6BFV5|A0A1B6BFV5_9FIRM S-adenosylmethionine:tRN A ribosyltransferase-isomerase OS=Fusibacter sp. 3D3 OX =1048380 GN=queA PE=3 SV=1
MRTKDFYFDLPEALIAQVPLEDRSESRLMVLDRQTGDVTHKIFKEIQAYLKSGDCLVLNNTKVIPARLFGTKDTGAVIEFLLLKRISERRWETLVKPGRKAKIGATFTFGAGQLTCEVVAIGDEGSRIIEFMYEGIFETILDELGNMPLPPYITAKLDDPKRYNTVYAKHDGSAAAPTAGLHFTEALMTSLKAQGVKIAYVTLHVGLGTFRPVKVDDVLNHKMHSEFYMLDAENAELINRTKAEGGRVISVGTTSTRTIETIANEYGKLVEASGWTEIFIYPGYEFKVIDGLITNFHLPESTLIMLVSALSSKEHVLKAYEIAVAEQYRFFSFGDAMLIL

SEQ ID NO: 66796 - protein, 341 aa, Fusicatenibacter saccharivorans
  misc_feature (1)..(341): tr|A0A174R2Q1|A0A174R2Q1_9FIRM S-adenosylmethionine:tRN A ribosyltransferase-isomerase OS=Fusicatenibacter sacc harivorans OX=1150298 GN=queA PE=3 SV=1
MKTSDFYYDLPKELIAQDPLEDRSASRLMHLDKTTGEYKHGHFRDILQYLKPGDCLVINDTKVIPARLYGSKVGTDAAIEILLLKRKENDIWETLVKPGKKCKVGTVISFGDGILTGEVVDIVDEGNRLIQFHYEGIFEEILDQLGEMPLPPYITHKLQDKNRYQTVYAKHEGSAAAPTAGLHFTKELLQQVQDAGVKIAHVTLHVGLGTFRPVKVEDVTQHHMHSEFYVVEEDQAKLINDTKANGGRVISVGTTSCRTLESATGEDGILRAGSGWTEIFIYPGYHFKMIDGLITNFHLPESTLVMLVSALAGKEHIMAAYEEAVREKYRFFSFGDAMIIE

SEQ ID NO: 66797 - protein, 341 aa, Fusicatenibacter saccharivorans
  misc_feature (1)..(341): tr|A0A174K4W2|A0A174K4W2_9FIRM S-adenosylmethionine:tRN A ribosyltransferase-isomerase OS=Fusicatenibacter sacc harivorans OX=1150298 GN=queA PE=3 SV=1
MKTSDFYYDLPKELIAQDPLEDRSASRLMHLNKETGEYEHGHFRDILKYLKPGDCLVINDTKVIPARLYGSKVGTDAAIEILLLKRRENDIWETLVKPGKKCKVGTVISFGDGILTGEVVDIVDEGNRLIQFHYDGIFEEILDQLGEMPLPPYITHKLQDKNRYQTVYAKHEGSAAAPTAGLHFTKELLQQVQDAGVKIAHVTLHVGLGTFRPVKVEDVTQHHMHSEFYVVEEDQAKLINDTKAAGGRVIAVGTTSCRTLESATGEDGILKAGSGWTEIFIYPGYCFKMIDGLITNFHLPESTLVMLVSALAGKEHIMAAYEEAVREKYRFFSFGDAMMIE

SEQ ID NO: 66798 - protein, 344 aa, Fusicatenibacter sp.; identical to SEQ ID NO: 66178
  misc_feature (1)..(344): tr|A0A174NSV7|A0A174NSV7_9FIRM S-adenosylmethionine:tRN A ribosyltransferase-isomerase OS=Fusicatenibacter sp. 2789STDY5834925 OX=1806509 GN=queA PE=3 SV=1

SEQ ID NO: 66799 - protein, 340 aa, Fusobacteria bacterium
  misc_feature (1)..(340): tr|A0A432I9X0|A0A432I9X0_9BACT S-adenosylmethionine:tRN A ribosyltransferase-isomerase OS=Fusobacteria bacteriu m OX=2060921 GN=queA PE=3 SV=1
MLLSDYDYNLPEELIGQTPTMPRDHSRLLVVDKTKKTTEHKKFYDILNYLKKGDVLVRNSTKVIPARLIGKKESGAVMEVFLLKRLELNKWECLVRRAKKLKIDQSIIFGDGQLKATLKEVKEDGNRILEFEFDGIFEEIIHELGQMPLPPYITEKLEDGDRYQTVYAEKGESVAAPTAGLHFTKELFEKIAEKGVEIVDVYLEVGLGTFRPVQTENVLDHKMHSETFEVPQKTAEVVNKAKSEGRRIIAVGTTSIRTLESATNENGELLPISGDTEIFIYPGYKFKIVDALITNFHLPKSTLLMLVSALSEKDFIFKVYEEAVKEKYKFFSFGDAMFIY

SEQ ID NO: 66800 - protein, 340 aa, Fusobacteriaceae bacterium
  misc_feature (1)..(340): tr|A0A349GRN7|A0A349GRN7_9FUSO S-adenosylmethionine:tRN A ribosyltransferase-isomerase OS=Fusobacteriaceae bact erium OX=2053555 GN=queA PE=3 SV=1
MLLSDYDYYLPKELIGQTPTMPRDHSRLLVVNKTKKEIEHKSFFNILEYLNKGDVLVRNSTKVIPARLIGKKESGAVMEVFLLKRLELNRWECLVRRAKKLKLDQTIIFGDGELKATLKEVKEDGNRILEFIFDGVFEEIIDELGQMPLPPYITEKLEDGDRYQTVYAEKGESVAAPTAGLHFTDELFEKIVKKGVEVVDVYLEVGLGTFRPVQTENVLEHKMHSETFEVPEKTAEVVNRAKAEGRRIIAVGTTSIRTLESATDSCGKLVATSGNTEIFIYPGYDFKIVDALITNFHLPKSTLLMLVSALSEKDFMFSVYENAVKEKYKFFSFGDAMFIY

SEQ ID NO: 66801 - protein, 252 aa, Fusobacteriia bacterium
  misc_feature (1)..(252): tr|A0A1W9W0K6|A0A1W9W0K6_9BACT S-adenosylmethionine:tRN A ribosyltransferase-isomerase (Fragment) OS=Fusobacter iia bacterium 4572_74 OX=1972457 GN=B6227_03315 PE=3 SV =1
MLLSDYDYHLPKELIGQTPTMPRDHSRLLVVDKTKKEIEHKKFYNILDYLNEGDVLVRNSTKVIPARLIGKKESGAVMEVFLLKRLGLNKWECLVRRAKKLKLDQTIIFGDGQLNATLKEVKDDGNRILEFTFDGIFEEIIHELGQMPLPPYITEKLEDGDRYQTVYAEKGESVAAPTAGLHFTEELFEKIAQKGIEIVDVYLEVGLGTFRPVQTENVLEHKMHSETFEVPEKTAEVVNRAKAEGRRIVAVG

SEQ ID NO: 66802 - protein, 340 aa, Fusobacteriia bacterium
  misc_feature (1)..(340): tr|A0A1W9TIC2|A0A1W9TIC2_9BACT S-adenosylmethionine:tRN A ribosyltransferase-isomerase OS=Fusobacteriia bacteri um 4572_132 OX=1971640 GN=queA PE=3 SV=1
MKLTEYDYNLPEEFIAQEPVSPRDSSKLMVLNKEKETIEHKHFYDIIDYLKKGDLLVMNSTKVIPARLMGRKKTGGFAEIFLLNRIDINNWECLVRPGRRLKEGTKVYFGKNKLIATIIKRKENGNRVVAFEYDGIFEEILDELGEMPLPPYIKAELKEKDRYQTVYAQKGESVAAPTAGLHFTQELLTKIKEKGVEIAEVFLEVGLGTFRPVKTENVLEHQMHEEKYEVPVDAAEKINRAKREGRRVIAVGTTSVRTLESASEKKNEIIAKKESTDIFIYPGYEFKIVDAIITNFHLPKSTLIMLISAFAKKDFIFEAYEKAIKDKYRFFSFGDAMFIY

SEQ ID NO: 66803 - protein, 351 aa, Fusobacterium canifelinum
  misc_feature (1)..(351): tr|A0A3P1URF2|A0A3P1URF2_9FUSO S-adenosylmethionine:tRN A ribosyltransferase-isomerase OS=Fusobacterium canifel inum OX=285729 GN=queA PE=3 SV=1
MKKLRKRKMSTYLSDYDYFLPEELIGQKPREPRDSAKLMLIDRKNESVEHKNFYNIIDYLQKGDVLVRNATKVIPARIFGHKDTGGVLEILLIKRITLDTWECLLKPAKKLKLGQKLYIGENKELIAELLEIKEDGNRILKFYHEGSFEEILDKLGSMPLPPYITSKLENKDRYQTVYAQRGESVAAPTAGLHFTEELLKKILDKGVEIVDIFLEVGLGTFRPVQTENVLEHKMHEESFEISEKVAKIINEAKVEGRRIISVGTTATRALESSVDENGKLIAQKKDTGIFIYPGYKFKIVDALITNFHLPKSTLLMLVSAFYDREKMLEIYNLAVKEKYHFFSFGDSMFIY

SEQ ID NO: 66804 - protein, 343 aa, Fusobacterium equinum
  misc_feature (1)..(343): tr|A0A133NB58|A0A133NB58_9FUSO S-adenosylmethionine:tRN A ribosyltransferase-isomerase OS=Fusobacterium equinum OX=134605 GN=queA PE=3 SV=1
MSTKLHDYDYHLPEELIGQTPREPRDHAKLLLVNRDTKTIEDKYFYDILDYLQKGDVLVRNSTKVIPARLYGQKETGGILEVFLVKRKDLDTWECLLKPAKKLKLGQKIYIGPNSELVAELLEIQEDGNRILKFSYEGSFEENLDRLGTMPLPPYIVEKLEDQEMYQTVYAKRGESVAAPTAGLHFTEELLQKIQEKGIEIVDIYLEVGLGTFRPVQTEDVLDHKMHEELFEIPEEAAQKINQAKAEGRRIISVGTTTTRALESSVDENGILLAQKKNTGIFIYPGYQFQIVDALITNFHLPKSTLLMLVSAFSEREFILEIYQHAVEEKYHFFSFGDAMFIY

SEQ ID NO: 66805 - protein, 343 aa, Fusobacterium gonidiaformans
  misc_feature (1)..(343): tr|E5BGK9|E5BGK9_9FUSO S-adenosylmethionine:tRNA ribosy ltransferase-isomerase OS=Fusobacterium gonidiaformans 3-1-5R OX=469605 GN=queA PE=3 SV=1
MSTKLHDYDYHLPEELIGQTPREPRDHAKLLLVNRDTKTIEDKYFYDILDYLQKGDVLVRNSTKVIPARLYGQKETGGILEVLLVKRKDLDTWECLLKPAKKLKLGQKIYIGPNSELVAELLEIQEDGNRILKFSYEGSFEENLDRLGTMPLPPYIVEKLEDQEMYQTVYAKRGESVAAPTAGLHFTEELLQKIQEKGIEIVDIYLEVGLGTFRPVQTEDVLDHKMHEELFEIPEEAAQKINQAKAEGRRIISVGTTTTRALESSVDENGILLAQKKNTGIFIYPGYQFQIVDALITNFHLPKSTLLMLVSAFSEREFILEIYQHAVEEKYHFFSFGDAMFIY

SEQ ID NO: 66806 - protein, 343 aa, Fusobacterium hwasookii
  misc_feature (1)..(343): tr|A0A0S2ZQE5|A0A0S2ZQE5_9FUSO S-adenosylmethionine:tRN A ribosyltransferase-isomerase OS=Fusobacterium hwasook ii ChDC F174 OX=1307442 GN=queA PE=3 SV=1
MSTYLSDYDYFLPEELIGQKPREPRDSAKLMLIDRKNESIEHKNFYNIIDYLQKGDILVRNATKVIPARIFGHKDTGGVLEILLIKRITLDTWECLLKPAKKLKLGQKLYIGENKELIAELLEIKEDGNRILKFYHEGSFEEILDKLGSMPLPPYITSKLENKDRYQTVYAQRGESVAAPTAGLHFTEELLKKILDKGVEIVDIFLEVGLGTFRPVQTENVLEHKMHEESFEISEKVAKIINEAKTEGRRIISVGTTATRALESSVDENGKLIAQKKDTGIFIYPGYKFKIVDALITNFHLPKSTLLMLVSAFYDREKMLEIYNLAVKEKYHFFSFGDSMFIY

SEQ ID NO: 66807 - protein, 343 aa, Fusobacterium hwasookii
  misc_feature (1)..(343): tr|J8S3E1|J8S3E1_9FUSO S-adenosylmethionine:tRNA ribosy ltransferase-isomerase OS=Fusobacterium hwasookii ChDC F128 OX=1216362 GN=queA PE=3 SV=1
MSTYLSDYDYFLPEELIGQKPREPRDSAKLMLIDKKNESIEHKNFYNIIDYLQKGDILVRNATKVIPARIFGHKDTGGVLEILLIKRITLDTWECLLKPAKKLKLGQKLYIGENKELIAELLEIKEDGNRILKFYHEGSFEEILDKLGSMPLPPYITSKLENKDRYQTVYAQRGESVAAPTAGLHFTEELLKKIIDKGVEIVDIFLEVGLGTFRPVQTENVLEHKMHEESFEISEKVAKIINEAKVEGRRIISVGTTATRALESSVDENGKLIAQKKDTGIFIYPGYKFKIVDALITNFHLPKSTLLMLVSAFYDREKMLEIYNLAVKEKYHFFSFGDSMFIY

SEQ ID NO: 66808 - protein, 343 aa, Fusobacterium mortiferum
  misc_feature (1)..(343): tr|C3WA27|C3WA27_FUSMR S-adenosylmethionine:tRNA ribosy ltransferase-isomerase OS=Fusobacterium mortiferum ATCC 9817 OX=469616 GN=queA PE=3 SV=1
MSTKLHDYDYHLPEELIGQEPREPRDHARLMLVDKTNKKIEHKHFYDIIDYLQEGDILVRNSTKVIPARLFGHKETGGVLEILLIKRINLDTWECLLKPAKKLKLGQKLYMGQNSELVAELIEIKDDGNRVLKFTYEGAFEEVLDKLGNMPLPPYIVETLKEKERYQTVYAQRGESVAAPTAGLHFTKELLEKIEKKGIKIVDIFLEVGLGTFRPVQTEDVLDHKMHEEIFEIPQEAADIINKGKAEGRRIISVGTTSTRALESSVDENGKVIAQKASTDIFIYPGYEFKVIDALITNFHLPKSTLLMLVSAFSSREFMLSVYETAVKEKYHFFSFGDAMFIY

SEQ ID NO: 66809 - protein, 343 aa, Fusobacterium mortiferum
  misc_feature (1)..(343): tr|A0A414PZS4|A0A414PZS4_FUSMR S-adenosylmethionine:tRN A ribosyltransferase-isomerase OS=Fusobacterium mortife rum OX=850 GN=queA PE=3 SV=1
MSTKLHDYDYHLPEELIGQEPREPRDHARLMLVDKTNKKIEHKHFYDIIDYLQEGDILVRNSTKVIPARLFGHKETGGVLEILLIKRINLDTWECLLKPAKKLKIGQKLYVGQNSELVAELIEIKDDGNRVLKFTYEGAFEEVLDKLGNMPLPPYIVETLKEKERYQTVYAQRGESVAAPTAGLHFTKELLEKIEKKGIKIVDIFLEVGLGTFRPVQTEDVLDHKMHEEIFEIPQEAADIINKGKAEGRRIISVGTTSTRALESSVDENGKVIAQKASTDIFIYPGYEFKVIDALITNFHLPKSTLLMLVSAFSSREFMLSVYETAVKEKYHFFSFGDAMFIY

SEQ ID NO: 66810 - protein, 341 aa, Fusobacterium naviforme
  misc_feature (1)..(341): tr|A0A2P8EPB2|A0A2P8EPB2_9FUSO S-adenosylmethionine:tRN A ribosyltransferase-isomerase OS=Fusobacterium navifor me OX=77917 GN=queA PE=3 SV=1
MDVSEFNYELPEELIAQDPLEDRSASRLLVLHRESGEREHRHFRDILEYLRKGDCLVINDTKVIPARLIGAKEGTGAKIEVLLLTRKEDNIWETLVKPGKKCRIGTVISFGDGLLRGKVVGQTEDGNRFIQFFYEGIFEEILDQLGQMPLPPYIRHQLKDKNRYQTVYAEHEGSAAAPTAGLHFTKELLEEIRSAGVDIVHVTLHVGLGTFRPVKEKDILKHHMHSEYYIVTQEAADRINAAKAAGGRIICVGTTSCRTLESAADEHGILHAKSDWTNIFIYPGYRFKILDCLITNFHLPESTLVMLVSALAGREQILAAYEEAVRERYRFFSFGDAMFID

SEQ ID NO: 66811 - protein, 343 aa, Fusobacterium necrogenes
  misc_feature (1)..(343): tr|A0A377GWA9|A0A377GWA9_9FUSO S-adenosylmethionine:tRN A ribosyltransferase-isomerase OS=Fusobacterium necroge nes OX=858 GN=queA PE=3 SV=1
MSTKLHDYDYHLPEELIGQEPREPRDHARLMLVDKTNKKIEHKHFYDIIDYLQEGDILVRNSTKVIPARLFGHKETGGVLEILLIKRINLDTWECLLKPAKKLKLGQKLYVGQNSELVAELIEIKDDGNRVLKFTYEGAFEEVLDKLGNMPLPPYIVETLKEKERYQTVYAQRGESVAAPTAGLHFTKELLEKIEKKGIKIVDIFLEVGLGTFRPVQTEDVLDHKMHEEIFEIPQEAADIINKGKAEGRRIISVGTTSTRALESSVNENGKVIAQKASTDIFIYPGYEFKVIDALITNFHLPKSTLLMLVSAFSSRKFMLSVYETAVKEKYHFFSFGDAVFIY

SEQ ID NO: 66812 - protein, 343 aa, Fusobacterium necrophorum
  misc_feature (1)..(343): tr|A0A0E2V1F3|A0A0E2V1F3_9FUSO S-adenosylmethionine:tRN A ribosyltransferase-isomerase OS=Fusobacterium necroph orum DJ-2 OX=1441737 GN=queA PE=3 SV=1
MSTKLQDYDYDLPEELIGQSPREPRDHAKLLLINRKTKKLEDKYFYDILDYLQKGDVLVRNSTKVIPARLYGQKETGGVLEVLLVKRKDLDTWECLLKPAKKLKLGQKIWIGPNAELVAELLEIQEDGNRILKFSYQGSFEENLDRLGTMPLPPYIVEKLEDQEMYQTVYAKRGESVAAPTAGLHFTKELLEKIQEKGIEIVDIYLEVGLGTFRPVQTEDVLNHKMHEELFEIPPEAAEKINRAKAEGRRIISVGTTTTRALESSVDENGILLAQKKNTDIFIYPGYRFQMVDALITNFHLPKSTLLMLVSAFSEREFMLDVYHHAVEQEYHFFSFGDAMFIY

SEQ ID NO: 66813 - protein, 343 aa, Fusobacterium necrophorum
  misc_feature (1)..(343): tr|A0A017H6F9|A0A017H6F9_9FUSO S-adenosylmethionine:tRN A ribosyltransferase-isomerase OS=Fusobacterium necroph orum subsp. funduliforme B35 OX=1226633 GN=queA PE=3 SV =1
MSTKLQDYDYDLPEELIGQSPREPRDHAKLLLIDRKTKKLEDKYFYDILDYLQKGDVLVRNSTKVIPARLYGQKETGGVLEVLLVKRKDLDTWECLLKPAKKLKLGQKIWIGPNAELVAELLEIQEDGNRILKFSYQGSFEENLDRLGTMPLPPYIVEKLEDQEMYQTVYAKRGESVAAPTAGLHFTKELLEKIQEKGIEIVDIYLEVGLGTFRPVQTEDVLNHKMHEELFEIPPEAAEKINRAKAEGRRIISVGTTTTRALESSVDENGILLAQKKNTDIFIYPGYRFQMVDALITNFHLPKSTLLMLVSAFSEREFMLDVYHHAVEQEYHFFSFGDAMFIY

SEQ ID NO: 66814 - protein, 351 aa, Fusobacterium nucleatum
  misc_feature (1)..(351): sp|Q8R620|QUEA_FUSNN S-adenosylmethionine:tRNA ribosylt ransferase-isomerase OS=Fusobacterium nucleatum subsp. nucleatum (strain ATCC 25586 / CIP 101130 / JCM 8532 / LMG 13131) OX=190304 GN=queA PE=3 SV=1
MKKLRKRKMSTYLSDYDYFLPEELIGQKPREPRDSAKLMLIDRKNGSVEHKNFYNIIDYLQKGDILVRNATKVIPARIFGHKDTGGVLEILLIKRITLDTWECLLKPAKKLKLGQKLYIGENKELIAELLEIKEDGNRILKFYYEGSFEEILDKLGSMPLPPYITRKLENKDRYQTVYAQRGESVAAPTAGLHFTEELLNKILDKGVEIVDIFLEVGLGTFRPVQTVNVLEHKMHEESFEISEKVAKIINEAKAEGRRIISVGTTATRALESSVDENGKLIAQKKDTGIFIYPGYKFKIVDALITNFHLPKSTLLMLVSAFYDREKMLEIYNLAVKEKYHFFSFGDSMFIY

SEQ ID NO: 66815 - protein, 222 aa, Fusobacterium nucleatum
  misc_feature (1)..(222): tr|Q7P5C7|Q7P5C7_FUSNV S-adenosylmethionine:tRNA ribosy ltransferase-isomerase OS=Fusobacterium nucleatum subsp . vincentii ATCC 49256 OX=209882 GN=FNV0706 PE=3 SV=1
MKKLRKKKMSTYLSDYDYFLPEELIGQKPREPRDSAKLMLIDRKTGSIEHKHFYNIVDYLQKGDVLVRNATKVIPARIFGHKDTGGVLEILLIKRISLDTWECLLKPAKKLKLGQKLYIGENKELIAELLEIKEDGNRILKFYYEGSFEEILDKLGSMPLPPYITRKLENKDRYQTVYAQRGESVAAPTAGLHFTEELLKKILDKGVVIVDNFFKKSRIGHF

SEQ ID NO: 66816 - protein, 343 aa, Fusobacterium periodonticum
  misc_feature (1)..(343): tr|K1GMG5|K1GMG5_9FUSO S-adenosylmethionine:tRNA ribosy ltransferase-isomerase OS=Fusobacterium periodonticum D 10 OX=620833 GN=queA PE=3 SV=1
MSTYLSDYDYFLPEELIGQKPREPRDSAKLMLINRKTGEIEHKHFYNIIDYLQKGDVLVRNATKVIPARIYGHKESGGVLEVLLIKRISIDTWECLLKPAKKLKLGQKLYIGENKELIAELLEIKEDGNRILKFYYEGSFEAVLDKLGSMPLPPYITRKLENKDRYQTVYAQRGESVAAPTAGLHFTEELLKKISEKGIEIVDIFLEVGLGTFRPVQTENVLEHKMHEESFEISEKAAKTINEAKAQGRRIISVGTTATRALESSVDENGKLIAQKKDTGIFIYPGYQFKIVDALITNFHLPKSTLLMLVSALYDREKMLEIYNLAVKEEYHFFSFGDSMFIY

SEQ ID NO: 66817 - protein, 351 aa, Fusobacterium periodonticum
  misc_feature (1)..(351): tr|A0A2D3LWR6|A0A2D3LWR6_9FUSO S-adenosylmethionine:tRN A ribosyltransferase-isomerase OS=Fusobacterium periodo nticum OX=860 GN=queA PE=3 SV=1
MKKLRKMKMSTYLSDYDYFLPEELIGQKPREPRDSAKLMLINRKTGEIEHKHFYNIIDYLQKGDVLVRNATKVIPARIYGHKESGGVLEVLLIKRISIDTWECLLKPAKKLKLGQKLYIGENKELIAELLEIKEDGNRILKFYYEGSFEEVLDKLGSMPLPPYITRKLENKDRYQTVYAQRGESVAAPTAGLHFTEELLKKISEKGIEIVDIFLEVGLGTFRPVQTENVLEHKMHEESFEISEKAAKAINEAKAQGRRIISVGTTATRALESSVDENGKLIAQKKDTGIFIYPGYQFKIVDALITNFHLPKSTLLMLVSALYDREKMLEIYKLAVKEEYHFFSFGDSMFIY

SEQ ID NO: 66818 - protein, 343 aa, Fusobacterium sp.
  misc_feature (1)..(343): tr|X8GWI1|X8GWI1_9FUSO S-adenosylmethionine:tRNA ribosy ltransferase-isomerase OS=Fusobacterium sp. CM22 OX=936 563 GN=queA PE=3 SV=1
MSTYLSDYDYFLPEELIGQKPREPRDSAKLMLIDRKTGSIEHKNFYNIIDYLQKGDVLVRNATKVIPARIFGHKDTGGVLEILLIKRITLDTWECLLKPAKKLKLGQKLYIGENKELIAELLEIKEDGNRILKFYHEGSFEEILDKLGSMPLPPYITSKLENKDRYQTVYAQRGESVAAPTAGLHFTEELLKKILDKGVEIVNVFLEVGLGTFRPVQTENVLEHKMHEESFEISEKAAKIINEAKTEGRRIISVGTTATRALESSVDENGKLIAQKKDTGIFIYPGYKFKIVDALITNFHLPKSTLLMLVSAFYDREKMLEIYNLAVKEKYHFFSFGDSMFIY

SEQ ID NO: 66819 - protein, 343 aa, Fusobacterium sp.
  misc_feature (1)..(343): tr|R5X791|R5X791_9FUSO S-adenosylmethionine:tRNA ribosy ltransferase-isomerase OS=Fusobacterium sp. CAG:649 OX= 1262900 GN=queA PE=3 SV=1
MSTYLNDYDYFLPEELIGQKPREPRDSAKLMLINRKTGSIEHKHFYNIVDYLQKGDVLVRNATKVIPARIFGHKDTGGVLEILLVKRISLDTWECLLKPAKKLKLGQKLYIGENKELIAELLEIKEDGNRILKFYHEGSFEEILDKLGSMPLPPYITRKLENKDRYQTVYAQRGESVAAPTAGLHFTEELLKKILDKGVEIVDIFLEVGLGTFRPVQTVNVLEHKMHEESFEISEKAAKIINEAKTEGRRIISVGTTATRALESSVDENGKLIAQKKDTGIFIYPGYEFKIVDALITNFHLPKSTLLMLVSAFYDREKMLEIYNLAVKEKYHFFSFGDSMFIY

SEQ ID NO: 66820 - protein, 343 aa, Fusobacterium ulcerans
  misc_feature (1)..(343): tr|A0A2P1S1D4|A0A2P1S1D4_9FUSO S-adenosylmethionine:tRN A ribosyltransferase-isomerase OS=Fusobacterium ulceran s OX=861 GN=queA PE=3 SV=1
MSTLLSDYDYHLPEKLIGQQPREPRDHARLMLVNRKNESIEHKKFYDIIDYLNEGDILVRNSTKVIPARLFGHKETGGVLEILLIKRIDLDTWECLLKPAKKLKVGQKLFIGHGNELIGELLEIKDDGNRIIKFTYEGAFEEVLDRLGKMPLPPYIVEALKEKDRYQTVYAIKGESVAAPTAGLHFTKELLEKIEKKGIKIVDIFLEVGLGTFRPVQTENVLEHKMHEEVYEIPQEAADIINEGKKNGKRIISVGTTSTRALESAVDENGLVKALKGSTEIFIYPGFEFKVIDALITNFHLPKSTLLMLVSALSSREFMLKVYDIAVKEEYHFFSFGDAMFIY

SEQ ID NO: 66821 - protein, 343 aa, Fusobacterium ulcerans
  misc_feature (1)..(343): tr|H1PRM8|H1PRM8_9FUSO S-adenosylmethionine:tRNA ribosy ltransferase-isomerase OS=Fusobacterium ulcerans 12-1B OX=457404 GN=queA PE=3 SV=1
MSTLLSDYDYHLPEKLIGQQPREPRDHARLMLVNRKNESIEHKRFYDIIDYLNEGDILVRNSTKVIPARLFGHKETGGVLEILLIKRIDLDTWECLLKPAKKLKVGQKLFIGHGNELIGELLEIKDDGNRIIKFTYEGAFEEVLDRLGKMPLPPYIVEALKEKDRYQTVYAIRGESVAAPTAGLHFTKELLEKIEKKGIKIVDIFLEVGLGTFRPVQTENVLEHKMHEEVYEIPQEAADIINEGKKNGKRIISVGTTSTRALESAVDENGLVKALKGSTEIFIYPGFEFKVIDALITNFHLPKSTLLMLVSALSSREFMLKVYDIAVKEEYHFFSFGDAMFIY

SEQ ID NO: 66822 - protein, 343 aa, Fusobacterium varium
  misc_feature (1)..(343): tr|A0A414TUJ2|A0A414TUJ2_FUSVA S-adenosylmethionine:tRN A ribosyltransferase-isomerase OS=Fusobacterium varium OX=856 GN=queA PE=3 SV=1
MSTLLSDYDYNLPEELIGQQPREPRDHARLMLVNRKNESIEHKKFYEIIDYLNEGDILVRNSTKVIPARLFGHKETGGVLEILLIKRIDLDTWECLLKPAKKLKIGQKLFIGHGNELIGELLEIKDDGNRIIKFTYEGAFEEVLDRLGKMPLPPYIVEALKEKDRYQTVYAIKGESVAAPTAGLHFTKELLEKIEKKGIKIVDIFLEVGLGTFRPVQTENVLEHKMHEEVFEIPQEAADIINEGKRNGKRIISVGTTSTRALESAVDENGMVKAQKGSTEIFIYPGYKFKVIDALITNFHLPKSTLLMLVSALSSREFMLKVYDIAVKEEYHFFSFGDAMFIY

SEQ ID NO: 66823 - protein, 343 aa, Fusobacterium varium
  misc_feature (1)..(343): tr|C6JN24|C6JN24_FUSVA S-adenosylmethionine:tRNA ribosy ltransferase-isomerase OS=Fusobacterium varium ATCC 277 25 OX=469618 GN=queA PE=3 SV=1
MSTLLSDYDYNLPEELIGQQPREPRDHARLMLVNRKNESIEHKKFYEIIDYLNEGDILVRNSTKVIPARLFGHKETGGVLEILLIKRIDLDTWECLLKPAKKLKIGQKLFIGHGNELIGELLEIKDDGNRIIKFTYEGAFEEVLDRLGKMPLPPYIVEALKEKDRYQTVYAIKGESVAAPTAGLHFTKELLEKIEKKGIKIVDIFLEVGLGTFRPVQTENVLEHKMHEEVFEIPQEAADIINEGKRNGRRIISVGTTSTRALESAVDENGMVKAQKGSTEIFIYPGYKFKVIDALITNFHLPKSTLLMLVSALSSREFMLKVYDIAVKEEYHFFSFGDAMFIY

SEQ ID NO: 66824 - protein, 349 aa, Gaetbulibacter sp.
  misc_feature (1)..(349): tr|A0A2G5GNH8|A0A2G5GNH8_9FLAO S-adenosylmethionine:tRN A ribosyltransferase-isomerase OS=Gaetbulibacter sp. 4G 1 OX=1891971 GN=queA PE=3 SV=1
MKLSHFGFELPEELLAEYPAENRDESRLMVLNRKEQTIEHKMFKDIIDYFDEEDVLVLNNTKVFPARLYGNKEKTGARIEVFLLRELNEEQRLWDVLVDPARKIRIGNKLYFGDDDTLVAEVIDNTTSRGRTLRFLYDGSYNEFRRKLTELGETPLPKYIKRDVEPEDENRYQTIFAKNEGAVAAPTAGLHFSRHLLKRLEIKGVDFAEVTLHVGLGTFNPVEVEDLSKHKMDSEELSINEKAVNIVNTAKNNKKRVCAVGTTAMRAIESAVSSNGELNEFEGWTNKFIFPPYDFSIANCMITNFHTPKSTLLMMVSAFAGHDFIKRAYEEAVKEKYKFYSYGDAMLII

SEQ ID NO: 66825 - protein, 349 aa, Gaetbulibacter sp.
  misc_feature (1)..(349): tr|A0A2G5KU47|A0A2G5KU47_9FLAO S-adenosylmethionine:tRN A ribosyltransferase-isomerase OS=Gaetbulibacter sp. 5U 11 OX=1889780 GN=queA PE=3 SV=1
MKLSHFNFELPEELLAEYPAENRDESRLMVLNRKEQTIEHKMFKDLIEYFDEKDVMILNNTKVFPARLFGNKEKTGARIEVFLLRELNQEQRLWDVLVDPARKIRIGNKLYFGDDETLVAEVIDNTTSRGRTLRFLYDGSYQEFRIKLQELGETPLPKYIKREVEPEDEDRYQTIYAKEEGAVAAPTAGLHFSKHLLKRLEIKGVDFAEVTLHVGLGTFNPVEVEDLSKHKMDSEELKIEAKAVEVINNAKKDKRRICAVGTTAMRAIESSVSSSGTLNEIEGWTNKFIFPPYDFSIANAMITNFHTPKSTLLMMVSAFAGHDFMKKAYEEAVKEKYKFYSYGDAMLII

SEQ ID NO: 66826 - protein, 347 aa, Gaiellales bacterium
  misc_feature (1)..(347): tr|A0A419GRP5|A0A419GRP5_9ACTN S-adenosylmethionine:tRN A ribosyltransferase-isomerase OS=Gaiellales bacterium OX=2093372 GN=queA PE=3 SV=1
MLTDELDYDLPPELIAQHPVYPRDHSRLLVYDRGTDAITHRSLPDLLAYLDPGDALVYNDSRVLMARVAAVRPTGGRTELLFLRRRHPRVWEALARPSARLREGMSLSLEQSIPLVKGIEARDIFTLMENLGGGRWLVENRSGKPMEELLEEVGRAPLPPYIREELGDPGRYQTVYAREHGSAAAPTAGLHFTPELIASIEGAGVAVLPLTLHVGLDTFRPVAEHDLELHEIHREYYRVPAATRDGVESARAAGGKVVAVGTTTVRGLETVFQDPGAPLEGDTSLFILPGFRFRAVDALMTNFHLPRSTLLALVMAFAGVAETRRLYSEAIRQSYRFYSFGDAMLML

SEQ ID NO: 66827 - protein, 349 aa, Galbibacter marinus
  misc_feature (1)..(349): tr|K2P035|K2P035_9FLAO S-adenosylmethionine:tRNA ribosy ltransferase-isomerase OS=Galbibacter marinus OX=555500 GN=queA PE=3 SV=1
MKLSNFNFELPKELLAEYPSEDRDEARLMVLHRKEQKIEHKLFKDVIDYFDEGDVMVLNNTKVFPARLFGNKEKTGARIEVFLLRELNEEQRLWDVLVDPARKIRIGNKLYFGDDESLVAEVIDNTTSRGRTLRFLYDGSYEEFRDKLNELGETPLPKYIKRDVEPEDEERYQTIYAKAEGAVAAPTAGLHFSKHLLKRLEIKGIDFAELTLHVGLGTFNPVEVEDLSKHKMDSEELFIDNKAASIVNNAKNGKRKICAIGTTAMRGLESSVSSNHMLNPYEGWTNKFIFPPYDFSIANCMITNFHTPKSTLLMMISAFAGHDFVMKAYKEAIKEEYKFYSYGDAMLIL

SEQ ID NO: 66828 - protein, 354 aa, Gallaecimonas pentaromativorans
  misc_feature (1)..(354): tr|A0A3N1PJ53|A0A3N1PJ53_9GAMM S-adenosylmethionine:tRN A ribosyltransferase-isomerase OS=Gallaecimonas pentaro mativorans OX=584787 GN=queA PE=3 SV=1
MQRADFHFDLPEDLIARHPMPERSASRLLMLDGPTGSVAHRHFTDLLGQLEPGDLLVFNNTRVIPARLFGQKASGGKIEALVERVLDDKRVLAHVRSSKSPKEGSALVFDDGVTATMAARHDALFELVFDGEETVLSILERIGHMPLPPYIDRPDDAADRERYQTVYNEKPGAVAAPTAGLHFDEPLLEKIRAKGVETAFVTLHVGAGTFQPVRADNIFEHKMHSEYAEVPQAVVDAVNACKARGGRVIAVGTTSVRSLESAAQAAQKAGTELAPFASDTDIFIYPGYRFLVVDGLVTNFHLPESTLIMLVSAFAGYNETLAAYREAVAERYRFFSYGDAMFITKNPEAKGPGA

SEQ ID NO: 66829 - protein, 354 aa, Gallaecimonas xiamenensis
  misc_feature (1)..(354): tr|K2IWR0|K2IWR0_9GAMM S-adenosylmethionine:tRNA ribosy ltransferase-isomerase OS=Gallaecimonas xiamenensis 3-C -1 OX=745411 GN=queA PE=3 SV=1
MQRADFHFDLPEHLIARHPMAERSASRLLMLDGPSGALRHGRFTDLLEELKEGDLLVFNNTRVIPARLFGQKASGGKLEVLVERVLDDKRVLAHVRSSKSPKPGTELVFDEGVKALMVARHDALFELAFEGEDGVLAILERIGHMPLPPYIDRPDDAADRERYQTVYNEKPGAVAAPTAGLHFDEPLLVALAAKGVETAFVTLHVGAGTFQPVRADSIFEHKMHSEYAEVPQAVVDAVKACKARGGRVIAVGTTSVRSLESAAQAAEQAGTELAPFASDTDIFIYPGYRFLVVDGLVTNFHLPESTLIMLVSAFAGYSETLAAYREAVNQEYRFFSYGDAMFITKNPEAKGPGA

SEQ ID NO: 66830 - protein, 356 aa, Gallibacterium anatis
  misc_feature (1)..(356): tr|A0A0E3CD77|A0A0E3CD77_9PAST S-adenosylmethionine:tRN A ribosyltransferase-isomerase OS=Gallibacterium anatis OX=750 GN=queA PE=3 SV=1
MRVSDFYFDLPDELIARYPQKERTASRLLKLDGNSGEFSHHHFKDVLDFVNEGDLLVFNNTRVIPARMYGCKSSGGKVEVLVERVLDEKSCLAHVRASKAPKEGSELILGEDKLGEGNGVRARMVGRSDSLFHLQFDIEGSLLDTLQQIGHIPLPPYIDRPDEDADQERYQTVYSKVPGAVAAPTAGLHFDEELLAALRAKGVKMAFVTLHVGAGTFQPVRVENIEDHHMHSEYAEVPQEVVDAVLATKAAGKRVIAVGTTSVRSLESAALAAEEKQSTQLIEPFFADTAIFIYPGKKFRVVDCLITNFHLPESTLIMLVSAFAGYDNIMRAYRNAVENRYRFFSYGDAMFLIKKN

SEQ ID NO: 66831 - protein, 356 aa, Gallibacterium anatis
  misc_feature (1)..(356): tr|F4HEB4|F4HEB4_GALAU S-adenosylmethionine:tRNA ribosy ltransferase-isomerase OS=Gallibacterium anatis (strain UMN179) OX=1005058 GN=queA PE=3 SV=1
MRVSDFYFDLPDELIARYPQKERTASRLLKLDGNSGEFSHHHFKDVLDFVNEGDLLVFNNTRVIPARMYGRKSSGGKVEVLVERVLDQKSCLAHIRASKAPKEGSELILGEDKLGEGNGVRARMVGRSDSLFHLQFDIEGSLLDTLQQIGHIPLPPYIDRPDEDADQERYQTVYSKIPGAVAAPTAGLHFDEELLAALRAKGVKMAFVTLHVGAGTFQPVRVENIEDHHMHSEYAEVPQEVVDAVLATKAAGKRVIAVGTTSVRSLESAALAAEEKQSMQLIEPFFADTAIFIYPGKKFRVVDCLITNFHLPESTLIMLVSAFAGYDNIMRAYRNAVENRYRFFSYGDAMFLIKKN

SEQ ID NO: 66832 - protein, 357 aa, Gallibacterium genomosp.
  misc_feature (1)..(357): tr|A0A1A7PBE8|A0A1A7PBE8_9PAST S-adenosylmethionine:tRN A ribosyltransferase-isomerase OS=Gallibacterium genomo sp. 1 OX=155515 GN=queA PE=3 SV=1
MRVSDFYFDLPDELIARYPQKERSASRLLKLDGNSGEFSHHHFKDVLDFVNEGDLLVFNNTRVIPARMYGRKSSGGKVEVLIERVLDQKSCLAHIRASKAPKEGSEIILGEDKLGEGKGIRAIMIGRSDALFHLQFDIESDLLDILQQIGHIPLPPYIDRPDEDADQERYQTVYSKIPGAVAAPTAGLHFDEALLNALKAKGVKMAFVTLHVGAGTFQPVRVENIEQHHMHAEYAEVPQSVVDAVLATKVAGKRVIAVGTTSVRSLESAALAAEEKQSKQLIDPFFADTTIFLYPGKKFRVVDALITNFHLPESTLIMLVSAFAGYDNIMRAYRSAVENRYRFFSYGDAMFLIKKQS

SEQ ID NO: 66833 - protein, 356 aa, Gallibacterium genomosp.
  misc_feature (1)..(356): tr|A0A0A2XMP9|A0A0A2XMP9_9PAST S-adenosylmethionine:tRN A ribosyltransferase-isomerase OS=Gallibacterium genomo sp. 2 OX=155517 GN=queA PE=3 SV=1
MRVSDFYFDLPDELIARYPQKERSASRLLKLDGNSGEFSHHHFKDVLDFVNEGDLLVFNNTRVIPARMYGRKSSGGKVEVLVERVLDQKSCLAHIRASKAPKEGSELILGEDKLGEGNGVRARMVGRSDSLFHLQFDIEGSLLDTLQQIGHIPLPPYIDRPDEDADQERYQTVYSKVPGAVAAPTAGLHFDEELLAALRAKGVKMAFVTLHVGAGTFQPVRVENIEDHHMHSEYAEVPQEVVDAVLATKAAGKRVIAVGTTSVRSLESAALAAEEKQSTQLIEPFFADTAIFIYPGKKFRVVDCLITNFHLPESTLIMLVSAFAGYDNIMRAYRNAVENRYRFFSYGDAMFLIKKN

SEQ ID NO: 66834 - protein, 362 aa, Gallibacterium salpingitidis
  misc_feature (1)..(362): tr|A0A1A7Q1E6|A0A1A7Q1E6_9PAST S-adenosylmethionine:tRN A ribosyltransferase-isomerase OS=Gallibacterium salpin gitidis OX=505341 GN=queA PE=3 SV=1
MRVADFYFDLPDELIARYPQKERTASRLLNLDGNSGEFSHHHFKDVLSFVEEGDLLVFNNTRVIPARIYGRKSSGGKLEVLIERVLDDKSCLAHVRASKAPKEGSELILGEDKLGEGNGIRVEMLGRQDALFHLRFAIEGSLFDVLQQIGHIPLPPYIDRSDEDADQERYQTVYSKVPGAVAAPTAGLHFDDELLAALRAKGGKMAFVTLHVGAGTFQPVRVENIEDHHMHAEYAEVPQEVVDAVLATKAAGKRVIAVGTTSVRSLESAALAAEQQQSKQLLEPFFADTTIFIYPGKKFRVVDCLITNFHLPESTLIMLVSAFAGYDNIMRAYRNAVENRYRFFSYGDAMFLIKKDNPSSMK

SEQ ID NO: 66835 - protein, 344 aa, Gallionella capsiferriformans
  misc_feature (1)..(344): tr|D9SJB0|D9SJB0_GALCS S-adenosylmethionine:tRNA ribosy ltransferase-isomerase OS=Gallionella capsiferriformans (strain ES-2) OX=395494 GN=queA PE=3 SV=1
MRTDEFDFALPDGLIAQHPPEKRGASRLLCVHDGILEDSQFVDLLQKVAPGDLLVLNDTRVIRARLFGIKRSGGKIEVMVERVLNNHEVLAQVRASKSPPTGSYVLLAGELSVEVMGRAGEFYHLRFCAEEPVLELLERYGRLPLPPYITHAAEAEDETRYQTVFARQSGAVAAPTAGLHFDDAMLEALQDKGVKIAYVTLHVGAGTFQPVRAEWLSEHIMHSECYQISQATVDAIEQTHAAGGRVVAVGTTSLRALESAAASGELQSGAGETRIFITPGYRFRVVDVLLTNFHLPKSTLLMLVSAFGGMSEMRAAYLHAVAQQYRFFSYGDAMLIEKSVSGES

SEQ ID NO: 66836 - protein, 356 aa, Gallionella sp.
  misc_feature (1)..(356): tr|A0A3D2H4G9|A0A3D2H4G9_9PROT S-adenosylmethionine:tRN A ribosyltransferase-isomerase OS=Gallionella sp. OX=20 52161 GN=queA PE=3 SV=1
MRTDEFDFVLPEGLIAQHPPEKRGASRLLCVHDGILEDSQFVDLLQKVAPGDLLVLNDTRVIRARLFGIKRSGGKIEVMVERVLNSHEVLAQVRASKSPPAGSYLLLSTDGAPQEGSAPDAGLSVEVLGRAGEFYHLRFCAEEPVLELLERYGRLPLPPYITHAAEEEDETRYQTVFARQSGAVAAPTAGLHFDDAMLQALQDKGVKIAYVTLHVGAGTFQPVRAEWLSEHVMHSECYQISQATVDAIEQTHEAGGRVVAVGTTSLRALESAAASGELQSGAGETRIFITPGYRFRVVDVLLTNFHLPKSTLLMLVSAFGGMNEMRAAYLHAVAQQYRFFSYGDAMLIEKSVSSES

SEQ ID NO: 66837 - protein, 184 aa, Gallionella sp.
  misc_feature (1)..(184): tr|A0A522X8C1|A0A522X8C1_9PROT S-adenosylmethionine:tRN A ribosyltransferase-isomerase (Fragment) OS=Gallionell a sp. OX=2052161 GN=EPN14_04910 PE=3 SV=1
GAVAAPTAGLHFDDAMLQALRDKGVQTAYITLHVGAGTFQPVRAEHLHEHTMHSERYEIPQATVDAIAQTRAVNGRVIAVGTTGLRALESAARSGGPQAGSGETKIFITPGYRFRVVDMLLTNFHLPKSTLLMLVCAFGGMEQMLAAYRHAVEHEYRFFSYGDAMLIERDDVGRAPPAAKINVG

SEQ ID NO: 66838 - protein, 331 aa, Gallionellaceae bacterium
  misc_feature (1)..(331): tr|A0A1J4TL60|A0A1J4TL60_9PROT S-adenosylmethionine:tRN A ribosyltransferase-isomerase (Fragment) OS=Gallionell aceae bacterium CG1_02_60_325 OX=1805162 GN=AUJ80_02405 PE=3 SV=1
LPQHLIAQHPPAQRGASRLLHVGAAGIADRLFADLPALLRPHDLLVLNDTRVLKARLFGQKETGGQVEVMVERILGEHEVLAQVRASKTPKLGSQLLLADAVTVTVLGREGEFFHLRFEGDTPVTDLLERHGKLPLPPYITHAADDEDEERYQTVFAREQGAVAAPTAGLHFDEAMLQTLRDKDVNLGYVTLHVGAGTFQPVRAEKIKDHIMHSERYTVPQATVDAIAMAQANGGRVVSVGTTSLRALESAAAGGALQAGSGDTDIFITPGYRFRMVDVLLTNFHLPRSTLLMLVCAFGGPEQMFAAYRHAVAREYRFFSYGDAMLIEKEQ

SEQ ID NO: 66839 - protein, 339 aa, Gallionellaceae bacterium
  misc_feature (1)..(339): tr|A0A521Q6V1|A0A521Q6V1_9PROT S-adenosylmethionine:tRN A ribosyltransferase-isomerase OS=Gallionellaceae bacte rium OX=2052162 GN=queA PE=3 SV=1
MRTDEFDFALPVHLIAQHPPGQRGASRLLRVGKGILENRKFADLQTLLGENDLLVLNDTRVLKARLFGEKGSGGKVEVLVERVLGEHEVLAQVRASKTPKPGSHFVLAEKIRVQVLGRAGEFFHLCFEDEEAVATLLERYGHLPLPPYITHAAGDEDEMRYQTVFAREPGAVAAPTAGLHFDEGMLQNLRNKGVDIAYVTLHVGAGTFKPVRAEHIKEHVMHSERYTVPPATVDAIARTREKGGRVIAVGTTSLRALESAAADGELKAGSGDTDIFITPGYQFKVVDVLLTNFHLPRSTLLMLVCAFGGMDKLLAAYRHAVANEYRFFSYGDAMLIERE

SEQ ID NO: 66840 - protein, 340 aa, Gallionellales bacterium
  misc_feature (1)..(340): tr|A0A2M7C434|A0A2M7C434_9PROT S-adenosylmethionine:tRN A ribosyltransferase-isomerase OS=Gallionellales bacter ium CG03_land_8_20_14_0_80_55_15 OX=1974017 GN=queA PE= 3 SV=1
MRTEEFDFALPECLIAQHPPECRGASRLLCVRGDTLEDRQFADLLQRVRPNDVLVLNDTRVIKARLFGSKSSGGKIEVLVERVLNEHEVLAQVRASKSPKAGSHLLLAGELEVEVLGREGEFFHLRFVAETAVLELLARFGRLPLPPYITHAAEQQDEARYQTVFAREAGAVAAPTAGLHFDEAMLQALRDKGVKIAYVTLHVGAGTFQPVRAEYVREHQMHSECYEIPQATVEAIARAREEGGRVVAVGTTSLRALESAAASGELKAGTGETRIFITPGYRFRVVEVLLTNFHLPKSTLLMLVSAFGGMAQIRAAYRHAVEQEYRFFSYGDAMLIERKP

SEQ ID NO: 66841 - protein, 340 aa, Gallionellales bacterium; identical to SEQ ID NO: 66840
  misc_feature (1)..(340): tr|A0A2M8DWG9|A0A2M8DWG9_9PROT S-adenosylmethionine:tRN A ribosyltransferase-isomerase OS=Gallionellales bacter ium CG_4_9_14_0_8_um_filter_55_61 OX=1974015 GN=queA PE =3 SV=1

SEQ ID NO: 66842 - protein, 346 aa, Unknown
  misc_feature (1)..(346): tr|E1VLQ3|E1VLQ3_9GAMM S-adenosylmethionine:tRNA ribosy ltransferase-isomerase OS=gamma proteobacterium HdN1 OX =83406 GN=queA PE=3 SV=1
MQRSDFHFELPAELIASHPAQERTGSRLLVVDRKQHALHDRQFPDLLDWLEPGDLLVFNNTRVIPARLFGQKETGGQVEILVERLLSARKCLAHVRASKSPKPGSAIQVGAYQLRVIARHDALFELALETATNAPDKRPAELTDLLEQEGHIPLPPYIDRADEPRDRERYQTVYSKVPGAVAAPTAGLHFDQAFLERLRERGVRMAHVTLHVGAGTFQPVRAENILEHHMHSEWLQVSPEAVDLVRATKAAGKRVIAVGTTSVRSLETAARNGEIAPYEGDTDIFIYPGYSFRVVDALITNFHLPESTLIMLVSALAGREFVLQAYAHAIAQRYHFFSYGDAMLIV

SEQ ID NO: 66843 - protein, 346 aa, Unknown
  misc_feature (1)..(346): tr|A0A2U0AJ07|A0A2U0AJ07_9GAMM S-adenosylmethionine:tRN A ribosyltransferase-isomerase OS=gamma proteobacterium symbiont of Ctena orbiculata OX=1968598 GN=queA PE=3 S V=1
MQLSDFDYILPEELIAQFPHKERSGSRLLGLLPGEMEPRDLMFADLPTLLNPGDLLVLNNTRVMRARLYGSKLSGGKVEVMIERILEPNLALAHLRASKSPKPGTQLELGDDNQLVEVAGREGDLFILRSSAGDFYDLMNKHGHMPLPPYISREDRAVDMDRYQTVYAERPGAVAAPTAGLHFDQAMLQTLEEMGVGRTTVTLHVGAGTFQPVRVSNLDEHVMHKEYIEVDETVCRKIHQTRQQGGRVVAVGTTCVRSLEAASGGGAIEPYQGDTRLFIKPGYRFRSVDAMITNFHLPQSTLLMLVAAFAGYDRIMHAYQHAIAERYRFFSYGDAMFLTPAAESVG

SEQ ID NO: 66844 - protein, 139 aa, Gammaproteobacteria bacterium
  misc_feature (1)..(139): tr|A0A480BT67|A0A480BT67_9GAMM S-adenosylmethionine:tRN A ribosyltransferase-isomerase OS=Gammaproteobacteria b acterium OX=1913989 GN=DCZ11_06010 PE=3 SV=1
MHQPCGRFAPSPTGPLHLGSLLAAVGSFLAARAAGGRVVAVGTTALRLLESVAAADGSLEAFAGETKLFILPGYRFKIVDLLMTNFHLPRSTLFMLVSALRSTDEMKRAYAHAVAAKYRFYSYGDACLIYGAPMNGTKT

SEQ ID NO: 66845 - protein, 341 aa, Gammaproteobacteria bacterium
  misc_feature (1)..(341): tr|A0A1G0I3T2|A0A1G0I3T2_9GAMM S-adenosylmethionine:tRN A ribosyltransferase-isomerase OS=Gammaproteobacteria b acterium RIFCSPHIGHO2_12_FULL_43_28 OX=1798287 GN=queA PE=3 SV=1
MKLSDFQFELPADLIARYPEKRRSESRLLCLDQGEGIAHRRFYQLVELLQPGDLLVFNDTKVIPARIFGQKTTGGQVEILVERILDETRLLAQVRVSKPPKIGDELLFPEHIRLRVIGKQDQFYELSYEAGDRTILAVVEHIGHIPLPPYMQREPDETDKVRYQTVYAKFKGSVAAPTAGLHFDEALLQTLKEKQIDMAYLTLHIGAGTFMPVRVPNLLEHKMHAEYLDVSSFLCEKIKATKARGKRVVAVGTTSLRALESASQSGEIKPYQGETNIFIYPGYQFRTADALITNLHLPGSTLLMLVSAFAGHKKVMHAYRAAVANRYRFYSYGDAMWMVRA

SEQ ID NO: 66846 - protein, 343 aa, Garciella nitratireducens
  misc_feature (1)..(343): tr|A0A1T4K1Q3|A0A1T4K1Q3_9FIRM S-adenosylmethionine:tRN A ribosyltransferase-isomerase OS=Garciella nitratiredu cens DSM 15102 OX=1121911 GN=queA PE=3 SV=1
MNKKDFYFDLPKELIAQTPLKERDASRLLVLDKDTGKIEHKQFRDIINYLERGDTLILNNSRVIPARLFGVREDTHSKVEILLLKRVKNKKDCWEALVKPGKKARIGHRIVFGEGLLIGEVVDIIEDGTRIIHFLYEGVFEQILDQLGTMPLPPYIKEQLEDQERYQTIYSKVEGSAAAPTAGLHFTEYIFKELKKKGVNIAFITLHVGLGTFRPVKEEKIEEHKMHSEYYEISQDIVDLIYKTKTSGKRVIAVGTTTVRTLETAVTKAGEIKSSSGWTDIFIYPGYQFKIIDGMITNFHLPESTLLMLVSAFAGRDKILNAYHEAVKNKYRFFSLGDAMLIK

SEQ ID NO: 66847 - protein, 399 aa, Geitlerinema sp.
  misc_feature (1)..(399): tr|K9S8Y6|K9S8Y6_9CYAN S-adenosylmethionine:tRNA ribosy ltransferase-isomerase OS=Geitlerinema sp. PCC 7407 OX= 1173025 GN=queA PE=3 SV=1
MGNRGKKLPFVGARPAGTFVMGARLVSVDLGGDRPTSAMTSTQSPRDWQLAAYEYDLPEDRIAQNPVEPRDHARLLALTSPTEHRHHHFYDLPDLLQPGDLLVLNNTRVIPARLYGRKPEGAQVEVLLLEEQGRDRWLALVRPGKRLKPGARILFGPEEAPTLTAEVLATDEATGGRVLQFAVPEGRSLLTLLEDLGEMPLPPYITDSQAAPERYQTIYGDRPGAVAAPTAGLHFTPELLERLAERGIDRTFVTLHVGVGTFRPVEVDDITTHQMHGEWIDVPAETVKKIQETQARGGRVIAVGTTAVRSLEGAAHGGVLQPFEGKTNLFIYPGYRWRVVDGLITNFHLPGSSLLMLVSALVGRDRLMEIYQEAIAQAYRFYSFGDAMIILPEARRSGG

SEQ ID NO: 66848 - protein, 349 aa, Gelidibacter algens
  misc_feature (1)..(349): tr|A0A1A7R057|A0A1A7R057_9FLAO S-adenosylmethionine:tRN A ribosyltransferase-isomerase OS=Gelidibacter algens O X=49280 GN=queA PE=3 SV=1
MKLSHFSFKLPEELLAEHPAENRDEARLMVLDRKNKTIEHKLFKDVIDYFDEGDVMILNNTKVFPARLYGNKEKTGARIEVFLLRELNEEQRLWDVLVDPARKIRIGNKLYFGDDETLVAEVIDNTTSRGRTLRFLYDGSYKEFRQKLTELGETPLPKYIKRDVEPEDEERYQTIFAKNEGAVAAPTAGLHFSKHLLKRLEIKGIDFAEITLHVGLGTFNPVEVEDLSKHKMDSEEAFVDQKAADIVNNAKTKKKRVCAVGTTAMRAVESSVSSSGTLNEFSGWTNKFIFPPYEFSIANCMITNFHTPKSTLLMMVSAFAGHDFMKKAYEEAVKEKYRFYTYGDAMLII

SEQ ID NO: 66849 - protein, 349 aa, Gelidibacter gilvus
  misc_feature (1)..(349): tr|A0A4Q0XBQ9|A0A4Q0XBQ9_9FLAO S-adenosylmethionine:tRN A ribosyltransferase-isomerase OS=Gelidibacter gilvus O X=59602 GN=queA PE=3 SV=1
MKLSHFNFKLPEELLAEHPTEIRDESRLMVLDRKKQTIEHKTFKDIIDYFDEGDVMVLNNTKVFPARLYGNKEKTGARIEVFLLRELNEEQRLWDVLVDPARKIRIGNKLYFGDDETLVAEVIDNTTSRGRTLRFLYDGSYKEFRQKLTLLGETPLPKYIKREVEPEDEERYQTIFAKNEGAVAAPTAGLHFSKHLLKRLEIKGIEFAEVTLHVGLGTFNPVEVEDLSKHKMDSEEAFVTQQAADIVNDAKTRKKRVCAVGTTAMRAIESSVSSSGTLNEFSGWTNKFIFPPYEFSIANCMITNFHTPKSTLLMMASAFAGHDFIKKAYDEAIKEKYRFYTYGDAMLII

SEQ ID NO: 66850 - protein, 349 aa, Gelidibacter salicanalis
  misc_feature (1)..(349): tr|A0A5C7ADE9|A0A5C7ADE9_9FLAO S-adenosylmethionine:tRN A ribosyltransferase-isomerase OS=Gelidibacter salicana lis OX=291193 GN=queA PE=3 SV=1
MKLSHFNFKLPEELLAEHPAEHRDEARLMVLDRKNKTIEHKLFKDIIDYFDEGDVMILNNTKVFPARLYGNKEKTGARIEVFLLRELNEEQRLWDVLVDPARKIRIGNKLYFGDDETLVAEVIDNTTSRGRTLRFLYDGSYKEFRKKLTELGETPLPKYIKRDVEPEDEERYQTIFAKNEGAVAAPTAGLHFSKHLLKRLEIKGIDFAEVTLHVGLGTFNPVEVEDLSKHKMDSEEAFVDQKAADIVNNAKTKKKRVCAVGTTAMRAVESSVSSSGTLNEFSGWTNKFIFPPYEFSIANCMITNFHTPKSTLLMMVSAFAGHDFMKEAYEEAVKEKYRFYTYGDAMLII

SEQ ID NO: 66851 - protein, 349 aa, Gelidibacter sediminis
  misc_feature (1)..(349): tr|A0A4V6Q4Q6|A0A4V6Q4Q6_9FLAO S-adenosylmethionine:tRN A ribosyltransferase-isomerase OS=Gelidibacter sedimini s OX=1608710 GN=queA PE=3 SV=1
MKLSHFNFKLPEELLAEHPSEHRDEARLMVLDRKNKTIEHKLFKDVIDYFDEGDVMILNNTKVFPARLYGNKEKTGARIEVFLLRELNEEQRLWDVLVDPARKIRIGNKLYFGDDETLVAEVIDNTTSRGRTLRFLYDGSYKEFRKKLTELGETPLPKYIKREVEPEDEERYQTIFAKNEGAVAAPTAGLHFSKHLLKRLEIKGIDFAEVTLHVGLGTFNPVEVEDLSKHKMDSEEAFVDQKAADIVNNAKTKKKRVCAVGTTAMRAIESSVSSSGTLNEFSGWTNKFIFPPYEFSIANCMITNFHTPKSTLLMMVSAFAGHDFMKQAYEEAVKEKYRFYTYGDAMLII

SEQ ID NO: 66852 - protein, 341 aa, Gemella asaccharolytica
  misc_feature (1)..(341): tr|A0A133ZT76|A0A133ZT76_9BACL S-adenosylmethionine:tRN A ribosyltransferase-isomerase OS=Gemella asaccharolyti ca OX=502393 GN=queA PE=3 SV=1
MKLENFDYKLPNELIAQHPMDKRDESRLLVVDKDTDQYQHKKFYNLIDYLNSGDTLVLNDTRVMPARLFGKKITTGALIEILLLKNKSNDVWECLVKPAKRVAVGTIVDFNGIMRAECIEAKDDGFRYFKFTYEGIFQEKLEILGTMPLPPYIKEQLKDNERYQTVYSKNLGSAAAPTAGLHFTKQLLNDIKEKGINVCYITLHVGIGTFRPVVVNEVENHKMHSEFYQIDEKTAEIINETKKNNKKIIAVGTTTIRTLETVAKNNNGKIVSSSGFTDIFIYPGFKFRCVDSLVTNFHLPKSTLIMLVSAFYNREKILNIYNIAVKEKYRFFSFGDAMLIH

SEQ ID NO: 66853 - protein, 342 aa, Gemella bergeri
  misc_feature (1)..(342): tr|U2QIR2|U2QIR2_9BACL S-adenosylmethionine:tRNA ribosy ltransferase-isomerase OS=Gemella bergeri ATCC 700627 O X=1321820 GN=queA PE=3 SV=1
MKLEEFNFNLPEELIAQTPLLKRDTSRLLMVDRKNNDYKHKVFSDIIDYFNPGDTLVLNNTRVMPARLYGGKKGTGAAIEVLLLKTKEHNIWECLVKPAKRIKIGSIVSFGDGVMEAECIKVMDDGFRYFRFSYEGIFQERLDELGTMPLPPYIKERLIDKERYQTVYSKEIGSSAAPTAGLHFTEELLKKIKEKGVNIAYLTLHVGLGTFRPVVTENIEDHDMHSEYYTIDEETANIIDETKKRGNKVFSVGTTSTRTLETIARDNNGKIVAASGWTNIFIYPGFEFECVDGLITNFHLPKSSLIMLVSAFYDREKVLELYKIAVDNKYRFFSFGDAMMII

SEQ ID NO: 66854 - protein, 342 aa, Gemella haemolysans
  misc_feature (1)..(342): tr|A0A134A2R7|A0A134A2R7_9BACL S-adenosylmethionine:tRN A ribosyltransferase-isomerase OS=Gemella haemolysans O X=1379 GN=queA PE=3 SV=1
MKLEQFDFYLPEELIAQTPLLKRDTSKLLCVDRKNNSHEHKVFSDIIDYFNPGDTLVLNNTRVMPARLYGAKKDTGAAIEVLLLKNLGHNDWECLVKPAKRIKEGSIVSFGDGIMEAVCTKVLDDGFRHFEFIYEGIFQERLDELGTMPLPPYIKERLTDKERYQTVYSKEVGSSAAPTAGLHFTKELLEKIKEKGINIAYLTLHVGLGTFRPVAVENIEEHDMHSEYYTLDENTAKIINNTKENGGRVFSVGTTSTRTLETIARDNNGKIVAASGWTNIFIYPGFEFKCVDGLITNFHLPKSSLIMLVSAFYDREKVIELYNIAVENKYRFFSFGDAMIII

SEQ ID NO: 66855 - protein, 342 aa, Gemella haemolysans
  misc_feature (1)..(342): tr|F3A176|F3A176_9BACL S-adenosylmethionine:tRNA ribosy ltransferase-isomerase OS=Gemella haemolysans M341 OX=5 62981 GN=queA PE=3 SV=1
MKLEQFDFYLPEELIAQTPLLKRDTSKLLCVDRKNNTHEHKVFSDIIDYFNPGDTLVLNNTRVMPARLYGAKKDTGAAIEVLLLKNLGHNDWECLVKPAKRIKEGSIVSFGDGIMEAVCTKVLDDGFRHFEFVYEGIFQERLNELGTMPLPPYIKERLTDKERYQTVYSKEVGSSAAPTAGLHFTNELLDRIKEKGVNIAYLTLHVGLGTFRPVAVENIEDHDMHSEYYTLDEKTAELINKTKENEGRVFSVGTTTTRTLETIARDNNGKIVAASGWTNIFIYPGFEFKCVDGLITNFHLPKSSLIMLVSAFYDREKVIELYNIAVENKYRFFSFGDAMIII

SEQ ID NO: 66856 - protein, 342 aa, Gemella morbillorum
  misc_feature (1)..(342): tr|A0A2X4R0W4|A0A2X4R0W4_9BACL S-adenosylmethionine:tRN A ribosyltransferase-isomerase OS=Gemella morbillorum O X=29391 GN=queA PE=3 SV=1
MKLEQFDFYLPEELIAQTPLLKRDTSKLLCIDKKENNYEHKTFSDIIDYFEAGDTLVLNNTRVMPARLYGQKKDTGAAIEVLLLKNEVDNIWECLVKPAKRIKIGSVVSFGDGIMEAICTRVLDDGFRYFEFKYEGIFQERLDELGTMPLPPYIKERLTDKERYQTVYSKEVGSSAAPTAGLHFTNELLDKIRAKGVNVAYLTLHVGLGTFRPVAVENIEEHDMHSEYYTLDEKTAEIINKTKENNGRIFSVGTTTTRTLETIARDNNGKIVAASGWTNIFIYPGFKFKCVDGLITNFHLPKSSLIMLVSAFYEREKILDLYKIAVENKYRFFSFGDAMIIV

SEQ ID NO: 66857 - protein, 342 aa, Gemella morbillorum
  misc_feature (1)..(342): tr|E5V238|E5V238_9BACL S-adenosylmethionine:tRNA ribosy ltransferase-isomerase OS=Gemella morbillorum M424 OX=5 62982 GN=queA PE=3 SV=1
MKLEQFDFYLPEELIAQTPLLKRDTSKLLCIDKKENNYEHKTFSDIIDYFEAGDTLVLNNTRVMPARLYGQKKDTGAAIEVLLLKNEVDNIWECLVKPAKRIKIGSVVSFGDGIMEAICTRVLDDGFRYFEFKYEGIFQERLDELGTMPLPPYIKERLTDKERYQTVYSKEVGSSAAPTAGLHFTNELLDKIKAKGVNVAYLTLHVGLGTFRPVAVENIEEHDMHSEYYTLDEKTAEIINKTKENNGRIFSVGTTTTRTLETIARDNNGKIVAASGWTNIFIYPGFKFKCVDGLITNFHLPKSSLIMLVSAFYEREKILDLYKIAVENKYRFFSFGDAMIIV

SEQ ID NO: 66858 - protein, 342 aa, Gemella sanguinis
  misc_feature (1)..(342): tr|A0A2N6SH22|A0A2N6SH22_9BACL S-adenosylmethionine:tRN A ribosyltransferase-isomerase OS=Gemella sanguinis OX= 84135 GN=queA PE=3 SV=1
MKLEEFDFYLPEELIAQTPLLKRDTSKLLTINRKENTYEHKVFSDIIDYFNPGDTLVLNNTRVMPARLYGQKKDTGAAIEVLLLKNKEHNMWECLVKPAKRIKVGSIVSFGDGIMEAECVKVLDDGFRYFEFKYEGIFQERLDELGTMPLPPYIKERLTDKERYQTVYSKEVGSSAAPTAGLHFTNELLDKIKQKGVNIVYLTLHVGLGTFRPVSVENIEDHDMHSEYYTLDEETANVINETKKNGGRVFSVGTTSTRTLETIARDNDGEIVPASGWTNIFIYPGFEFKCVDGLITNFHLPKSSLIMLVSAFYNREKVLELYKIAVENKYRFFSFGDAMIII

SEQ ID NO: 66859 - protein, 342 aa, Gemella sp.
  misc_feature (1)..(342): tr|A0A533I0M5|A0A533I0M5_9BACL S-adenosylmethionine:tRN A ribosyltransferase-isomerase OS=Gemella sp. OX=196635 4 GN=queA PE=3 SV=1
MKLEQFDFYLPEELIAQTPLLKRDTSKLLCVDRKNNSHEHKVFSDIIDYFNSGDTLVLNNTRVMPARLYGAKKDTGAAIEVLLLKNLGHNDWECLVKPAKRIKEGSIVSFGDGIMEAVCTKVLDDGFRHFEFIYEGIFQERLDELGTMPLPPYIKERLTDKERYQTVYSKEVGSSAAPTAGLHFTNELLEKIKEKGVNIAYLTLHVGLGTFRPVAVENIEEHDMHSEYYTLDEETAKIINRTKENGGRVFSVGTTSTRTLETIARDNNGKIVAASGWTNIFIYPGFEFKCVDGLITNFHLPKSSLIMLVSAFYDREKVIELYNIAVKNKYRFFSFGDAMIII

SEQ ID NO: 66860 - protein, 342 aa, Gemella sp.
  misc_feature (1)..(342): tr|A0A0X8KLB3|A0A0X8KLB3_9BACL S-adenosylmethionine:tRN A ribosyltransferase-isomerase OS=Gemella sp. oral taxo n 928 OX=1785995 GN=queA PE=3 SV=1
MKLEEFNFNLPEELIAQTPLLKRDTSKLLMVDRKNNNYKHKVFSDIIDYFNPGDTLVLNNTRVMPARLYGEKKGTGAAIEVLLLKTKEHNIWECLVKPAKRIKIGSIVSFGDGVMEAECIKVMDDGFRYFKFSYEGIFQERLDELGTMPLPPYIKERLIDKERYQTVYSKEIGSSAAPTAGLHFTEELLKKIKEKGVNIAYLTLHVGLGTFRPVVTENIEDHDMHSEYYTIDEETANIINETKKRCNKVFSVGTTSTRTLETIARDNNGKIVAASGWTNIFIYPGFEFKCVDGLITNFHLPKSSLIMLVSAFYSREKVLELYKIAVDNKYRFFSFGDAMMII

SEQ ID NO: 66861 - protein, 348 aa, Geminicoccus sp.
  misc_feature (1)..(348): tr|A0A2D6C0V4|A0A2D6C0V4_9PROT S-adenosylmethionine:tRN A ribosyltransferase-isomerase OS=Geminicoccus sp. OX=2 024832 GN=queA PE=3 SV=1
MRLSDFDFSLPEALIAQRPVYPRAAARLLQVRGDGSRVDRTFADLAACLRDGDLLVFNNSQVFASRLIGQRERDGQRFNGRIEVTLVAETDEPTLWVCYARPGKKLEPGDGLFFGDWLSAVVEAKDGADIKLRFDAQGADLLETIDALGHMPLPPYIRRAKGGENSDREDYRTFCGRKMGSLAAPTASLHFDEETLESLRTARALEVAEVRLDVGLGTFAPIRSDDISDHQMHHESCALDADNAALIASARAEGRRVVAVGTTVLRALESLRGQAGAMSTDIFLKPGDDFHVVDALITNFHLPQSTLFMLVCAFSGTDAMKAAYDHAIAAEYRFFSYGDGCFLERPTG

SEQ ID NO: 66862 - protein, 348 aa, Geminicoccus sp.
  misc_feature (1)..(348): tr|A0A2E3IRK0|A0A2E3IRK0_9PROT S-adenosylmethionine:tRN A ribosyltransferase-isomerase OS=Geminicoccus sp. OX=2 024832 GN=queA PE=3 SV=1
MRLSDFDFNLPEALIAQRPVYPRAAARLLQVRGDGSRVDRTFADLAACLCDGDLLVFNNSQVFASRLIGQRERDGQRFGGRIEVTLVAETDEPALWVCYARPGKKLEPGDGLYFSDRLSTVVEAKDGADIKLRFDAQGADLLETIDALGHMPLPPYIRRAKGGENSDREDYRTFCGRKKGSLAAPTASLHFDEETLESLRAARALEVAEVRLDVGLGTFAPIRSDDISDHQMHHESCALDADNAALIASARAEGRRVVAVGTTVLRALESLRGQAGAMSTDIFLKPGDDFHVVDALITNFHLPQSTLFMLVCAFSGTEAMKAAYDHAIAAEYRFFSYGDGCLLERPTG

SEQ ID NO: 66863 - protein, 348 aa, Geminocystis sp.
  misc_feature (1)..(348): tr|A0A0D6ANL3|A0A0D6ANL3_9CHRO S-adenosylmethionine:tRN A ribosyltransferase-isomerase OS=Geminocystis sp. NIES -3709 OX=1617448 GN=queA PE=3 SV=1
MNLDRQLSSYDYYLPPELIAQNPVTPRDSSRLLTVKSNNTIEHTIFCNLPDLLLPGDLLVLNDTRVIPARLYGKKSTGAEVEVLLVEERQNNCWLGLVKPGKRFSLGSEIIFSDDLKAIVIGKDDITGGRFLQFEVSKSQSFWEILDRIGNIPFPPYVTNSQANPQQYQTIYAEKQGAIAAPTAGLHFTEKLLRELKKRQINIATVTLHVGIGTFRPVEVEDILTHQMHHESIELNQKTVDLITKTKKAGRNVIAVGTTVVRTLEGAYKNQKVLKPFSGKTDLFIYPGYEFKVIDGLITNFHLPKSSLLMLVSALIGREKLMSIYEEAIKEKYRFYSFGDAMFILNDR

SEQ ID NO: 66864 - protein, 354 aa, Geminocystis sp.
  misc_feature (1)..(354): tr|A0A0D6AK35|A0A0D6AK35_9CHRO S-adenosylmethionine:tRN A ribosyltransferase-isomerase OS=Geminocystis sp. NIES -3708 OX=1615909 GN=queA PE=3 SV=1
MNLDQQLSSYDYFLPPNLIAQNPVSPRDSSRLLVVKSEGKIDHSIFCNLPDFLLPGDLLVLNDTRVIPARLYGKKSTGAQVEVLLVEETTNNCWLALVKPGKRFSIGSEILFGDSSLLKATVVGKDKSTGGRFLQFQINESQSFWEILDQVGNIPFPPYVTESQANPQQYQTIYAEKQGAIAAPTAGLHFTQKLLTELQQRQINIATVTLHVGIGTFRPVEVENILTHEMHQEWIEINQNTIDAIKATKEKGRKVIAVGTTVVRTLEGAYKHQQKLAPFSGKTDLFIYPGYEFKVIDGLITNFHLPKSSLLMLVSALIGRKRLMSIYQEAIEEKYRFYSFGDGMFIMPNQNIES

SEQ ID NO: 66865 - protein, 341 aa, Gemmata obscuriglobus
  misc_feature (1)..(341): tr|A0A2Z3HC12|A0A2Z3HC12_9BACT S-adenosylmethionine:tRN A ribosyltransferase-isomerase OS=Gemmata obscuriglobus OX=114 GN=queA PE=3 SV=1
MHFFDYHLPEHLIAQHPAAERDAARLLVVRRDTQRIQHHIFRDLPELLSPGDLVVLNDTRVLPARVVGRREATGGKWEGLFLRATETGLWEMLAQTRGYPEVGTVFVTDTGLRLVLRGRTADRHWLMQPEAEGTPPEILSTYGHIPLPPYIRKGREDAGDRERYQTVYAGAAAGSVAAPTAGLHFTPAVFDRLTARGIGTARVTLHVGLGTFAPVKEDDPTKHAIHHEWCAVPQGTVDTIRDTKARGGRVVAIGTTTTRTLESAARPDGLRSFCGETGLFIHEPFEFRAVDALVTNFHLPRTTLLLLVGALAGDELLARAYAEAVTCEYRFFSYGDAMLVL

SEQ ID NO: 66866 - protein, 342 aa, Gemmata sp.
  misc_feature (1)..(342): tr|A0A142XU28|A0A142XU28_9BACT S-adenosylmethionine:tRN A ribosyltransferase-isomerase OS=Gemmata sp. SH-PL17 O X=1630693 GN=queA PE=3 SV=1
MHFFDYYLPEHLIAQHPAAERDSARLLVVRRSENSITHHTFRDLPDLLSPGDLVVLNDTRVLPARVVGRREQTGGKWEGLFLRTTEDGSWEMLAQTRGYPEIGTAFVTDTNLRLVLCGRTAERHWLMRPDEEGTPPELLGRYGHIPLPPYIRKGREETADRERYQTVYASGNAAGSVAAPTAGLHFTPALFDRLAAKGIGTARVTLHVGLGTFAPVKEEDPTKHVIHSEWCAVTQDVVDAIRATKERGGRVVAVGTTTTRTLETAARSGTPQPFCGETNLFIHEPFEFRAISALVTNFHLPRTTLLLLVGAFTGSELLQRAYAEAVANEYRFFSYGDAMLVL

SEQ ID NO: 66867 - protein, 341 aa, Gemmataceae bacterium
  misc_feature (1)..(341): tr|A0A5C1AI65|A0A5C1AI65_9BACT S-adenosylmethionine:tRN A ribosyltransferase-isomerase OS=Gemmataceae bacterium PX52 OX=2598579 GN=queA PE=3 SV=1
MHPLFFDYDLPERLIAQEPTARRDDARLLVVRRGTQALEHRHVRDLPQLLRAGDRLVLNDTRVLPARLIGERANTGGKWEGLFLRDRDGEWELMAKTRGYPKLGERIVTDTGLSLTLIGRTSDKHWLMRPDATGSALELLQKFGQIPLPPYIRKGRAGEPDAERYQTVYARAAGSVAAPTAGLHFTPELFAALSQAGVGRASVTLHVGLGTFAPIKSDDPTQHEMHSEWCEVPATTVEAIRQTKAAGGRVIAVGTTTARTLESAALPGELQAFIGETNIFIHPPFAFRVLDGLLTNFHLPRTTLLLLVQALAGSELLQRAYEEAIREEYRFYSYGDAMLVL

SEQ ID NO: 66868 - protein, 338 aa, Gemmataceae bacterium
  misc_feature (1)..(338): tr|A0A4V0I5H8|A0A4V0I5H8_9BACT S-adenosylmethionine:tRN A ribosyltransferase-isomerase OS=Gemmataceae bacterium OX=2052164 GN=queA PE=3 SV=1
MHFDYHLPEHLIAQHPAARRDGSRLLVVRRATGTLEHRTFRDLPELLSPGDLLVLNDTKVLPARVVGRRESTGGKWEGLFLRERDGLWEMLAQTRSYPEPGSAFVTDTGLRLTLRGRTDDRHWLMEPDPPGPPAEVLGRYGRIPLPPYIRKGTAGDADAERYQTVYAAHAGSVAAPTAGLHFTQEVFDRLAARGIGTARVTLHVGLGTFAPVKADDPAKHAIHREWCEVTQGTVDAIAATKARGGRVVAVGTTTTRTLESAAREGELKTFSGETDLYILPGFAFRVVDALVTNFHLPRTTLLLLVGALAGTDLLGTAYAEAVAREYRFYSYGDAMLVL

SEQ ID NO: 66869 - protein, 352 aa, Gemmatimonadaceae bacterium
  misc_feature (1)..(352): tr|A0A2E0DR24|A0A2E0DR24_9BACT S-adenosylmethionine:tRN A ribosyltransferase-isomerase OS=Gemmatimonadaceae bac terium OX=2026741 GN=queA PE=3 SV=1
  misc_feature (15)..(15): Xaa can be any naturally occurring amino acid
  misc_feature (48)..(48): Xaa can be any naturally occurring amino acid
  misc_feature (78)..(78): Xaa can be any naturally occurring amino acid
  misc_feature (87)..(87): Xaa can be any naturally occurring amino acid
  misc_feature (106)..(106): Xaa can be any naturally occurring amino acid
  misc_feature (197)..(197): Xaa can be any naturally occurring amino acid
  misc_feature (206)..(206): Xaa can be any naturally occurring amino acid
  misc_feature (222)..(222): Xaa can be any naturally occurring amino acid
  misc_feature (348)..(348): Xaa can be any naturally occurring amino acid
MSDKVSDYHYELPRXLIAQRPAKRRDEARLLVVPEIGPFGHHTIRDLXSLVRPGDLLVVNESKVLPARLNGQKTTGAXAEVLLLKPXGLGEDEDPALWEALVRPGXKLRAGHVVEIGDELSVEILEVLPSGNRLVRLKSDLDIETAIERNGSMPLPPYIDREIEPSDRDRYQTVYARTGGSVAAPTAGLHFTNDLLXEFETKGIKXTAITLHVGLGTFRPVXAEHPSGHPMHIERYFIPESAIEAVERTKRDGGRVWAVGTTAVRALESAARDDGSLRPGWAQTDLFIWPPYNFRVVDGLLTNFHLPRSTLIMLVAAFGGYERTMAAYEEAVRERYLFYSYGDAMLVXPSCG

SEQ ID NO: 66870 - protein, 354 aa, Gemmatimonadaceae bacterium
  misc_feature (1)..(354): tr|A0A2E5WI42|A0A2E5WI42_9BACT S-adenosylmethionine:tRN A ribosyltransferase-isomerase OS=Gemmatimonadaceae bac terium OX=2026741 GN=queA PE=3 SV=1
MNLDDLDFHLPDELIALHPTSQRDGSRLLILDRCKGDLTDSRFPHLLSHLRADDVLVLNETRVVPVRLLTRKPSTGGLVELLVLGRAPGEGWMAMAKPLKGLVAGKILEASSGLQLEVIDRVEDRLHFRIVGHDDTGVDPTGLDTFFQLTGDIGQIPLPPYIRRSPVEADSQRYQTVFARTNGSIAAPTAGLHFSETLLGQIQRAGVTIERLLLHVGAGTFAPVRAADPRQHRVEAEYFRLEPEAAERIMKRRAAGGRVVAVGTTSVRALETCAKTGTLKSGEGWTDLVITPDHRFKLVDAMITNFHLPRSSLMMLVSAFAGSEHIRKAYQHAVGAGYRFYSYGDAMFIHGDRR

SEQ ID NO: 66871 - protein, 346 aa, Gemmatimonadales bacterium
  misc_feature (1)..(346): tr|A0A524H593|A0A524H593_9BACT S-adenosylmethionine:tRN A ribosyltransferase-isomerase OS=Gemmatimonadales bact erium OX=2448054 GN=queA PE=3 SV=1
MTADRLLRTADFAYHLPPELIAQTPGTERGDSRLLVVRRPSRGLQDLGFAALPDLIPPGDLLVLNSTRVRHARLLGTRPSGAPAEVLLIHPSTDGSWLAIGKPGSALREGKRITLGAGAEIETLEVLPDGERRVRFVGMPADQAIARYGRLPLPPYIDRDPDAQDEVRYQTVYADREGSVAAPTAGLHFTEAMLGSLRGRGVRIVSLDLEVGPGTFRPVEEEDIAAHPMHPERYDIPADVAAAVRDARSRGAAVWAVGTTVVRALESAAQDDGTVAEGAAETRLLISPGYDFKVVNHLVTNFHLPRSTLLMLVAAFAGYDTMMAAYRHAVEARYRFYSYGDAMCIL

SEQ ID NO: 66872 - protein, 347 aa, Gemmatimonadales bacterium
  misc_feature (1)..(347): tr|A0A524IVJ9|A0A524IVJ9_9BACT S-adenosylmethionine:tRN A ribosyltransferase-isomerase OS=Gemmatimonadales bact erium OX=2448054 GN=queA PE=3 SV=1
MGERTSDYEYHLPADLIASRPTPARDGSRLLVVDSTGVFTDRMFPDLVDYISPGDALVLNQTRVFPARLIGRKPTGAGAEVLLVRPRPDLDPSGALFEALVRPGGKLKPGRIVEFAAEFRAVIEDSARGGARIVRLEGDGDPWELIERHGHVPLPPYIARDDDEADRERYQTVFATHRGSVAAPTAGLHFTPELLDRIEGLGIHLVRITLHVGVGTFRPVSAARPEDHELHSEWYRVESEAARILNEVRDTGGRIWAVGTTSVRTLESVLGSDGRFRADEGWTDLFIRPPYEFRAVDALVTNFHLPRSSLLMLVSALAGRERILAAYDHAVAEGYRFYSYGDAMVIP

SEQ ID NO: 66873 - protein, 348 aa, Gemmatimonadetes bacterium
  misc_feature (1)..(348): tr|A0A1Q7E460|A0A1Q7E460_9BACT S-adenosylmethionine:tRN A ribosyltransferase-isomerase OS=Gemmatimonadetes bact erium 13_1_40CM_66_11 OX=1805195 GN=queA PE=3 SV=1
MHRLSDFDYDLPSEQIAQHPLPDRSASRLLVLDRASGDIRHQYFRDLPGLIPPRDVLVINTSRVIPARLRGKRDGGRGTGTGGDAEILLVRELPDRTWLAMGHPGGKLKPGRRVTFGDDSVVEIVEVLGGGLRRVRFVGALDARATLAQYGEVPLPPYIRRAPDAADRERYQTVYAAHDGSVAAPTAGLHFTPELLADIYTRQVRVASLDLHVGPGTFKPVETEDISQHPMHAEAYDITPGAAEWINHALERKRGVWGVGTTVVRALESAVDSAGLVGPGSGETALFIRPPYEFKVVTHLITNFHLPRSTLLMLVCAFGGYEHVMAAYREAVREGYRFYSYGDAMLII

SEQ ID NO: 66874 - protein, 332 aa, Gemmatimonadetes bacterium
  misc_feature (1)..(332): tr|A0A1Q7AC83|A0A1Q7AC83_9BACT S-adenosylmethionine:tRN A ribosyltransferase-isomerase OS=Gemmatimonadetes bact erium 13_2_20CM_2_69_23 OX=1805204 GN=queA PE=3 SV=1
MPAGRIAQHPLPDRAASRLLVLDRSTGAIRHAQFRDIVELVAPEDVLVLNVSRVIPARLHGKRETGNVAELLVVRELPDGSWLAMGHPGGKLKPGRTVRFGDDSAAEIVEMLGGGLRRVKFVGALDARATLAKYGETPLPPYIRRPPVPEDRARYQTVYAAHDGSVAAPTAGLHFTAELVDRVRASGTAVATLDLHVGPGTFKPVEVDDLAGHALHAEPYAVSAESATTINGRREAGGRIWAVGTTVVRALETCADARGAIRPGAGETSLFIYPPYPFRAVDRLLTNFHLPRSTLLMLVCAFGGYDNVMRAYGEAVRQGYRFYSYGDAMAIV

SEQ ID NO: 66875 - protein, 369 aa, Gemmatimonas aurantiaca
  misc_feature (1)..(369): tr|A0A3D4VC47|A0A3D4VC47_9BACT S-adenosylmethionine:tRN A ribosyltransferase-isomerase OS=Gemmatimonas aurantia ca OX=173480 GN=queA PE=3 SV=1
MTAPSNPHGSADPAADVLPELRRVDGDRTADYDYELPEERIAQLPVEPRDASRLLVVDRESGSLTHRQFRDVVSLIPAGDAVVLNTTKVFRARLLGHRESGGPAEILLLRHLRDAHYEAMIHPGGKLRPGRTVTIAPGFTVEIVDTTPRRTRIVKLHAPEFSSVQSAIEQHGHIPLPPYIERSDTDADAARYQTIYAAQAGSVAAPTAGLHFTDDLLATLDARGVERVNVLLHVGAGTFRPVSDDDPSQHVMHEEWCEVTPDAAARLNAVRARGGKIWAVGTTSVRTIETAATPDGVIHPYIGETNIFLRPPYQFRGVDHLITNFHLPRSTLIMLVAAFAGYDLTMQAYRTAVAEQYRFYSYGDAMVLL

SEQ ID NO: 66876 - protein, 353 aa, Gemmatimonas aurantiaca
  misc_feature (1)..(353): tr|C1A610|C1A610_GEMAT S-adenosylmethionine:tRNA ribosy ltransferase-isomerase OS=Gemmatimonas aurantiaca (stra in T-27 / DSM 14586 / JCM 11422 / NBRC 100505) OX=37906 6 GN=queA PE=3 SV=1
MLPELRRVDGDRTADYDYELPEERIAQLPVEPRDASRLLVVDRESGSLTHRQFRDVVSLIPAGDAVVLNTTKVFRARLLGHRESGGPAEILLLRHLRDAHYEAMIHPGGKLRPGRTVTIAPGFTVEIVDTTPRRTRIVKLHAPEFSSVQSAIEQHGHIPLPPYIERSDTDADAARYQTIYAAQAGSVAAPTAGLHFTDDLLATLDARGVERVNVLLHVGAGTFRPVSDDDPSQHVMHEEWCEVTPDAAARLNAVRARGGKIWAVGTTSVRTIETAATPDGVIHPYIGETNIFLRPPYQFRGVDHLITNFHLPRSTLIMLVAAFAGYDLTMQAYRTAVAEQYRFYSYGDAMVLL

SEQ ID NO: 66877 - protein, 360 aa, Gemmatimonas phototrophica
  misc_feature (1)..(360): tr|A0A143BHY5|A0A143BHY5_9BACT S-adenosylmethionine:tRN A ribosyltransferase-isomerase OS=Gemmatimonas phototro phica OX=1379270 GN=queA PE=3 SV=1
MTLPSDSVGVSPPKGARTSDYDYELPEARIAQRPVEPRDASRLLVVDRTTGGVSHRTFRDVLGLIPEGDAIVLNTTKVFRARLLGHRESGGPAEILLLRPAEGHADGVHFEAMIHPGGKLRPGRVVTIADGFKVEIVDTTPRRTRIVKLHTDGDPLAAIETHGHVPLPPYIERADEAGDVNRYQTVYAREAGSVAAPTAGLHFTDDLLAQMQAKGVERVNVLLHVGAGTFRPVSDEDPSQHLMHDEWCEVTPEAADRLNAVRARGNKIWVVGTTGVRTLETATDAHGIVQPYTGDTNIFLRPPYQFRGVDHLITNFHLPKSTLVMLVAAFAGYEQTMHAYRVAVENEYRFYSYGDAMCII

SEQ ID NO: 66878 - protein, 342 aa, Gemmatimonas sp.
  misc_feature (1)..(342): tr|A0A0S8B581|A0A0S8B581_9BACT S-adenosylmethionine:tRN A ribosyltransferase-isomerase OS=Gemmatimonas sp. SG8_ 28 OX=1703357 GN=queA PE=3 SV=1
MRVDDFDFTFPPEAVAQRPLADRSASRLLVLSRRSGAVEHRRFRDVPELLAPGDVLVLNASRVIPARLYGRRDSGRPAEILLVQEEPSGTWLAMVHPGGKLKAGRHLTFEDGWTGEIVDVLGGGLRRIRFDGPHPTRVLLERHGTVPLPPYIDRSPDAADRERYQTVYATSDGSVAAPTAGLHFTPEVLARVTERGIRIVEILLHVGPGTFKPVDVDDPARHRMHAERYEVPDVAATVINETRSAGGRVWAVGTTAARTLETVVRPDGSVAAGVGWTDLFIYPPYRFGAIDALLTNFHLPRSTLIMLVAAFAGHGATMAAYRTAIEQGYRLFSYGDAMAIVP

SEQ ID NO: 66879 - protein, 343 aa, Gemmatimonas sp.
  misc_feature (1)..(343): tr|A0A0S8HDP5|A0A0S8HDP5_9BACT S-adenosylmethionine:tRN A ribosyltransferase-isomerase OS=Gemmatimonas sp. SM23 _52 OX=1703359 GN=queA PE=3 SV=1
MRTADFDYPLDERLIAQRPLPARDSSRMLLVRRLGATLEDRTFRDLISLFSPGDVLVLNDTRVFPARLLGHKPTGAAAEVLLIEAIDPAGLRWRALVRPGGKLKPGRIVRAGEELEVAIEDCGAGGERIVRLITPLPATEALTRYGHVPLPPYIRRADDESDRVRYQTVYARESGSVAAPTAGLHFSESLLAAIERHGVEITSVTLHVGPGSFRPVDASDPAEHHLDGEWYRVAVSTAGTINRVRERGGRVWAVGTTTVRALETVAADDGVIEPGEGTTDLFIRPGFRFRAVDCLITNFHLPRSTLLMLVAAFAGYELTMHAYRHAQQQGYRFYSYGDAMAVI

SEQ ID NO: 66880 - protein, 349 aa, Gemmatirosa kalamazoonesis
  misc_feature (1)..(349): tr|W0RI54|W0RI54_9BACT S-adenosylmethionine:tRNA ribosy ltransferase-isomerase OS=Gemmatirosa kalamazoonesis OX =861299 GN=queA PE=3 SV=1
MPERPGNRTSDFDFELPERLVAQTPLERRDASRLMVVDRAAGTIAHRTFADLPSLMAAGDALVLNTTRVFRARLLGRRDSGAPAEVMLLRAQDDDPAVFEAMVHPGAKLKPGRRVVVADDLEVEILGTSGRGTRFVRLHAHGDPMEAVERNGHVPLPPYIHRTDATADVQRYQTVYARERGSVAAPTAGLHFTPELLDAIAARGVRRVDVVLHVGAGTFKPVAVEDPAEHVMHSEWYAVSAAAAAAVNAARAAGGRVWAVGTTSARTLESAANDDGTVRAESRDTALFIRPGYRFKAVDRLITNFHLPRSTLLMLVAAMVGYDLAMHAYRVAVEEGYRFYSYGDAMVIL

SEQ ID NO: 66881 - protein, 342 aa, Gemmiger formicilis
  misc_feature (1)..(342): tr|A0A1T4WNC6|A0A1T4WNC6_9FIRM S-adenosylmethionine:tRN A ribosyltransferase-isomerase OS=Gemmiger formicilis O X=745368 GN=queA PE=3 SV=1
MLKKDFWYDLPKELIAQEPADPRDAARLMVLDRKNDKILHSVFHELPHYLEKGDLLVVNNSKVLPARLMGTKVPTGAVCELLLLRQVKGDTWECLARPGKRMQPGTKVEFGDGSLTAVVDETLPDGNKYVTFTYDTETLYEKLDEFGKMPLPPYITKQLEDQSQYQTVYAKELGSAAAPTAGLHFTPQLMDTIRSRGVNIAEVTLHVGLGTFRPVNEESIEDHQMHSEWYSVSEETAKLINETRAAGHRVIAVGTTSCRTLESVWAKYGKIVPCSGNTSIFIYPGIELKAIDGLITNFHLPESTLIMLIAAFYGYDKTMAAYKVAVEEKYRFFSFGDAMFIR

SEQ ID NO: 66882 - protein, 342 aa, Gemmiger sp.
  misc_feature (1)..(342): tr|A0A1Y3XQY1|A0A1Y3XQY1_9FIRM S-adenosylmethionine:tRN A ribosyltransferase-isomerase OS=Gemmiger sp. An50 OX= 1965639 GN=queA PE=3 SV=1
MLKKDFWFDLPQELIAQEPCSPRDAARLMCLDRSNDQIQHRIFRDLVDLLEPGDLLVVNNSKVLPARLIGQKEHTGAVCELLLLRQESNDVWECLARPGKRLKPGMRILFGDGSLVATIQETKEDGNKLVSFQYDTQTLYEKLDEFGKMPLPPYITKQLEDQSQYQTVYAKELGSAAAPTAGLHFTPELMQKLKEKGIGITEVTLHVGLGTFRPVKEDEIEDHLMHSEWYSVSEETARLINETKEAGHRVIAVGTTSCRTLESVAAKYGKIQACSGDTSIFLYPGCKFLCLDGLITNFHLPESTLIMLVSAFYGYEKTMAAYKTAVEQRYRFFSFGDAMLIL

SEQ ID NO: 66883 - protein, 341 aa, Gemmiger sp.
  misc_feature (1)..(341): tr|A0A1Y4TMW2|A0A1Y4TMW2_9FIRM S-adenosylmethionine:tRN A ribosyltransferase-isomerase OS=Gemmiger sp. An120 OX =1965549 GN=queA PE=3 SV=1
MLKKDFWFDLPPEQIAQEPAEPRDAARLMVLGRQDGHIEHRVFHDLPDLLHAGDLLVVNNSKVLPARLIGSKDTGAVCELLLLHQVKGDEWECLAKPGKRLKEGAVIHFGDGSLTARILQTLPDGNKRVEFSYDTATLYEKLDQFGRMPLPPYITKQLEDQSQYQTVYAKELGSAAAPTAGLHFTPELLDTLQKMGVGVTQVTLHVGLGTFRPVKEDDILDHVMHSEWYSVSEENAEAIRRTKANGGRVIAVGTTSCRTLEAVAEKYGEIRACCGDTDIFLYPGKPFRCIDGLITNFHLPESTLIMLVAGFCGYENTMHAYKVAVEEKYRFFSFGDAMLIL

SEQ ID NO: 66884 - protein, 348 aa, Gemmobacter aquatilis
  misc_feature (1)..(348): tr|A0A1H8BHN6|A0A1H8BHN6_9RHOB S-adenosylmethionine:tRN A ribosyltransferase-isomerase OS=Gemmobacter aquatilis OX=933059 GN=queA PE=3 SV=1
MKLSDFDFHLPEELIATRPAKPRPAARLLLAEGEAIRDLHVADLVDIFRPGDRLVLNNTKVIPARLTGQRQRQSAQGPVVAKVEITLLEPTAAGGWRALAKPLRKLAAGEVIVFSDQLSAEVVQKGETEVELRFNLAGDDFDAALAEAGQMPLPPYIAAKRAPDAQDRDDYQTVFARHSGAVAAPTASLHFDADLLAALRARGVEFTEVTLHVGAGTFLPVKVEDVTTHRMHAEWGEVTEAAAAAINATKAAGGRVIPVGTTALRLIESAGRGGQMQAWRGTTDIFIYPGFRFQIADALMTNFHLPKSTLLMLVSALMGKDRMMRVYDHAIRHGYRFFSYGDASLLIP

SEQ ID NO: 66885 - protein, 349 aa, Gemmobacter caeni
  misc_feature (1)..(349): tr|A0A2T6BBA3|A0A2T6BBA3_9RHOB S-adenosylmethionine:tRN A ribosyltransferase-isomerase OS=Gemmobacter caeni OX= 589035 GN=queA PE=3 SV=1
MKLADFDFDLPEHLIATRPVKPRPAARLLLAEGEAIRDLHVRDLVTLLRPGDRLVLNNTKVIPARLNGTRWRDTGQGRVSAKVEITLLEPVASGGWRALAKPLRKLAQGEVIVFSDQLSAQVSRKGETDLVLEFNLTGPDFDAALAAAGQMPLPPYIAAKRAPDAQDHQDYQTVFARHSGAVAAPTASLHFDAGLLAALRARGVEFTEVTLHVGAGTFLPVKVEDVTTHRMHAEWGEVTEAAVAEIAATKAAGGRVIPVGTTALRLIESAAQGGALAPWRGETDIFIYPGFTFRVADGLMTNFHLPRSTLMMLVAALMGRDRILRVYDHAISEGYRFFSYGDASLLLPG

SEQ ID NO: 66886 - protein, 349 aa, Gemmobacter intermedius
  misc_feature (1)..(349): tr|A0A444M9G9|A0A444M9G9_9RHOB S-adenosylmethionine:tRN A ribosyltransferase-isomerase OS=Gemmobacter intermedi us OX=1553448 GN=queA PE=3 SV=1
MKLDDFDYHLPEDLIATRPAKPRTAAKFLICEGDGMRDLHVSDLPSVLRPGDRLVLNNTKVIPARLTGRRLRESAQGLVEAKIEITLMEPQPDGAWRAMAKPLRKLKEGEVIRFGERLSASVLQKSDEDVVLSFDAEGDALEAALAEVGTMPLPPYIAAKRAPDAQDNDDYQTVFARVSGAVAAPTASLHFTPELMEELRAMGVGFTEVTLHVGAGTFLPVKVENIETHKMHAEWGQVTDKAAAEINATKAAGGRIIAVGTTALRLIESAATDEGLQPWTGETDIFIRPGFRFRVADGLMTNFHLPKSTLLMLVSALMTKERIDRIYAHAVEQRYRFFSYGDSSLLLPG

SEQ ID NO: 66887 - protein, 349 aa, Gemmobacter lutimaris
  misc_feature (1)..(349): tr|A0A398BSE9|A0A398BSE9_9RHOB S-adenosylmethionine:tRN A ribosyltransferase-isomerase OS=Gemmobacter lutimaris OX=2306023 GN=queA PE=3 SV=1
MKLSDFDFDLPEHLIATRPVKPRPAARLLLAEGDAIRDLHVRDLVTLLKPGDRLVLNNTKVIPARLSGTRWRESAQGRVSAKVEITLLEPVASGGWRALAKPLRKLAEGEEIVFSDRLAASVATKGDTDVVLEFNLTGPDFDAALAAAGQMPLPPYIAAKRAPDAQDHQDYQTVFARHSGAVAAPTASLHFDADLLAALRARGVDFTEVTLHVGAGTFLPVKVEDVTTHRMHAEWGEVSDAAVAEITATKAAGGRVIPVGTTALRLIESAAQGGKLAPWRGETDIFIYPGFTFRVADGLMTNFHLPKSTLMMLVSALMGRDRILRIYDHAISSGYRFFSYGDASLLLPG

SEQ ID NO: 66888 - protein, 350 aa, Gemmobacter megaterium
  misc_feature (1)..(350): tr|A0A1N7NTJ5|A0A1N7NTJ5_9RHOB S-adenosylmethionine:tRN A ribosyltransferase-isomerase OS=Gemmobacter megateriu m OX=1086013 GN=queA PE=3 SV=1
MKLDDFDYHLPEHLIATRPARPRSAARLLVARGDAIADAHVHDLCAALRPGDRLVLNNTKVIPARLTGRRLRNSAQGMVEAKVEITLMEPVPSGGWRALARPLRKLKEGERIVFSERLSALVVARGAEDVVLDFDLNGADFDAALAEAGTMPLPPYIAALRAPDAQDDQDYQPVFARHSGAVAAPTASLHFDEDLLAALAAMGVAFTEVTLHVGAGTFLPVKVDDVTTHRMHSEWGEVTERAAAEINATRAAGGRIIPVGTTALRLIESAAGDDGLMPWQGETDIFIYPGYRFRIADGLMTNFHLPKSTLLMLVSALMGKDRIDRIYAHAVAQGYRFFSYGDASLLLPKG

SEQ ID NO: 66889 - protein, 352 aa, Gemmobacter sp.
  misc_feature (1)..(352): tr|A0A4S3MQE2|A0A4S3MQE2_9RHOB S-adenosylmethionine:tRN A ribosyltransferase-isomerase OS=Gemmobacter sp. CC-PW -75 OX=1445661 GN=queA PE=3 SV=1
MKLSDFDFDLPEALIATRPARPRTSARLLLAEGDRFTDLHVRDLVDVFRKGDLLVLNNTRVIPARLTGQRTRQTGQGPVTAKVEITLLEAAAAGGWRALAKPLRKLDAGELIRFSDALSATVAEKGDTDLRLEFNLTGEDFDAALAEAGAMPLPPYIAARRAPDEQDRDDYQTVFARHAGAVAAPTASLHFDEALLRALADKGVEFAEVTLHVGAGTFLPVKVEDVTTHRMHAEWGEVTPEAAAAIAAAKARGGRVIPVGTTALRLIETAARDGQIAPWRGDTDIFIYPGFRFHVTDALMTNFHLPKSTLLMLVSALMGKDRIDRIYAHAVASGYRFFSYGDASLLIPESGR

SEQ ID NO: 66890 - protein, 347 aa, Gemmobacter sp.
  misc_feature (1)..(347): tr|A0A2S0UKT9|A0A2S0UKT9_9RHOB S-adenosylmethionine:tRN A ribosyltransferase-isomerase OS=Gemmobacter sp. HYN00 69 OX=2169400 GN=queA PE=3 SV=1
MKLSDFDFDLPDELIATRPARPRTHARLLLAQGDSIEDRHVYDLPDIFRPGDRLVLNNTRVIPARLTGTRARGEAVAKVEITLLEPQATGWRALAKPLRKVNAGEVIRFSDALSATVAEKSETDLRLVFNLTGDDFDAALAEAGAMPLPPYIAAKRAPDAQDRDDYQTVFARHAGAVAAPTASLHFDAALLQRLADMGVTFTEVTLHVGAGTFLPVKVEDVTTHRMHAEWGEVTPKAAAEINATKAAGGRIIPVGTTALRLIESAGRSGKVEPWVGPTDIFIYPGFRFQITDALMTNFHLPKSTLMMLVSALMGQDRIRRIYDHAVTSRYRFFSYGDSSLLVPPRGR

SEQ ID NO: 66891 - protein, 345 aa, Geoalkalibacter ferrihydriticus
  misc_feature (1)..(345): tr|A0A1G9PXP3|A0A1G9PXP3_9DELT S-adenosylmethionine:tRN A ribosyltransferase-isomerase OS=Geoalkalibacter ferri hydriticus OX=392333 GN=queA PE=3 SV=1
MHLNDFNFELPEHLIAQHPAQQRDGSRLMTLDRAAGSLHPGYFPDVVGAFRPGDLLVINDTRVIPARLLGRKVSGGRIEVFLVRRLVGEDETWLCLTRSSKPARPGTRVLFEGGLEGEVLGADEQEPGQRRVRFKVQGEFLQVLEKVGRMPLPPYISRPDHNLDRERYQTVFAQEPGAVAAPTAGLHFTEPILRQLREVGVDICPLTLHVGPGTFLPVRVDDIRDHRMHAEHYRVPVATAEAVNRAKQQGRRVFALGTTATRVLEFALDDAGRLLPGEGVSDLFIYPGFRFRVVDGLITNFHLPRSTLLMLVCAFAGRELTLEAYRRAVEEQFRFFSYGDCMLIL

SEQ ID NO: 66892 - protein, 345 aa, Geoalkalibacter ferrihydriticus; identical to SEQ ID NO: 66891
  misc_feature (1)..(345): tr|A0A0C2HUX9|A0A0C2HUX9_9DELT S-adenosylmethionine:tRN A ribosyltransferase-isomerase OS=Geoalkalibacter ferri hydriticus DSM 17813 OX=1121915 GN=queA PE=3 SV=1

SEQ ID NO: 66893 - protein, 343 aa, Geoalkalibacter subterraneus
  misc_feature (1)..(343): tr|A0A0B5FS33|A0A0B5FS33_9DELT S-adenosylmethionine:tRN A ribosyltransferase-isomerase OS=Geoalkalibacter subte rraneus OX=483547 GN=queA PE=3 SV=1
MQLSDFSFDLPDELIAQHPHQQRDGSRLMILDRGALSVSVGRFADLSQFFQAGDLLVVNDTRVIPARLLGHKESGGRIEVFLSRQVPLPGTVWQCLMRSSKTPRPGTRLFFDDNLRGVVLEGDQPPHRLIRFEFEGDFYQTLDRVGQVPLPPYIKRSPDEDDPERYQTVFGANPGAVAAPTAGLHFTRKTFDELQRIGVEIHALTLHVGLGTFLPVRVENVLEHRMHAEHFQVSHETAAAVNQARSEGRRIFALGTTTTRVLEYALDANGRLRAGEGASDLFIYPGFEFRMVDALITNFHLPQSTLLMLVSAFAGRDFVLNAYRQAVAEQFRFFSYGDCMLIL

SEQ ID NO: 66894 - protein, 342 aa, Geobacillus galactosidasius
  misc_feature (1)..(342): tr|A0A226QMA9|A0A226QMA9_9BACI S-adenosylmethionine:tRN A ribosyltransferase-isomerase OS=Geobacillus galactosi dasius OX=883812 GN=queA PE=3 SV=1
MKIDLFDFELPEELIAQTPLLNRDASRLMVLDKKTGEIHHETFRNILSYLHKGDCLVLNDTRVMPARLYGEKENTGANIEVLLLKQLEGDRWETLVKPAKRVKVGTEITFGDGRLKATCVDTLEHGGRILEFSYQGIFYEVLEQLGEMPLPPYIKEKLDDPERYQTVYAREVGSAAAPTAGLHFTEQLLDDIRAKGVHIAFITLHVGLGTFRPVNVENIEEHDMHAEFYQMTEKTARLLNEVRQQGGRIIAVGTTSTRTLETIASKHNGAFVAESGWTDIFIYPGYEFKAIDGLVTNFHLPKSTLIMLVSALAGRENILRAYNAAVKERYRFFSFGDAMLII

SEQ ID NO: 66895 - protein, 342 aa, Geobacillus kaustophilus; identical to SEQ ID NO: 63693
  misc_feature (1)..(342): tr|A0A4D7QGZ9|A0A4D7QGZ9_GEOKU S-adenosylmethionine:tRN A ribosyltransferase-isomerase OS=Geobacillus kaustophi lus NBRC 102445 OX=1220595 GN=queA PE=3 SV=1

SEQ ID NO: 66896 - protein, 342 aa, Geobacillus kaustophilus
  misc_feature (1)..(342): sp|Q5KWR3|QUEA_GEOKA S-adenosylmethionine:tRNA ribosylt ransferase-isomerase OS=Geobacillus kaustophilus (strai n HTA426) OX=235909 GN=queA PE=3 SV=1
MKVDLFDFHLPEELIAQTPLPDRAASRLMVLDKRTGAIRHETFRNIISYLNPGDCLVLNDTRVMPARLYGEKEETGGTVEVLLLKQLDGDRWETLVKPGKRVKPGTKLTFGEGKLEAVCLDTLEHGGRVLEFSYDGLFYEVLAELGEMPLPPYIKEKLDDPERYQTVYAREIGSAAAPTAGLHFTEELLDAIREKGVHIVFITLHVGLGTFRPVQVDDVEKHDMHAEFYQMSEETAETLNRVREQGGRIIAVGTTSTRTLETIAGKHNGRFVAESGWTDIFIYPGYEFKGIDGLVTNFHLPKSTLIMLVSALAGRENILHAYQVAVKERYRFFSFGDAMLII

SEQ ID NO: 66897 - protein, 342 aa, Geobacillus lituanicus
  misc_feature (1)..(342): tr|A0A223DUL9|A0A223DUL9_9BACI S-adenosylmethionine:tRN A ribosyltransferase-isomerase OS=Geobacillus lituanicu s OX=169283 GN=queA PE=3 SV=1
MKVDLFDFHLPEELIAQTPLPDRAASRLMVLDKRTGAIRHETFRNIISYLNPGDCLVLNDTRVMPARLYGEKAETGGTVEVLLLKQLDGDRWETLVKPGKRVKPGTKLTFGGGKLQAVCLDTLEHGGRVLEFSYDGLFYEVLAELGEMPLPPYIKEKLDDPERYQTVYAREIGSAAAPTAGLHFTEELLEDIRQKGVHIVFITLHVGLGTFRPVQVDEVEKHDMHAEFYQMSEETAETLNRVREQGGRIIAVGTTSTRTLETIAGKHNGRFVAESGWTDIFIYPGYEFKGIDGLVTNFHLPKSTLIMLVSALAGRENILHAYQVAVKERYRFFSFGDAMLII

SEQ ID NO: 66898 - protein, 342 aa, Geobacillus proteiniphilus
  misc_feature (1)..(342): tr|A0A1Q5TA34|A0A1Q5TA34_9BACI S-adenosylmethionine:tRN A ribosyltransferase-isomerase OS=Geobacillus proteinip hilus OX=860353 GN=queA PE=3 SV=1
MKVDLFDFHLPEELIAQTPLPDRAASRLMVLDKRTGAIRHETFRNIISYLNPGDCLVLNDTRVMPARLYGEKAETGGTVEVLLLKQLDGDRWETLVKPGKRVKPGTKLTFGEGKLQAVCLDTLEHGGRVLEFSYDGLFYEVLAELGEMPLPPYIKEKLDDPERYQTVYAREIGSAAAPTAGLHFTEELLDAIREKGVHIVFITLHVGLGTFRPVQVDEVEKHDMHAEFYQMSEETAETLNRVREQGGRIIAVGTTSTRTLETIAGKHNGRFVAESGWTDIFIYPGYEFKGIDGLVTNFHLPKSTLIMLVSALAGRENILHAYEVAVKERYRFFSFGDAMLII

SEQ ID NO: 66899 - protein, 342 aa, Geobacillus sp.
  misc_feature (1)..(342): tr|L8A0X3|L8A0X3_9BACI S-adenosylmethionine:tRNA ribosy ltransferase-isomerase OS=Geobacillus sp. GHH01 OX=1233 873 GN=queA PE=3 SV=1
MKVDLFDFHLPEELIAQTPLPDRAASRLMVLDKRTGAIRHETFRNIISYLNPGDCLVLNDTRVMPARLYGEKEETGGTVEVLLLKQLDGDRWETLVKPGKRVKPGTKLTFGGGKLEAVCLDTLEHGGRVLEFSYDGLFYEVLAELGEMPLPPYIKEKLDDPERYQTVYAREIGSAAAPTAGLHFTEELLDAIREKGVHIVFITLHVGLGTFRPVQVDEVEKHDMHAEFYQMSEETAETLNRVREQGGRIIAVGTTSTRTLETIAGKHNGRFVAESGWTDIFIYPGYEFKGIDGLVTNFHLPKSTLIMLVSALAGRENILHAYQVAVKERYRFFSFGDAMLII

SEQ ID NO: 66900 - protein, 342 aa, Geobacillus sp.
  misc_feature (1)..(342): sp|C5D5E6|QUEA_GEOSW S-adenosylmethionine:tRNA ribosylt ransferase-isomerase OS=Geobacillus sp. (strain WCH70) OX=471223 GN=queA PE=3 SV=1
MKIDLFDFDLPEELIAQTPLPNRDASRLMVLDKKTGEIRHETFRNILSYLHEGDCLVLNDTRVMPARLYGEKENTGANIEVLLLKQLEGDRWETLVKPAKRVKVGTEITFGDGRLKATCVDTLEHGGRILEFSYQGIFYEVLEQLGEMPLPPYIKEKLDDPERYQTVYAREVGSAAAPTAGLHFTEQLLDDIRAKGVHIAFITLHVGLGTFRPVSVENIEEHDMHAEFYQMTEETARLLNEVRQQGGRIIAVGTTSTRTLETIASKHNGAFVAESGWTDIFIYPGYEFKAIDGLVTNFHLPKSTLIMLVSALAGRENILRAYNAAVKERYRFFSFGDAMLII

SEQ ID NO: 66901 - protein, 342 aa, Geobacillus stearothermophilus; identical to SEQ ID NO: 66899
  misc_feature (1)..(342): tr|A0A0K2H650|A0A0K2H650_GEOSE S-adenosylmethionine:tRN A ribosyltransferase-isomerase OS=Geobacillus stearothe rmophilus 10 OX=272567 GN=queA PE=3 SV=1

SEQ ID NO: 66902 - protein, 342 aa, Geobacillus stearothermophilus
  misc_feature (1)..(342): tr|A0A250E1K6|A0A250E1K6_GEOSE S-adenosylmethionine:tRN A ribosyltransferase-isomerase OS=Geobacillus stearothe rmophilus OX=1422 GN=queA PE=3 SV=1
MKVDLFDFHLPEELIAQTPLPDRAASRLMVLDKRTGAIRHETFRNIISYLNPGDCLVLNDTRVMPARLYGEKAETGGTVEVLLLKQLDGDRWETLVKPGKRVKPGTKLTFGGGKLQAVCLDTLEHGGRVLEFSYDGLFYEVLAELGEMPLPPYIKEKLDDPERYQTVYAREIGSAAAPTAGLHFTEELLEAIREKGVHIVFITLHVGLGTFRPVQVDEVEKHDMHAEFYQMSEETAETLNRVREQGGRIIAVGTTSTRTLETIAGKHNGRFVAESGWTDIFIYPGYEFKGIDGLVTNFHLPKSTLIMLVSALAGREHILHAYEVAVKERYRFFSFGDAMLII

SEQ ID NO: 66903 - protein, 342 aa, Geobacillus subterraneus
  misc_feature (1)..(342): tr|A0A146CUS2|A0A146CUS2_9BACI S-adenosylmethionine:tRN A ribosyltransferase-isomerase OS=Geobacillus subterran eus OX=129338 GN=queA PE=3 SV=1
MRVDLFDFYLPEELIAQTPLPDRAASRLMVLDKRTGAIRHETFRNIISYLHPGDCLVLNDTRVMPARLYGEKAETGGTVEVLLLKPLDGDRWETLVKPGKRVKPGTKLVFGDGKLQAVCLDTLEHGGRVLEFSYEGLFYEVLAELGEMPLPPYIKERLDNPERYQTVYAREIGSAAAPTAGLHFTEELLDAIRERGVHIAFITLHVGLGTFRPVQVDDVEKHDMHAEFYQMSEETAAILNRVRADGGRIIAVGTTSTRTLETIAGKHNGRFVAESGWTDIFIYPGYEFKGIDGLVTNFHLPKSTLIMLVSALAGREHILHAYEVAVKERYRFFSFGDAMLIM

SEQ ID NO: 66904 - protein, 342 aa, Geobacillus thermocatenulatus
  misc_feature (1)..(342): tr|A0A226QBW8|A0A226QBW8_9BACI S-adenosylmethionine:tRN A ribosyltransferase-isomerase OS=Geobacillus thermocat enulatus OX=33938 GN=queA PE=3 SV=1
MKVDLFDFHLPEELIAQTPLPDRAASRLMVLDKRTGAIRHETFRNIISYLNPGDCLVLNDTRVMPARLYGEKEETGGTAEVLLLKQLDGDRWETLVKPGKRVKPGTKLTFGEGKLEAVCLDTLEHGGRVLEFSYDGLFYEVLAELGEMPLPPYIKEKLDDPERYQTVYAREIGSAAAPTAGLHFTEELLDAIREKGVHIVFITLHVGLGTFRPVQVDDVEKHDMHAEFYQMSEETAETLNRVREQGGRIIAVGTTSTRTLETIAGKHNGRFVAESGWTDIFIYPGYEFKGIDGLVTNFHLPKSTLIMLVSALAGRENILHAYQVAVKERYRFFSFGDAMLII

SEQ ID NO: 66905 - protein, 342 aa, Geobacillus thermodenitrificans
  misc_feature (1)..(342): sp|A4IRB0|QUEA_GEOTN S-adenosylmethionine:tRNA ribosylt ransferase-isomerase OS=Geobacillus thermodenitrificans (strain NG80-2) OX=420246 GN=queA PE=3 SV=1
MKVDLFDFHLPEELIAQTPLPDRAASRLMVLDKQTGAIRHETFRNIISYLHPGDCLVLNDTRVMPARLYGEKAETGGMVEVLLLKQLDGDRWETLVKPGKRVRPGTKLVFGGGKLQAVCLDTLEHGGRVLEFSYEGLFYQVLAELGEMPLPPYIKEKLDNPERYQTVYAREIGSAAAPTAGLHFTEELLDAIREKGIHIAFITLHVGLGTFRPVQVDDIEKHNMHAEFYQMSEETAAILNRVRANGGRIIAVGTTSTRTLETIANRHDGRFAAESGWTDIFIYPGYEFKAIDGLVTNFHLPKSTLIMLVSAFAGREHILHAYEVAVKEQYRFFSFGDAMLII

SEQ ID NO: 66906 - protein, 344 aa, Geobacillus thermodenitrificans
  misc_feature (1)..(344): tr|A0A1W6VX88|A0A1W6VX88_GEOTD S-adenosylmethionine:tRN A ribosyltransferase-isomerase OS=Geobacillus thermoden itrificans OX=33940 GN=queA_2 PE=3 SV=1
MKVSELDFYLPPKLLARKPREIDGQSRSDSRMLVIFKDNGQINHSFVKNIGDYLEEGDLIVLNNSKTMNAVFKGRSIDGAFLEIALCSQIKPKTWLASVSTPNVEKYLNVEFKVSDELHFIVRSKSKKINNFYVVDFVYDGELYELSVKYGRPIISNYTERQWDLKYYQNEFATIAGSVEMPAAGRHFTNELLSSLKRKGINIAYITLHTGLSSLTIEEENIEDHVMYEEYYSISKETADLINSTKMRGKKVIAIGTTVTRTLESAVDVNNRVQSKTDWTDLYIYPGYQFKIVDGILTNFHGPRTSRIALAAAFTKPEYLMNAYQEAIAEGYLFYEFGDATLII

SEQ ID NO: 66907 - protein, 342 aa, Geobacillus thermoleovorans; identical to SEQ ID NO: 66896
  misc_feature (1)..(342): tr|G8N3I2|G8N3I2_GEOTH S-adenosylmethionine:tRNA ribosy ltransferase-isomerase OS=Geobacillus thermoleovorans C CB_US3_UF5 OX=1111068 GN=queA PE=3 SV=1

SEQ ID NO: 66908 - protein, 338 aa, Geobacillus thermoleovorans
  misc_feature (1)..(338): tr|A0A098KZP7|A0A098KZP7_GEOTH S-adenosylmethionine:tRN A ribosyltransferase-isomerase OS=Geobacillus thermoleo vorans B23 OX=1406857 GN=queA PE=3 SV=1
MFDFHLPEELIAQTPLPDRAASRLMVLDKRTGAIRHETFRNIISYLNPGDCLVLNDTRVMPARLYGEKEETGGTVEVLLLKQLDGDRWETLVKPGKRVKPGTKLTFGEGKLEAVCLDTLEHGGRVLEFSYDGLFYEVLAELGEMPLPPYIKEKLDDPERYQTVYAREIGSAAAPTAGLHFTEELLDAIREKGVHIVFITLHVGLGTFRPVQVDDVEKHDMHAEFYQMSEETAETLNRVREQGGRIIAVGTTSTRTLETIAGKHNGRFVAESGWTDIFIYPGYEFKGIDGLVTNFHLPKSTLIMLVSALAGRENILHAYQVAVKERYRFFSFGDAMLII

SEQ ID NO: 66909 - protein, 342 aa, Geobacillus zalihae
  misc_feature (1)..(342): tr|A0A1V9CK42|A0A1V9CK42_9BACI S-adenosylmethionine:tRN A ribosyltransferase-isomerase OS=Geobacillus zalihae O X=213419 GN=queA PE=3 SV=1
MKVDLFDFHLPEELIAQTPLPDRAASRLMVLDKRTGAIRHETFRNIISYLNPGDCLVLNDTRVMPARLYGEKEETGGTVEVLLLKQLDGDRWETLVKPGKRVKPGTKLTFGEGKLEAVCLDTLEHGGRVLEFSYDGLFYEVLAELGEMPLPPYIKEKLDDPERYQTVYAREIGSAAAPTAGLHFTEELLDAIREKGVHIVFITLHVGLGTFRPVQVDDVEKHDMHAEFYQMSEETAETLNRVRDQGGRIIAVGTTSTRTLETIAGKHNGRFVAESGWTDIFIYPGYEFKGIDGLVTNFHLPKSTLIMLVSALAGRENILHAYQVAVKERYRFFSFGDAMLII

SEQ ID NO: 66910 - protein, 343 aa, Geobacter argillaceus
  misc_feature (1)..(343): tr|A0A562WQX2|A0A562WQX2_9DELT S-adenosylmethionine:tRN A ribosyltransferase-isomerase OS=Geobacter argillaceus OX=345631 GN=queA PE=3 SV=1
MRLDDFDYELPAELIAQEPLARRDTARLMLLDRASGALDERTVSAFPDLLNSGDLLVLNDTRVIPARLLGRKESGGRVEIFLVRRTPEEGECWLCLLRSSKPSRPGTCILLADGMTATVTAQVDEGTWTVSFAPAEAFSDWLERHGQMPLPPYIRRGAGAHDRQRYQTVFARQAGAVAAPTAGLHFTPELLDAVRSRGVTVATLTLHVGLGTFQPVRVDNILEHRMHREFYRIPEETAREVARRKREGGRIVTVGTTTTRALEHASREDGTVRAGAGEADIFIYPGYRFRVVDALLTNFHLPKSTLLMLVSAFAGKDMVFAAYEEAIRRRFRFFSYGDAMFIY

SEQ ID NO: 66911 - protein, 341 aa, Geobacter bemidjiensis
  misc_feature (1)..(341): sp|B5EFX9|QUEA_GEOBB S-adenosylmethionine:tRNA ribosylt ransferase-isomerase OS=Geobacter bemidjiensis (strain Bem / ATCC BAA-1014 / DSM 16622) OX=404380 GN=queA PE=3 SV=1
MFLSDFDYELPPELIAQHPASRRDASRLLTLDRLSGAIGEATVASIAAQFLPGDLLVLNDTRVIPARLHGHKESGGAVEIFLVRRVAGEPECWSCLIKASKSPKNGCRVVFPGGVTATVLERDGGDWRVLFEGSDDFMAWLEQTGSMPLPPYIKRAPEGEDLERYQTVFAREKGAVAAPTAGLHFTPAILDEIRGRGVEIVSVTLHVGLGTFMPIRVEDLSEHTMHRELYRIPQETAAAIRRTKERGGRVVALGTTSLRALEHAAASGEVAAGEREADIFILPGYRFRVVDALITNFHLPKSTLFMLVCAFAGKEAMLEAYREAVSRRFRFFSYGDAMFIG

SEQ ID NO: 66912 - protein, 343 aa, Geobacter daltonii
  misc_feature (1)..(343): sp|B9M5N6|QUEA_GEODF S-adenosylmethionine:tRNA ribosylt ransferase-isomerase OS=Geobacter daltonii (strain DSM 22248 / JCM 15807 / FRC-32) OX=316067 GN=queA PE=3 SV=1
MQLKDFNYHLPPELIAQEPAHRRESARLMTLDRKSGEIGEGVVADIAEYFVAGDLLVINDTKVIPARLLGRKETGGKAEVFLVRRRDEAGQVWQCLIKCSKSPAPGSLILLSEGVTARIVERSEHDTWIVSFSPEEGFLDRLEMIGSMPLPPYIHRPANVIDGERYQTVFARERGAVAAPTAGLHFTESLLQKIRARGVDILPLTLHVGLGTFMPVRVKDLSEHRMHREYYRIPETTAKAVTDRKKAGKRVIALGTTTTRALEHAAAEDGSLDAKEGEADIFIVPGYAFKTVDALITNFHLPESTLLMLVSAFAGRDRLFNAYAEAVRRKFRFFSYGDAMFIY

SEQ ID NO: 66913 - protein, 341 aa, Geobacter lovleyi
  misc_feature (1)..(341): sp|B3E2S1|QUEA_GEOLS S-adenosylmethionine:tRNA ribosylt ransferase-isomerase OS=Geobacter lovleyi (strain ATCC BAA-1151 / DSM 17278 / SZ) OX=398767 GN=queA PE=3 SV=1
MLVKEYSFTLPDELIARYPANQRDGSRLMVLDRQTAARSEIAFSQIVEWLRPDDLLVLNDTKVIPARLFGQKETGGRIELFLVEPVGDACWRCLLRSSKRCRTGQSIRLAEGVTAEVVEQLGEQDWLIRFHGSDDFESWLQRVGQMPIPPYLNRESEELDRVRYQTVYASESGAVAAPTAGLHFTQELLERIQEKGIRLARVTLHVGLGTFQPVRVERVQDHVIHRERYRLPSETAAAVTETRARGGRVIAVGTTACRTLEYAADNAGHLQAGQGEADIFIYPGYRFKVVDALLTNFHLPESTLLMLVSAFGGKEFILSAYEAAVNRQFRFYSYGDAMLIV

SEQ ID NO: 66914 - protein, 343 aa, Geobacter metallireducens
  misc_feature (1)..(343): sp|Q39XD1|QUEA_GEOMG S-adenosylmethionine:tRNA ribosylt ransferase-isomerase OS=Geobacter metallireducens (stra in GS-15 / ATCC 53774 / DSM 7210) OX=269799 GN=queA PE= 3 SV=1
MRVDDFDYELPPELIAQEPLDRRDATRLMTVDRLKGEVGEVSFREITRLFRPGDLLVVNDTRVIPARFFGVKESGGRVEVFLERRLAAVGERWQCLLRSSKPSRPGTRIVLAEGVSAEVIGRSDGDTWCVSFTPVTGFDEWLERNGAMPLPPYIRRSAADADRERYQTVFSRQRGAVAAPTAGLHFTPELLDELRERGVEIATLTLHVGLGTFMPIRVERVEEHRMHRERYIIPSATADAVNARKGGKGRVIALGTTTCRTLEHAARDDGRVAAGAGETGIFIYPGYHFKTVDALITNFHLPKSTLLMLVSAFAGKELLFRAYHEAVTRRFRFFSYGDAMFVH

SEQ ID NO: 66915 - protein, 341 aa, Geobacter pelophilus
  misc_feature (1)..(341): tr|A0A1W7QQD9|A0A1W7QQD9_9DELT S-adenosylmethionine:tRN A ribosyltransferase-isomerase OS=Geobacter pelophilus OX=60036 GN=queA PE=3 SV=1
MFLSDFDYELPPELIAQHPASRRDGARLLTLERSSGAIGEGTVAGIAAHFLPGDLLVLNDTRVIPARLHGNKESGGGVEIFLVRRVPGEPECWSCLIKASKSPKDGCRVILPGGVTATVLGRDGGDWRVLFEGSPDFMSWLEQTGSMPLPPYIKRAPEGEDLERYQTVFAREKGAVAAPTAGLHFTPAILDEIRERGVEIAPVTLHVGLGTFMPVRVEDLSQHTMHRELYRIPQETAAAIRRTKERGGRVVALGTTSLRALEHAAASGELEAGEREADIFILPGYRFRVVDALITNFHLPKSTLFMLVCAFAGKEAMLKAYREAVSRRFRFFSYGDAMFIG

SEQ ID NO: 66916 - protein, 343 aa, Geobacter pickeringii
  misc_feature (1)..(343): tr|A0A0B5BEU7|A0A0B5BEU7_9DELT S-adenosylmethionine:tRN A ribosyltransferase-isomerase OS=Geobacter pickeringii OX=345632 GN=queA PE=3 SV=1
MLVDDFAYPLPPELVAQEPLPRRDATRLMTVDRARGEIGERPFREIAALFAPGDLLVVNDTRVIPARLHGRKESGGKVEIFLVRRLPAEGERWLCLLRSSKPSRPGTVVSLAEGVTATVVSRVDGDTWEVAFSPDEGFDAWLDRVGAMPLPPYIRRESGDYDRERYQTVFACNRGAVAAPTAGLHMTDDLLAELRGGGVEVAPLTLHVGLGTFMPIRVKSIEEHRMHRERYAIPESTARAVAERKRNGGRVVALGTTVCRTLEQAAAADGTVPAGEGEAGIFIYPGYRFKTVDALITNFHLPKSTLLMLVSAFAGKELLFRAYGEAVARRFRFFSYGDAMFVS

SEQ ID NO: 66917 - protein, 343 aa, Geobacter soli
  misc_feature (1)..(343): tr|A0A0C1QTH0|A0A0C1QTH0_9DELT S-adenosylmethionine:tRN A ribosyltransferase-isomerase OS=Geobacter soli OX=151 0391 GN=queA PE=3 SV=1
MLVTEFDYHLPPELIAQEPLGQRDATRLMTVERDGGRIGEIPFRGIAGLLRPGDLLVINDTRVIPARLHGRKESGGKTEIFLVQRRPGDDETWHCLIRSSKPPRPGVTVLLPEGVRAVVREPGEGETWLVSFTPGEGFQEWLDRNGAMPLPPYIRRGADAADRDRYQTVFARNRGAVAAPTAGLHMTAGLLDEIAGRGVRVVPVTLHVGLGTFMPIRVERLEDHRMHRERYHISPATAEAVNGCRRAGGRVIALGTTVCRTLEQAAAADGTIAAGEGEADIFIYPGYRFKAVDALITNFHLPKSTLLMLVSAFAGRDLLFRAYGEAVAGRFRFFSYGDAMFIF

SEQ ID NO: 66918 - protein, 342 aa, Geobacter sp.
  misc_feature (1)..(342): tr|A0A212PD44|A0A212PD44_9DELT S-adenosylmethionine:tRN A ribosyltransferase-isomerase OS=Geobacter sp. DSM 973 6 OX=1277350 GN=queA PE=3 SV=1
MHLDTFDYQLPPELIAQEPLSRRDAARLLVLRRSHGTVTETVFSGIVSLLRPGDLLVLNDTRVIPARLIGSKESGGRTEIFLVRRLAGPGEVWQCLLRASKSPRPGQMIRLPHGVTAQVVERQDETWRVAFSPEEGFEEWLDRAGQMPLPPYIRRSSADLDQERYQTVFGRNRGAVAAPTAGLHMTPELLNELVARGIAIASVTLHVGLGTFLPVRVDDIREHRMHRELCSIPIATADAVAETRRKGGRVVALGTTVCRALEHASDEAGVLVPGETEADIFIYPGYRFRIVDALITNFHLPKSTLLMLVSAFAGKDFLLEAYAQAVERQFRFFSYGDAMFIE

SEQ ID NO: 66919 - protein, 343 aa, Geobacter sp.
  misc_feature (1)..(343): tr|A0A399I3N2|A0A399I3N2_9DELT S-adenosylmethionine:tRN A ribosyltransferase-isomerase OS=Geobacter sp. OX=4661 0 GN=queA PE=3 SV=1
MDLEEFDFHLPSELIAQVPAARRDAARLMTLDRTTGKIGETVFSEIQGLFRPGDLLVVNDTRVIPARLLGCKESGGRVEVFLVRRVPGDRELWHCLIRASKSPKPGTVLLLAEGMTARVESRGEGDIWQVAFAPVEDFSPWLERNGSMPLPPYIRRAAEEHDRERYQTVFARAKGAVAAPTAGLHMTPELFAALAADGVEIATVTLHVGLGTFMPIRVENLDDHRMHREEYIIPEKTALAISQRKRDGGRVVALGTTTTRALEHAAGDDGTVTAGAGEADIFIRPGYNFKVIDALITNFHLPKSTLLMLVSAFAGKDLLLEAYGEAVRRQFRFYSYGDAMMIW

SEQ ID NO: 66920 - protein, 343 aa, Geobacter sulfurreducens
  misc_feature (1)..(343): sp|Q749X2|QUEA_GEOSL S-adenosylmethionine:tRNA ribosylt ransferase-isomerase OS=Geobacter sulfurreducens (strai n ATCC 51573 / DSM 12127 / PCA) OX=243231 GN=queA PE=3 SV=1
MLVTEFDYHLPPELIAQEPLVQRDATRLMTVERDGGGIGEIPFRGIVDLFRPGDLLVINDTRVIPARLLGRKESGGKTEIFLVRRRPGDHETWHCLIRSSKPPRPGVTVLLPEGVRAVVREPGDGETWLVSFTPGEGFQEWLDRNGAMPLPPYIRREADAADRDRYQTVFARNRGAVAAPTAGLHMTAGLLDEIAGRGVRVAPVTLHVGLGTFMPIRVERLEDHRMHRERYHIPPATADAINGCRREGGRVIALGTTVCRTLEQAAAADGTIAAGEGEADIFIYPGYRFKAVDALITNFHLPKSTLLMLVSAFAGRDLLFRAYGEAVARRFRFFSYGDAMFIF

SEQ ID NO: 66921 - protein, 343 aa, Geobacter sulfurreducens; identical to SEQ ID NO: 66920
  misc_feature (1)..(343): tr|A0A0D5N4Z9|A0A0D5N4Z9_GEOSN S-adenosylmethionine:tRN A ribosyltransferase-isomerase OS=Geobacter sulfurreduc ens OX=35554 GN=queA PE=3 SV=1

SEQ ID NO: 66922 - protein, 341 aa, Geobacter thiogenes
  misc_feature (1)..(341): tr|A0A1T4RQ72|A0A1T4RQ72_9DELT S-adenosylmethionine:tRN A ribosyltransferase-isomerase OS=Geobacter thiogenes O X=115783 GN=queA PE=3 SV=1
MLVSDFSFELPDELIARYPMPQRDDSRLLVLERQQHTLTEARFKQITDWLQPDDLLVVNDTRVIPARLFGNKETGGRVELFLVEPQPDACWRCLLRASKACKLGQMIILSQGVTARVVDRLGEQDWLIRFHGTDDFDGWLQQIGQMPIPPYLNRPSEELDRERYQTVYAAESGAVAAPTAGLHFTPQLLDRIKQKGVQLAAVTLHVGLGTFQPVRVERVQDHIIHRERYSIPPETAAAVAATKQRGGRVIAVGTTACRTLEYAADAAGQVHAGKGEADIFIYPGYGFKVVDALITNFHLPESTLLMLVSAFAGQKFVLDAYRRAVQEKYRFYSYGDAMLIV

SEQ ID NO: 66923 - protein, 343 aa, Geobacter uraniireducens
  misc_feature (1)..(343): sp|A5GEQ5|QUEA_GEOUR S-adenosylmethionine:tRNA ribosylt ransferase-isomerase OS=Geobacter uraniireducens (strai n Rf4) OX=351605 GN=queA PE=3 SV=1
MQLNDFDYYLPTELIAQQPAQNRDASRLMTLDRVNGELNETIISEIAALFRDGDLLVINDTRVIPARLLGKKESGGRVEVFLVRRLLEPGEVWQCLIKASKSPKPGSLIILSEGVVARVLERSELDTWAVSFSPVEGFLDRLERIGSMPLPPYIRRSAGDDDRERYQTVFARAKGAVAAPTAGLHFTDALLQKIRQQGVEIAPLTLHVGLGTFMPVRVDDLKDHRMHREYYFIPEATARAVNARKNDGGRVVALGTTTTRALEHAAAGNGSVQPGEGEADIFICPGYTFKVVDALITNFHLPKSTLLMLVSALAGKDRLFNAYNEAVNRNFRFFSYGDAMFIY

SEQ ID NO: 66924 - protein, 342 aa, Geobacteraceae bacterium
  misc_feature (1)..(342): tr|A0A1G0M5S7|A0A1G0M5S7_9DELT S-adenosylmethionine:tRN A ribosyltransferase-isomerase OS=Geobacteraceae bacter ium GWC2_55_20 OX=1798317 GN=queA PE=3 SV=1
MLVKDFTFDLPAELIARYPAPERDGSRLMLLNRETGAIAETVFRDIGQYLDSGDLLVMNDTRVIPARLFGTKLSGGKVEVFLLRRLVDSDQWECMLRGSKKFRPGQQILFGSGMTAIVNSRCGTENWLIDFSGCEPFDAWLDREGHIPLPPYLQREDCASDRERYQTVVARNSGAVAAPTAGLHFTAGLLDQLAARGIATAFLTLHTGLGTFQPVRVERVQEHRIHCERYSIPPETVAVIRRTKAAGGRVIAVGTTTARTLEYSAGLAGGLDAGAGEADIFIYPGYRFKVVDALITNFHLPESTLLMLVSAFAGREFVLDAYKNAVACGFRFYSYGDAMFIY

SEQ ID NO: 66925 - protein, 343 aa, Geobacteraceae bacterium
  misc_feature (1)..(343): tr|A0A1G0MQP4|A0A1G0MQP4_9DELT S-adenosylmethionine:tRN A ribosyltransferase-isomerase OS=Geobacteraceae bacter ium GWC2_53_11 OX=1798316 GN=queA PE=3 SV=1
MLVKDFTFHLPQDLIARHPSAQRDGSRLMLLDRSSGAIAEDTFNHLDAYLKPGDLLVMNDTRVIPARLFGRKPTGGKVEIFLLRRVAGTHEQWECLCKSSKSLQTGQEVQLEAGMVATVLSRSDSDNWLVGFSGNEPFEIWLEREGHMPLPPYLQRDDSTVDRERYQTVIAREPGAVAAPTAGLHFTHEMLALLASQGVNTAFLTLHTGLGTFQPVRVERVEDHQIHTERYVIPAETAEAVNRTKAAGGRVIAVGTTSARTLEYSALQSGHVVAGSGEANIYIYPGYRFNVIDALITNFHLPESTLLMLVSALAGREFVLEAYREAVQRGFRFYSYGDAMFIS

SEQ ID NO: 66926 - protein, 339 aa, Geodermatophilus africanus
  misc_feature (1)..(339): tr|A0A1H3GPC3|A0A1H3GPC3_9ACTN S-adenosylmethionine:tRN A ribosyltransferase-isomerase OS=Geodermatophilus afri canus OX=1137993 GN=SAMN05660209_01957 PE=3 SV=1
MSALAMGAEAAAPPERRGLARDQVRLMAVRPDGITETTFRDLPEMLEPGDLVVVNTSATLPARLDVRRADGVRAPLHVATTLDDGDWVVELRRPDNDGPDRGVEPGTVLDLPGGVRLRLVEGFPAPARASRLWRARPDPAVPAVGHLQRHGTPIRYGYLGAAVPLADAQNVYATEPGSAENASAGRPFTDRVLVRLMARGVPVVPVVLHAGVSSPELHEPPAPERYRVPEVTARLVNATRAAGSRVVAVGTTVTRALETATGEDGVTRAAAGWTDLVLGPDRPARVVTGLLTGLHAPDASHLLLLEAVAGREPVDRAYARAVTGGYLWHEFGDTMLFLP

SEQ ID NO: 66927 - protein, 345 aa, Geodermatophilus amargosae
  misc_feature (1)..(345): tr|A0A1I6XB64|A0A1I6XB64_9ACTN S-adenosylmethionine:tRN A ribosyltransferase-isomerase OS=Geodermatophilus amar gosae OX=1296565 GN=SAMN05660657_00338 PE=3 SV=1
MTAVAVSTGAVPMGAEATEPPERRGLTRDGVRLMAVRPGSLTHARFTDLPGLLEPGDLVVVNTSATLPARLTARRADGTGTPVHVSTTLDDGTWVVEVRRPGDDGPETGLEPGATLTLPGGVRLVLRDGFPDPARPGRLWRAAADPAVAVPAYLARHGEPVRYRHLRGPLVLDDVQNVYATEPGSAENASAGRPFTDRLLVRLLARGVPVVPLVLHAGVSSPELHEPPAPERYRVPEVTARLVTATRAAGQRVVAIGTTVTRALETVTGEDGVTRPGEGWTDLVLGPDRPVRAVTGLVTGLHEPEASHLLLLEAVAGRDLVERAYAAAAGAYLWHEFGDSMLFLP

SEQ ID NO: 66928 - protein, 340 aa, Geodermatophilus aquaeductus
  misc_feature (1)..(340): tr|A0A521FRH0|A0A521FRH0_9ACTN S-adenosylmethionine:tRN A ribosyltransferase-isomerase OS=Geodermatophilus aqua eductus OX=1564161 GN=SAMN06273567_11453 PE=3 SV=1
MTALAVPMGAEATEPPERRGLSRDGVRLMAVRPGSLTHARFADLPGLLEPGDLVVVNTSATLPARLTARRADGTTTPVHVSTTLDDGTWVVEVRRPGDDGPESGLEPGAALDLPGGVRLVLRGGFPDPARPGRLWRAVATPAVAVPAYLARHGEPVRYRHLRGPLALGDVQNVYATEPGSAENASAGRPFTDRLLVRLMARGVPVVPLVLHAGVSSPELHEPPAPERYRVPEVTARLVTATRAAGRRVVAVGTTVTRALETATGDDGVTRPGEGWTDLVLGPDRPVRAVTGLVTGLHEPEASHLLLLEAVAGRDLVRRAYDAAAGTYLWHEFGDSMLFLP

SEQ ID NO: 66929 - protein, 341 aa, Geodermatophilus dictyosporus
  misc_feature (1)..(341): tr|A0A1I5N5L9|A0A1I5N5L9_9ACTN S-adenosylmethionine:tRN A ribosyltransferase-isomerase OS=Geodermatophilus dict yosporus OX=1523247 GN=SAMN05660464_2301 PE=3 SV=1
MTAFALPPGSEATEPPEHRGLSRDGVRLMAVRPGSTTAARFSDLPGLLEPGDLLVVNTSATLAARLEARRADGRVVPLHVSTALDDGSWVVEVRRPGNDGPETGLEPGTALDLPGGVRLRLRTGFPDPARPSRLWRARVEPAVALVPYLTEHGQPVRYGYLRAPVRLADAQNVYATEPGSAENASAGRPFTDRLLVRLLARGVPVVPLVLHAGVSSPELHEPPAPERYRVPEVTARLVNATRAAGRRVVAVGTTATRALETVTGEDGVTRPGEGWTDLVLGPDRAARAVTGLVTGLHAPEASHLLLLQAVAGADLVAAAYRVATADGWLWHEYGDSMLFLP

SEQ ID NO: 66930 - protein, 346 aa, Geodermatophilus nigrescens
  misc_feature (1)..(346): tr|A0A1M5DFA6|A0A1M5DFA6_9ACTN S-adenosylmethionine:tRN A ribosyltransferase-isomerase OS=Geodermatophilus nigr escens OX=1070870 GN=SAMN05444351_0347 PE=3 SV=1
MTAAAASHAPVPMGSVATGPPERRGLTRDGVRLLAVRPGSLTSARFRDLPDLLEPGDLLVVNTSATLPARLTARRADGSPTPLHVSTTLDDGSWVVEVRRPDDDGPETRLEPGTALYLPGGVRLVLRAGFPDPGTPERLWRAHATPAVAVPAYLARHGEPVRYGYLTAPVALADVRNVYATEPGSAENASAGRPFTDRLLVRLMARGVPVVPLVLHAGVSSPEVYEPSAPERYRVPEVTARLVTATRDAGRRVVAVGTTVTRALETVTGEDGVTRPGEGWTDLVLGPERPARAVTGLLTGLHAPEASHLQLLRSVAGGDLVARAYRAAAEGGYLWHEFGDSMLFLP

SEQ ID NO: 66931 - protein, 344 aa, Geodermatophilus normandii
  misc_feature (1)..(344): tr|A0A317QFF3|A0A317QFF3_9ACTN S-adenosylmethionine:tRN A ribosyltransferase-isomerase OS=Geodermatophilus norm andii OX=1137989 GN=JD79_00816 PE=3 SV=1
MTATTSRGAVPMGAEATEPPERRGTTRDGVRLMAVRPGSLTHARFSDLPGLLDPGDLVVVNTSATLPARLTARRADGTTTPVHLSTTLDDGTWVVEVRRPGDDGPETGLEPGAALTLPGGVRLVLRAGFPDPARPGRLWRAAATPAVAVPAYLARHGAPVRYRHLRGPLALDDVQNVYATEPGSAENASAGRPFTDRLLVRLVARGIPVVPLVLHAGVSSPELHEPPAPERYRVPEVTARLVTATRAAGRRVVAVGTTVTRALETVTGTDGVTRPGEGWTDLVLGPGRPVRAVTGLVTGLHEPEASHLLLLEAVAGRDPVERAYAAAAGTYLWHEFGDSMLFLP

SEQ ID NO: 66932 - protein, 341 aa, Geodermatophilus obscurus
  misc_feature (1)..(341): tr|A0A1I5EKF6|A0A1I5EKF6_9ACTN S-adenosylmethionine:tRN A ribosyltransferase-isomerase OS=Geodermatophilus obsc urus OX=1861 GN=SAMN05660359_01522 PE=3 SV=1
MTALTVPVGAAATVPPERRGLARDGVRLMAVRPHVLTSARFSDLPDLLEPGDLVVVNTSGTLPARLTARRTDGATTPVHVSTTLDDGAWVVEVRRPTDDGPETGVEPGTALDLPGGVRLVLRAGFPDPGRPGRLWRAHASPAVSVPGYLARYGRPVRYGHLGAAVDLADVQNVYATEPGSAENASAGRPFTERLLVRLVARGVPVVPLVLHAGVSSPELHEPPAPERYRVPEVTARLVTATRAAGRRVVAVGTTVTRALETVTGEDGVTRPGEGWTDLVLGPDRPARAVTGLVTGLHEPEASHLLLLQAVAGPDLVARAYDAAVAGGYLWHEFGDSMLFLP

SEQ ID NO: 66933 - protein, 338 aa, Geodermatophilus obscurus
  misc_feature (1)..(338): tr|A0A1M7V0T6|A0A1M7V0T6_9ACTN S-adenosylmethionine:tRN A ribosyltransferase-isomerase OS=Geodermatophilus obsc urus OX=1861 GN=SAMN05660350_04882 PE=3 SV=1
MTTFAMGAEASAPPERRGLARDGVRLMAVRPGGITETTFRDLPELLEPGDLVVNTSATLPARLDVRRADGIRAPLHVSTTLDDGDWVVELRRPDNDGPDRGVEPGTVLDLPGGVRLRLLEGFPDPARASRLWRARPDPDVPAAELLRRHGTPIRYGHLGAAVPLADAQNVYATEPGSAENASAGRPFTDRVLVRLMARGVPVVPVVLHAGVSSPELHEPPMAERYRVPEVTARLVDATREAGRRVVAVGTTVTRALETATGEDGVTRPAAGWTDLVLGPDRPARAVTGLLTGLHAPDASHLLLLEAVAGRELVDEAYARAAASGYLWHEFGDTMLFLP

SEQ ID NO: 66934 - protein, 339 aa, Geodermatophilus poikilotrophus
  misc_feature (1)..(339): tr|A0A1I0F647|A0A1I0F647_9ACTN S-adenosylmethionine:tRN A ribosyltransferase-isomerase OS=Geodermatophilus poik ilotrophus OX=1333667 GN=SAMN04488546_2737 PE=3 SV=1
MTAVAMGAEASAPPERRGLARDGVRLMAVRPGGLTETTFRDLPELLEPGDLVVVNTSATLPARLDVRRADGVGAPLHVSTTLDDGDWVVELRRPHNDGPDRGVEPGTVLDLPGGVRLRLLEGFPTPARASRLWRARPDPDVPAAELLRRHGTPIRYGHLSAAVPLADAQNVYATDPGSAENASAGRPFTDRVLVRLMARGVPVVPVVLHAGVSSPELHEPPVPERYRVPEVTARLVNATRAAGSRVVAVGTTVTRALETATGEDGVTRTAAGWTDLVLGPDRPARVVTGLLTGLHAPDASHLLLLEAVAGRELVDEAYARAAAGGYLWHEFGDTMLFLP

SEQ ID NO: 66935 - protein, 342 aa, Geodermatophilus ruber
  misc_feature (1)..(342): tr|A0A1I4D7C3|A0A1I4D7C3_9ACTN S-adenosylmethionine:tRN A ribosyltransferase-isomerase OS=Geodermatophilus rube r OX=504800 GN=SAMN04488085_104250 PE=3 SV=1
MTVTFPLPPDREAPAPPEHRGLPRDGVRLMTVRPGGIAEGVFHDLPDHLEPGDLVVVNTSAPLPARLDVRRADGVLTPLHVSTSLDDGEWVVEVRRPDNDGPDRGVEPGTELALPGGVRLRLLAGFPDPTRPGRLWRARPTPATPAPEHLRRYGQPIRYGYLRGAVPLAAAQNVYATEPGSAENASAGRPFTEHLLVRLMARGIPVVPVVLHAGVSSPELHEPPAPERFRVPEGTARLVRSTREAGRRVVAVGTTVTRALETATGEDGLTRAAAGWTDLVLGPDRPARVVNGLVTGLHAPDASHLLLLEAVAGRALVEGAYARAVGGDYLWHEYGDTMLFLP

SEQ ID NO: 66936 - protein, 339 aa, Geodermatophilus sabuli
  misc_feature (1)..(339): tr|A0A285EFD5|A0A285EFD5_9ACTN S-adenosylmethionine:tRN A ribosyltransferase-isomerase OS=Geodermatophilus sabu li OX=1564158 GN=SAMN06893097_105114 PE=3 SV=1
MSSLTMGREATAPPEHRGLPRDGVRMMVVRPDGLLDTTFRDLPGHLEPGDLLVVNTSATLPARLEARRADGTSTPLHVSTALDDGDWVVEVRRPGNDGPDRGVEPGTVLDLPGGVTLRLLAGFPDPARPSRLWRARPEPPVPMAEHLRRYGQPIRYGYLTAVPTLADAQNVYATEPGSAENASAGRPFTERLLVRLMARGVVVAPVVLHAGVSSPELHEPPAPERFRVPEVTARLVASTRRAGRRVVAVGTTVTRALESATGEDGVTSPAAGWTDLVLGPDRPARAVTGLVTGLHAPDASHLLLLEAVAGRDLVDRAYARAATGAYLWHEYGDTMLFLP

SEQ ID NO: 66937 - protein, 350 aa, Geodermatophilus saharensis
  misc_feature (1)..(350): tr|A0A239IIS5|A0A239IIS5_9ACTN S-adenosylmethionine:tRN A ribosyltransferase-isomerase OS=Geodermatophilus saha rensis OX=1137994 GN=SAMN04488107_4353 PE=3 SV=1
MTALLPMGTPATVPPERRGLARDGVRLLAVAPGRTTSAHFSDLPDLLDPGDLLVVNTSATLPARLTARRADGATTPLHVSTTLDDGSWVVEVRRRTDDGPETGLEPGAALDLPGGVRLVLRDGFPDPAAPRRLWRAHATPAVGVPAYLARYGRPVHYAHLTAPVSLADVRNVYATEPGSAENASAGRPFTDRLLVRLVARGVPVVPLVLHAGVSSPELHEPPAPERYRVPEVTARLVTATRAAGRRVVAVGTTVTRALETVTGDDGVTRPGEGWTDLVLGPDRPARAVSGLLTGLHEPEASHVLLLEAVAGPELVARGYRAAVDGGYLWHEFGDSMLFLPGGGPATDRRG

SEQ ID NO: 66938 - protein, 334 aa, Geodermatophilus siccatus
  misc_feature (1)..(334): tr|A0A1G9TWL5|A0A1G9TWL5_9ACTN S-adenosylmethionine:tRN A ribosyltransferase-isomerase OS=Geodermatophilus sicc atus OX=1137991 GN=SAMN05660642_02676 PE=3 SV=1
MGAEAAAPPERRGLARDGVRLMTVRPDGITETVFRDLPELLEPGDLVVVNTSATLPARLDVRRADGVRAPLHVATTLDDGDWVVELRRPGNDGPDRGVEPGTLLDLPGAVRLRLVEAFPAPARASRLWRARPDPAVPAAEHLQRHGVPIRYGYLGAAVPLADAQNVYATEPGSAENASAGRPFTDRVLVRLMARGVPVVPVVLHAGVSSPELHEPPAPERYRVPEVTARLVNATRAAGSRVVAVGTTVTRALETATGEDGVTRPAAGWTDLVLGPDRPARVVTGLLTGLHAPDASHLLLLESVAGRELVDRAYARAVAGGYLWHEFGDTMLFLP

SEQ ID NO: 66939 - protein, 339 aa, Geodermatophilus sp.
  misc_feature (1)..(339): tr|A0A366ZM76|A0A366ZM76_9ACTN S-adenosylmethionine:tRN A ribosyltransferase-isomerase OS=Geodermatophilus sp. TF02-6 OX=2250575 GN=DQ238_12700 PE=3 SV=1
MSAPVMGAEAPAPPERRGLARDGVRLMVVRPGDVRDAVFRDLPDVLDPGDLVVVNTSATLPARLDVRRADGVLTPLHVSTTLDDSDWVVEVRRPGNDGPDRGVEPGTALELPGGVRLRLVEGFPDPARPSRLWRARTEPDVSAVEHLARHGQPIRYGYLDGAVPLADAQNVYATEPGSAENPSAGRPFTDRLLVRLMARGVPVVPLVLHAGVSSPELHEPPAPERFRVPEVTARLVNGTRAAGRRVVAVGTTVTRALETATGEDGVTRPAEGWTDLVLDPDRPVWAVTGLLTGLHAPDASHLLLLQAVAGRALVADAYARAVAGGYLWHEYGDTMLFLP

SEQ ID NO: 66940 - protein, 367 aa, Geodermatophilus sp.
  misc_feature (1)..(367): tr|A0A372J5H7|A0A372J5H7_9ACTN S-adenosylmethionine:tRN A ribosyltransferase-isomerase OS=Geodermatophilus sp. LHW52908 OX=2303986 GN=D0Z06_06410 PE=3 SV=1
MTAAPPPGPAATTPPPGPAATTPPPGPAATTPPPGPAATTPPEDRGLARDGVRLLVARPDRLTPVTFRDLPAHLAPGDLVVVNTSATLPARLDVRRADGTRAPLHVSTRLDDGDWVVELRRPGNDGPDRGVEPGTVLDLPGGVRLRLLAGFPDPARPTRLWRARPEPAVALPGYLHRHGSPVRYGYLSRPVPLAAAQNVYATEPGSAENASAGRPFTDRVLVRLMARGVPVVPVTLHAGVSSPELHEPPAPERFRVPEVTARLVRATREAGGRVVAVGTTVTRALESATGEDGVLRAATGWTDLVLGPERPARVVTGLVTGLHAPDASHLLLLQAVAGRDLVERAYAAVSGGGWLWHEYGDTMLFLP

SEQ ID NO: 66941 - protein, 341 aa, Geodermatophilus telluris
  misc_feature (1)..(341): tr|A0A1G6LFA0|A0A1G6LFA0_9ACTN S-adenosylmethionine:tRN A ribosyltransferase-isomerase OS=Geodermatophilus tell uris OX=1190417 GN=SAMN05660690_1361 PE=3 SV=1
MTAFALPPGSEATEPPEHRGLSRDGVRLMAVRPGSTTAARFRDLPDLLEPGDLLVVNTSATLAARLEARRADGRVVPLHVSTALDDGSWVVEVRRPGNDGPETGLEPGTELGLPGGVRLRLRTGFPDPARPSRLWRAHVTPAVALVPYLAEHGQPVRYGYLRAPVRLAEAQNVYATEPGSAENASAGRPFTDRLLVRLLARGVPVVPLVLHAGVSSPELHEPPAPERYRVPEVTARLVNATRAAGRRVVAVGTTATRALETVTGDDGVTRPGEGWTDLVLGPDHPARAVTGLVTGLHAPEASHLLLLHAVAGTELVDTAYRAATAGGWLWHEYGDSMLFLP

SEQ ID NO: 66942 - protein, 341 aa, Geodermatophilus tzadiensis
  misc_feature (1)..(341): tr|A0A2T0TRA5|A0A2T0TRA5_9ACTN S-adenosylmethionine:tRN A ribosyltransferase-isomerase OS=Geodermatophilus tzad iensis OX=1137988 GN=LY71_110146 PE=3 SV=1
MTAFALPPGSEATEPPEHRGLSRDGVRLMAVRPGSTTAARFADLPDLLEPGDLLVVNTSATLAARLDARRADGRVVPLHVSTALDDGSWVVEVRRPGNDGPETGLEPGTELDLPGGVRLRLRTGFPDPARPSRLWRARVEPAVALVPYLAEHGQPVRYGYLRAPVRLAEAQNVYATEPGSAENASAGRPFTDRLLVRLLARGVPVVPLVLHAGVSSPELHEPPAPERYRVPEVTARLVNATRAAGRRVVAVGTTATRALETVTGEDGVTRPGEGWTDLVLGPDRPARAVTGLVTGLHAPEASHLLLLQAVAGPDLVAAAYRVATAGGWLWHEYGDSMLFLP

SEQ ID NO: 66943 - protein, 349 aa, Geofilum rubicundum
  misc_feature (1)..(349): tr|A0A0E9LWU6|A0A0E9LWU6_9BACT S-adenosylmethionine:tRN A ribosyltransferase-isomerase OS=Geofilum rubicundum J CM 15548 OX=1236989 GN=queA PE=3 SV=1
MKLSKFKYKLPEELIALHPSPNRDESRLMVINRATGKIEHKVFKDLINYFSINDVLVFNDTKVFPARLYGNKEKTGAEIEVFLLRELNQDQRLWDVLVDPARKIRIGNKLYFGDDDSLVAEVIDNTTSRGRTLRFLYDGPYEDFKKTLYSLGETPLPKFIKREVEPEDSERYQTIFAKNEGAVAAPTAGLHFSRELLKRLEIKGSHFAYVTLHVGLGNFRTVDVEDLTKHKMDSEQIFISEEATKVINNAKDQKQRVCAVGTTVMRTLESSVSTYGHVKPFEGWTNKFIFPAYDFQVANSMISNFHLPYSTLLMMSAAFGGYDLIMKAYKVAVKEKYRFGTYGDAMLIL

SEQ ID NO: 66944 - protein, 400 aa, Geofilum rubicundum
  misc_feature (1)..(400): tr|A0A0E9LZT4|A0A0E9LZT4_9BACT S-adenosylmethionine:tRN A ribosyltransferase-isomerase OS=Geofilum rubicundum J CM 15548 OX=1236989 GN=queA PE=3 SV=1
MSIPQINISDYDYQLPTGRIAKYPLENRDQSKLLVYKNLHISHTRFFNLPEQLPHNSLLVFNNTKVIRARLEFFKSTGARIELFCLEPYEPSDAALAFQSLGEVQWQCMVGNQKKWKEGSLFATSQTTQGDIQVVATLIKKLSDGAIIQFKWDDAAITFSEIMEGMGQTPIPPYLEREAEDIDTERYQTVYSKYQGSVAAPTAGLHFTDEVLETLAQRNISLIELTLHVGAGTFKPVKTDTIDQHEMHTEHFEVTVNALRQIAEHDGPVIAVGTTSVRTLESIYRAAILLSQNRPHQNVQQWDGFEQVSDMPKAEALKLLIRHLHSQQQPAFKASTSIIITPGYQFKVIDGLITNFHQPRSTLLLLIAALIDENWKAVYDYALNNDFRFLSYGDSSLLLR

SEQ ID NO: 66945 - protein, 346 aa, Geomicrobium sp.
  misc_feature (1)..(346): tr|A0A061N936|A0A061N936_9BACL S-adenosylmethionine:tRN A ribosyltransferase-isomerase OS=Geomicrobium sp. JCM 19055 OX=1460649 GN=queA PE=3 SV=1
MKVKDFDFDLPEELIAQTPLEQRDTSKLLMLDADDGSVRHETFQHIVSMFEPGDCLVLNDTKVIPARVFGTKEQGGANIECLLLKDEGNDTWEALVKPAKRVKVGTTISFGDGRLKATCTEILAHGGRKLSFSYEGVFLEVLESLGEMPLPPYITERLEEQDRYQTVFAKRSGAAAAPTAGLHFTEQLLGELKDRGVNICYITLHVGLGTFRPVSVDTIEEHDMHAEFYEMNDATATVLNEAKSAGRSIVACGTTSARTLETIVNEHEAFTACSGWTDIFIFPGYEWKAIDGLITNFHLPKSTLMMLVSAFSSREHIMNAYKEAIAKRYRFFSFGDAMVMKKGINN

SEQ ID NO: 66946 - protein, 343 aa, Geomicrobium sp.
  misc_feature (1)..(343): tr|A0A061NMD8|A0A061NMD8_9BACL S-adenosylmethionine:tRN A ribosyltransferase-isomerase OS=Geomicrobium sp. JCM 19037 OX=1460634 GN=queA PE=3 SV=1
MRVDDFDFELPEELIAQTPLKERDQSRLLVLETPGGALHHTHFTHIEEELNDGDCLVLNNTKVLPARLFGTKENGGANIECLLLKEQSDDTWEALVKPAKRVKEGTTISFGDGRLQAVCTNVLPHGGRELSFSYDGIFLEVLESLGEMPLPPYITETLEERDRYQTVYATQTGAAAAPTAGLHFTEALLNRLRAKGVQICYITLHVGLGTFRPVSVEKIEDHDMHKEFYEMDEDTARRLNDAKRNGNRIIACGTTSARTLETIACEREAFAPCSGWTNIFIYPGYEWKAVDSLITNFHLPKSTLMMLVSALAGRDEIMAAYTSAIEHRYRFFSFGDAMFIKRS

SEQ ID NO: 66947 - protein, 341 aa, Geomonas terrae
  misc_feature (1)..(341): tr|A0A4S1CHL5|A0A4S1CHL5_9DELT S-adenosylmethionine:tRN A ribosyltransferase-isomerase OS=Geomonas terrae OX=25 62681 GN=queA PE=3 SV=1
MRLSDFDYELPPELIAQHPASRRDASRLLTLDRASGAVAETTIAAIAGEFRAGDLLILNDTRVIPARLKGQKETGGAVEVFLVRRLPGADEIWSCLIKASRSPGEGTRILLPGGVTATVVSREDGEWQVLFEGAADFMGWVEGAGSMPLPPYIKRQPEGEDLERYQTVFAREKGAVAAPTAGLHFTPELLDEIRSRGVQIASVTLHVGLGTFMPVRVEELSEHTMHRERYRIPEETAAAIRRTKEAGGRVIALGTTSLRALEHAAASGELVAGEREADIFILPGYRFRVVDALITNFHLPKSTLFMLVCAFAGKETMLHAYGEAVKRRFRFFSYGDAMFIS

SEQ ID NO: 66948 - protein, 366 aa, Georhizobium profundi
  misc_feature (1)..(366): tr|A0A3Q8XP98|A0A3Q8XP98_9RHIZ S-adenosylmethionine:tRN A ribosyltransferase-isomerase OS=Georhizobium profundi OX=2341112 GN=queA PE=3 SV=1
MRVDLFDFDLPDERIALRPAVPRDSARLLGVDPNAQTPLSDHIVSDLPALLEPGDALVFNDTKVIPAQFEGLRRRPGPDGADVTVGVSATLHMRAASDRWWAFVKPGKRVKHGDRIEFGGSTDTCLVGRLDATVIEKGEGGEVLLAFDLDGPALDEAIMSVGHVPLPPYIASKRPEDAQDRADYQTIYAREDGAVAAPTAGLHFTDELLSALEERGVERHFVTLHVGAGTFLPVKADTTEDHRMHAEIGHVSAATADALNAVRARGGRIVSVGTTSLRLLESAASEDGKIEPWSGATDIFITPGYRFRAVDMLMTNFHLPRSTLFMLVSAFAGLETMRAAYAHAIANEYRFYSYGDSSLLKKADHE

SEQ ID NO: 66949 - protein, 341 aa, Geosporobacter ferrireducens
  misc_feature (1)..(341): tr|A0A1D8GPI7|A0A1D8GPI7_9CLOT S-adenosylmethionine:tRN A ribosyltransferase-isomerase OS=Geosporobacter ferrir educens OX=1424294 GN=queA PE=3 SV=1
MQKKDFYFDLPPELIAQTPLQNRDASRLMLLNKRTGEIEHRHFKEIIKFLNPGDCLVLNNTRVIPARLFGVRENSGAQIEFLLLKRIHDNQWETLVKPGKRAKIGDTIIFGEGLLKAKIIALAEEGARVVEFEYSGIFEEILDQLGTMPLPHYIKESLADKERYQTVYAKHEGSAAAPTAGLHFTQELLQAIQEKGVEIAFVTLHVGLGTFRPVKADNILDHKMHGEYYVMTEETAEKINKTKENGGRVIAVGTTSIRTLESIANDYGSIRPCSGWTEIFIYPGYSFKVVDCLITNFHLPESTLIMLVSALSTREIILNAYNEAVQQQYRFFSFGDAMFIY

SEQ ID NO: 66950 - protein, 341 aa, Geosporobacter subterraneus
  misc_feature (1)..(341): tr|A0A1M6BR53|A0A1M6BR53_9CLOT S-adenosylmethionine:tRN A ribosyltransferase-isomerase OS=Geosporobacter subter raneus DSM 17957 OX=1121919 GN=queA PE=3 SV=1
MQTKDFYFDLPPELIAQTPLQNRDESRLMLLNKRTGNIEHRQFKDIIEILNPGDCLVLNNTRVIPARLFGIRENGSAQVEFLLLKRIKDNQWEILVKPGKRAKVGDTIVFNEGLLKAKIIGLAEEGTRIVEFEYDGIFEEILDKLGTMPLPHYIKERLEDKERYQTVYAKHEGSAAAPTAGLHFTQELLHAIQQKGIEIAFITLHVGLGTFRPVKADNILEHKMHGEFYIMTEETAEKINRTKENGGRIIAVGTTSVRTLESIAADHGEIKPCSGWTEIFIYPGFSFKVVDCLITNFHLPESTLIMLVSALSTREIILNAYKEAVTQRYRFFSFGDAMFIY

SEQ ID NO: 66951 - protein, 342 aa, Geothermobacter ehrlichii
  misc_feature (1)..(342): tr|A0A5D3WKL7|A0A5D3WKL7_9DELT S-adenosylmethionine:tRN A ribosyltransferase-isomerase OS=Geothermobacter ehrli chii OX=213224 GN=queA PE=3 SV=1
MRLDDFNFDLPEELIAQQPVEKRDASRLLVVDRAGDLIAHRRFPDLVDYLAAGDCLILNDTRVMPARLQGRKETGGQVEVLLVRRIGDDESWLCLTRSSRPVRPGVDIVFAPDVRAEVVRDQGDGFRILRFHCPGSFRQVLDEIGGLPLPPYIRRQPEPADWERYQTVVARNEGAVAAPTAGLHFTPEVLERIRNRGCHVCTLTLHVGIGTFLPVRCDDIRQHRMHEEFYDIPPETAATVARVRENGGRVIAVGTTVTRALEDAARKSGRVEAGCGFSDLFIYPGFEFRVVDALVTNFHLPKSTLLMLVSAFAGRERILRAYREAVALRYRFFSYGDCMLIL

SEQ ID NO: 66952 - protein, 343 aa, Geothermobacter sp.
  misc_feature (1)..(343): tr|A0A1X0Y8S8|A0A1X0Y8S8_9DELT S-adenosylmethionine:tRN A ribosyltransferase-isomerase OS=Geothermobacter sp. E PR-M OX=1969733 GN=queA PE=3 SV=1
MRLEDFDFQLPEEQIAQHPVARRDGSRLLVMSRNATAIRHQQFPDIVDYFRPGDCLVLNDTRVIPARLQGNKQSGGRIEVFLVRQLSTEPPEWLCLTRCSRTPRPGVCLDLGEGLRAEILDGGDAPLQRLRFDCDGSFSDALQRLGKIPLPPYIRREALPADAERYQTVFARTEGAVAAPTAGLHFTPEILDQLKGRGVEVCSLTLHVGLGTFFPVRCENIAEHRMHSEAYSIPRQTADAIARTRAAGGRVIALGTTTTRALEHAVTADGTVAAGDGMSDLFIYPGFRFRVIDGLVTNFHLPKSTLLMLVSAFAGRNFVLAAYRQAVQHGYRFFSYGDCMLIL

SEQ ID NO: 66953 - protein, 343 aa, Geothermobacter sp.
  misc_feature (1)..(343): tr|A0A2K2HBS0|A0A2K2HBS0_9DELT S-adenosylmethionine:tRN A ribosyltransferase-isomerase OS=Geothermobacter sp. H R-1 OX=654845 GN=queA PE=3 SV=1
MRLEDFDFQLPEEQIAQHPVAQRDGSRLLVLSRNATAIRHQQFPDIVDYFRPGDCLVLNDTRVIPARLQGNKQSGGRIEVFLVRQLSAEPPEWLCLTRCSRTPRPGVCLDLGEGLRAEILDGGEAPLQRLRFDCDGSFSDALQRLGKIPLPPYIRREALPADAERYQTVFARAEGAVAAPTAGLHFTPEILDQLKGRGVEVCSLTLHVGLGTFFPVRCENIAEHRMHSEAYSIPRQTADAIARTRAAGGRVIALGTTTTRALEHAVTADGTVAAGDGMSDLFIYPGFRFRVIDGLVTNFHLPKSTLLMLVSAFAGRNFVLAAYRQAVQHGYRFFSYGDCMLIL

SEQ ID NO: 66954 - protein, 336 aa, Geotoga petraea
  misc_feature (1)..(336): tr|A0A1G6JCJ6|A0A1G6JCJ6_9BACT S-adenosylmethionine:tRN A ribosyltransferase-isomerase OS=Geotoga petraea OX=28 234 GN=queA PE=3 SV=1
MYKISDYDYDLPKEMIAQTPAEPRDKCKLMVLDKKTGDIEHKIFKDVIDYLEPGDVLVVNNTKVIPARIYGQKTTGAKVEILLLEKTDEKNSWKCLVKPGGKIKVNTEILFSEKLTGIVTHHNNDGSRIIEFVGEDIWNEINRIGETPLPPYITKKIDDDSKYQTKYAKKEGAVAAPTAGLHFTEELLQKIRDKGIQIEEVTLHVGLGTFRPIDVEDIRDHKIHEEFYEVKQETYEKIKKAKKEGNNIVAVGTTVVRTLESIALDDKLMGKTGIYIYPPYKFKIVDKLITNFHLPKSSLLLLVSAFSDKEIIMKSYEEAKKENYRFFSFGDAMLLK

SEQ ID NO: 66955 - protein, 336 aa, Geotoga petraea
  misc_feature (1)..(336): tr|A0A4Z0W279|A0A4Z0W279_9BACT S-adenosylmethionine:tRN A ribosyltransferase-isomerase OS=Geotoga petraea OX=28 234 GN=queA PE=3 SV=1
MYKISDYDYDLPKEMIAQTPAEPRDECKLMVLDKKTGDTEHKIFKDVIDYLEPGDVLVVNNTKVIPARIYGQKTTGAKVEILLLEKTEEKNSWKCLVKPGGKIKVNTEILFSEKLTGIVTHHNNDGSRIIEFVGEDIWNEINRIGETPLPPYITKKIDDDSKYQTKYAKKEGAVAAPTAGLHFTEELLQKIRDKGIQIEEVTLHVGLGTFRPIDVEDIRDHKIHEEFYEVKQETYEKIKKAKKEGNNIVAVGTTVVRTLESIALDDKLMGKTGIYIYPPYKFKIVDKLITNFHLPKSSLLLLVSAFSDKEIIMKSYEEAKKENYRFFSFGDAMLLK

SEQ ID NO: 66956 - protein, 338 aa, Geovibrio thiophilus
  misc_feature (1)..(338): tr|A0A410K1Z6|A0A410K1Z6_9BACT S-adenosylmethionine:tRN A ribosyltransferase-isomerase OS=Geovibrio thiophilus OX=139438 GN=queA PE=3 SV=1
MKTPAELFDFPLPEELIAQHPPETRGASRLLLADRKGSVQDLLFRDITELITDEYFIVINNTRVMNARLEGFKPTGGRVEVFLLNKTSSDSFTALTGGKVKEGTEVTVGEAVIRIEKFLDDGLRMIRFLTHSPEEVMERWGHVPLPPYIRRNDSEEDKIRYQTVYAKEAKSVAAPTAGLHFTEDTLNGLRNKGVEILEVSLDVGIGTFRPMKADHLEDHRMHTERYHVSSETADRINSLRKSGKKLICVGTTAMRTMESVTDGNGTVHAGSGETDIFIKPGYSFKAADALITNFHLPKSTLFVLVCAFAGRESMLNAYAHAVAERYRFFSYGDAMFIR

SEQ ID NO: 66957 - protein, 356 aa, Gibbsiella quercinecans
  misc_feature (1)..(356): tr|A0A250AYG7|A0A250AYG7_9ENTR S-adenosylmethionine:tRN A ribosyltransferase-isomerase OS=Gibbsiella quercineca ns OX=929813 GN=queA PE=3 SV=1
MRVADFSFELPESLIARYPQAERSACRLLQLDGPTGELTHGVFTDLLNQLEAGDLLVFNNTRVIPARVFGRKASGGKIEVLVERVLDEHRVLAHVRASKAPKAGAELLLGDDESINATMVARHDTLFELRFNDDRDVFTLLNAVGHMPLPPYIDRPDEDADRELYQTVYSEKPGAVAAPTAGLHFDEPLLAALREKGVEMAFVTLHVGAGTFQPVRVETIEDHVMHAEYAEVPQEVVDAVLACKARGKRVVAVGTTSVRSLESAAAASQDAPIAPFFGDTRIFIYPGYHYQVIDALVTNFHLPESTLIMLVSAFAGYQNTMHAYRQAVAEQYRFFSYGDAMFISRNPQAEQETVGA

SEQ ID NO: 66958 - protein, 373 aa, Giesbergeria anulus
  misc_feature (1)..(373): tr|A0A1H9LKM1|A0A1H9LKM1_9BURK S-adenosylmethionine:tRN A ribosyltransferase-isomerase OS=Giesbergeria anulus O X=180197 GN=queA PE=3 SV=1
MTDFSAPVSSAFTLSDFDFELPPEHIAQHPAPERSASRLLDGRGVQPVDRIFRELPGLLRAGDLLVFNDTRVLKARIFGEKASGGKLELLIERVLSDHEVVAHMKVSKKPQPGATLHMAGGCNGGGFDAVLLGRYPDENGPLFRFALHGPAHESAWDLMERHGHLPLPPYIERQQAEGNDPNAAQDAQRYQTVFARAPGAVAAPTAALHFDEEVLAALAAQGIEHASVTLHVGAGTFQPVKTENLAEHQMHSEWYEVPLATLAALERCRQRGGRVVAVGTTTVRTLESWARSGQTSGDTNIFITPGFEFQVVNLLLTNFHLPKSTLMMLVSAFAGYAPVMGLYHYAIKRNYRFFSYGDAMLLERRAAGDAGAT

SEQ ID NO: 66959 - protein, 346 aa, Gilliamella apicola
  misc_feature (1)..(346): tr|A0A066TCS4|A0A066TCS4_9GAMM S-adenosylmethionine:tRN A ribosyltransferase-isomerase OS=Gilliamella apicola O X=1196095 GN=queA PE=3 SV=1
MQLSDFDFYLPKELIAKHPSKNRSACRLLSLDSHTGKVEDNVFTDIIDKINPGDLLIFNNTKVIPARLYGKKASGGKIEILIERILDNNRALAHIRASKSPKAGTELILGENDPIKVTMLTRHDALFELQFPDDVLSVLNKIGHIPLPPYIDRPDNEQDREVYQTVYSKVPGAVAAPTAGLHFDKPLLEKLKQKGVEMAFVTLHVGAGTFQPVRVENIETHIMHSEYAEVPETVVEAVLACKARNKKVIAVGTTSVRALESAAQKTGKIASFFADTQIFIYPGYQFKVIDSLITNFHLPESTLIMLVSAFAGYENTMKAYQHAVKENYRFFSYGDAMFITAESNKY

SEQ ID NO: 66960 - protein, 146 aa, Gilliamella apicola
  misc_feature (1)..(146): tr|A0A080KCV9|A0A080KCV9_9GAMM S-adenosylmethionine:tRN A ribosyltransferase-isomerase (Fragment) OS=Gilliamell a apicola SCGC AB-598-B02 OX=1445513 GN=GASC598B02_0055 70 PE=3 SV=1
MQLSDFDFTLPKELIAKYPAETRSACRLLSLDGNTGNTNHGFFTDIVDKINPGDLLIFNNTRVIPARVYGKKSSGGKIEILIERLLDGNRALAHVKASKSPKEGAELILGEDSSVTVTMVARHDSLFELQFPDDVLTILNKIGHIP

SEQ ID NO: 66961 - protein, 343 aa, Gilliamella apis
  misc_feature (1)..(343): tr|A0A2V4E720|A0A2V4E720_9GAMM S-adenosylmethionine:tRN A ribosyltransferase-isomerase OS=Gilliamella apis OX=1 970738 GN=queA PE=3 SV=1
MQLSDFDFTLPKELIAKYPSETRSSCRLLALDGHSGKIEDKVFTDIIDCINAGDLLIFNNTKVIPARLYGKKASGGKIEVLIERLLEGNRALAHIKASKSPKIGAELILGENDNIQVTMVARHDALFELQFPNDVLSILNEIGHIPLPPYIDRPDDAQDREVYQTVYSKVPGAVAAPTAGLHFDKPLLDKLKQKGVEMEFVTLHVGAGTFQPVRVENIETHIMHAEYAEVPESVVKAVLDCKARGNKVIAVGTTSVRALESAAQLTGTIAPFFADTRIFIYPGYQFKVIDSLITNFHLPESTLIMLVSAFAGYENTMNAYQYAVKEKYQFFSYGDAMLITNNK

SEQ ID NO: 66962 - protein, 343 aa, Gilliamella apis
  misc_feature (1)..(343): tr|A0A242NTL9|A0A242NTL9_9GAMM S-adenosylmethionine:tRN A ribosyltransferase-isomerase OS=Gilliamella apis OX=1 970738 GN=queA PE=3 SV=1
MQLSDFNFTLPKELIAKYPSETRSSCRLLALDGHTGKIEDKVFTDIVDYINAGDLLIFNNTKVIPARLYGKKVSGGKIEVLIERLLEGNRALAHIKASKSPKIGAELILGENENIQVTMVARHDALFELQFPDDVLSILNEIGHIPLPPYIDRPDDAQDREVYQTVYSKVPGAVAAPTAGLHFDKPLLDKLKQKGVEMEFVTLHVGAGTFQPVRVENIETHIMHAEYAEVPESVVKAVLDCKARGNKVIAVGTTSVRALESAAQQTGTIAPFFADTRIFIYPGYQFKVIDSLITNFHLPESTLIMLVSAFAGYENTMNAYQYAVKEKYQFFSYGDAMLITNNK

SEQ ID NO: 66963 - protein, 346 aa, Gilliamella bombicola
  misc_feature (1)..(346): tr|A0A1C4D8D5|A0A1C4D8D5_9GAMM S-adenosylmethionine:tRN A ribosyltransferase-isomerase OS=Gilliamella bombicola OX=1798182 GN=queA PE=3 SV=1
MQLSDFDFYLPKELIAKHPKKTRSACRLLSLNSHTGKIEDKVFTDIVDKINPGDLLVFNDTKVIPARLYGKKASGGKIEILIERLLDGNRALAHIKASKSPKAGAELILGEDTSISVIMLARHDALFELQFPDNVLNILDKIGHIPLPPYINRPDDEQDREVYQTVYNRVPGAVAAPTAGLHFDKPLLEKLKQKGVEMAFVTLHVGAGTFQPVRVENIETHVMHSEYAEVPESVVEAVLACKARNNKVIAVGTTSVRALESAAQKTGKIAPFFADTQIFIYPGYQFKVIDSLITNFHLPESTLIMLVSAFAGYKNTMDAYQHAVNEKYRFFSYGDAMFITTQDNQS

SEQ ID NO: 66964 - protein, 346 aa, Gilliamella intestini
  misc_feature (1)..(346): tr|A0A1C4CLL3|A0A1C4CLL3_9GAMM S-adenosylmethionine:tRN A ribosyltransferase-isomerase OS=Gilliamella intestini OX=1798183 GN=queA PE=3 SV=1
MQLSDFDFYLPKELIAKHPSETRSACKLLSLNSQTGKIEDNVFTDIIDKINPGDLLIFNNTKVIPARLYGKKASGGKIEVLIERILDNNQALAHIKASKSPKAGAKLILGENDPIKVTMLTRHDTLFELQFPNDVLSILNKIGHIPLPPYIDRPDNEQDREVYQTVYSKVPGAVAAPTAGLHFDKPLLEKLKQKGVEMAFVTLHVGAGTFQPVRVENIETHIMHAEYAQVPDSVVEAVLACKARNNKVIAVGTTSVRALESAAQKTGKIAPFFADTQIFIYPGYQFKVIDSLITNFHLPESTLIMLVSAFAGYKNTMNAYQHAVKEKYRFFSYGDAMFITSKNDKY

SEQ ID NO: 66965 - protein, 343 aa, Gilliamella sp.
  misc_feature (1)..(343): tr|A0A242PCS4|A0A242PCS4_9GAMM S-adenosylmethionine:tRN A ribosyltransferase-isomerase OS=Gilliamella sp. N-G2 OX=1970471 GN=queA PE=3 SV=1
MQLSDFNFTLPKELIAKYPSKTRSSCRLLALDGHTGKIEDKVFTDIVDYINAGDLLIFNNTKVIPARLYGKKISGGKIEVLIERLLEGNRALAHIKASKSPKIGAELILGENENIQVTMIARHDALFELQFPDDVLSILNEIGHIPLPPYIDRPDEAQDREVYQTVYSKVPGAVAAPTAGLHFDKPLLDKIKQKGVEMEFVTLHVGAGTFQPVRVENIETHIMHAEYAEVPESVVKAVLNCKARGNKVIAVGTTSVRALESAAQQTGTIAPFFADTRIFIYPGYQFKVIDSLITNFHLPESTLIMLVSAFAGYENTMNAYQYAVKEKYQFFSYGDAMLITNNK

SEQ ID NO: 66966 - protein, 343 aa, Gilliamella sp.
  misc_feature (1)..(343): tr|A0A242NYH2|A0A242NYH2_9GAMM S-adenosylmethionine:tRN A ribosyltransferase-isomerase OS=Gilliamella sp. A7 OX =1970465 GN=queA PE=3 SV=1
MQLSDFNFTLPKELIAKYPSETRSSCRLLALDSDTGKIEDKVFTDIVNYINTGDLLIFNNTKVIPARLYGKKASGGKIEVLIERLLDGNRALAHVKASKSPKIGAELILGENDNIKVTMLARHDALFELQFPDDVLSILNEIGHIPLPPYIDRPDDAQDREVYQTVYSKVPGAVAAPTAGLHFDKPLLDKLKQKGVEMEFVTLHVGAGTFQPVRVENIETHIMHAEYAEVPESVVKAVLNCKARGNKVIAVGTTSVRALESAAQQTGTIAPFFADTRIFIYPSYQFKVIDSLITNFHLPESTLIMLVSAFAGYENTMSAYQHAVKEKYQFFSYGDAMLITNKR

SEQ ID NO: 66967 - protein, 349 aa, Gillisia hiemivivida
  misc_feature (1)..(349): tr|A0A5C6ZXR6|A0A5C6ZXR6_9FLAO S-adenosylmethionine:tRN A ribosyltransferase-isomerase OS=Gillisia hiemivivida OX=291190 GN=queA PE=3 SV=1
MKLSQFGFELPEELLAEYPAENRDEARLMVLNRKDQTIEHKLFKDIMEYFEPKDVMVLNNTKVFPARLFGNKEKTGARIEVFLLRELNPETKLWDVLVDPARKIRIGNKLYFGDDESLVAEVIDNTTSRGRTLRFLYDGSYQEFRKKLQELGETPLPKYIKRDVQPEDAERYQTIYAKNEGAVAAPTAGLHFSKHLLKRLEIKGIDFAEVTLHVGLGTFSPVEVEDLSKHKMDSEEAFIEEKATVTINKALSEKRRICAVGTTSMRVLESAVSSNHTLNEFSGWTNKFIFPPYDFSIANCMITNFHTPKSTLMMMVSAFAGHDFMKRAYDEAIKEKYKFYTYGDAMLII

SEQ ID NO: 66968 - protein, 351 aa, Gillisia limnaea
  misc_feature (1)..(351): tr|H2BVD8|H2BVD8_9FLAO S-adenosylmethionine:tRNA ribosy ltransferase-isomerase OS=Gillisia limnaea DSM 15749 OX =865937 GN=queA PE=3 SV=1
MGMKLSQFGFELPEELLAEYPAENRDESRLMVLNRKEQTIEHKQFKDIIDYFQPEDVLVLNNTKVFPARLYGNKEKTGARIEVFLLRELNPETKLWDVLVDPARKIRIGNKLYFGDDESLVAEVIDNTTSRGRTLRFLYDGSYQEFRKKLDELGETPLPKYIKREVQPEDQERYQTIYAKTEGAVAAPTAGLHFSKQLLKRLEIKGIDFAEVTLHVGLGTFNPVEVEDLSKHKMDSEEAFIDTNATRIINKAIKERRRVCAVGTTSMRVLESAVSSNHTLNEFSGWTNKFIFPPYDFSIANCMITNFHTPKSTLMMMVSAFAGHDFMKKAYTEAIKEKYKFYTYGDAMLII

SEQ ID NO: 66969 - protein, 351 aa, Gillisia mitskevichiae
  misc_feature (1)..(351): tr|A0A495Q0H0|A0A495Q0H0_9FLAO S-adenosylmethionine:tRN A ribosyltransferase-isomerase OS=Gillisia mitskevichia e OX=270921 GN=queA PE=3 SV=1
MGMKLSQFGFELPDELLAEYPSENRDEARLMVLNRKDQTIEHKLFKDIMDYFEPNDVMVLNNTKVFPARLFGNKEKTGARIEVFLLRELNPETKLWDVLVDPARKIRIGNKLYFGDDESLVAEVIDNTTSRGRTLRFLYDGSYQEFRKKLQELGETPLPKYIKRDVQPEDAERYQTIYAKNEGAVAAPTAGLHFSKHLLKRLEIKGIDFAEVTLHVGLGTFSPVEVEDLSKHKMDSEEAFIEEKATVTINKALSEKRRICAVGTTSMRVLESAVSSNHTLNEFSGWTNKFIFPPYDFSIANCMITNFHTPKSTLMMMVSAFAGHDFMKKAYDEAIKEKYKFYTYGDAMLII

SEQ ID NO: 66970 - protein, 351 aa, Gillisia sp.
  misc_feature (1)..(351): tr|A0A559PNS4|A0A559PNS4_9FLAO S-adenosylmethionine:tRN A ribosyltransferase-isomerase OS=Gillisia sp. Hel_I_86 OX=1249981 GN=queA PE=3 SV=1
MGMKLSQFGFELPDELLAEYPAENRDEARLMVLNRKDQTIEHKLFKDIMDYFEPQDVMVLNNTKVFPARLFGNKEKTGARIEVFLLRELNPETKLWDVLVDPARKIRIGNKLYFGEDESLVAEVIDNTTSRGRTLRFLYDGSYQEFRKKLQELGETPLPKYIKREVQPEDQERYQTIYAKNEGAVAAPTAGLHFSKHLLKRLEIKGIDFAEVTLHVGLGTFSPVEVEDLSKHKMDSEEAFIEEKATKIINKALSEKRRICAVGTTSMRVLESAVSSNHTLNEFSGWTNKFIFPPYDFSIANSMITNFHTPKSTLMMMVSAFAGHDFMKKAYDEAIKEKYKFYTYGDAMLII

SEQ ID NO: 66971 - protein, 351 aa, Gillisia sp.
  misc_feature (1)..(351): tr|A0A1H1Q2Y4|A0A1H1Q2Y4_9FLAO S-adenosylmethionine:tRN A ribosyltransferase-isomerase OS=Gillisia sp. Hel1_33_ 143 OX=1336796 GN=queA PE=3 SV=1
MGMKLSQFNFELPKELLAEYPAENRDEARLMVLNRKEQTIEHKQFKDLIDYFEPEDVMVLNNTKVFPARLYGNKEKTGARIEVFLLRELNAETKLWDVLVDPARKIRIGNKLYFGDDESLVAEVIDNTTSRGRTLRFLYDGSYEEFRKKLQDLGETPLPKYIKREVQPEDQERYQTIYAKKEGAVAAPTAGLHFSKHLLKRLEIKGIDFAEVTLHVGLGTFNPVEVEDLSKHKMDSEEAFIETNATNTINQAIQDRRRICAVGTTVMRVLESAVSSNHTLNEFSGWTNKFIFPPYDFSIANCMITNFHTPKSTLMMMVSAFAGHDFMKKAYAEAIKEEYKFYTYGDAMLII

SEQ ID NO: 66972 - protein, 349 aa, Gilvibacter sp.
  misc_feature (1)..(349): tr|A0A1Y0MNB5|A0A1Y0MNB5_9FLAO S-adenosylmethionine:tRN A ribosyltransferase-isomerase OS=Gilvibacter sp. SZ-19 OX=754429 GN=queA PE=3 SV=1
MKLSNFNFDLPNELLAEYPSANRDESRLMVLDREKQTIEHRMFKDLIEYFNEDDVLVLNNTKVFPARLFGNKEKTGARIEVFLLRELNAETRLWDVLVDPARKIRIGNKLYFGEDESLVAEVIDNTTSRGRTLRFLYDGSYEEFRMKLNELGQTPLPKYIKRDVEPEDEERYQTIYAKNEGAVAAPTAGLHFSKHLMKRLEIKGVHFSEVTLHVGLGTFSPVEVEDLSKHKMDSEEIIISPEAANIINTGLANKKRVCAVGTTAMRTLESSVSSNHTLNPYAGWTNKFIFPPYEFSIANAMITNLHTPKSTLLMMVSAFAGHEFIKEAYAEAVKEKYRFYSYGDAMLIL

SEQ ID NO: 66973 - protein, 351 aa, Gimesia maris
  misc_feature (1)..(351): tr|A6CET7|A6CET7_9PLAN S-adenosylmethionine:tRNA ribosy ltransferase-isomerase OS=Gimesia maris DSM 8797 OX=344 747 GN=queA PE=3 SV=1
MTDLNDFDYQLPPELIATEPTQQRDQSRLLILDRKSQSITHGSISDLPRYLNPDDCLVLNNTRVLSARLFGTRQSTGGKWEGLYLGSNSLGEWKLMSKTRGKLNPGDIIELRPAHQRSLEKQVTLKLLSKDTEGYWTALVKSDEDHHSLLAHFGTMPLPPYMKRNLATEEDWERYQTVYAAQPGAVAAPTAGLHFTPELLERCTAQGTRIANVTLHVGIGTFKPISVETLEAHKMHSEWCELSAESAELLNQSRQQGGRIVCVGTTSVRTLESVAQQGPLQAWQGETDIFIYPPYQFQAVDCLLTNFHLPKSTLLVLVSAFAGAEFICEAYKKAVEAEYRFYSYGDAMLIL

SEQ ID NO: 66974 - protein, 351 aa, Gimesia maris
  misc_feature (1)..(351): tr|A0A3D3R9N5|A0A3D3R9N5_9PLAN S-adenosylmethionine:tRN A ribosyltransferase-isomerase OS=Gimesia maris OX=122 GN=queA PE=3 SV=1
MTDLNDFDYQLPPELIATEPTQQRDQSRLLILDRKSQSITHGSISDLPRYLNPDDCLVLNNTRVLSARLFGTRQSTGGKWEGLYLGSNSLGEWKLMSKTRGKLNPGDIIELRPAHQRSLEKQVTLKLLSKDTEGYWTALVKSDEDHHSLLAHFGTMPLPPYMKRNLATEEDWERYQTVYAAQPGAVAAPTAGLHFTPELLERCTAQGTRIANVTLHVGIGTFKPISVETLEAHKMHSEWCELPAESAELLNQSRQQGGRIICVGTTSVRTLESVAQQGPLQAWQGETDIFIYPPYQFQAVDCLLTNFHLPKSTLLVLVSAFAGAEFIREAYKKAVEAEYRFYSYGDAMLIL

SEQ ID NO: 66975 - protein, 351 aa, Gimesia sp.
  misc_feature (1)..(351): tr|A0A2E7K924|A0A2E7K924_9PLAN S-adenosylmethionine:tRN A ribosyltransferase-isomerase OS=Gimesia sp. OX=202483 3 GN=queA PE=3 SV=1
MPRLDAFDYHLPPELIATEPTRQRDQSRLLVVNRQDRSIEHSMISDLPQFLNPQDCLVLNDTRVLSARLFGVRQATGGKWEGLYLGSNAEGEWKLMSKTRGKLVPGETIKLTPAHSRSEEKQLSLIMQSKDEEGYWTAQVQSDEDHHALLSHFGTMPLPPYMKRDLATEEDWERYQTVYANQPGAVAAPTAGLHFTPDLLANCTGKGVGVAKVTLHVGIGTFKPIACETLEEHKMHSEWCELPGESAALLNRTREQGGRIVAVGTTSVRTLESVAQQGPLQAWQGETDIFIYPPYQFQAVDCLLTNFHLPKSTLLVLVSAFADTELIREAYEKAVEAKYRFYSYGDAMLII

SEQ ID NO: 66976 - protein, 351 aa, Gimesia sp.
  misc_feature (1)..(351): tr|A0A5A8ATQ0|A0A5A8ATQ0_9PLAN S-adenosylmethionine:tRN A ribosyltransferase-isomerase OS=Gimesia sp. JC646 OX= 2605989 GN=queA PE=3 SV=1
MPRLDAFDYHLPPELIATEPTRQRDQSRLLVVNRRDRSIQHSMISDLPQFLNPQDCLVLNDTRVLSARVFGVRQATGGKWEGLYLGSNAEGEWKLMSKTRGKLVPGETIELTPAHSRSEEKQLSLIMQSKDDEGYWTALVQSDEDHHALLSHFGTMPLPPYMKRDLATEEDWERYQTVYANQPGAVAAPTAGLHFTPDLLANCTGKGVGVAKVTLHVGIGTFKPIACETLEEHKMHSEWCELPGESAAFLNRTREQGGRIVAVGTTSVRTLESVAQQGPLQAWQGETDIFIYPPYQFQAVDCLLTNFHLPKSTLLVLVSAFADTELIREAYEKAVEAKYRFYSYGDAMLII

SEQ ID NO: 66977 - protein, 346 aa, Glaciecola nitratireducens
  misc_feature (1)..(346): tr|G4QK24|G4QK24_GLANF S-adenosylmethionine:tRNA ribosy ltransferase-isomerase OS=Glaciecola nitratireducens (s train JCM 12485 / KCTC 12276 / FR1064) OX=1085623 GN=qu eA PE=3 SV=1
MKLADFYFDLPEHLIAKHPTAQRTQSRLLHLKGDTGEVLHQKFTDILDLLHPGDLLIFNNTRVIPARLHGAKASGGKVEVLIERILNDGSAMAHIRSSKSPKSGAILTMEGGLQIEMLGRNDALFHIKFLTEENVFDLLEKYGHMPLPPYIDRPDDEADKERYQTVYNEKPGAVAAPTAGLHFDDDILNKLRDKGVDLAFVTLHVGAGTFQPVRVENIVEHQMHAEYAEVSQDVVDKVIATKAAGGRVIAVGTTSVRSIESAAKAADNDLITEFMSDTNIFIYPGYQFKVIDAMLTNFHLPESTLMMLISAFAGRDNVMDAYAKAIEEEYRFFSYGDAMFIERKNT

SEQ ID NO: 66978 - protein, 346 aa, Glaciecola pallidula
  misc_feature (1)..(346): tr|K6YV63|K6YV63_9ALTE S-adenosylmethionine:tRNA ribosy ltransferase-isomerase OS=Glaciecola pallidula DSM 1423 9 = ACAM 615 OX=1121922 GN=queA PE=3 SV=1
MKLSDFYFDLPEHLIAKHPTEQRTQSRLLQLDGNTGEVSHKKFTDILELLQPSDLLIFNNTRVIPARLHGTKASGGKVEVLIERILNDGSAMAHIRSSKSPKSGAMLTMEGGLQIEMLGRDNALFHIKFMTERNVFDLLEEFGHMPLPPYIDRADEEADKERYQTVYNERPGAVAAPTAGLHFDLDILNRIQEKGVELAFVTLHVGAGTFQPVRVDNIEEHQMHAEYAEVSQDVVDKVLATKAAGGRVIAVGTTSVRSIESAAQAARSELISEFMSDTNIFIYPGYHFKVIDAMLTNFHLPESTLMMLISAFAGRDNVMQAYALAIEEKYRFFSYGDAMFIERKNT

SEQ ID NO: 66979 - protein, 352 aa, Glaciecola punicea
  misc_feature (1)..(352): tr|H5T7V9|H5T7V9_9ALTE S-adenosylmethionine:tRNA ribosy ltransferase-isomerase OS=Glaciecola punicea ACAM 611 O X=1121923 GN=queA PE=3 SV=1
MKLTDFDFELPEKLIAKYPSAQRTASRMLRLNGATSEVRHGLFIDIVDLVEPGDLLVFNNTRVIPARLFGHKQSGGKIEIMLERVLNDSTALAHIRSSKSPKVGAVLTLEGDIKVQVLGRQDALFHIQFEVNPKSPQTIFELLEQHGHMPLPPYIDRPDEAADKERYQTVYNEKPGAVAAPTAGLHFDEAILQTLKDKGVNTAFVTLHVGAGTFLPVRVENIEDHQMHAEFAEVTPEVANLVKQTKANGKRVIAVGTTSVRSLESAAQQASDSLIESFLSDTSIFIYPGFEFKVVDCMLTNFHLPQSTLMMLISAFASRDGVMKAYSEAIEQEYRFFSYGDAMFIEGAQTKA

SEQ ID NO: 66980 - protein, 346 aa, Glaciecola sp.
  misc_feature (1)..(346): tr|A0A2N1HU85|A0A2N1HU85_9ALTE S-adenosylmethionine:tRN A ribosyltransferase-isomerase OS=Glaciecola sp. 33A OX =2057807 GN=queA PE=3 SV=1
MKLSDFYFDLPEHLIAKHPTELRTQSRLLQLDGNTGEVLHKKFTDILGLLQPNDLLIFNNTRVIPARLHGTKMSGGKVEVLIERILNDGSAMAHIRSSKSPKSGAILTMEGGLQIEMLGRDNALFHIKFMTEKNVFDLLEEFGHMPLPPYIDRPDEEADKERYQTVYNERPGAVAAPTAGLHFDLEILNRIKEKGVELAFVTLHVGAGTFQPVRVDNIEEHQMHAEYAEVSQDVVDKVLATKAAGGRVIAVGTTSVRSIESAAQAASSELISEFMSDTNIFIYPGYHFKVIDAMLTNFHLPESTLMMLISAFAGRDNVMQAYAQAIQEEYRFFSYGDAMFIERKNT

SEQ ID NO: 66981 - protein, 316 aa, Glaciecola sp.
  misc_feature (1)..(316): tr|A0A2Z6UCM1|A0A2Z6UCM1_GLASK S-adenosylmethionine:tRN A ribosyltransferase-isomerase OS=Glaciecola sp. (strai n KUL10) OX=2161813 GN=queA PE=3 SV=1
MLCLNVDTGEVEHKQFVDIIDLIDEGDLLIFNNTRVIPARLFGQKETGGKVEVLIERVLEDQTAMVHMRSSKSPKSGAILTLEGGLKVEVIGRKEALFHIKFIAEGNVFDLLEQYGHMPLPPYIDRPDEEQDKERYQTVYNEKPGAVAAPTAGLHFDEAILQTLSQKGVQTAFVTLHVGAGTFQPVRVDNIEEHQMHAEYAEVPQDVVDKVLATKKAGKRVIAVGTTSVRSLESAAQASNETIEAFMSDTNIFIYPGYEFKVVDAMITNFHLPESTLMMLISAFADREKVMAAYAAAIEEEYRFFSYGDAMFIHHE

SEQ ID NO: 66982 - protein, 344 aa, Glaciimonas sp.
  misc_feature (1)..(344): tr|A0A2T6FBX1|A0A2T6FBX1_9BURK S-adenosylmethionine:tRN A ribosyltransferase-isomerase OS=Glaciimonas sp. PCH18 1 OX=2133943 GN=queA PE=3 SV=1
MHSLSDYDFTLPPELIAQLPLSERSASRLLHVDNTNGAALIDRQFTDVVDLLLPGDLLVFNDTRVLKARFFGVKDTGGNVEVLVERVLDNRTVHAQVRASKSPPTGTNIRLAEAFDVTVGPRVGEFFTLIFPTDVFELIEAHGRLPLPPYIEHTADAFDETRYQTVYAKELGAVAAPTAGLHFDLALLERLRQKGINFAYVTLHVGAGTFQPVRTENLADHKMHTEWYTIDVATVEAIRATKAAGRSVVAVGTTSLRALESASQSGELQAGGADTALFITPGYRFKTVDRLITNFHLPKSTLLMLVSAFAGYDVIKAAYAHAIVQQYRFFSYGDAMLLTTQKNI

SEQ ID NO: 66983 - protein, 361 aa, Glaesserella parasuis
  misc_feature (1)..(361): tr|U4SKL0|U4SKL0_HAEPR S-adenosylmethionine:tRNA ribosy ltransferase-isomerase OS=Glaesserella parasuis D74 OX= 1275971 GN=queA PE=3 SV=1
MRVTDFHFDLPDELIARYPTAERSASRLLYLNGNTGEYQDQQFNDLLEHIHSGDLLIFNNTRVIPARLYGRKASGGKLEVLVERVLDEHRCLAHIRSSKAPKENAEIFLGEDKLGEGNGFKAIMVARHDALFELKFEEAQPLFDLLQQAGHIPLPPYIDRPDEDADQERYQTVYSKVLGAVAAPTAGLHFDHQMLQKLQEKGVQTAFVTLHVGAGTFQPVRVETIEEHKMHAEYAEVSQEVVDKILATKAQGKRVICVGTTSVRSIESAAQAAEKEGKLIAPFYSDTTIFLYPGKTFRIVDALVTNFHLPESTLIMLVSAFAGFKNCMNAYQHAVESQYRFFSYGDAMFITKNENAFGDVP

SEQ ID NO: 66984 - protein, 362 aa, Glaesserella parasuis
  misc_feature (1)..(362): tr|U4RYB4|U4RYB4_HAEPR S-adenosylmethionine:tRNA ribosy ltransferase-isomerase OS=Glaesserella parasuis str. Na gasaki OX=1117322 GN=queA PE=3 SV=1
MRVTDFHFDLPDELIARYPTAERSASRLLYLNGNTGEYQDQQFNDLLEHIHSGDLLIFNNTRVIPARLYGRKASGGKLEVLVERVLDEHRCLAHIRSSKAPKENAEIFLGEDKLGEGNGFKAIMVARHDALFELKFEEAQPPLFDLLQQAGHMPLPPYIDRPDEDADQERYQTVYSKVLGAVAAPTAGLHFDHQMLQKLQEKGVQTAFVTLHVGAGTFQPVRVETIEEHKMHAEYAEVSQEVVDKILATKAQGKRVICVGTTSVRSIESAAQAAEKEGKLIAPFYSDTAIFLYPGKTFRIVDALVTNFHLPESTLIMLVSAFAGFKNCMNAYQHAVESQYRFFSYGDAMFITKNENALGDVP

SEQ ID NO: 66985 - protein, 361 aa, Glaesserella sp.
  misc_feature (1)..(361): tr|A0A328C063|A0A328C063_9PAST S-adenosylmethionine:tRN A ribosyltransferase-isomerase OS=Glaesserella sp. HHC- 2018 OX=2094024 GN=queA PE=3 SV=1
MRVTDFHFDLPDELIARYPTAERSASRLLYLNGNTGVYQDQQFNDLLEHINAGDLLIFNNTRVIPARLYGRKASGGKLEVLVERVLDEHRCLAHIRSSKAPKENAEIFLGEDKLGEAHGFKAIMVARHDALFELKFEADKPLFDLLQQAGHMPLPPYIDRPDEDADQERYQTVYSKVLGAVAAPTAGLHFDNQMLQKLQDKGVQTAFVTLHVGAGTFQPVRVETIEEHKMHAEYAEVSQEVVDKILETKAKGKRVICVGTTSVRSIESAAQAAEKEGKLIAPFYSDTAIFLYPGKTFRIVDALVTNFHLPESTLIMLVSAFAGFKNCMNAYQHAVESQYRFFSYGDAMFITKNENALKDTP

SEQ ID NO: 66986 - protein, 344 aa, Globicatella sanguinis
  misc_feature (1)..(344): tr|A0A2I1PJA9|A0A2I1PJA9_9LACT S-adenosylmethionine:tRN A ribosyltransferase-isomerase OS=Globicatella sanguini s OX=13076 GN=queA PE=3 SV=1
MLTTKDFDYELPEELIAQTPLSDRSSSRLLVLDRETDELTDTHFTEIIDYLNPGDALVVNETRVIPARIFGVKPDTGGHLEVLLLNNTEGNHWECLIKPARRAKVGTEIHFGDNAQLKATVTKELTHGGRMIEFHYEGVFLELLETLGQMPLPPYIKERLDDPDRYQTVYAKENGSAAAPTAGLHFTPELLEKVKAKGIEIIPLVLHVGLGTFRPVSTDKIEEHEMHAEYYMLSEDSAAKIRQVKANGGKITAVGTTSVRTLETIASEHNGEIVASSGWTSIFISPGYQFKVVDHLITNFHLPQSTLVMLVSAFYDREKILKAYEHAVVEKYRFFSFGDAMFIK

SEQ ID NO: 66987 - protein, 344 aa, Globicatella sp.
  misc_feature (1)..(344): tr|A0A1E8YQA4|A0A1E8YQA4_9LACT S-adenosylmethionine:tRN A ribosyltransferase-isomerase OS=Globicatella sp. HMSC 072A10 OX=1739315 GN=queA PE=3 SV=1
MLTTKDFDYELPEELIAQTPLSDRSSSRLLVLDRENDELTDTHFTEIIDYLNPGDALVVNETRVIPARIFGVKPDTGGHLEVLLLNNTEGNHWECLIKPARRAKVGTEIHFGDNAQLKATVTKELTHGGRMIEFHYEGVFLELLETLGQMPLPPYIKERLDDPDRYQTVYAKENGSAAAPTAGLHFTPELLEKVKAKGIEIIPLVLHVGLGTFRPVSTDKIEEHEMHAEYYMLSEDSAAKIRQIKANGGKITAVGTTSVRTLETIASEHNGEIVASSGWTSIFISPGYQFKVVDHLITNFHLPQSTLVMLVSAFYDREKILKAYEHAVAEKYRFFSFGDAMFIK

SEQ ID NO: 66988 - protein, 344 aa, Globicatella sulfidifaciens
  misc_feature (1)..(344): tr|A0A1T4K4T3|A0A1T4K4T3_9LACT S-adenosylmethionine:tRN A ribosyltransferase-isomerase OS=Globicatella sulfidif aciens DSM 15739 OX=1121925 GN=queA PE=3 SV=1
MLTTKDFDYELPEELIAQTPLNDRSSSRLLVLDRETDELTDTHFTEIIDYLNPGDALVVNETRVIPARIFGVKPDTGGHLEVLLLNNTEGNHWECLIKPARRAKVGTEIHFGDNAQLKATVTKELTHGGRMIEFHYEGVFLELLETLGQMPLPPYIKERLDDPDRYQTVYAKENGSAAAPTAGLHFTPDLLEKVKAKGIEIIPLVLHVGLGTFRPVTTDKIEEHEMHAEYYMLSEDSAAKIRQVQANGGKITAVGTTSVRTLETIASEHNGEIVASSGWTSIFISPGYQFKVVDHLITNFHLPQSTLVMLVSAFYDREKILKAYEHAVAEKYRFFSFGDAMFIK

SEQ ID NO: 66989 - protein, 351 aa, Gloeobacter kilaueensis
  misc_feature (1)..(351): tr|U5QE22|U5QE22_9CYAN S-adenosylmethionine:tRNA ribosy ltransferase-isomerase OS=Gloeobacter kilaueensis JS1 O X=1183438 GN=queA PE=3 SV=1
MNDSAHTSELDLLTESYAYELPERCIAQNPVEPRDHSHLMVVRQSDHTHRRFFELPELLQPGDLLVLNDTRVIPARLFGRKATGSRIEVLLLEPRSERQWLCLLKPARKLTAGSVIDFDGLLSATVLESDPATGGRWLAFDGKTDFESALHKLGQMPLPPYLKHSTARAEQYQTIWASRPGAVAAPTAGLHFTSELLTRLNERGIEQTQITLHVGLGTFRPVQAAHILAHQMHSEWYEIPEAAVEAVRRTRERGGRVIAVGTTSARALESAGEDGTLRSGSRRSELFIYPGYRWQVVDGLLTNFHLPRSSLLMLVSSLVGRERLLALYREAIAQGYRFYSFGDAMLILLDG

SEQ ID NO: 66990 - protein, 352 aa, Gloeobacter violaceus
  misc_feature (1)..(352): sp|Q7NFD9|QUEA_GLOVI S-adenosylmethionine:tRNA ribosylt ransferase-isomerase OS=Gloeobacter violaceus (strain A TCC 29082 / PCC 7421) OX=251221 GN=queA PE=3 SV=1
MNAPIDERDFLTDSYDYALPERCIAQQPAEPRDHSRLLVVDGEAHTHRYFYDLPGLLRPGDLLVLNDTRVIPARLFGSKASGGRVEVLLLEPRAPREWLCLVKPARRLAVGARIDFDGVLAARVTELDAETGGRWLRFEGEEDFEAALERVGHTPLPPYLKTGRTRDERYQTLWASRPGAVAAPTAGLHFSGELLARLAERGIERATVTLHVGLGTFRPVQSVSVHTHRMHREWYEIPEATAIAIERTRSRGGRVLAVGTTSARALESAAQPNGLPATGPGRSELFVYPGYRWRVVEGLITNFHLPRSSLLMLVSSLVGRERLLALYREAVDKGYRFYSFGDAMLILPGAGA

SEQ ID NO: 66991 - protein, 361 aa, Gloeocapsa sp.
  misc_feature (1)..(361): tr|K9XL20|K9XL20_9CHRO S-adenosylmethionine:tRNA ribosy ltransferase-isomerase OS=Gloeocapsa sp. PCC 7428 OX=11 73026 GN=queA PE=3 SV=1
MLRQLSAQEQDRLLSAYDYELPEELIAQNPAVPRDSARLLVVDSTRHRHHRFYELPQLLRSGDLLVMNNTRVIPARLYGHKQSGATVEVLLLEERQHNQWLALVKPGRRLPPGATIVFAGNATDPLSATVLETDAATGGRLLQFDVPQEMSLLQVLDQYGQVPLPPYITNSQAASEQYQTVYAEQPGAVAAPTAGLHFTPELLTRLKDTGIRTAFVTLHVGVGTFRPVEVEDITTHKMHGEWVEVSADTVAQIRETQAQGGRVFAVGTTVVRSLEGAAVSGELQPFCGKTNLFIYPGYQWRVVEGLITNFHLPKSSLLMLVSALIGRQRLLELYQEAIAERYRFYSFGDAMLILPQFESMC

SEQ ID NO: 66992 - protein, 356 aa, Gloeocapsa sp.
  misc_feature (1)..(356): tr|L8LUU7|L8LUU7_9CHRO S-adenosylmethionine:tRNA ribosy ltransferase-isomerase OS=Gloeocapsa sp. PCC 73106 OX=1 02232 GN=queA PE=3 SV=1
MNAEQLLSSYDYQLPTELIAQTPAIPRDSSRLLVIDSLVSHQHLIFRDINRYLQPGDLLVVNDTKVIPARLYGRKSTGAPVEILLLEEKTSNHWLALVKPGKRFHQDTEIWFQPHNSSSGQSLLKATVVDKDSETGGRILAFDLPDQRSLWEILPEFGTIPLPPYITATDSPIDQYQTVYAQQPGAVAAPTAGLHFTHELLAKLAQLGVEQTSITLHVGVGTFRPVEVESIVNHKIHQEWLEVNSSTVERIQAKRAQGGRIIAVGTTVVRALETASIKRLQPYRGKTDLFIYPGYKFRAIDALITNFHLPRSSLLMLVSALIGRERLLSLYQEAIDQRYRFYSFGDAMFITPEAKI

SEQ ID NO: 66993 - protein, 366 aa, Gloeomargarita lithophora
  misc_feature (1)..(366): tr|A0A1J0AE02|A0A1J0AE02_9CYAN S-adenosylmethionine:tRN A ribosyltransferase-isomerase OS=Gloeomargarita lithop hora Alchichica-D10 OX=1188229 GN=queA PE=3 SV=1
MPYPAYPPGAGDWELSNYNYHLPQELIAQTAMVPRDHARLLVVDPDCHQHHRFDELPALLRPGDLLVLNNTKVLPARLIGTRPGGGITEFLLLEPGEDGGWRALVRPGRRVGAGTVVRFPAGEETQLLGVVQVRDETTGGRWVQFQTPDGMAIDQIRLLQILDKIGELPLPPYIQKFQGDPGQYQTVYAQALGAVAAPTAGLHFTDDLLKKLQNKGIAQAMVTLHVGLGTFRPVNTPDVRQHELHSEWIEVSPATVAQIHQTQQRGGRVIGVGTTVARALEAAAQGGELQATTGKINLYIYPGYTWRVIDGLITNFHLPQSSLLLLVSALIGRERLLYLYEQAIQERYRFYSLGDAMLILPDGDFR

SEQ ID NO: 66994 - protein, 366 aa, Gloeothece citriformis
  misc_feature (1)..(366): tr|B7K8E8|B7K8E8_GLOC7 S-adenosylmethionine:tRNA ribosy ltransferase-isomerase OS=Gloeothece citriformis (strai n PCC 7424) OX=65393 GN=queA PE=3 SV=1
MINDRLLSSYDYQLPSELIAQTPVVPRDSSRLLIVDSLTTYSHSVFRDLGKWLLPGDLLVFNNTRVIPARLYGRKVTGSPVEILLLEEKSNLCWLALVKPGKRFKIGSEIEFYSSIAQGENQEVVLKAKVLERDETTGGRLLQFELKSDRSFWELLEQIGEIPFPPYISSSDAKASQYQTVYAQKSGAVAAPTAGLHFTNELLESLLSQGIDQAHVTLHVGVGTFRPVEVEDITQHLMHTEWVEVPEATVQKIEATKARGGRVIAVGTTVVRSLEGAAKETQPPDGKYLLPFRGKTDLFIYPGYSWGVVDGLITNFHLPKSSLLMLVSALIGRERLLSLYQVAIEERYRFYSFGDAMLILPSAVIK

SEQ ID NO: 66995 - protein, 365 aa, Gloeothece verrucosa
  misc_feature (1)..(365): tr|E0U7X8|E0U7X8_GLOV7 S-adenosylmethionine:tRNA ribosy ltransferase-isomerase OS=Gloeothece verrucosa (strain PCC 7822) OX=497965 GN=queA PE=3 SV=1
MTNDQLLSSYDYELPLDLIAQNPVVPRDMSRLLIVDTPASHTHSIFRELPKWLLPGDLLVFNNTRVIPARLYGCKSTGAPIEILLLEPKSNGCWLALVKPGKRFKVGSELWFYPPSANPKNPEIFLKAKVLDRDEATGGRILQFLWDNDQSFWELLEKIGQVPLPPYITSSDAKSSQYQTVYAKELGAVAAPTAGLHFTDELLKSLQSIGIDQAWITLHVGVGTFRPVEKEDITQHQMHTEWLEVPSATVTKIQETKARGGRVIAVGTTVVRALEGAAKETQAPESEYLLPFQGRTDLFIYPGYRWRVIDGMITNFHLPKSSLLMLVSALIGRERLLELYHQAIQEKYRFYSFGDAMLILPTAVL

SEQ ID NO: 66996 - protein, 355 aa, Gluconacetobacter diazotrophicus
  misc_feature (1)..(355): sp|A9HBI8|QUEA_GLUDA S-adenosylmethionine:tRNA ribosylt ransferase-isomerase OS=Gluconacetobacter diazotrophicu s (strain ATCC 49037 / DSM 5601 / PAl5) OX=272568 GN=qu eA PE=3 SV=1
MTDLASDFDFDLPPALIAEHPARPRDSARLLDIPAAGPFHDRIVRDLPSLLRPGDLLVANDTAVIPAQLDARRGEARIGITLDRILPDGTWHALARNARRLRAGDVLTFPGTPNTAAVISRDDEGGVVLRFDTEGAAFDAFLQAAGVLALPPYIARPFGPTEQDRVDYATIFSAHRGAVAAPTAGLHFTPDLLAALDAAGVGRCTLTLHVGAGTFLPVRGDSIAAHRMHAERGVITAETADAINAARRAGGRIVAVGTTSLRLLESAADPDGTIRPFDGDTAIFIRPGYRFRAVDVLMTNFHLPRSTLFMLVCAFAGYDRMRDAYAHAVADGYRFYSYGDACLLHRAPVAGEQGL

SEQ ID NO: 66997 - protein, 352 aa, Gluconacetobacter entanii
  misc_feature (1)..(352): tr|A0A318Q622|A0A318Q622_9PROT S-adenosylmethionine:tRN A ribosyltransferase-isomerase OS=Gluconacetobacter ent anii OX=108528 GN=queA PE=3 SV=1
MTDLVSDFDFDLPPALIADHPARPRDSARMLEVPVEGPFIDRHVRDLPGCLRAGDILVANDTAVIPAQLSAMRGAARIGITLDRILPDGTWHALARNSRRLKPGDTLTFAPSHVTAEVMVCEDAGGVVLRFDVEGEAFDQFLHDTGHLALPPYIARPDGPTEEDRRDYSTIFAQHRGAVAAPTAGLHFTPALLSGLEAAGVLRQTLTLHVGAGTFLPMRSEQISEHRMHAERGTISPHAAQRINAARAAGGRIIAVGTTSLRLLESATDEDGVVHPFHGETAIFIRPGYRFRAVDMLLTNFHLPRSTLFMLVSAFAGQARMRAAYDHAIAAGYRFYSYGDACLLHRHDGGAA

SEQ ID NO: 66998 - protein, 355 aa, Gluconacetobacter liquefaciens
  misc_feature (1)..(355): tr|A0A370G249|A0A370G249_GLULI S-adenosylmethionine:tRN A ribosyltransferase-isomerase OS=Gluconacetobacter liq uefaciens OX=89584 GN=queA PE=3 SV=1
MSDQVSDFDFDLPHTLVAEHPARPRDAARLLDVMPTGPFHDRVVRDLPSLLRPGDLLVANDTAVIPAQLDARRGEAKIGITLDRILPDGTWHALARNARRLRAGDVLTFPGTSNTAAIVSRDDEGGVILRFDTEGAAFDAFLQKAGVLALPPYIDRPQGPTEQDRQDYATIFAAHRGAVAAPTAGLHFTPQLLAALDAAGVERCTLTLHVGAGTFLPVRGDSIAGHRMHAERGVITEETAERLNRTRRAGGRIVAVGTTSLRLLESAADPDGTIRPFDGDTAIFIRPGYRFRAVDLLMTNFHLPRSTLFMLVCAFAGYDRMRDAYAHAIGTGYRFYSYGDACLLHRAPTPGETGA

SEQ ID NO: 66999 - protein, 397 aa, Gluconacetobacter sp.
  misc_feature (1)..(397): tr|F3S4J4|F3S4J4_9PROT S-adenosylmethionine:tRNA ribosy ltransferase-isomerase OS=Gluconacetobacter sp. SXCC-1 OX=1004836 GN=queA PE=3 SV=1
MKNSRTGIAMSFWLPPPLLSNIGLHAASAHSSDWQEPWGFRKGSRMTDLVSDFDFTLPPDRIADHPARPRDSARLLDVPVAGPIMDRHVRDLPGCLRAGDILVANDTAVIPAQLSATRGAARIGITLDRILPDGSWHVLARNARRLHPGDTLAFGASPVTADVLACGDAGDVTLRFSVEGAAFDQFLHDTGHLALPPYIARPEGPTEQDRKDYATIFAQHRGAVAAPTAGLHFTPDLLAALDHAGVLRQTLTLHVGAGTFLPMRSEQISAHRMHAERGTITPHAARRINAARAAGGRIIAVGTTSLRLLESATDEDGVVHPFHGETAIFIKPGYRFRAVDMLLTNFHLPRSTLFMLVCAFGGYRRMQAAYAHAIAKGYRFYSYGDACLLHRSEGDLP

SEQ ID NO: 67000 - protein, 347 aa, Gluconobacter albidus
  misc_feature (1)..(347): tr|A0A149TL73|A0A149TL73_9PROT S-adenosylmethionine:tRN A ribosyltransferase-isomerase OS=Gluconobacter albidus OX=318683 GN=queA PE=3 SV=1
MTDDLAPFDFELPRDHIATEPARPRDSATLLHVRPGLAPDPHVIRELPDFLREGDLLIANNTAVIRAQLAATRGEAKIGLTLDRILADGSWHALARNSRKLKPQDILHFGDDPVTATVVENEGDGAVSIRFSVEGDDFDAFLERVGALALPPYIERPFGPTKQDDTDYRTIFSQYRGAVAAPTAGLHFTPEVLAALDAKGIQRRTLTLHVGAGTFLPVRSTIAEHKMHAEWGEIDADTAAAINETRARGGRVIAVGTTSLRLLESAARDDGTVAPWRGETSIFIKPGYRFKAVDVLMTNFHLPRSTLFMLVCAFSGIETMREAYAYAIANGLRFYSYGDACLLERAP

SEQ ID NO: 67001 - protein, 347 aa, Gluconobacter albidus
  misc_feature (1)..(347): tr|A0A1U9KZR0|A0A1U9KZR0_9PROT S-adenosylmethionine:tRN A ribosyltransferase-isomerase OS=Gluconobacter albidus OX=318683 GN=queA PE=3 SV=1
MTDDLAPFDFELPRDHIATEPARPRDSATLLHVRPGLAPDPHVIRELPDFLREGDLLIANNTAVIRAQLAATRGEAKIGLTLDRILADGSWHALARNSRKLKPQDILHFGDDPVTATVVENEGDGAVSIRFSVEGDDFDAFLERVGALALPPYIERPFGPTKQDDTDYRTIFSQYRGAVAAPTAGLHFTPEVLAALDAKGIQRRTLTLHVGAGTFLPVRSTIAEHKMHAEWGEIDADTAAAINETRARGGRVIAVGTTSLRLLESAARDDGTVAPWRGETSIFIKPGYRFKAVDVLMTNFHLPRSTLFMLVCAFSGTETMREAYAYAIANGLRFYSYGDACLLERAP

SEQ ID NO: 67002 - protein, 347 aa, Gluconobacter cerinus
  misc_feature (1)..(347): tr|A0A1B6VKB8|A0A1B6VKB8_9PROT S-adenosylmethionine:tRN A ribosyltransferase-isomerase OS=Gluconobacter cerinus OX=38307 GN=queA PE=3 SV=1
MTDELATFDFELPRDHIATEPARPRDSAKLLHVRSGEAPDLRIIRDLPGLLQEGDLLIANNTAVIRAQLSATRGEAKIGITLDRILADGSWHALARNSRKLKPNDTLNFGDDPVTASVVENEGDGAVSIRFAVEGDAFDAFLERVGALALPPYIDRPFGPTVQDDSDYRTIFSEHRGAVAAPTAGLHFTPDLLAALDAKGIQRRTLTLHVGAGTFLPVRSSIAEHRMHAEWGEIDAETAQAINETRARGGRVVAVGTTSLRLLESAAQEDGTVQPWRGETSIFIKPGYRFKAVDLLMTNFHLPRSTLFMLVCAFSGTVTMREAYAYAIANGLRFYSYGDACLLERAQ

SEQ ID NO: 67003 - protein, 347 aa, Gluconobacter frateurii
  misc_feature (1)..(347): tr|A0A0K8N5H4|A0A0K8N5H4_9PROT S-adenosylmethionine:tRN A ribosyltransferase-isomerase OS=Gluconobacter frateur ii NBRC 101659 OX=1104996 GN=queA PE=3 SV=1
MTDELAPFDFELPRDHIATEPARPRDSATLLHVRPGHAPDQRIIRDLPSLLREGDLLIANNTAVIRAQLSATRGEAKIGITLDRILADGSWHALARNSRKLKPNDTLNFGDDPVTASVVENEGDGAVSIRFSVEGDAFDAFLERVGALALPPYIDRPFGPTVQDDSDYRTIFSEHRGAVAAPTAGLHFTPDLLAALDAKGIQRRTLTLHVGAGTFLPVRSSIAEHRMHAEWGEIDAETAQAINETRARGGRVVAVGTTSLRLLESAAQEDGTVQPWRGETSIFIKPGYRFKAVDLLMTNFHLPRSTLFMLVCAFSGTDTMREAYAYAIANGLRFYSYGDACLLERAP

SEQ ID NO: 67004 - protein, 347 aa, Gluconobacter frateurii
  misc_feature (1)..(347): tr|A0A0S6TJC0|A0A0S6TJC0_9PROT S-adenosylmethionine:tRN A ribosyltransferase-isomerase OS=Gluconobacter frateur ii NBRC 103465 OX=1307834 GN=queA PE=3 SV=1
MTDELAQFDFELPRDHIATEPARPRDSATLLHVRPGHAPDQRIIRDLPSLLREGDLLIANNTAVIRAQLSATRGEAKIGITLDRILADGSWHALARNSRKLKPNDTLHFGDDPVTASVVENEGDGAVSIRFSVEGEAFDAFLERVGALALPPYIDRPFGPTVQDDSDYRTIFSEHRGAVAAPTAGLHFTPDLLAALDAKGIQRRTLTLHVGAGTFLPVRSSIAEHRMHAEWGEIDAETAQAINETRARGGRVVAVGTTSLRLLESAAQEDGTVQPWRGETSIFIKPGYRFKAVDLLMTNFHLPRSTLFMLVCAFSGTDTMREAYAYAIANGLRFYSYGDACLLERAP

SEQ ID NO: 67005 - protein, 103 aa, Gluconobacter japonicus
  misc_feature (1)..(103): tr|A0A149U775|A0A149U775_GLUJA S-adenosylmethionine:tRN A ribosyltransferase-isomerase (Fragment) OS=Gluconobac ter japonicus OX=376620 GN=AD936_07000 PE=3 SV=1
TRARGGRVVAVGTTSLRLLESAAQDDGTVQPWRGETSIFIKPGYRFKAVDLLMTNFHLPRSTLFMLVCAFSGTDTMREAYAYAIANGLRFYSYGDACLLERAP

SEQ ID NO: 67006 - protein, 347 aa, Gluconobacter japonicus
  misc_feature (1)..(347): tr|A0A149S6J6|A0A149S6J6_GLUJA S-adenosylmethionine:tRN A ribosyltransferase-isomerase OS=Gluconobacter japonic us OX=376620 GN=queA PE=3 SV=1
MTDELAQFDFELPRDHIATEPARPRDSATLLHVRPGHAPDQRIIRDLPSLLREGDLLIANNTAVIRAQLSATRGEAKIGITLDRILADGSWHALARNSRKLKPNDTLNFGDDPVTASVVENEGDGAVSIRFSVEGDAFDAFLERVGALALPPYIDRPFGPTVQDDSDYRTIFSEHRGAVAAPTAGLHFTPDLLAALDAKGIQRRTLTLHVGAGTFLPVRSSIAEHRMHAEWGEIDVETAQAINETRTRGGRVVAVGTTSLRLLESAAQEDGTVQPWRGETSIFIKPGYRFKAVDLLMTNFHLPRSTLFMLVCAFSGTDTMREAYAYAIANGLRFYSYGDACLLERAP

SEQ ID NO: 67007 - protein, 347 aa, Gluconobacter kanchanaburiensis
  misc_feature (1)..(347): tr|A0A511B9S2|A0A511B9S2_9PROT S-adenosylmethionine:tRN A ribosyltransferase-isomerase OS=Gluconobacter kanchan aburiensis NBRC 103587 OX=1307948 GN=queA PE=3 SV=1
MTDDLAPFDFELPRDHIATEPARPRDSATLLHVRPGLAPDPHIIRELPDFLREGDLLIANNTAVIRAQLAATRGEAKIGLTLDRILADGSWHALARNSRKLKPQDILHFGDDPVTATVVENEGDGAVSIRFSVEGDDFDAFLERVGALALPPYIERPFGPTKQDDTDYHTIFSQYRGAVAAPTAGLHFTSEVLAALDAKGIQRRTLTLHVGAGTFLPVRSTIAEHKMHAEWGEIDAETAAAINETRARGGRIVAVGTTSLRLLESAAREDGTVAPWRGETSIFIKPGYRFKAVDVLMTNFHLPRSTLFMLVCAFSGTETMREAYAYAIANGLRFYSYGDACLLERAP

SEQ ID NO: 67008 - protein, 347 aa, Gluconobacter morbifer
  misc_feature (1)..(347): tr|G6XMP9|G6XMP9_9PROT S-adenosylmethionine:tRNA ribosy ltransferase-isomerase OS=Gluconobacter morbifer G707 O X=1088869 GN=queA PE=3 SV=1
MTDELAPFDFHLPHDHIATEPARPRDSARLLHVRPGQAPVLNTVRDLPGLLREGDLLIANNTAVIRAQLAATRGEAKIGLTLDRILPDGIWHALARNARKLRPQDVLRFGDDPVTATVRENEGDGAVSIRFSVEGEAFDAFLERVGALALPPYIDRPFGPTKQDDIDYRTIFSQYRGAVAAPTAGLHFTPELLAALDKKGIKRRTLTLHVGAGTFLPVRSSIAEHRMHAEWGEIDQDTADAINETRARGSRIVAVGTTSLRLLESAAADDGTVSPWRGETSIFIKPGYRFRAVDVLMTNFHLPRSTLFMLVCAFSGTETMREAYAYAIARGLRFYSYGDACLLERAE

SEQ ID NO: 67009 - protein, 347 aa, Gluconobacter oxydans
  misc_feature (1)..(347): sp|Q5FR06|QUEA_GLUOX S-adenosylmethionine:tRNA ribosylt ransferase-isomerase OS=Gluconobacter oxydans (strain 6 21H) OX=290633 GN=queA PE=3 SV=2
MTDDLAPFDFELPRDHIATEPARPRDSATLLHVRPGLPPDPHVIRDLPDFLREGDLLIANNTAVIRAQLAATRGEAKIGLTLDRILANGSWHALARNSRKLKPQDILHFGDDPVTATVIENEGDGAVSIRFSVEGDEFDAFLERVGALALPPYIERPFGPTKQDDADYRTIFSQYRGAVAAPTAGLHFTPEVLAALDAKGIQRRTLTLHVGAGTFLPVRSTIAEHKMHAEWGEIDAETAAAINETRARGGRIVAVGTTSLRLLESAAREDGTVAPWRGETSIFIKPGYRFKAVDVLMTNFHLPRSTLFMLVCAFSGTETMREAYAYAIANGLRFYSYGDACLLERAP

SEQ ID NO: 67010 - protein, 347 aa, Gluconobacter oxydans
  misc_feature (1)..(347): tr|A0A067Z4Q4|A0A067Z4Q4_GLUOY S-adenosylmethionine:tRN A ribosyltransferase-isomerase OS=Gluconobacter oxydans DSM 3504 OX=1288313 GN=queA PE=3 SV=1
MTDDLAPFDFELPRDHIATEPARPRDSATLLHVRPGLPPDPHVIRELPDFLREGDLLIANNTAVIRAQLAATRGEAKIGLTLDRILADGSWHALARNSRKLKPQDILHFGDDPVTATVIENEGDGAVSIRFSVEGDAFDAFLERVGALALPPYIERPFGPTKQDDADYRTIFSQYRGAVAAPTAGLHFTPEVLAALDAKGIQRRTLTLHVGAGTFLPVRSTIAEHKMHAEWGEIDAETAAAINETRVRGGRVVAVGTTSLRLLESAAREDGTVAPWRGETSIFIKPGYRFKAVDVLMTNFHLPRSTLFMLVCAFSGTETMREAYAYAIANGLRFYSYGDACLLERAP

SEQ ID NO: 67011 - protein, 347 aa, Gluconobacter roseus
  misc_feature (1)..(347): tr|A0A4Y3M943|A0A4Y3M943_9PROT S-adenosylmethionine:tRN A ribosyltransferase-isomerase OS=Gluconobacter roseus NBRC 3990 OX=1307950 GN=queA PE=3 SV=1
MTDDLAPFDFELPRDHIATEPARPRDSATLLHVRPGLPPDPHVIRDLPDFLREGDLLIANNTAVIRAQLAATRGEAKIGLTLDRILADGSWHALARNSRKLKPQDILHFGDDPVTATVIENEGDGAVSIRFSVEGDEFDAFLERVGALALPPYIERPFGPTKQDDADYRTIFSQYRGAVAAPTAGLHFTPEVLAALDAKGIQRRTLTLHVGAGTFLPVRSTIAEHKMHAEWGEIDVETAAAINETRARGGRIVAVGTTSLRLLESAAREDGTVAPWRGETSIFIKPGYRFKAVDVLMTNFHLPRSTLFMLVCAFSGTETMREAYAYAIANGLRFYSYGDACLLERAP

SEQ ID NO: 67012 - protein, 347 aa, Gluconobacter sp.
  misc_feature (1)..(347): tr|A0A252BNA4|A0A252BNA4_9PROT S-adenosylmethionine:tRN A ribosyltransferase-isomerase OS=Gluconobacter sp. DsW _058 OX=1511210 GN=queA PE=3 SV=1
MTDELATFDFELPRDHIATEPARPRDSAKLLHVRSGEAPDLRIIRDLPGLLREGDLLIANNTAVIRAQLSATRGEAKISITLDRILADGSWHALARNSRKLKPNDTLNFGDDLVTASVVENEGDGAVSIRFSVEGDAFDAFLERVGALALPPYIDRPFGPTAQDDSDYRTIFSEHRGAVAAPTAGLHFTPDLLAALDAKGIQRRTLTLHVGAGTFLPVRSSIAEHRMHAEWGEIDAETAQAINETRVRGGRVVAVGTTSLRLLESAAQEDGTVQPWRGETSIFIKPGYRFKAVDLLMTNFHLPRSTLFMLVCAFSGTDTMREAYAYAIANGLRFYSYGDACLLERAP

SEQ ID NO: 67013 - protein, 347 aa, Gluconobacter sphaericus
  misc_feature (1)..(347): tr|A0A4Y3QCY5|A0A4Y3QCY5_9PROT S-adenosylmethionine:tRN A ribosyltransferase-isomerase OS=Gluconobacter sphaeri cus NBRC 12467 OX=1307951 GN=queA PE=3 SV=1
MTDDLAPFDFELPRDHIATEPARPRDSATLLHVRPGLAPDPHVIRDLPDFLREGDLLIANNTAVIRAQLAATRGEAKIGLTLDRILADGSWHALARNSRKLKPQDVLHFGDDVVTATVVDNEGDGAVSIRFSVEGDDFDAFLERVGALALPPYINRPFGPTKQDDADYRTIFSQHRGAVAAPTAGLHFTPEVLTALDAKGIQRRTLTLHVGAGTFLPVRSTIAEHKMHAEWGEIDEETAAAINETRARGGRIVAVGTTSLRLLESAAREDGTVAPWRGETSIFIKPGYRFKAVDVLMTNFHLPRSTLFMLVCAFSGTETMREAYAYAIANGLRFYSYGDACLLERAP

SEQ ID NO: 67014 - protein, 371 aa, Gluconobacter thailandicus
  misc_feature (1)..(371): tr|M9LWF3|M9LWF3_GLUTH S-adenosylmethionine:tRNA ribosy ltransferase-isomerase OS=Gluconobacter thailandicus NB RC 3255 OX=1291534 GN=queA PE=3 SV=1
MTEKMRRAGWSGVFMLAEPAREHPMTDELATFDFELPRDHIATEPARPRDSAKLLHVRSGHAPDLRIIRDLPGLLREGDLLIANNTAVIRAQLSATRGEAKIGITLDRILADGSWHALARNSRKLKPNDTLNFGDDPVTASVVENEGDGAVSIRFSVEGDAFDAFLERVGALALPPYIDRPFGPTAQDDSDYRTIFSEHRGAVAAPTAGLHFTPDLLAALDTKGIQRRTLTLHVGAGTFLPVRSSIAEHRMHAEWGEIDAETAQAINETRARGGRVVAVGTTSLRLLESAAQEDGTVQPWRGETSIFIKPGYRFKAVDLLMTNFHLPRSTLFMLVCAFSGTDTMREAYAYAIANGLRFYSYGDACLLERAP

SEQ ID NO: 67015 - protein, 367 aa, Gluconobacter thailandicus
  misc_feature (1)..(367): tr|A0A5C0AA23|A0A5C0AA23_GLUTH S-adenosylmethionine:tRN A ribosyltransferase-isomerase OS=Gluconobacter thailan dicus OX=257438 GN=queA PE=3 SV=1
MRRAGWSGVFMLAEPAREHPMTDELATFDFELPRDHIATEPARPRDSAKLLHVRSGHAPDLRIIRDLPGLLREGDLLIANNTAVIRAQLSATRGEAKIGITLDRILADGSWHALARNSRKLKPNDTLNFGDDPVTASVVENEGDGAVSIRFSAEGDAFDAFLERVGALALPPYIDRPFGPTAQDDSDYRTIFSEHRGAVAAPTAGLHFTPDLLAALDAKGIQRRTLTLHVGAGTFLPVRSSIAEHRMHAEWGEIDAETAQAINETRARGGRVVAVGTTSLRLLESAALEDGTVQPWRGETSIFIKPGYRFKAVDLLMTNFHLPRSTLFMLVCAFSGTDTMREAYAYAIANGLRFYSYGDACLLERAP

SEQ ID NO: 67016 - protein, 347 aa, Gluconobacter wancherniae
  misc_feature (1)..(347): tr|A0A511B2F2|A0A511B2F2_9PROT S-adenosylmethionine:tRN A ribosyltransferase-isomerase OS=Gluconobacter wancher niae NBRC 103581 OX=656744 GN=queA PE=3 SV=1
MTDELAPFDFELPRDNIATEPARPRDSAKLLHVRPEAGTDMHVVRDLPDLLREGDLLIANNTEVIRAQLSATRGEARIGITLDRILADGSWHALARNSRKLRSGDVLQFGNDAVTATIVTNEGDGAIALRFSVEGDAFDAFLERVGALALPPYIERPLGPTPQDDTDYRTIFSQFRGAVAAPTAGLHFTPELLAALDARGIQRRTLTLHVGAGTFLPVRSSISEHRMHAEWGEIDAETAAAINETRARGGRVVAVGTTSLRLLESAAREDGIVEPWRGETSIFIKPGYRFRAVDVLMTNFHLPRSTLFMLVCAFSGTDTMREAYTRAIADGLRFYSYGDACLLERAP

SEQ ID NO: 67017 - protein, 354 aa, Glycocaulis alkaliphilus
  misc_feature (1)..(354): tr|A0A3T0E9R3|A0A3T0E9R3_9RHOB S-adenosylmethionine:tRN A ribosyltransferase-isomerase OS=Glycocaulis alkaliphi lus OX=1434191 GN=queA PE=3 SV=1
MKLSDFDFHLPEDRIALRPARPRDSARLLHVGQGGALGDHTMLDLPALLQPGDLLVLNNTSVIPAALTGERPARAVGGGGPARIELNLHTRVSEDSWRAFARPAKRVREGDTIHFPEGLSATVMAKAEGGDIALQFNASGAGLDAALEGAGNPPLPPYIASKRDTDAQDRTDYQTLFSDPARKGSVAAPTAGLHFTDRLFAALEARGVSTTQLTLHVGAGTFLPVKTENVAEHTMHAEWYEISEDTAAAINTARAEGRRIIPVGTTALRTLESAADNEGRVRAGSTETAIFITPGYRFRVTDALLTNFHLPRSTLFMLVSALVGLDVMQGAYSHAIARSYRFFSYGDACLIERG

SEQ ID NO: 67018 - protein, 352 aa, Glycocaulis sp.
  misc_feature (1)..(352): tr|A0A550KI75|A0A550KI75_9RHOB S-adenosylmethionine:tRN A ribosyltransferase-isomerase OS=Glycocaulis sp. ZYF76 5 OX=2518983 GN=queA PE=3 SV=1
MKLSDFDFHLPEDRIALRPARPRDSARLLHVGGALEDLGVLDLPGLLNPGDLLVFNDTRVLPASLSGVRPARAHGGGGDAAIEINLHRREGADRWRAFARPGKRLREGDAVRFSGGLEAVVETKGEGGEIVLAFPLSGEALDRAIEAAGAPPLPPYIASKRAADEADRDDYQTLYAAPDKTGSVAAPTAGLHFTERLFTALDARGVQRAHVTLHVGAGTFLPVKTEDVAEHRMHGEWFEISPEAAAAINAAKAAGRRVIPVGTTSLRTLESAADGEGRIAPGARETDIFITPGYRFRVADALLTNFHLPKSTLFMLVSALAGLDRMQAAYAHAIANRYRFFSYGDACFIERA

SEQ ID NO: 67019 - protein, 348 aa, Glycomyces artemisiae
  misc_feature (1)..(348): tr|A0A2T0UL30|A0A2T0UL30_9ACTN S-adenosylmethionine:tRN A ribosyltransferase-isomerase OS=Glycomyces artemisiae OX=1076443 GN=B0I28_105354 PE=3 SV=1
METSKLNFQLPAHLLARQPIERRGGERHDSKMVVYHKRSETVEFTSFREIPRFLEPGDVVVINDSRTLNASVFANVEDRGRVEVQLRYNPKDNIWGVSSKSRRAPRIGSKLTFDGTDITATMLGPDDRGLSLWMLEFDCEFDALVAYLDEHGRPIPSLYVEGSFTNEEYNSVYAERPGSAEMPAAGRHFTEEVLTRLRERGVGIAYITLHTGLSSVEISEEHLEDHRMHAEWCQIPPETADMVNTAKDEGHRVLVVGTTVMRTLESAAKEDGLPLRAGDRWTDLYIYPGFDFQVADAFVTNFHGPRSSRIALASAFTGADLLLHGYDAAIERGLQFYEFGDTTLTLPD

SEQ ID NO: 67020 - protein, 341 aa, Glycomyces artemisiae
  misc_feature (1)..(341): tr|A0A2T0UHW5|A0A2T0UHW5_9ACTN S-adenosylmethionine:tRN A ribosyltransferase-isomerase OS=Glycomyces artemisiae OX=1076443 GN=B0I28_107323 PE=3 SV=1
MSTTLSEPFAFALDAALEARRPAEVRGSGRSDVRMLVTDKETGEITHRRFEDLPALVRPGDLLVVNNSGTLPAAVVTRQGLRVHFSSVRPDGSWLVELRDRDKPYLGDVLGRIVDLPGSYQLYLERRFGKRLWVVRPPFASVPDYLARYGRPISYSYVEEQWPIGAYQTVFATVPGSAEMPSAARPFTSEIVTRLVSAGVGIAPVTLHTGVASLESDEDPYPEWFEVGEYTARAVNTAKAAGGRVIAVGTTVVRALESAVEKSTAEDGRVVGTSGHTERIISPANPVAVVDGLLTGFHEPRSTHLSMLEAICPTALLRDSYEAAIGGKYLWHEFGDVHLIA

SEQ ID NO: 67021 - protein, 337 aa, Glycomyces harbinensis
  misc_feature (1)..(337): tr|A0A1G7BE73|A0A1G7BE73_9ACTN S-adenosylmethionine:tRN A ribosyltransferase-isomerase OS=Glycomyces harbinensi s OX=58114 GN=SAMN05216270_11665 PE=3 SV=1
MSTTLTSPFAFALDAALEADRPAEARGASRSDVRMLVSDKATGAIGHHRFDALPALVRPGDLLVVNNSGTMPASVPTRQGWRVHFSSTRPDGSWLVELRDRDKPYLGEVLGRIVDLPGGVELYLERRFGKRLWVTRPKFASVPEYLAKYGKPIRYSYVDRDWPISAYQTAFATVPGSAEMPSAARPFTPEIVTRLVSAGVGVAPITLHTGVASLESDEDPYPEWFEVGDFTARAVNAAKAAGGRVIAVGTTAVRALESAAAEGGEVAAASGHTDRIVSTADPVKVVDGLLTGFHEPRSTHLSMLEAICDTDLLRASYTAAIEERYLWHEFGDVHLIA

SEQ ID NO: 67022 - protein, 336 aa, Glycomyces paridis
  misc_feature (1)..(336): tr|A0A4V4HP80|A0A4V4HP80_9ACTN S-adenosylmethionine:tRN A ribosyltransferase-isomerase OS=Glycomyces paridis OX =2126555 GN=E9998_09420 PE=3 SV=1
MSATLESPFGFALDAALEADRPAEERGLLRSDVRMLVTDKATGAIEHAAFDSLPALVRPGDLLVVNNSATLPAAVSTRQGLRVHFSSTRPDGSWLVELRDRDRPHLGEVQGRTVDLPGGVSLYLERRFGKRLWVTRPPVPSVPEYLARYGRPIRYSYVATDRPLSAYQTAFATVPGSAEMPSAARPFTPEIVTRLVSAGVGIAPITLHTGVASLESDEDPYPEWFEVGEYTARQVNATREAGGRVIAVGTTAVRALESAVSEGRVVAASGHTERIVSTAHPVEVVDGLLTGFHEPRSTHLSMLEAICETELLRASYEAAIGARYLWHEFGDVHLIA

SEQ ID NO: 67023 - protein, 336 aa, Glycomyces sambucus
  misc_feature (1)..(336): tr|A0A1G9D3C2|A0A1G9D3C2_9ACTN S-adenosylmethionine:tRN A ribosyltransferase-isomerase OS=Glycomyces sambucus O X=380244 GN=SAMN05216298_0645 PE=3 SV=1
MSTTLTEPFAFALDAALEARRPAEVRGTGRSDVRMLVTDKATGAITHQHFEDLPALVRPGDLLVVNNSGTLPAAVLTRQGLRVHFSSVRPDGSWLVELRDRDKPYLGDVIGRTLDLPGGVHLYLERRFGKRLWVTRPPVKSVADYLVRYGRPIRYTYVDQQWPLSAYQTAFATVPGSAEMPSAARPFTPEIVTRLVSAGVGIAPVTLHTGVASLESDEDPYPEWFEVGEYTARAVESAKAAGGRVIAVGTTAVRALETAAEGGRVAAASGHTERIVSTADPVTVVDGLLTGFHEPRSTHLSMLEAICETELLRESYAAAIEARYLWHEFGDVHLIA

SEQ ID NO: 67024 - protein, 336 aa, Glycomyces sp.
  misc_feature (1)..(336): tr|A0A4S8Q1U6|A0A4S8Q1U6_9ACTN S-adenosylmethionine:tRN A ribosyltransferase-isomerase OS=Glycomyces sp. 18 OX= 2570927 GN=FAB82_21220 PE=3 SV=1
MSTTLVSPFGFALEAALEANQPAEVRGASRSDVRMLVTDKATGQISHRHFEDLPALVRPGDLLVVNNSTTLPASVPTKQGWRVHFSSTRPDGSWLVELRDGQRPYLGEVPGRQVHLAGGVVLELEARFGKRLWVTRPPLASVPDYLARFGKPIRYSYVDRDWPVSAYQTAFATVPGSAEMPSAARPFTPEIVTRLVSAGIGIAPITLHTGVASLESDEDPYPEWFEVGEYTARAVNAAKDSGGRVIAVGTTAVRALESAADGGRAFAASGHTDRIISLDDPPVVVDGLLTGLHEPRSTHLAMLEALCETELLRESYEAAIEARYLWHEFGDVHLIA

SEQ ID NO: 67025 - protein, 336 aa, Glycomyces sp.
  misc_feature (1)..(336): tr|A0A426V4E2|A0A426V4E2_9ACTN S-adenosylmethionine:tRN A ribosyltransferase-isomerase OS=Glycomyces sp. YIM 12 1974 OX=2493553 GN=EIW28_02700 PE=3 SV=1
MSTTLTEPFAFALDAALEARRPAEVRGAGRSDVRMLVTDKATGAITHRHFEDLPALVRPGDLLVVNNSATLPAAVLTRQGLRVHFSSVRPDGSWLVELRDRDRPYLGDVIGRTLDLPGGVHLYLERRFGKRLWTTRPPVASVPDYLARHGRPIRYSYVDQEWPLAAYQTAFSTVPGSAEMPSAARPFTPEIVTRLVSAGVGIAPITLHTGVASLESDEDPYPEWFEVGEYTARAVNSAKAAGGRVIAVGTTAVRALESAVEDGRVAAASGHTERIISPAAPVAVVDGLLTGFHEPRSTHLSMLEAICETGLLRDSYTAAIEARYLWHEFGDVHLIA

SEQ ID NO: 67026 - protein, 359 aa, Gordonibacter pamelaeae
  misc_feature (1)..(359): tr|A0A369M7P3|A0A369M7P3_9ACTN S-adenosylmethionine:tRN A ribosyltransferase-isomerase OS=Gordonibacter pamelae ae OX=471189 GN=queA PE=3 SV=1
MKTSDFDYDLPEELIAQEPAAERDGCRLLVMDRATGALEDRVFRDIAEYLRPGDLLVANETRVMPARLLGAKRGTGGAAEVFLLRQHGTPTENRSALWEVLVRPGKRLKPGTGAVVDFTDAEGNVALSAEIVDWLPDAQKGERLARLTTPLPSLDEALHAVGHTPLPPYIKDYAGDEELYQTVYSRRESSAAAPTAGLHFTPELIEHLREQGVRWETVELEVGLDTFRIVDEDDPEKHVIHTEFYTVPERTVAAISETRERGGRVVAVGTTSVRSLESAWDAEAGAVTPREREATSLYLLPGSEFHVVDALVTNFHVPRSTLMMLVSAFSTREHIMAAYQHAIAERYRMLSFGDAMFIC

SEQ ID NO: 67027 - protein, 359 aa, Gordonibacter sp.
  misc_feature (1)..(359): tr|A0A1Y4G703|A0A1Y4G703_9ACTN S-adenosylmethionine:tRN A ribosyltransferase-isomerase OS=Gordonibacter sp. An2 30 OX=1965592 GN=queA PE=3 SV=1
MLTSDFDYDLPPELIAQEPAPNRDGCRLLVMDRSTGALEDRVFRDIVEYLRPGDVLVANETRVMPARLVGTKRGTGGAAEVFLLRQHGTPFDNKSALWEVLVRPGKRLKPGSGAVVDFTDSKGNAALSAEIVDWAPNAQKGERVARISTTLPSLDEALHAVGRTPLPPYIKDYAGDEELYQTVYSRRESSAAAPTAGLHFTPELIERLRGQGVGWETVELEVGLDTFRIVDEDDPERHAIHTEFYTVGQRTADAVNEARERGGRVVAVGTTSVRSLESAWDAERGRLAPKEREATSLYILPGYEFRAVDALITNFHVPRSTLMMLVSAFSTRDNVMAAYAHAIAERYRLLSFGDAMLIR

SEQ ID NO: 67028 - protein, 359 aa, Gordonibacter sp.
  misc_feature (1)..(359): tr|A0A1Y4GI73|A0A1Y4GI73_9ACTN S-adenosylmethionine:tRN A ribosyltransferase-isomerase OS=Gordonibacter sp. An2 32A OX=1965593 GN=queA PE=3 SV=1
MLTSDFDYDLPPELIAQEPAPDRDGCRLLVMDRATGALEDRVFRDIADYLRPGDVLVANETRVMPARLIGKKRGTGGAAEVFLLRQHGTPTQNRSALWEVLVRPGKRLKPGSGAVVDFADATGNTVLSAEVVDWARNAQKGERVARLSTTLPSLDEALHAVGRTPLPPYIKDYAGDEELYQTVYSRRESSAAAPTAGLHFTPELIDRLREKGVGWETVELEVGLDTFRIVDEDDPERHVIHTEFYTVPRRTADAVNEARERGGRVVAVGTTSVRSLESAWDAEACRLMPKDREATSLYILPGYEFHAVDALVTNFHVPRSTLMMLVSAFSTRDNIMAAYAHAVAERYRMLSFGDAMLIG

SEQ ID NO: 67029 - protein, 359 aa, Gordonibacter urolithinfaciens
  misc_feature (1)..(359): tr|A0A423UJN6|A0A423UJN6_9ACTN S-adenosylmethionine:tRN A ribosyltransferase-isomerase OS=Gordonibacter urolith infaciens OX=1335613 GN=queA PE=3 SV=1
MKTSDFDYDLPEELIAQEPAAERDGCRLLVMDRVTGALEDRVFRDIAEYLRPGDLLVANETRVMPARLLGAKRGTGGAAEVFLLRQHGTPLDNKSALWEVLVRPGKRLKPGTGAIVDFTDAAGQVALSAEIVDWIADAQKGERLARLITPLPSLDEALHAVGHTPLPPYIKDYAGDEELYQTVYSRRESSAAAPTAGLHFTPELIERLHKQGVGWETVELEVGLDTFRIVDEDDPEKHVIHTERYSVPARTVDAIAATRERGGRVVAVGTTSVRSLESAWDAEAGIVTPREREATSLYLLPGSEFHVVDALVTNFHVPRSTLMMLVSAFSTREHIMAAYRHAIAERYRLLSFGDAMLIC

SEQ ID NO: 67030 - protein, 359 aa, Gordonibacter urolithinfaciens
  misc_feature (1)..(359): tr|A0A1Y4FUD3|A0A1Y4FUD3_9ACTN S-adenosylmethionine:tRN A ribosyltransferase-isomerase OS=Gordonibacter urolith infaciens OX=1335613 GN=queA PE=3 SV=1
MKTSDFDYDLPEELIAQEPAAERDGCRLLVMDRVTGALEDRVFRDIAEYLRPGDLLVANETRVMPARLLGAKRGTGGAAEVFLLRQHGTPLDNKSALWEVLVRPGKRLKPGTGAIVDFTDAAGQVALSAEIVDWIADAQKGERLARLITPLPSLDEALHAVGHTPLPPYIKDYAGDEELYQTVYSRRESSAAAPTAGLHFTPELIERLHKQGVGWETVELEVGLDTFRIVDEDDPEKHVIHTERYSVPARTVDAIAATRERGGRVVAVGTTSVRSLESAWDAEAGAVTPREREATSLYLLPGSEFHVVDALVTNFHVPRSTLMMLVSAFSSRENIMTAYRHAIAERYRLLSFGDAMLIC

SEQ ID NO: 67031 - protein, 341 aa, Gottschalkia acidurici
  misc_feature (1)..(341): tr|K0AW07|K0AW07_GOTA9 S-adenosylmethionine:tRNA ribosy ltransferase-isomerase OS=Gottschalkia acidurici (strai n ATCC 7906 / DSM 604 / BCRC 14475 / CIP 104303 / NCIMB 10678 / 9a) OX=1128398 GN=queA PE=3 SV=1
MNTHDFYFDLPEELIAQYPLKNREKSKLLFLEKKTGKIEHKIFEDIIDYLEKGDCIILNNTRVIPARLFGKREDTGANIEFLLLKRIEGDTWETLVKPGKKARIGTKVVFGNGELRGEIIDIAEDGTRIIKFIYEGIFQEILDILGEMPLPPYITQKLEDRERYQTVYSKKEGSAAAPTAGLHFTQELLDKIDAKGVNIGYVTLHVGLGTFRPVKVENIHDHSMHSEYFEIEESVAKLVNDTKKKGKKVIAVGTTSIRTLESSVDENSMVKSGSGWTDIFIYPGYEFKVVDRLITNFHLPESTLIMLVSALASRENTLRAYEEAVKLKYRFFSFGDAMFIY

SEQ ID NO: 67032 - protein, 341 aa, Gottschalkia purinilytica
  misc_feature (1)..(341): tr|A0A0L0WCQ1|A0A0L0WCQ1_GOTPU S-adenosylmethionine:tRN A ribosyltransferase-isomerase OS=Gottschalkia purinily tica OX=1503 GN=queA PE=3 SV=1
MKKEDFYFELPEDLIAQYPLENREESRLLVLNKETGEINHKVFKEIIEYLEEGDCLVLNNTRVIPARIFGQRVDTGSSIEFLLLKRVEGDIWETLVKPGKKAKIGSEIIFGDGELKAKVLDILEGGTRVIEFYYDGIFQEILDRLGEMPLPPYITAKLEDKERYQTVYSKEEGSAAAPTAGLHFTKELIQEISKKGVKIAYVTLHVGLGTFRPVKSDNIEDHIMHSEYFEISEDAVELINSSKKNGKKVIAVGTTSVRTLESSVNEEGKLIPKSGWTDIFIYPGYEYKVIDRLITNFHLPESTLIMLVSALAGKENTMNAYEVAVKEKYRFFSFGDAMFII

SEQ ID NO: 67033 - protein, 341 aa, Gottschalkiaceae bacterium
  misc_feature (1)..(341): tr|A0A521J5C0|A0A521J5C0_9FIRM S-adenosylmethionine:tRN A ribosyltransferase-isomerase OS=Gottschalkiaceae bact erium OX=2527676 GN=queA PE=3 SV=1
MKKEDFYFDLPEKLIAQTPIENREGSRLLILDKETGVIEHRFFSDIIQYLNPGDCLVLNNTRVIPARLYGHREDTKSSVEFLLLRRIDKDKWETLVKPGKKAKPGAIFNFGEGIMKGEILEIKDGGTRVIEFKYKGIFEEILDKLGEMPLPPYIKEKLEDRERYQTVYAKKEGSAAAPTAGLHFTESLLHKIKEKGVNIAYITLHVGLGTFRPVKVDNIEEHTMHSEFYEIDEYTANIINNTKEAGGRIVAVGTTSVRTIESASDEDGRLNSKQGWTNIFIHPGYRFKVVDRLITNFHLPESTLIMLVSALASRENVLQAYEEAVKQGYRFFSFGDAMFIK

SEQ ID NO: 67034 - protein, 43 aa, Gracilibacillus boraciitolerans
  misc_feature (1)..(43): tr|W4VN20|W4VN20_9BACI S-adenosylmethionine:tRNA ribosy ltransferase-isomerase OS=Gracilibacillus boraciitolera ns JCM 21714 OX=1298598 GN=JCM21714_3284 PE=3 SV=1
MPKSTLIMLVSALADRDFILEAYHKAVEERYRFFSFGDAMLII

SEQ ID NO: 67035 - protein, 254 aa, Gracilibacillus boraciitolerans
  misc_feature (1)..(254): tr|W4VL81|W4VL81_9BACI S-adenosylmethionine:tRNA ribosy ltransferase-isomerase OS=Gracilibacillus boraciitolera ns JCM 21714 OX=1298598 GN=JCM21714_3285 PE=3 SV=1
MEIEDFDFELPEELIAQTPLKDRASSRLMKLNRDKRTITHHHFYDIVDLLHAGDCLVLNDTKVLPARLYGIKEDTDAKVEILLLKQIENDDWEVLAKPAKKIQEGTQISFGNGKLTATCIEIKEHGGRILRFNYQGIFYEVLDQLGEMPLPPYIKEQLKEKDRYQTVYAKEQGSAAAPPTAGLHFTEELLEKLKQKGGIEIAFITLHVGIGTFRPVRVDNIQEHEMHAEFYQMTQKTADQLNAVKNRGEIVLYP

SEQ ID NO: 67036 - protein, 342 aa, Gracilibacillus dipsosauri
  misc_feature (1)..(342): tr|A0A317KY72|A0A317KY72_9BACI S-adenosylmethionine:tRN A ribosyltransferase-isomerase OS=Gracilibacillus dipso sauri OX=178340 GN=queA PE=3 SV=1
MKIDDFDFELPEKLIAQTPLKDRSSSRLMVLNREMRTISHHHFYDVLDFLEKGDCLVLNDTKVLPARLFGTKKDTGAKVEVLLLTQMEQDDWEVLVKPARKIQIGTEISFGDGKLRAICVDTKEHGGRILRFRYQGIFYEVLDELGEMPLPPYIKEQLEEKDRYQTVFAREQGSAAAPTAGLHFTDELLEEIKQKGVEIAFITLHVGLGTFRPVSVEDVTTHEMHAEFYQMTSETAEQLNKVKKRGGRIISVGTTSTRTLETIARDTGGNFEERNGWTDIFIYPPYQFQAIDGLITNFHLPKSTLIMLVSALADREFILEAYNQAVKEKYRFFSFGDAMLII

SEQ ID NO: 67037 - protein, 342 aa, Gracilibacillus halophilus
  misc_feature (1)..(342): tr|N4WVK8|N4WVK8_9BACI S-adenosylmethionine:tRNA ribosy ltransferase-isomerase OS=Gracilibacillus halophilus YI M-C55.5 OX=1308866 GN=queA PE=3 SV=1
MRIEDFDFDLPEELIAQTPLKDRSSSRLMVLHRQEQRVAHHHFYEMIDFLHPGDCLVLNDTKVLPARLYGIKEDTGAKVEVLLLNQIEHDDWEVLVKPAKKLKVGTKVTFGHGQLTATCVDTMEHGGRVLRFDYDGIFYEVLDALGEMPLPPYIKEQLDEADRYQTVYAKEKGSAAAPTAGLHFTEELLDKLKKKGIEIAFITLHVGLGTFRPVNVENITEHEMHAEFYQMTEETAETLNRVKAKGGRIISVGTTSTRTLETVARDTGGTFEARNGWTDIFIYPSYQFQAIDGLITNFHLPKSTLIMLVSALAGRDFILEAYQTAVKEKYRFFSFGDAMLIL

SEQ ID NO: 67038 - protein, 342 aa, Gracilibacillus kekensis
  misc_feature (1)..(342): tr|A0A1M7NYS3|A0A1M7NYS3_9BACI S-adenosylmethionine:tRN A ribosyltransferase-isomerase OS=Gracilibacillus keken sis OX=1027249 GN=queA PE=3 SV=1
MEIEDFDFDLPEELIAQTPLQERASSRLMVLNRENRKISHHHFYDILDFLNEGDCLVLNDTKVLPARLYGIKEETGAKVEVLLLTQMENDDWEVLVKPAKKIKAGSKITFGDGQLIATCLEIKEHGGRILRFEYQGIFYEVLDQLGEMPLPPYIKEQLEEKDRYQTVYAKEQGSAAAPTAGLHFTETLLRKIKQKGIDIAFITLHVGLGTFRPVSVDNIKEHEMHAEFYQMTQETADQLNEVKKSGNRIISVGTTSTRTLETIARDTGGVFEERNGWTDIFIYPPYQFKAIDGLITNFHLPKSTLIMLVSALADRDFILEAYHKAVDERYRFFSFGDAMLII

SEQ ID NO: 67039 - protein, 342 aa, Gracilibacillus orientalis
  misc_feature (1)..(342): tr|A0A1I4MQ02|A0A1I4MQ02_9BACI S-adenosylmethionine:tRN A ribosyltransferase-isomerase OS=Gracilibacillus orien talis OX=334253 GN=queA PE=3 SV=1
MEIEDFDFDLPEELIAQTPLEERASSRLMVLNRENRSITHHHFYDILDFLKSGDCLVLNNTEVLPARLYGVKEETGAKVEVLLLTQLEDDDWEVLVKPAKKITEGTKISFGEGKLTATCVDTKEHGGRVLRFHYDGIFYEVLDQLGEMPLPPYIKEQLDERNRYQTVYAKEKGSAAAPTAGLHFTEALLQQIREKGVEIAFITLHVGLGTFRPVSVDNIAEHEMHAEFYQMTKETADQLNQVKIRGDRIISVGTTSTRTVETIARDTGGKFEERNGWTDIFIYPPYQFKAIDGLITNFHLPKSTLIMLVSALADRDFILEAYNKAVTERYRFFSFGDAMLIM

SEQ ID NO: 67040 - protein, 342 aa, Gracilibacillus ureilyticus
  misc_feature (1)..(342): tr|A0A1H9RNG8|A0A1H9RNG8_9BACI S-adenosylmethionine:tRN A ribosyltransferase-isomerase OS=Gracilibacillus ureil yticus OX=531814 GN=queA PE=3 SV=1
MRIEDFDFNLPEELIAQTPLKDRTSSRLMVLDKEKHTIRNHHFYEVIDFLNEGDCLVLNDTKVLPARLYGTKTDTGGKVEVLLLTQMENDDWEVLVKPAKRIKAGTEISFGDGKLTATCIDTKDHGGRILRFHYEGIFYEVLDELGEMPLPPYIKEQLNERDRYQTVYAKEEGSAAAPTAGLHFTEDLLEKIKQKGIEIAFITLHVGLGTFRPVSVEDVETHEMHAEFYQMTEETAAQLNAVKKRGGRIISVGTTSTRTLETIARDTGGTFAAKNGWTDIFIYPPYTFKAIDGLITNFHLPKSTLIMLVSALADRDFILEAYNKAVEEKYRFFSFGDAMLIL

SEQ ID NO: 67041 - protein, 345 aa, Gracilibacter sp.
  misc_feature (1)..(345): tr|A0A101W5E1|A0A101W5E1_9FIRM S-adenosylmethionine:tRN A ribosyltransferase-isomerase OS=Gracilibacter sp. BRH _c7a OX=1734398 GN=queA PE=3 SV=1
MQLKDFDFYLPEELIAQVPIEPRDRSRMMLIDRAKGELFHYQFNQLDKLLKADDVLVLNKTKVIPARLFGNKKATGTQIEVLLLNRLEKDLWEVILRPGKRLKLGQKVVFGKGLLEGELISIKDNGNRLIKFEYEGLFEEVLDELGKMPLPPYIHIELEDKERYQTVYAKESGSAAAPTAGLHFTEDLLEKLRSKGVEILEITLHVGLGTFRPVKTENILEHEMHSEYFRLDPQTADRINLAKKEGRKVIAVGTTVVRTLESAATYSTKKEGELSALDGWTDIFIYPGYEFKIIDGLITNFHFPRSTLIMLVSAFANRELIMKAYETAVKERYRFFSFGDCMLIL

SEQ ID NO: 67042 - protein, 351 aa, Gracilimonas mengyeensis
  misc_feature (1)..(351): tr|A0A521FKE6|A0A521FKE6_9BACT S-adenosylmethionine:tRN A ribosyltransferase-isomerase OS=Gracilimonas mengyeen sis OX=1302730 GN=queA PE=3 SV=1
MKLTDFKFEIDDLNVPEEPLEKRDSAKLMVLNRAEKTIEHKTFSDIHEYVNEGDVVIYNNTKVFPARLKGKKEKTEADIEVFLLRELMPENMLWDVLVEPARKIRIGNKLYFGEEDDELMAEVVDNTTSRGRTIRFLYEGPNQELYDKLDELGMMPLPPYIEREPVEADKERYQTIFATERGAVAAPTAGMHFTPELVKKIEDKGAEFLPTTLHIGWGTFRNVEVEDLTKHRMDSENYFISKDTSDKINKALKSKKNKVIAIGTSAVRTIETSVMASGMSKPGTGWTDKFIYPPYEFKITEALITNFHRPESTLLMLGAAFAGYDFLMEAYEEAKEKDYRMFSFGDAMLII

SEQ ID NO: 67043 - protein, 333 aa, Gracilimonas mengyeensis
  misc_feature (1)..(333): tr|A0A521CDY1|A0A521CDY1_9BACT S-adenosylmethionine:tRN A ribosyltransferase-isomerase OS=Gracilimonas mengyeen sis OX=1302730 GN=queA PE=3 SV=1
MNFTLSDFDYDLPEKLIAQAPASPRDHARLLVYNRETGTITDDYFYNLGKYLPNETTLVVNNSKVEKCRLLFDDGKRELFVTSVRNNNTVEAMVRPGKKFKLDREVELAEGITAKVTNIADDGIRTVILSCDVDDPKLEPYKHTPFPPYIEQNESLSEEYQTVYAKDLGSKAAPTAGLHFTDNLLEDLKNAGVRKSEVTLHVGLGTFAPVKTEDISEHNMHSEWYQLGAFTCEELNEAKHITAVGTTSVRVLESAAKEPRGFQPESRDTDIFITPGYKFKATDALITNFHLPKSTLLMLVSAFMGYEEMNRLYQHAIEEEYRFYSFGDAMLIL

SEQ ID NO: 67044 - protein, 333 aa, Gracilimonas sp.
  misc_feature (1)..(333): tr|A0A316TSN5|A0A316TSN5_9BACT S-adenosylmethionine:tRN A ribosyltransferase-isomerase OS=Gracilimonas sp. 8A47 OX=2079485 GN=queA PE=3 SV=1
MQFTLSDFDYHLPEELIAQKPAEPRDHSRLLVYNRSTEKITDDHFYNIGDHLPQETSLVVNNSRVEKCRLLFNKGRIEIFVIKAVDDRVVEAMVRPGKKFKKGKTVELPGGITASTIDIAEDGIRTLKLSHSIDHPLLEPYRHTPFPPYIERDESLAERYQTVYAKDEGSKAAPTAGLHFTPALLKTLSDRGIEKKEVTLHVGLGTFAPVKSEKIEEHIMHSEWYQVTAEQAEALNRSKSITAVGTTCVRVLESAPKKNGMFIASSGETDIFITPGYTFTSVDHLITNFHLPKSTLLMLIAAFTGFDEMQKIYEHAIREKYRFYSFGDAMLLL

SEQ ID NO: 67045 - protein, 348 aa, Gracilimonas sp.
  misc_feature (1)..(348): tr|A0A316TKZ3|A0A316TKZ3_9BACT S-adenosylmethionine:tRN A ribosyltransferase-isomerase OS=Gracilimonas sp. 8A47 OX=2079485 GN=queA PE=3 SV=1
MKLTDFKFEIDHFNVPDEPAEPRDSSRLMVLDREDKSIKHEKFSDIHKYLNKGDVVVYNNTKVFPAKLKGKKEKTEADIEVFLLRELQPENMLWDVLVEPARKIRIGNKLYFGEDLMAEVVDNTTSRGRTIRFLYEGPNQDLYERLDEIGDMPLPPYIEREPKDSDKENYQTIFAKERGAVAAPTAGMHFTPELVEKLEKKGVDFVPVTLHIGWGTFRPVEVEDLTKHRMDSENYYISKESSDRINEALKSKKNKVVACGTSAVRVIETSVMASGMSKPGTGWTDKFIYPDYNFKITEAIITNFHRPESTLLMLAAAFGGFEYIKEAYKEAVKEDYRFFSFGDAMLIL

SEQ ID NO: 67046 - protein, 351 aa, Gramella flava
  misc_feature (1)..(351): tr|A0A1L7I6V2|A0A1L7I6V2_9FLAO S-adenosylmethionine:tRN A ribosyltransferase-isomerase OS=Gramella flava JLT201 1 OX=1229726 GN=queA PE=3 SV=1
MGMKLSHFNFELPKELLAEYPSEHRDEARLMVLNRKDQTIEHKKFKDIIDYFDPEDVMVLNNTKVFPARLYGNKEKTGARIEVFLLRELNPETKLWDVLVDPARKIRIGNKLYFGEDESLVAEVIDNTTSRGRTLRFLYDGSYSDFRKKLKELGQTPLPKYIKRDVEPEDEERYQTIYAKNEGAVAAPTAGLHFSKHLLKRLEIKGVDFAEVTLHVGLGTFSPVEVEDLSKHKMDSEEAFITKDATDVINKAKAEKRKVCAVGTTVMRVLESSVSSNQTLNEFSGWTNKFIFPPYDFNIANCMITNFHTPKSTLLMMISAFAGHDFMKKAYEEAVKEKYRFYTYGDAMLIL

SEQ ID NO: 67047 - protein, 351 aa, Gramella forsetii
  misc_feature (1)..(351): tr|A0LY93|A0LY93_GRAFK S-adenosylmethionine:tRNA ribosy ltransferase-isomerase OS=Gramella forsetii (strain KT0 803) OX=411154 GN=queA PE=3 SV=1
MGMKLSNFNFELPQELLAEYPSENRDEAKLMVLNRKEQTIEHKKFKDLIDYFEPEDVMVLNNTKVFPARLYGNKEKTGARIEVFLLRELNPETKLWDVLVDPARKIRIGNKLYFGEDESLVAEVIDNTTSRGRTLRFLYDGSYSDFRIKLKELGQTPLPKYIKRDVEPSDEDRYQTIYAKNEGAVAAPTAGLHFSKHLLKRLEIKGIDFAEVTLHVGLGTFSPVEVEDLSKHKMDSEEAFITKDATEVINNAKTEKRRVCAVGTTVMRVLESAVSSDQTLNEFGGWTNKFIFPPYDFNIANCMITNFHTPKSTLLMMVSAFAGHDFMKKAYEEAVKEKYRFYTYGDAMLII

SEQ ID NO: 67048 - protein, 351 aa, Gramella gaetbulicola
  misc_feature (1)..(351): tr|A0A2T6AKC1|A0A2T6AKC1_9FLAO S-adenosylmethionine:tRN A ribosyltransferase-isomerase OS=Gramella gaetbulicola OX=703340 GN=queA PE=3 SV=1
MGMKLSNFNFELPKELLAEYPSENRDEARLMVLNRKEQTIEHKKFKDLIDYFEPEDVMVLNNTKVFPARLYGNKEKTGARIEVFLLRELNPETKLWDVLVDPARKIRIGNKLYFGEDESLVAEVIDNTTSRGRTLRFLYDGSYTDFRKKLKELGQTPLPKYIKREVEPEDEERYQTIYAKNEGAVAAPTAGLHFSKHLLKRLEIKGVDFAEVTLHVGLGTFSPVEVEDLSKHKMDSEEAYITKDATEVINKAKTERRRVCAVGTTVMRVLESAVSSDQTLNEFGGWTNKFIFPPYDFNIANCMITNFHTPKSTLLMMVSAFAGHDFMKKAYEEAVKEKYRFYTYGDAMLIL

SEQ ID NO: 67049 - protein, 349 aa, Gramella jeungdoensis
  misc_feature (1)..(349): tr|A0A4Y8ARJ4|A0A4Y8ARJ4_9FLAO S-adenosylmethionine:tRN A ribosyltransferase-isomerase OS=Gramella jeungdoensis OX=708091 GN=queA PE=3 SV=1
MKLSHFKFELPEDLLAEYPAEHRDESRLMVLNRKEKTIEHKQFKDLINYFDEGDLMVLNNTKVFPARMYGEKEKTGARIEVFLLRELNAESRLWDVLVDPARKIRIGNKLFFGDDESLVAEVIDNTTSRGRTLRFLYDGSYEEFRKKLEELGETPLPKYIKREVNEDDEERYQTIYAKHEGAVAAPTAGLHFSKHLMKRLEIKGVDFAEVTLHVGLGTFSAVEVEDLSKHKMDSEQAIIPDETVEIVNNAIDTKRRVCAVGTTVMRAMESSVSSNNHLNSFNGWTNKFIFPPYDFSIANCMITNFHTPKSTLMMMAAAFAGYDFLMEAYEEAVKEGYKFYSYGDAMLII

SEQ ID NO: 67050 - protein, 349 aa, Gramella salexigens
  misc_feature (1)..(349): tr|A0A1L3J8G6|A0A1L3J8G6_9FLAO S-adenosylmethionine:tRN A ribosyltransferase-isomerase OS=Gramella salexigens O X=1913577 GN=queA PE=3 SV=1
MKLSNFNFELPKELLAEYPSEHRDEARLMVLNRKEQTIEHKYFKDIIDYFEPEDVMVLNNTKVFPARLYGNKEKTGARIEVFLLRELNPETKLWDVLVDPARKIRIGNKLYFGEDESLVAEVIDNTTSRGRTLRFLYDGSYIDFRKKLKELGQTPLPKYIKRDVEPEDEERYQTIYAKNEGAVAAPTAGLHFSKHLLKRLEIKGIDFAEVTLHVGLGTFSPVEVEDLSKHKMDSEEAFIKKDATEVINKAKLEKRKVCAVGTTVMRVLESAVSSNQTLNEFGGWTNKFIFPPYDFNIANCMITNFHTPKSTLLMMVSAFAGHDFMKKAYEEAVKEKYRFYTYGDAMLIL

SEQ ID NO: 67051 - protein, 349 aa, Gramella sp.
  misc_feature (1)..(349): tr|A0A2D8KQJ3|A0A2D8KQJ3_9FLAO S-adenosylmethionine:tRN A ribosyltransferase-isomerase OS=Gramella sp. OX=19312 28 GN=queA PE=3 SV=1
MKLSHFNFELPKELLAEYPSEHRDEARLMVLNRKDQTIEHKKFKDIIDYFDPEDVMVLNNTKVFPARLYGNKEKTGARIEVFLLRELNPETKLWDVLVDPARKIRIGNKLYFGEDESLVAEVIDNTTSRGRTLRFLYDGSYSDFRKKLKELGQTPLPKYIKRDVEPEDEERYQTIYAKNEGAVAAPTAGLHFSKHLLKRLEIKGVDFAEVTLHVGLGTFSPVEVEDLSKHKMDSEEAFITKDATDVINKAKAEKRKVCAVGTTVMRVLESSVSSNQTLNEFSGWTNKFIFPPYDFNIANCMITNFHTPKSTLLMMISAFAGHDFMKKAYEEAVKEKYRFYTYGDAMLIL

SEQ ID NO: 67052 - protein, 349 aa, Gramella sp.
  misc_feature (1)..(349): tr|A0A2R3ZB09|A0A2R3ZB09_9FLAO S-adenosylmethionine:tRN A ribosyltransferase-isomerase OS=Gramella sp. SH35 OX= 2126553 GN=queA PE=3 SV=1
MKLSNFNFELPKELLAEYPTENRDEARLMVLNRKEQTIEHKKFKDLIDYFEPEDVMVLNNTKVFPARLFGNKEKTGARIEVFLLRELNPETKLWDVLVDPARKIRIGNKLYFGEDESLVAEVIDNTTSRGRTLRFLYDGSYSDFRRKLKELGQTPLPKYIKRDVEPEDEERYQTIYAKNEGAVAAPTAGLHFSKHLLKRLEIKGVDFAEVTLHVGLGTFSPVEVEDLSKHKMDSEEAFITKDATDIINKAKSERRKVCAVGTTVMRVLESSVSSNQTLNEFAGWTNKFIFPPYDFNIANCMVTNFHTPKSTLLMMVSAFAGHDFVKKAYAEAVKEKYRFYTYGDAMLIL

SEQ ID NO: 67053 - protein, 351 aa, Granulibacter bethesdensis
  misc_feature (1)..(351): tr|A0A1L3RV69|A0A1L3RV69_9PROT S-adenosylmethionine:tRN A ribosyltransferase-isomerase OS=Granulibacter bethesd ensis OX=364410 GN=queA PE=3 SV=1
MSTAPLDIADFTFDLPPERIAHEPARPRESARLLHVPAGEEGFHDHHIRDLPDLLSPGDVLVANDTRVIPAQLTAWRGQARIGLTLNRPLPDGSWHVLARNARRLRAGDRLRFTEEDTQPTGMLAAEVVARDEDGGAILRFVAEDFDAALAQYGALALPPYIDRPQGPTDQDARDYQTVFARHRGAVAAPTAGLHFTPALLDRLEAKGIERVTITLHVGAGTFLPMRDDTIEAHRLHAERGVITPEAASRINAAKRIVAVGTTSLRLLESAADATGGVRPFDAETDIFIKPGHRFRTAHALLTNFHLPRSTLFMLVCAFAGTARMRAAYAHAIAEAYRFYSYGDACLIERG

SEQ ID NO: 67054 - protein, 361 aa, Granulibacter bethesdensis
  misc_feature (1)..(361): tr|Q0BVG5|Q0BVG5_GRABC S-adenosylmethionine:tRNA ribosy ltransferase-isomerase OS=Granulibacter bethesdensis (s train ATCC BAA-1260 / CGDNIH1) OX=391165 GN=queA PE=3 S V=1
MSTAPLDIADFTFDLPPERIAHEPARPRESARLLHVPAGEEGVHDHHIRDLPDLLRPGDVLVANDTRVIPAQLTAWRGQARIGLTLNRPLPDGSWHVLARNARRLRAGDRLRFTEHDTQSTHTQPTGMLAAEVVARDEDGGAILRFVAEDFDAALAQYGALALPPYIDRPQGPTAQDAKDYQTVFARHRGAVAAPTAGLHFTPALLDRLAAKGIERVTITLHVGAGTFLPMRDDTIEAHRLHAERGVITPEAASRINAAKRVIAVGTTSLRLLESAADAAGGVRPFDAETDIFIKPGHRFRTAHALLTNFHLPRSTLFMLVCAFAGTARMRAAYAYAIAEAYRFYSYGDACLIERDLRDRH

SEQ ID NO: 67055 - protein, 345 aa, Granulicatella adiacens
  misc_feature (1)..(345): tr|C8NF57|C8NF57_9LACT S-adenosylmethionine:tRNA ribosy ltransferase-isomerase OS=Granulicatella adiacens ATCC 49175 OX=638301 GN=queA PE=3 SV=1
MNYTTKDFDFDLPEELIAQTPLKDRTSSRLLMVDKTKHTIEDRHFSDLLEELEAGDTLVVNNTRVLPARLYGTKEETGAHIEVLLLTNTEGDKWETLVKPAKRMKVGSVVSFGDGRLKATVIEELEQGGRIIEFSYEGVFLEVLESLGEMPLPPYIKERLEDKERYQTVYAKENGSAAAPTAGLHFTEELMQQIRDKGVNIVPVTLHVGLGTFRPVSVDSLEDHKMHSEYYNVSKETADMIEATKKAGKRVIAVGTTSIRTLETVARDNDGHVVPASGWTDIFISPGYEFGVVDAFVTNFHLPKSTLVMLVSAYLGREFTLEAYQHAIEERYRFFSFGDAMFVHK

SEQ ID NO: 67056 - protein, 346 aa, Granulicatella balaenopterae
  misc_feature (1)..(346): tr|A0A1H9MQD2|A0A1H9MQD2_9LACT S-adenosylmethionine:tRN A ribosyltransferase-isomerase OS=Granulicatella balaen opterae OX=137733 GN=queA PE=3 SV=1
MGFTTNDFDFNLPEELIAQTPLKNRASSKLLTVDAITNKMEDKHFSEIIGELNAGDTLVINNTRVLPARLHGVKEETGAHCEVLLLTNTEGDTWETLVKPAKRFKVGTKITFGDGRLTATVLETLEQGGRMIEFSYDGVFLEIIESLGEMPLPPYIKEKLEDQDRYQTVYAKENGSAAAPTAGLHFTNEVLDELKAKGVNVVPVTLHVGLGTFRPVSVDNLEDHKMHSEYYQISPETAEIVNKTKEAGGRVIAVGTTSIRTLETVAKANNGRLVATSGWTDIFISPGYEFALVDAFVTNFHLPKSTLVMLVSAYLGRENTLACYQHAIDEKYRFFSFGDAMFVYRS

SEQ ID NO: 67057 - protein, 345 aa, Granulicatella elegans
  misc_feature (1)..(345): tr|D0BJU6|D0BJU6_9LACT S-adenosylmethionine:tRNA ribosy ltransferase-isomerase OS=Granulicatella elegans ATCC 7 00633 OX=626369 GN=queA PE=3 SV=1
MNYTTQDFDFDLPEEQIAQTPLKDRTSSRLLVVNETEHSVEDKHFSEIIDYLEEGDILVVNNTRVLPARLYGEKEGTGAHIEVLLLHNTHGDCWETLVKPAKRMKVGTVVSFGDGRLKATVTEELEQGGRIIEFQYDGVFLEILESLGEMPLPPYIKERLDDQERYQTVYAKENGSAAAPTAGLHFTKELMEKIQQKGIQIVPITLHVGLGTFRPVSVDHLEDHKMHSEYYHISKETAEVIAETKKNGKRVIAVGTTSIRTLETVGSANQGEIVPSSGWTDIFISPGYEFKVVDAFITNFHLPKSTLVMLVSAYLGRDFTLEAYHHAIRERYRFFSFGDAMFVYR

SEQ ID NO: 67058 - protein, 345 aa, Granulicatella sp.
  misc_feature (1)..(345): tr|A0A1F1SG80|A0A1F1SG80_9LACT S-adenosylmethionine:tRN A ribosyltransferase-isomerase OS=Granulicatella sp. HM SC31F03 OX=1581074 GN=queA PE=3 SV=1
MNYTTKDFDFDLPEELIAQTPLKDRTSSRLLVVDKTTHSIEDKHFSDLLDELEEGDTLVVNNTRVLPARLYGTKEETGAHIEALLLTNTEGDKWETLVKPAKRMKVGSVVSFGDGRLKATVVEELEQGGRIIEFSYEGVFLEVLESLGEMPLPPYIKERLEDKERYQTVYAKENGSAAAPTAGLHFTEELMQKIREKGVNIVPVTLHVGLGTFRPVSVDSLEDHKMHSEYYNVSKETADMIEATKKAGKRVIAVGTTSIRTLETVARDNDGHVVPASGWTDIFISPGYEFRVVDAFVTNFHLPKSTLVMLVSAYLGREFTLEAYQHAIEERYRFFSFGDAMFVHK

SEQ ID NO: 67059 - protein, 342 aa, Granulicatella sp.
  misc_feature (1)..(342): tr|A0A4Y9J4R4|A0A4Y9J4R4_9LACT S-adenosylmethionine:tRN A ribosyltransferase-isomerase OS=Granulicatella sp. WM 01 OX=2558277 GN=queA PE=3 SV=1
MLTTKDFDFDLPEQLIAQTPLKERSQSKLLVLNKKNGHYKDEIFVDVIHHLHKGDVLVLNDTKVLPARLMGTKVETGANIECLLLTNNKDDEWEVLIKPAKRAKVGTEITFGDGRLKATVIGEKEHGGRIVQFTYQGIFLEVLDSLGEMPLPPYIKEKLEDKERYQTVYAKQVGSAAAPTAGLHFTPELLQNIQEKGVHIAYVTLHVGLGTFRPVSSEVLDEHQMHAEFYQLTEENAQIIQQAKQSGGRIIAVGTTSIRTLETIMNTHHNIIASSGWTDIFIFPGYTFKAVDAFITNFHLPKSTLVMLVSAFAGREHVLQAYEHAIKNHYRFFSFGDAMIVE

SEQ ID NO: 67060 - protein, 373 aa, Granulicella mallensis
  misc_feature (1)..(373): tr|G8NV90|G8NV90_GRAMM S-adenosylmethionine:tRNA ribosy ltransferase-isomerase OS=Granulicella mallensis (strai n ATCC BAA-1857 / DSM 23137 / MP5ACTX8) OX=682795 GN=qu eA PE=3 SV=1
MLVSDFHYDLPEELIAQRPPAVRGTSRMMTLDRRTGDFSDHTFAELPLLLQPGDLLVMNDSRVIPARLFATRAGLTTQHNSPAPSGHIEVLLTQRHASAEGYNDWSALVRPAKKIQPGETLLFAPDDSTAPLLRATVLSAGEFGERTLRFDPAEDFHAALERIGHLPLPPYIHRSKQEPNTSEDRERYQTVYSQQLTSAEAEGSAAAPTAGLHFTPEVLSQLKERGVEFATLTLHVGLGTFQPVRVERTEDIRLHAEHYTLSTTTAEAIQRARREGRRIVAVGTTTTRTLEHIARETNGSEIAAHSGSTALFLSPGVEFKLVGGLLTNFHLPQSTLLMLVSAFAGREQALAAYAHAVEARYRFFSYGDCMLIT

SEQ ID NO: 67061 - protein, 360 aa, Granulicella pectinivorans
  misc_feature (1)..(360): tr|A0A1I6N1E4|A0A1I6N1E4_9BACT S-adenosylmethionine:tRN A ribosyltransferase-isomerase OS=Granulicella pectiniv orans OX=474950 GN=queA PE=3 SV=1
MLTADFDFHLPESLIAQTPPPVRGSSRMLVVDRATGAYTDGRFTDLPEHLGEGDLLILNDSRVLPARLFGTRARSTTTQASSPDPSGRVEVLLTQQVAPGTWTTLVRPAKKVQVGEKLLFHEGAAVVLEAVVLGAGEYGERTLRFSATDEFEAILQRIGHMPLPPYIHRDKGTPDSEEDRARYQTVYANQTGSAAAPTAGLHFTPEVLEALTRKGVQIERVTLHVGLGTFQPVRAERVVDIRLHAERYTLPAATAEAINVARREGRRIIAAGTTTTRTLEHCATLGAELYPHSGETSIFLSPGHRFQVVSGLLTNFHLPQSTLLMLVCAFAGTEHVLAAYAHAVEAKYRFFSYGDCMLLL

SEQ ID NO: 67062 - protein, 360 aa, Granulicella rosea
  misc_feature (1)..(360): tr|A0A239L5D7|A0A239L5D7_9BACT S-adenosylmethionine:tRN A ribosyltransferase-isomerase OS=Granulicella rosea OX =474952 GN=queA PE=3 SV=1
MLVSDFNYELPEELIAQAPPAVRGASRMLAMDRRTGAVTDDRFVNLPEYLRAGDLLVLNDSRVLPARLYATRGGLRTQVKSPEPSGRIEVLLTQQLGPELWTALVRPGKKVQPGETLSFADPAGAPVLTAEVVAAGEFGERTLRFAPDPRFLQILDRIGHMPLPPYIHRDKDAPDTDEDKARYQTVYAHQPGSAAAPTAGLHFTPEILAAIRERGVQVETVTLHVGLGTFQPVRAERLEDIRLHTEHYTLPAATASAINLARADGRRIIAAGTTTTRTLEHCATLGAELAPHSGQTSIFIQPGHEFRVVSGLLTNFHLPQSTLVMLVSAFAGREAVLAAYAHAVAQRYRFFSYGDCMLLL

SEQ ID NO: 67063 - protein, 362 aa, Granulicella sibirica
  misc_feature (1)..(362): tr|A0A4Q0SYY2|A0A4Q0SYY2_9BACT S-adenosylmethionine:tRN A ribosyltransferase-isomerase OS=Granulicella sibirica OX=2479048 GN=queA PE=3 SV=1
MLTSDFQFQLPERLIAQTPPAIRGTSRMLALDRRSGAYEDTSFSDLPNRLQPGDLLVLNDSRVLPARLFATRARSRMTQATSPDPSGRIEVLLTQKVADDQVWMALVKPARKVVPGETLHFADPDGATALEAEVIAAGEYGERTLRFSAKEDFLETIMRIGHMPLPPYIHRDRDTPDTAEDKDRYQTVYSHEIGSAAAPTAGLHFTPEVLEALRAKGVEIAYLTLHVGLGTFQPVRAEKVEDIRLHAERYTLSEATAEAVNRARRGGRRIIAAGTTTTRTLEHCATLAPELFPHTGETSIFISPGHTFQIIQGLLTNFHLPQSTLLMLVSAFAGRKAVLAAYAHAVEAQYRFFSYGDCMLIL

SEQ ID NO: 67064 - protein, 369 aa, Granulicella sp.
  misc_feature (1)..(369): tr|A0A3N1JZE4|A0A3N1JZE4_9BACT S-adenosylmethionine:tRN A ribosyltransferase-isomerase OS=Granulicella sp. GAS4 66 OX=2485170 GN=queA PE=3 SV=1
MRVSDFHFDLPEELIAQTPPATRGSSRMLFLDKKTGATSDVLFADLPHYLQDGDLLILNNSRVIPARLYATRAGLHTQSSSPDPSGQIEVLLTQQISPDEWTALVRPSRKVVVGERLLFAAPDNPTPLLQAEIITTGDFGERTLKFQPAPEFFSILNKIGHMPLPPYIHREDTPEDRDRYQTVFAHHPGSAAAPTAGLHFTEEMLATLKTKGIQIETVTLHVGLGTFQPVRVENLDDVRLHEEHYIIPEATADAIESAYKSKRRIIAVGTTAARTLEGAVLKHCEDPNARPFEGKLFSQAREGTTNIFISPGHKFALVNGLLTNFHLPQSTLLMLVSAFAGREAVLAAYAHAVCERYRFFSYGDCMLIL

SEQ ID NO: 67065 - protein, 368 aa, Granulicella tundricola
  misc_feature (1)..(368): tr|E8X0D6|E8X0D6_GRATM S-adenosylmethionine:tRNA ribosy ltransferase-isomerase OS=Granulicella tundricola (stra in ATCC BAA-1859 / DSM 23138 / MP5ACTX9) OX=1198114 GN= queA PE=3 SV=1
MLVSDFDYELPEELIAQTPPETRGASRMLRMDRASGALVDDSFASLPECLKAGDLLILNDTRVIPARLFGVRAGLHTQHNSPAPTGRIEVLLTSQISADDEGSTWETLVRPARKVQPGETLHFYDAERPSAPALTAEVLAAGEFGERTLRLIPADPQEPLTAILERIGHLPLPPYIYRPDEAPNTTADRERYQTVFAQPAGSAAAPTAGLHFTPEILAALKARGVEVQTLTLHVGLGTFQPVRAERTEDIRLHAEPYTLPAATAEAIQRAQAEGRRIVAVGTTVTRTLEHCAAIGNLAPHSGTTSLFLSPGHEFRVVGGLLTNFHLPQSTLVMLVSAFAGREATLAAYAHAVRERYRFFSYGDCMLIV

SEQ ID NO: 67066 - protein, 393 aa, Granulosicoccus antarcticus
  misc_feature (1)..(393): tr|A0A2Z2NZ48|A0A2Z2NZ48_9GAMM S-adenosylmethionine:tRN A ribosyltransferase-isomerase OS=Granulosicoccus antar cticus IMCC3135 OX=1192854 GN=queA PE=3 SV=1
MDKADIAQNSRLIERADTQSATPDLEAFRLSDFFYDLPDELIAQAPLAARSDSRLMVVDGRVGKASDTENSESQAVQHLSVRDLPRLLKKGDHLVFNNTRVIPARLYGAKASGGKLEMMLERVTSRGSVLAKIRASKSPKPGSIIVLSGRDTQSADCPHCEARVVGRQDDLFELEAVDNSNDVLTRFIEAQGEIPLPPYIERAPDAADDERYQTVFAKSPGAVAAPTAGLHFDEDLLQALSAAGITHSFITLHVGAGTFQPVRVENPAEHVMHAERVTVDAATVAEIQAAKARGGRIVAVGTTSVRALEAAAAETGVLAPFNGETRLFLVPGAKFYVVDAMVTNFHLPESTLLMLVASFTGLDTIMQAYRMAVLERYRFFSYGDAMLVWPKIS

SEQ ID NO: 67067 - protein, 356 aa, Grimontella sp.
  misc_feature (1)..(356): tr|A0A318GBY7|A0A318GBY7_9GAMM S-adenosylmethionine:tRN A ribosyltransferase-isomerase OS=Grimontella sp. AG753 OX=2183905 GN=queA PE=3 SV=1
MRVADFSFELPESLIAHYPQPERSSCRLLSLDGPTGALAHGTFTDLLDKLNPGDLLVFNNTRVIPARLFGRKASGGKIEVLVERMLDDKRILAHIRASKAPKPGAELLLGDDESINATMVARHDALFEVEFNDERPVLDILNAIGHMPLPPYIDRPDEDADRELYQTVYSQKPGAVAAPTAGLHFDEPLLARLREKGIEMAFVTLHVGAGTFQPVRVDSIEDHIMHSEYAEVPQEVVDAVLAAKARGNRVIAVGTTSVRSLESAAQAAKNALIEPFFGDTQIFIFPGYQYQVIDALVTNFHLPESTLIMLVSAFAGYKHTMHAYQEAVAHKYRFFSYGDAMFITYNPQAINERPGE

SEQ ID NO: 67068 - protein, 351 aa, Grimontia celer
  misc_feature (1)..(351): tr|A0A128ESQ8|A0A128ESQ8_9GAMM S-adenosylmethionine:tRN A ribosyltransferase-isomerase OS=Grimontia celer OX=17 96497 GN=queA PE=3 SV=1
MQVSDFHFDLPDSLIARYPQADRTASRLLQLNGNTGELSHKQFTDILDLVEPGDLMVFNNTRVIPARVYGRKASGGKIEVLVERMLDEKSILAHVRASKPPKPGTQLFLGENDEFEAEMVARHDALFEIHFSGEQAVLDILNQVGHMPLPPYIDRPDEESDKERYQTVYNEKPGAVAAPTAGLHFDENILAALKEKGVETAFVTLHVGAGTFQPVRVDDINDHVMHSEYAEVPQEVVDAVLATKARGNRVIAVGTTSVRSLESAAQHSKNESTELKPFFNDTQIFIYPGYEWQLVDALVTNFHLPESTLIMLVSSFAGYEHVMNAYQEAVNNEYRFFSYGDAMFVTRQTEV

SEQ ID NO: 67069 - protein, 351 aa, Grimontia hollisae
  misc_feature (1)..(351): tr|A0A377HQ20|A0A377HQ20_GRIHO S-adenosylmethionine:tRN A ribosyltransferase-isomerase OS=Grimontia hollisae OX =673 GN=queA PE=3 SV=1
MQVSDFHFDLPDSLIARYPQPDRTASRLLQLNGNTGELSHRQFTDILDLVEPGDLMVFNNTRVIPARVYGRKASGGKIEVLVERMLDEKTILAHVRSSKSPKPGTQLFLGENDEFEAEMVARHDALFEIRFAGEQAVLDILNQVGHMPLPPYIDRPDEDSDKERYQTVYNEKPGAVAAPTAGLHFDENILAALKEKGVQTAFVTLHVGAGTFQPVRVENINDHVMHAEYAEVPQEVVDAVLATKARGNRVIAVGTTSVRSLESAAQHAKKEGTELQPFFDDTQIFIYPGYEWQLVDALVTNFHLPESTLIMLVSSFAGYDHVMNAYKEAVSNEYRFFSYGDAMFVTRQTEV

SEQ ID NO: 67070 - protein, 351 aa, Grimontia hollisae
  misc_feature (1)..(351): tr|D0I7R6|D0I7R6_GRIHO S-adenosylmethionine:tRNA ribosy ltransferase-isomerase OS=Grimontia hollisae CIP 101886 OX=675812 GN=queA PE=3 SV=1
MQVSDFHFDLPDSLIARYPQPDRTASRLLQLNGNTGELSHRQFTDILDLVEPGDLMVFNNTRVIPARVYGRKASGGKIEVLVERMLDEKTILAHVRSSKSPKPGTQLFLGENDEFEAEMVARHDALFEIRFVGEQAVLDILNQVGHMPLPPYIDRPDEDSDKERYQTVYNEKPGAVAAPTAGLHFDENILAALKEKGVQTAFVTLHVGAGTFQPVRVENINDHVMHAEYAEVPQEVVDAVLATKARGNRVIAVGTTSVRSLESAAQHAKKEGTELQPFFDDTQIFIYPGYEWQLVDALVTNFHLPESTLIMLVSSFAGYDHVMNAYKEAVSNEYRFFSYGDAMFVTRQSEV

SEQ ID NO: 67071 - protein, 351 aa, Grimontia indica
  misc_feature (1)..(351): tr|R1GXF4|R1GXF4_9GAMM S-adenosylmethionine:tRNA ribosy ltransferase-isomerase OS=Grimontia indica OX=1056512 G N=queA PE=3 SV=1
MQVSDFHFDLPDSLIARYPQPDRTASRLLQLNGNSGELSHKQFTDILDLVEPGDLMVFNNTRVIPARVYGRKASGGKIEVLVERMLDEKSILAHVRASKPPKPGTQLFLGENDEFEAEMVARYDALFEIHFSGEQAVLDILNQVGHMPLPPYIDRPDEESDKERYQTVYNEKPGAVAAPTAGLHFDEKILAALKEKGVDTAFVTLHVGAGTFQPVRVDDINDHVMHSEYAEVPQEVVDAVLATKARGNRVIAVGTTSVRSLESAAQHSKNEGTELKPFFNDTQIFIYPGYEWQLVDALVTNFHLPESTLIMLVSSFAGYDHVMNAYQEAVNNEYRFFSYGDAMFVTRQTEV

SEQ ID NO: 67072 - protein, 351 aa, Grimontia marina
  misc_feature (1)..(351): tr|A0A128F406|A0A128F406_9GAMM S-adenosylmethionine:tRN A ribosyltransferase-isomerase OS=Grimontia marina OX=6 46534 GN=queA PE=3 SV=1
MQVSDFHFDLPDSLIARYPQADRTASRLLQLNGNTGELSHKQFTDILDLVEPGDLMVFNNTRVIPARVFGRKASGGKIEVLVERMLDEKSILAHVRASKPPKPGTQLFLGENDEFEAEMVARHDALFEIHFSGEQAVLDILNQVGHMPLPPYIDRPDEESDKERYQTVYNEKPGAVAAPTAGLHFDENILAALKEKGVETVFVTLHVGAGTFQPVRVDDINDHVMHSEYAEVPQEVVDAVLATKARGNRVIAVGTTSVRSLESAAQHSKNEGTDLEPFFNDTQIFIYPGYEWQLVDALVTNFHLPESTLIMLVSSFAGYEHVMNAYKEAVNNEYRFFSYGDAMFVTRQTEV

SEQ ID NO: 67073 - protein, 351 aa, Grimontia sp.
  misc_feature (1)..(351): tr|A0A0F6A442|A0A0F6A442_9GAMM S-adenosylmethionine:tRN A ribosyltransferase-isomerase OS=Grimontia sp. AD028 O X=1581149 GN=queA PE=3 SV=1
MQVSDFHFDLPDSLIARYPQPDRTASRLLQLNGNTGELSHKQFTDILDLVEPGDLMVFNNTRVIPARVYGRKASGGKIEVLVERMLDEKSILAHVRASKPPKPGTQLFLGENDEFEAEMVARHDALFEIHFSGEQAVLDILNQVGHMPLPPYIDRPDEESDKERYQTVYNEKPGAVAAPTAGLHFDESILAALKEKGVETAFVTLHVGAGTFQPVRVDDINDHVMHSEYAEVPQEVVDAVLATKARGNRVIAVGTTSVRSLESAAQHSKNEGTELKPFFNDTQIFIYPGYEWRLVDALVTNFHLPESTLIMLVSSFAGYDHVMNAYKEAVNNEYRFFSYGDAMFVTRQTEV

SEQ ID NO: 67074 - protein, 340 aa, Gulbenkiania indica
  misc_feature (1)..(340): tr|A0A0K6H324|A0A0K6H324_9NEIS S-adenosylmethionine:tRN A ribosyltransferase-isomerase OS=Gulbenkiania indica O X=375574 GN=queA PE=3 SV=1
MQLSDFDYHLPEALIAQHPPAERGRSRLMHVQGSRHTDLMFSDFDVLVEPGDVLVFNDTRVIKARLFGEKVSGGKVEALVERVLDEHTALAHVRASKSPKPGTRLVFAGRWEAEMVERQGELFKLRFLCETGVFDILEASGKLPLPPYIERGADEDDDERYQTVYARERGAVAAPTAGLHFSEAMLARLAEKGVHLAYVTLHVGAGTFQPVRVENIEEHRMHSEVYEIPQATVEAVREAHAAGRRVLSVGTTSMRALESAAHTGELVAGRGETDIFITPGYRFRVVDRLLTNFHLPKSTLLMLVSAFAGYEEMRAAYAHAVEAEYRFFSYGDAMLLERKD

SEQ ID NO: 67075 - protein, 359 aa, Guyparkeria sp.
  misc_feature (1)..(359): tr|A0A426QP22|A0A426QP22_9GAMM S-adenosylmethionine:tRN A ribosyltransferase-isomerase OS=Guyparkeria sp. SCN-R 1 OX=2341113 GN=queA PE=3 SV=1
MKLDAFDYHLPPERIAARPAEPRESARLLVLPAVGEFDHRQIGDLPDLIAPGDLLILNDTRVIPARAFGRKVSGGKVEFLLERLLDSDRALCHLRSSRSPRVGVELIMEGGARLEVIGRDGALFEVKLLASAPMNGMLSWLDQHGHMPLPTYIERPDDDQDRHDYQTVFARREGAVAAPTAGLHLTEALLERLRAQGVETAFVTLHVGAGTFQPVRSETIEAHEMHREWTEVPQATVEAVAAARRRGNRVIAIGTTAVRAIETAVRAHPEHAARGEIGPFVGDTQLFLYPGQPLHVIDAMLTNFHLPRSTLLMLVSAFAGRERVLGAYHEAIERGYRFYSFGDAMFIETSADVGGAQTA

SEQ ID NO: 67076 - protein, 354 aa, Gynuella sunshinyii
  misc_feature (1)..(354): tr|A0A0C5VRV2|A0A0C5VRV2_9GAMM S-adenosylmethionine:tRN A ribosyltransferase-isomerase OS=Gynuella sunshinyii Y C6258 OX=1445510 GN=queA PE=3 SV=1
MSASLLSVKDFDFDLPDHLIARYPLSERSASRLLTLEGETGALAHRRFTDIVSLLNANDLLVFNNTRVIPARLYGQKSSGGKVEMLFERLLTQTRCLAHVRSSRAPKAGQHLIFDGGIEVEVTGRQHNLFELELLNGAQHWFEALEGNGRMPLPPYMEREDDESDKSRYQTVYAEKKGAVAAPTAGLHFDEALLQAIADKGVRIAFVTLHVGAGTFMPVKVDKVEDHVMHSEWYDIPEDTVAAIQQTRERGGRVVAVGTTSVRSLESAARGQDGWICRGDTSIFIYPGYQFQVVDAMVTNFHLPQSTLIMLVSAFAGREAVMQAYHEAIAQEYRFFSYGDAMFITRNQSVAEKD

SEQ ID NO: 67077 - protein, 347 aa, Haematobacter genomosp.
  misc_feature (1)..(347): tr|A0A212AD20|A0A212AD20_9RHOB S-adenosylmethionine:tRN A ribosyltransferase-isomerase OS=Haematobacter genomos p. 1 OX=366618 GN=queA PE=3 SV=1
MTLRLSDFDFDLPDDLIATRPVRPRSAARLLVAEGDRISDRRVSDLVTLLRPGDRLVLNDTKVIPARLSGLRIRGEVSARVEVTLLEATASGGWRVLARPLRKLKPGDILIFSDRLSGEVRERNEADAVIAFNLTGGDFDTALAEAGSMPLPPYIAAKRPADEQDKEDYQTVFARRSGAVAAPTASLHFDEPLLAALAERGVAFSHVTLHVGAGTFLPVKVEDVTTHRMHAEWGEVTARAAEEIAATRLAGGRVIPVGTTALRLIESASRGGEIAPWDGETDIFIYPGFRFHATDGLITNFHLPKSTLLMLVSALMGMDRMRRVYAHAVTERYRFFSYGDASLLLPQ

SEQ ID NO: 67078 - protein, 347 aa, Haematobacter massiliensis
  misc_feature (1)..(347): tr|A0A086Y068|A0A086Y068_9RHOB S-adenosylmethionine:tRN A ribosyltransferase-isomerase OS=Haematobacter massili ensis OX=195105 GN=queA PE=3 SV=1
MTLRLSDFDFDLPDDLIATRPVRPRSAARLLVAESDRISDRRVSDLVTLLRPGDRLVLNDTRVIPARLSGLRIRGEVAARVEVTLLEATASNGWRVLARPLRKLKPGDIIAFSDRLSAEVQERNEADAVIAFNLTGGDFDTALAEAGAMPLPPYIAAKRPADEQDKEDYQTVFARRSGAVAAPTASLHFDEPLLAALAERGVAFSHVTLHVGAGTFLPVKVEDVTTHRMHAEWGEVTLRAAEEIASTRADGGRVIPVGTTALRLIESASRGGEIAPWEGETDIFIYPGFRFHATDGLMTNFHLPKSTLLMLVSALMGMDRMRRVYAHAVAERYRFFSYGDASLLLPE

SEQ ID NO: 67079 - protein, 347 aa, Haematobacter missouriensis
  misc_feature (1)..(347): tr|A0A212AY81|A0A212AY81_9RHOB S-adenosylmethionine:tRN A ribosyltransferase-isomerase OS=Haematobacter missour iensis OX=366616 GN=queA PE=3 SV=1
MTLRLSDFDFNLPDDLIATRPVRPRSAARLLVAEGDRISDRRVSDLVTLLRPGDRLVLNDTKVIPARLSGLRTRGEVSARVEVTLLEATASGGWRVLARPLRKLKPGDILIFSDRLSAEVRERNEADAVIAFNLTGGDFDTALAEAGSMPLPPYIAAKRPADEQDKEDYQTVFARRSGAVAAPTASLHFDEPLLAALAERGVAFSHVTLHVGAGTFLPVKVEDVTTHRMHAEWGEVTARAAEEIAATRLAGGRVIPVGTTALRLIESAARSGEIVPWEGETDIFIYPGFRFHATDGLITNFHLPKSTLLMLVSALMGMDRMRRVYAHAVTERYRFFSYGDASLLLPE

SEQ ID NO: 67080 - protein, 353 aa, Haematospirillum jordaniae
  misc_feature (1)..(353): tr|A0A143DD48|A0A143DD48_9PROT S-adenosylmethionine:tRN A ribosyltransferase-isomerase OS=Haematospirillum jord aniae OX=1549855 GN=queA PE=3 SV=1
MRVDAFDFDLPREQIATRPVSPRHSARLLDVAPDGLHDRTMLDLPSLLEPGDVMVFNDTRVIPARLSGLRPAIHPGCQPAGVDITLHQGLGPDTWAAFAKGARKLSPGQTVVLSADGDFTARVENRQEGGEIVLRFDRSGADLMAALERHGHIPLPPYMGRKDDARDRQDYQTVYASRDGAVAAPTAGLHFTPELLEAIDARGIRRVHVTLHVGAGTFLPVKAEDTRDHRMHAETGDISADAARTITQAREQGGRVVCVGTTSLRLLESAAAPDGSLSAWSGSTSIFITPGYQFRIADLLVTNFHLPRSTLFMLVCALAGLDAMHAAYAHAIKAGYRFYSYGDGSLLRCKDSC

SEQ ID NO: 67081 - protein, 363 aa, Haemophilus aegyptius
  misc_feature (1)..(363): tr|A0A448MFB1|A0A448MFB1_HAEAE S-adenosylmethionine:tRN A ribosyltransferase-isomerase OS=Haemophilus aegyptius OX=197575 GN=queA PE=3 SV=1
MRVSDFNFDLPDELIARYPKTDRVSCRLLQLNGENGEIFHRTFSDVLDLIDEGDLLIFNNTRVIPARMFGRKASGGKIEVLVERMLDEHRFLAHIRSSKSPKEGAELFLGEDKLGENNGIKAVMKARHSSLFEVELSDKSTALLDVLQTIGHMPLPLYIDRPDEEADKECYQTVYSKVPGAVAAPTAGLHFDDPLLEKLKKKGVNFEFVTLHVGAGTFQPVRVENIEDHVMHAEYVEVSQEVCNAIIATKKAGKRVIAVGTTSVRSIESAALSAEEFGNPDLIEPYFSDTSIFIYPGKKFRVVDCLITNFHLPESTLIMLVSAFAGYKNTMNAYKHAVQEKYRFFSYGDAMFINKNSNVRGLE

SEQ ID NO: 67082 - protein, 361 aa, Haemophilus ducreyi
  misc_feature (1)..(361): tr|A0A448KJX5|A0A448KJX5_HAEDC S-adenosylmethionine:tRN A ribosyltransferase-isomerase OS=Haemophilus ducreyi O X=730 GN=queA PE=3 SV=1
MLVSDFHFNLPDELIARYPEDERTASRLLHLNGESGKFTDLHFSDLLDHINPGDLLIFNNTRVIPARLYGRKESGGKLEVLIERVLDEHHCLAHIRCSKAPKAGTKLILGEDKLGVGNGLEATMISRHDTLFELRFNASTPLFTLLQQAGHIPLPPYIDRPDEDFDQERYQTVYSKVLGAVAAPTAGLHFDNPMLDKLKAKGVNMAFVTLHVGAGTFQPVRVENILEHNMHAEYAEVTQAVVDQILATKAAGKRVIAVGTTSVRSIESAAQAAQPTGKLIAPFFSDTNIFLYPGKTFKIVDVLITNFHLPESTLIMLVSAFAGYRHTMNAYQHAVQQKYRFFSYGDAMLINKNPNALNDLP

SEQ ID NO: 67083 - protein, 361 aa, Haemophilus ducreyi
  misc_feature (1)..(361): sp|Q7VLY1|QUEA_HAEDU S-adenosylmethionine:tRNA ribosylt ransferase-isomerase OS=Haemophilus ducreyi (strain 350 00HP / ATCC 700724) OX=233412 GN=queA PE=3 SV=1
MLVSDFHFNLPDELIARYPKDERTASRLLHLNGESGKFSDLHFSDLLDHINPGDLLIFNNTRVIPARLYGRKESGGKLEVLIERVLDEHHCLAHIRCSKAPKAGTKLILGEDKLGIGNGLEATMISRHDTLFELRFNATTPLFTLLQQAGHIPLPPYIDRPDEDFDQERYQTVYSKVLGAVAAPTAGLHFDNPMLDKLKAKGVNMAFVTLHVGAGTFQPVRVENILEHNMHAEYAEVTQAVVDQILATKAAGKRVIAVGTTSVRSIESAAQATQPTGKLIAPFFSDTNIFLYPGKTFKIVDVLITNFHLPESTLIMLVSAFAGYRHTMNAYQHAVQQKYRFFSYGDAMLINKNPNALNDLP

SEQ ID NO: 67084 - protein, 356 aa, Haemophilus haemoglobinophilus
  misc_feature (1)..(356): tr|A0A1V4AZT2|A0A1V4AZT2_9PAST S-adenosylmethionine:tRN A ribosyltransferase-isomerase OS=Haemophilus haemoglob inophilus OX=733 GN=queA PE=3 SV=1
MQLSDFYFDLPDELIARYPKADRKSSKLLQLEGKTGAVSHRSFSHVLDLVNEGDLLIFNNTRVIPARMFGRKASGGKLEVLVERVLSEHSFLAHIRSSKSPKENAELFLGEDKLGEGNGVKVLMKSRHESLFELELADKSTALLDILQQIGHMPLPPYIDRPDEDADKERYQTVYNKVPGAVAAPTAGLHFDNELLEQLKNKGVNFAFVTLHVGAGTFQPVRVENIEDHKMHAEYVEVPQEVVDAVLATKAKGKRVIAVGTTSVRSIESAALFAEENNSTQLLEPYFSDTSIFIYPGKKFRVIDCLITNFHLPESTLIMLVSAFAGYEHTMNAYKIAVENQYRFFSYGDAMFITKA

SEQ ID NO: 67085 - protein, 363 aa, Haemophilus haemolyticus
  misc_feature (1)..(363): tr|A0A0M3FZ89|A0A0M3FZ89_HAEHA S-adenosylmethionine:tRN A ribosyltransferase-isomerase OS=Haemophilus haemolyti cus OX=726 GN=queA PE=3 SV=1
MRVSDFNFDLPDKLIARYPKEDRASCRLLHLNGENGAVIDRTFSDVLDLIDEGDLLIFNNTRVIPARMFGRKASGGKIEVLVERMLDEHRFLAHIRSSKSPKEGAELFLGEDKLGENNEIKAVMTARHGALFEVELSDKSTALLDVLQAIGHMPLPPYIDRPDEEADQECYQTVYSKVPGAVAAPTAGLHFDAPLLEKLKKKGVNFEFVTLHVGAGTFQPIRVENIEDHVMHAEYVEVSQEVCNAIIATKKAGKRIIAVGTTSVRSIESAALSAEEFGNPDLIEPYFSDTSIFIYPGKKFRVVDCLITNFHLPESTLIMLVSAFAGYKNTMNAYKHAVKEKYRFFSYGDAMFINKNSNVRGLE

SEQ ID NO: 67086 - protein, 363 aa, Haemophilus haemolyticus
  misc_feature (1)..(363): tr|A0A0M3G902|A0A0M3G902_HAEHA S-adenosylmethionine:tRN A ribosyltransferase-isomerase OS=Haemophilus haemolyti cus OX=726 GN=queA PE=3 SV=1
MRVSDFNFDLPDELIARYPKEDRASCRLLHLNGENGAVIDRTFSDVLDLIDEGDLLIFNNTRVIPARMFGRKASGGKIEVLVERMLDEHRFLAHIRSSKSPKEGAELFLGEDKLGENNGIKAVMTARYGALFEVELSDKSTALLDVLQTIGHMPLPPYIDRPDEEADQECYQTVYNKVPGAVAAPTAGLHFDDPLLEKLKKKGVNFEFVTLHVGAGTFQPVRVENIEDHVMHAEYVEVSQEVCNAIIATKKAGKRVIAVGTTSVRSIESAALSAEEFSNPDLIEPYFSDTSIFIYPGKKFRVVDCLITNFHLPESTLIMLVSAFAGYKNTMNAYKHAVQEKYRFFSYGDAMFINKNSNLRGLE

SEQ ID NO: 67087 - protein, 363 aa, Haemophilus influenzae
  misc_feature (1)..(363): sp|P44595|QUEA_HAEIN S-adenosylmethionine:tRNA ribosylt ransferase-isomerase OS=Haemophilus influenzae (strain ATCC 51907 / DSM 11121 / KW20 / Rd) OX=71421 GN=queA PE =3 SV=1
MRVSDFNFDLPDELIARYPKTDRVSCRLLQLNGENGEIFHRTFSDVLDLIDEGDLLIFNNTRVIPARMFGRKASGGKIEVLVERMLDEHRFLAHIRSSKSPKEGAELFLGEDKLGENNGIKAVMKARHGALFEVELSDKSTALLDVLQTIGHMPLPPYIDRPDEEADQECYQTVYSKVPGAVAAPTAGLHFDENLLEKLKAKGVNFEFVTLHVGAGTFQPVRVENIEDHVMHAEYVEVSQEVCNAIIATKKAGKRVIAVGTTSVRSIESAALSAEEFGNPDLIEPYFSDTSIFIYPGKKFRVVDCLITNFHLPESTLIMLVSAFAGYKNTMNAYKHAVKEKYRFFSYGDAMFINKNSNVRGLE

SEQ ID NO: 67088 - protein, 363 aa, Haemophilus influenzae
  misc_feature (1)..(363): sp|A5UAP2|QUEA_HAEIE S-adenosylmethionine:tRNA ribosylt ransferase-isomerase OS=Haemophilus influenzae (strain PittEE) OX=374930 GN=queA PE=3 SV=1
MRVSDFNFDLPDELIARYPKTDRVSCRLLQLNGENGEIFHRTFSDVLDLIDEGDLLIFNNTRVIPARMFGRKASGGKIEVLVERMLDEHRFLAHIRSSKSPKEGAELFLGEDKLGENNGIKAVMKARHSSLFEVELSDKSTALLDVLQTIGHMPLPPYIDRPDEEADKECYQTVYSKVPGAVAAPTAGLHFDENLLEKLKAKGVNFEFVTLHVGAGTFQPVRVENIEDHVMHAEYVEVSQEVCNAIIATKKAGKRVIAVGTTSVRSIESAALSAEEFGNPDLIEPYFSDTSIFIYPGKKFRVVDCLITNFHLPESTLIMLVSAFAGYKNTMNAYKQAVQEKYRFFSYGDAMFINKNSNVRELE

SEQ ID NO: 67089 - protein, 361 aa, Haemophilus paracuniculus
  misc_feature (1)..(361): tr|A0A1T0ASL2|A0A1T0ASL2_9PAST S-adenosylmethionine:tRN A ribosyltransferase-isomerase OS=Haemophilus paracunic ulus OX=734 GN=queA PE=3 SV=1
MLVSDFHFDLPDELIARYPTAQRTASRLLYLNGETGEFADQQFPDLLSHINEGDLLIFNNTRVIPARLYGRKASGGKLEVLVERVLDEKRCLAHVRASKAPKEGAELILGEDKLGEGNGLKAIMVARHEALFELHFEADKSLFELLQQAGHMPLPPYIDRPDEDADQERYQTVYSKVLGAVAAPTAGLHFDKDMLQKLADKGVQTAFVTLHVGAGTFQPVRVETIEDHKMHAEYAEVSQEVVDKILATKANGKRVICVGTTSVRSIESAAQAAEKSGKLIAPFCSDTAIFLYPGKTFRIVDALVTNFHLPESTLIMLVSAFAGYRHCMQAYAHAVEQKYRFFSYGDAMFITKNSQALKDLP

SEQ ID NO: 67090 - protein, 361 aa, Haemophilus parahaemolyticus
  misc_feature (1)..(361): tr|A0A377I2Q9|A0A377I2Q9_HAEPH S-adenosylmethionine:tRN A ribosyltransferase-isomerase OS=Haemophilus parahaemo lyticus OX=735 GN=queA PE=3 SV=1
MLVSDFHFDLPDELIARYPTQERTASRLLYLNGNTGKFADQHFTDLLEHLNEGDLLVFNNTRVIPARLYGRKLSGGKVEALVERVLDEHRCLAHVRASKAPKEGTVLVFGEDKLGEGNGLTATMTERHDTLFELQFEGKKPLFDLLQQAGHMPLPPYIDRPDEDADQERYQTVYSKVLGAVAAPTAGLHFDQNLLAKLKEKGVNTAFVTLHVGAGTFQPVRVENILDHKMHAEYAEVSQDVVDQILQTKANGKRVIAVGTTSVRSIESAAQAVKNPEHLIEPFFSDTSIFIYPGKTFKVIDALVTNFHLPESTLIMLVSAFAGYRTTMDAYAHAVTEKYRFFSYGDAMFIEKNPNALKDVP

SEQ ID NO: 67091 - protein, 361 aa, Haemophilus parahaemolyticus
  misc_feature (1)..(361): tr|A0A5C1QQ13|A0A5C1QQ13_HAEPH S-adenosylmethionine:tRN A ribosyltransferase-isomerase OS=Haemophilus parahaemo lyticus OX=735 GN=queA PE=3 SV=1
MLVSDFHFDLPAELIARYPTKERTASRLLYLNGNTGEFADQHFTDLLEHLNEGDLLVFNNTRVIPARLYGRKLSGGKVEALVERVLDEHRCLAHVRASKAPKEGTVLVFGEDKLGEGNGLTATMTERHDTLFELQFEGEAPLFDLLQQAGHMPLPPYIDRPDEDADQERYQTVYSKVLGAVAAPTAGLHFDQNLLAKLKEKGVNTAFVTLHVGAGTFQPVRVENILDHKMHAEYAEVSQDVVDQILQTKANGKRVIAVGTTSVRSIESAAQAVKNPEYLIEPFFSDTSIFIYPGKTFKVIDALVTNFHLPESTLIMLVSAFAGYRTTMNAYAHAVTEKYRFFSYGDAMFIEKNPNALKDVP

SEQ ID NO: 67092 - protein, 363 aa, Haemophilus parainfluenzae
  misc_feature (1)..(363): tr|A0A410SG88|A0A410SG88_HAEPA S-adenosylmethionine:tRN A ribosyltransferase-isomerase OS=Haemophilus parainflu enzae OX=729 GN=queA PE=3 SV=1
MRVSDFHFDLPDELIARYPKEDRSSCRLLQLNGENGEISHRTFTDVLDLIDEGDLLIFNNTRVIPARMFGRKASGGKIEVLVERVLSVHHFLAHIRSSKAPKEGAELFLGEDKLGENNGVKAIMVGRQDALFEVELADKSRNVLDVLQEIGHMPLPPYIDRPDEEADQECYQTVYNKVPGAVAAPTAGLHFDDELLQKLHEKGVNFEFVTLHVGAGTFQPVRVENIEDHIMHAEYVELSQEVCNAIIETKKAGKRVIAVGTTSVRSVETAALSAEENGNPDLIEPYFSDTSIFIYPGKSFRVVDALITNFHLPESTLIMLVSAFAGFSHTMNAYKSAVENRYRFFSYGDAMFITKNPNVKGLE

SEQ ID NO: 67093 - protein, 363 aa, Haemophilus parainfluenzae
  misc_feature (1)..(363): tr|F0ES63|F0ES63_HAEPA S-adenosylmethionine:tRNA ribosy ltransferase-isomerase OS=Haemophilus parainfluenzae AT CC 33392 OX=888828 GN=queA PE=3 SV=1
MRVSDFHFNLPDELIARYPKEDRSSCRLLQLNGENGEISHRTFTDVLDLIDEGDLLIFNNTRVIPARMFGRKASGGKIEVLVERVLSEHHFLAHIRSSKAPKEGTELFLGEDKLGENNGVKAIMVGRQDALFEVELADKSRNVLDVLQEIGHMPLPPYIDRPDEEADQECYQTVYNKVPGAVAAPTAGLHFDDELLQKLHEKGVNFEFVTLHVGAGTFQPVRVENIEDHIMHAEYVELSQEVCNAIIETKKAGKRVIAVGTTSVRSVETAALSAEENGNPDLIEPYFSDTSIFIYPGKSFRVVDALITNFHLPESTLIMLVSAFAGFSHTMNAYKSAVENRYRFFSYGDAMFITKNPNVKGLE

SEQ ID NO: 67094 - protein, 361 aa, Haemophilus paraphrohaemolyticus
  misc_feature (1)..(361): tr|A0A369ZTN6|A0A369ZTN6_9PAST S-adenosylmethionine:tRN A ribosyltransferase-isomerase OS=Haemophilus paraphroh aemolyticus OX=736 GN=queA PE=3 SV=1
MLVSDFHFDLPDELIARYPTKERTASRLLYLNGNTGEFADQHFTDLLEHLNEGDLLVFNNTRVIPARLYGRKLSGGKVEALVERVLDEHRCLAHVRASKAPKEGTVLVFGEDKLGEGNGLAATMTARHDALFELQFEGKKPLFDLLQQAGHMPLPPYIDRPDEDADQERYQTVYSKVLGAVAAPTAGLHFDQNLLVKLKEKGVNTAFVTLHVGAGTFQPVRVENILDHKMHAEYAEVSQEVVDQILQTKANGKRVIAVGTTSVRSIESAAQAVKNPENLIEPFFSDTSIFIYPGKTFKVADALVTNFHLPESTLIMLVSAFAGYHTTMNAYAHAVAEKYRFFSYGDAMFIEKNPNALKDVP

SEQ ID NO: 67095 - protein, 361 aa, Haemophilus paraphrohaemolyticus
  misc_feature (1)..(361): tr|I2NNN2|I2NNN2_9PAST S-adenosylmethionine:tRNA ribosy ltransferase-isomerase OS=Haemophilus paraphrohaemolyti cus HK411 OX=1095743 GN=queA PE=3 SV=1
MLVSDFQFDLPSELIARYPTKERTASRLLYLNGNTGEFADQHFTDLLEHLNEGDLLVFNNTRVIPARLYGRKLSGGKVEALLERVLDEHRCLAHVRASKAPKEGTVLVFGEDKLGEGNGLTATMTERHDTLFELQFEGEESLFNLLQQAGHMPLPPYIDRPDEDADQERYQTVYSKVLGAVAAPTAGLHFDQNLLAKLKEKGVNTAFVTLHVGAGTFQPVRVENILDHKMHAEYAEVSQDVVDQILQTKANGKRVIAVGTTSVRSIESAAQAVKNPEHLIEPFFSDTSIFIYPGKTFKVADALVTNFHLPESTLIMLVSAFAGYRTTMNAYAHAVAEKYRFFSYGDAMFIEKNPNALKDVP

SEQ ID NO: 67096 - protein, 361 aa, Haemophilus parasuis
  misc_feature (1)..(361): sp|B8F4R5|QUEA_HAEPS S-adenosylmethionine:tRNA ribosylt ransferase-isomerase OS=Haemophilus parasuis serovar 5 (strain SH0165) OX=557723 GN=queA PE=3 SV=1
MRVTDFHFDLPDELIARYPTAERSASRLLYLNGNTGEYQDQQFNDLLEHIHSGDLLIFNNTRVIPARLYGRKASGGKLEVLVERVLDEHRCLAHIRSSKAPKENAEIFLGEDKLGEGNGFKAIMVARYDALFELKFEASQPLFDLLQQAGHMPLPPYIDRPDEDADQERYQTVYSKVLGAVAAPTAGLHFDHQMLQKLQEKGVQTAFVTLHVGAGTFQPVRVETIEEHKMHAEYAEVSQDVVDKILATKAQGKRVICVGTTSVRSIESAAQAAEKEGKLIAPFYSDTTIFLYPGKTFRIVDALVTNFHLPESTLIMLVSAFAGFKNCMNAYQHAVESQYRFFSYGDAMFITKNENALGDVP

SEQ ID NO: 67097 - protein, 361 aa, Haemophilus parasuis
  misc_feature (1)..(361): tr|A0A1T0A6V2|A0A1T0A6V2_HAEPR S-adenosylmethionine:tRN A ribosyltransferase-isomerase OS=Haemophilus parasuis OX=738 GN=queA PE=3 SV=1
MRVTDFHFDLPDELIARYPTAERSASRLLYLNGNTGEYQDQQFNDLLEHIHSGDLLIFNNTRVIPARLYGRKASGGKLEVLVERVLDEHRCLAHIRSSKAPKENAEIFLGEDKLGEGNGFKAIMVARHDALFELKFEEAQPLFDLLQQAGHIPLPPYIDRPDEDADQERYQTVYSKVLGAVAAPTAGLHFDHQTLQKLQEKGVQTAFVTLHVGAGTFQPVRVETIEEHKMHAEYAEVSQEVVDKILATKAQGKRVICVGTTSVRSIESAAQAAEKEGKLIAPFYSDTTIFLYPGKTFRIVDALVTNFHLPESTLIMLVSAFAGFKNCMNAYQHAVESQYRFFSYGDAMFITKNENAFGDVP

SEQ ID NO: 67098 - protein, 82 aa, Haemophilus pittmaniae
  misc_feature (1)..(82): tr|F9QBE4|F9QBE4_9PAST S-adenosylmethionine:tRNA ribosy ltransferase-isomerase OS=Haemophilus pittmaniae HK 85 OX=1035188 GN=HMPREF9952_1493 PE=3 SV=1
MIEPYFSDTSIFIYPGKKFRVVDALITNFHLPESTLIMLVSAFAGFTHTMNAYKSAVENRYRFFSYGDAMFITKNPNVKGLE

SEQ ID NO: 67099 - protein, 363 aa, Haemophilus pittmaniae
  misc_feature (1)..(363): tr|A0A377J0Z7|A0A377J0Z7_9PAST S-adenosylmethionine:tRN A ribosyltransferase-isomerase OS=Haemophilus pittmania e OX=249188 GN=queA PE=3 SV=1
MRVSDFHFDLPDELIARYPKEERASCRLLTLDGEQGTLGHGTFTDVLDLINEGDLLIFNNTRVIPARMFGRKASGGKLEVLVERVLDEQHCLAHIRSSKSPKEGTELFLGEDKLGEGQGIKVVMTGRQGALFELQLVEPHSAWLAVLQQIGHMPLPPYIDRPDEEADQECYQTVYSKVPGAVAAPTAGLHFDDLLLDKLRAKGVNFEFVTLHVGAGTFQPVRVDNIEEHIMHAEYVELSQEVCNAIIETKKAGKRVIAVGTTSVRSIETAALSAEENGNPDLIEPYFSDTSIFIYPGKKFRVVDALITNFHLPESTLIMLVSAFAGFTHTMNAYKSAVENRYRFFSYGDAMFITKNPNVKGLE

SEQ ID NO: 67100 - protein, 356 aa, Haemophilus somnus
  misc_feature (1)..(356): sp|Q0I4R7|QUEA_HAES1 S-adenosylmethionine:tRNA ribosylt ransferase-isomerase OS=Haemophilus somnus (strain 129P t) OX=205914 GN=queA PE=3 SV=1
MYLSDFYFDLPDELIARYPKRERSSSRMLQLNGQNGELFHRTFSDVADLINEGDLLIFNNTRVIPARMFGRKASGGKIEVLVERVLNEHHFLAHIRSSKSPKENTVLFLGEDKLGEGKGVEMLMKARHENLFELELSDKSTALLDILQKIGHMPLPPYIDRPDEDADKERYQTVYNKVPGAVAAPTAGLHFDDELLTQLKNKGVNFAFVTLHVGAGTFQPVRVENIEDHKMHAEYVEVPQEVVDAVLATKAKGKRVIAVGTTSVRSIESAALFAEENNSTHLLEPYFSDTSIFIYPGKKFRVIDCLITNFHLPESTLIMLVSAFAGYQHTMNAYKSAVENRYRFFSYGDAMFITKA

SEQ ID NO: 67101 - protein, 363 aa, Haemophilus sp.
  misc_feature (1)..(363): tr|H1LMT8|H1LMT8_9PAST S-adenosylmethionine:tRNA ribosy ltransferase-isomerase OS=Haemophilus sp. oral taxon 85 1 str. F0397 OX=762965 GN=queA PE=3 SV=1
MRVSDFNFDLPDELIARYPKEDRASCRLLHLNGENGAVIDRTFSDVLDLIDEGDLLIFNNTRVIPARMFGRKASGGKIEVLVERMLDEHRFLAHIRSSKSPKEGAELFLGEDKLGENNGIKAVMTARHGALFEVELSDKSTALLDVLQAIGHMPLPPYIDRPDEEADQECYQTVYSKVPGAVAAPTAGLHFDEPLLEKLKDKGVNFEFVTLHVGAGTFQPVRVENIEDHVMHAEYVEVSQEVCNAIIATKKAGKRVIAVGTTSVRSIESAALSAEEFGNPDLIEPYFSDTSIFIYPGKKFRVVDCLITNFHLPESTLIMLVSAFAGYKNTMNAYKHAVQEKYRFFSYGDAMFINKNSNVRGLE

SEQ ID NO: 67102 - protein, 363 aa, Haemophilus sp.
  misc_feature (1)..(363): tr|A0A0M1GP31|A0A0M1GP31_9PAST S-adenosylmethionine:tRN A ribosyltransferase-isomerase OS=Haemophilus sp. C1 OX =1661745 GN=queA PE=3 SV=1
MRVSDFNFDLPDELIARYPKEDRASCRLLHLNGENGAVIDRTFSDVLDLIDEGDLLIFNNTRVIPARMFGRKASGGKIEVLVERMLDEYRFLAHIRSSKSPKEGAELFLGEDKLGGNNGIKAVMTVRHGALFEVELSDKSTALLDVLQSIGHMPLPPYIDRPDEEADQECYQTVYSKVPGAVAAPTAGLHFDTPLLEKLKKKGVNFEFVTLHVGAGTFQPVRVENIEDHVMHAEYVEVSQEVCNAIIATKKAGKRVIAVGTTSVRSIESAALSAEEFGNPDLIEPYFSDTSIFIYPGKKFRVVDCLITNFHLPESTLIMLVSAFAGYKNTMNAYKHAVQEKYRFFSYGDAMFINKNSNVRGLE

SEQ ID NO: 67103 - protein, 364 aa, Haemophilus sputorum
  misc_feature (1)..(364): tr|J5HKQ1|J5HKQ1_9PAST S-adenosylmethionine:tRNA ribosy ltransferase-isomerase OS=Haemophilus sputorum HK 2154 OX=1078483 GN=queA PE=3 SV=1
MLVSDFHFDLPDNLIARYPMPERTASRLLKLDGNTGALTDQHFPDLLEDIQAGDLLIFNNTRVIPARLYGRKSSGGKLEVLVERVLDEHRCLAHIRASKAPKEGAEIILGEDKLGEGNGFHAIMTARHGALFELQFSAAQPLFDLLQQAGHMPLPPYIDRPDEDADQERYQTVYSKVLGAVAAPTAGLHFDNAMLEKLSEKGVQTAFVTLHVGAGTFQPVRVENILDHQMHAEYAEVSEEVVEKILATKAAGKRVIAVGTTSVRSIESAAQAAEQTGKLIAPFFSDTQIFLYPGKTFKVVDALVTNFHLPESTLIMLVSAFAGYRHTMQAYQHAVANQYRFFSYGDAMFITKNENATQDLPPNA

SEQ ID NO: 67104 - protein, 364 aa, Haemophilus sputorum
  misc_feature (1)..(364): tr|A0A369YMI4|A0A369YMI4_9PAST S-adenosylmethionine:tRN A ribosyltransferase-isomerase OS=Haemophilus sputorum OX=1078480 GN=queA PE=3 SV=1
MLVSDFHFDLPDNLISRYPMPERTASRLLKLDGNTGALTDQHFPDLLEDIQAGDLLIFNNTRVIPARLYGRKSSGGKLEVLVERVLDEHRCLAHIRASKAPKEGAEIILGEDKLGEGNGFHAIMTARHGALFELQFSAAQPLFDLLQQAGHMPLPPYIDRPDEDADQERYQTVYSKVLGAVAAPTAGLHFDNAMLEKLCEKGVQTAFVTLHVGAGTFQPVRVENILDHQMHAEYAEVSEEVVEKILATKAAGKRVIAVGTTSVRSIESAAQAAEQTGKLIAPFFSDTQIFLYPGKTFKVVDALVTNFHLPESTLIMLVSAFAGYRHTMQAYQHAVANQYRFFSYGDAMFITKNENATQDLPPNA

SEQ ID NO: 67105 - protein, 357 aa, Hafnia alvei
  misc_feature (1)..(357): tr|A0A2J9HG02|A0A2J9HG02_HAFAL S-adenosylmethionine:tRN A ribosyltransferase-isomerase OS=Hafnia alvei OX=569 G N=queA PE=3 SV=1
MRVSDFSFELPDNLIARYPQAERSACRLLSLDGPTGKLDHGVFTDVLDKIEAGDLLIFNNTRVIPARLFGRKASGGKLEVLVERVLDDTRVLAHVRASKSPKPGAELLLGDNEDIRATMVARHDTLFELRFDDGRDVLTILNAAGHMPLPPYIDRPDEDADRELYQTVYSSRPGAVAAPTAGLHFDEPLLEKLRAKGVEMAFVTLHVGAGTFQPVRVDTIENHTMHSEYAEVPQDVVDAVLACKARGNRVIAVGTTSVRSIESAAAAAKDALIAPFFDDTQIFIYPGYHYQVIDALITNFHLPESTLIMLVSAFAGYQNTMHAYHEAVAKEYRFFSYGDAMFITRSEQAEQEKVSAA

SEQ ID NO: 67106 - protein, 357 aa, Hafnia alvei
  misc_feature (1)..(357): tr|A0A097R576|A0A097R576_HAFAL S-adenosylmethionine:tRN A ribosyltransferase-isomerase OS=Hafnia alvei FB1 OX=1 453496 GN=queA PE=3 SV=1
MRVSDFSFELPDNLIARYPQAERSACRLLSLDGPTGKLEHGVFTDVLDKIEAGDLLIFNNTRVIPARLFGRKASGGKLEVLIERVLDDTRVLAHVRASKSPKPGAELLLGDNEDIRATMVARHDTLFELRFDDGRDVLTILNAAGHMPLPPYIDRPDEDADRELYQTVYSSRPGAVAAPTAGLHFDEPLLEKLRAKGVEMAFVTLHVGAGTFQPVRVDTIENHTMHSEYAEVPQDVVDAVLACKARGNRVIAVGTTSVRSIESAAAAAKDALIVPFFDDTQIFIYPGYHYQVIDALITNFHLPESTLIMLVSAFAGYQNTMHAYHEAVAKEYRFFSYGDAMFITRSEQAEQEKVSAE

SEQ ID NO: 67107 - protein, 357 aa, Hafnia paralvei
  misc_feature (1)..(357): tr|A0A2A2MCS6|A0A2A2MCS6_9GAMM S-adenosylmethionine:tRN A ribosyltransferase-isomerase OS=Hafnia paralvei OX=54 6367 GN=queA PE=3 SV=1
MRVSDFSFELPDNLIARYPQAERSACRLLSLDGPTGKLEHGVFTDVLNKIDAGDLLIFNNTRVIPARLFGRKASGGKLEVLVERLLDDTRVLAHVRASKSPKPGAELLLGDNEDIRVTMVARHDTLFELRFEDGRDVLTILNAAGHMPLPPYIDRPDEDADRELYQTVYSSRPGAVAAPTAGLHFDEPLLEKLRAKGVEMAFVTLHVGAGTFQPVRVDTIENHTMHSEYAEVPQDVVDAVLACKARGNRVIAVGTTSVRSIESAAAAAKDQLIAPFFDDTQIFIYPGYHYQVIDALITNFHLPESTLIMLVSAFAGYKNTMHAYHEAVAKEYRFFSYGDAMFITHSELAEQEKVSAE

SEQ ID NO: 67108 - protein, 357 aa, Hafnia paralvei
  misc_feature (1)..(357): tr|A0A4Q9EWK2|A0A4Q9EWK2_9GAMM S-adenosylmethionine:tRN A ribosyltransferase-isomerase OS=Hafnia paralvei OX=54 6367 GN=queA PE=3 SV=1
MRVSDFSFELPDNLIARYPQAERSACRLLSLDGPTGKLEHGVFTDVLNKIDAGDLLIFNNTRVIPARLFGRKASGGKLEVLVERLLDDTRVLAHVRASKSPKPGAELLLGDNEDIRVTMVARHDTLFELRFEDGRDVLTILNAAGHMPLPPYIDRPDEDADRELYQTVYSSRPGAVAAPTAGLHFDEPLLEKLRAKGVEMAFVTLHVGAGTFQPVRVDTIENHTMHSEYAEVPQDVVDAVLACKARGNRVIAVGTTSVRSIESAAAAAKDQLIAPFFDDTQIFIYPGYHYQVIDALITNFHLPESTLIMLVSAFAGYKNTMHAYHEAVAKEYRFFSYGDAMFITRSELAEQEKVSAE

SEQ ID NO: 67109 - protein, 351 aa, Hahella chejuensis
  misc_feature (1)..(351): sp|Q2SDV0|QUEA_HAHCH S-adenosylmethionine:tRNA ribosylt ransferase-isomerase OS=Hahella chejuensis (strain KCTC 2396) OX=349521 GN=queA PE=3 SV=1
MRVDDFDFELPPELIARRPLAERSSSRLLCLDAETGEINHRGFKDLLGMVNPGDLLVFNDTRVIPARLFGQKRSGGKVEVMVERVVSMTEMLAHVRASKAPKPGVEILIEENYVLTMVEREGDLFRLRVSQGGSVSELLERCGHMPLPPYIDREDDLSDRERYQTVYSRQPGAVAAPTAGLHFDEALLLAMSQKGVETAFVTLHVGAGTFQPVRVDVVQDHQMHSEYLEVSADVCERVRQVKAAGGRVVAVGTTAVRALETASRSGSIEPYAGDTSIFIYPGYEFVTVDALVTNFHLPKSTLLMLVSAFAGREHILAAYQEAIEQRYRFFSYGDAMFLHRRQSGLEDAGAN

SEQ ID NO: 67110 - protein, 351 aa, Hahella sp.
  misc_feature (1)..(351): tr|A0A3T0VQ60|A0A3T0VQ60_9GAMM S-adenosylmethionine:tRN A ribosyltransferase-isomerase OS=Hahella sp. KA22 OX=1 628392 GN=queA PE=3 SV=1
MRVDDFDFDLPPELIARRPLAERSSSRLLCLDADTGEINHRGFKDLLGMINPGDLLVFNDTRVIPARLFGQKRSGGKVEVMVERVVSMTEILAHVRASKAPKPGVDILIDDNYVLTMVEREGDLFRLRVSEGGSVSELLEACGHMPLPPYIDREDDLSDRERYQTVYSRQPGAVAAPTAGLHFDESLLQALAQKGVETAFVTLHVGAGTFQPVRVDVVQDHQMHSEYLEVSADVCEQVRKVKAAGGRVIAVGTTAVRALETASRSGAIEPYAGDTSIFIYPGYDFVTIDALVTNFHLPKSTLLMLVSAFAGREHILAAYQEAIEQRYRFFSYGDAMFLHRRQSGRADALTS

SEQ ID NO: 67111 - protein, 339 aa, Hahella sp.
  misc_feature (1)..(339): tr|A0A261GQV5|A0A261GQV5_9GAMM S-adenosylmethionine:tRN A ribosyltransferase-isomerase OS=Hahella sp. CCB-MM4 O X=1926491 GN=queA PE=3 SV=1
MRVDDFDFDLPESLIAKYPLSKRSSSRLLCMDKSSGKVEHRQFQDIEDYLNPGDLLVFNDTRVIPARMFGQKATGGKVEVLIERVISSHEAMAHIRSSKAPKPGAQIHIGDNVLEVTGRDDALFFVRSLGAASISDILESHGHMPLPPYIDREDEVSDRERYQTVYNRNPGAVAAPTAGLHFDEELLARLSAKGVEFAYVTLHVGAGTFQPVRVESINDHKMHKEYLEVNRECVDRIVKARGNGNKVIAVGTTAVRSLETAAASGGIKPYVGDTQIFIYPGYQFQVVDALITNFHLPKSTLLMLVSAFAGRENILAAYQDAIAREYRFFSYGDAMLLHP

SEQ ID NO: 67112 - protein, 360 aa, Hahellaceae bacterium
  misc_feature (1)..(360): tr|A0A2D8RDU9|A0A2D8RDU9_9GAMM S-adenosylmethionine:tRN A ribosyltransferase-isomerase OS=Hahellaceae bacterium OX=2048971 GN=queA PE=3 SV=1
MTSSTSDYDFELPEALIAQHPLERRSASRLLTMQMSGGASTIRHDHFASLPDYLESGDLLVFNDTKVIPARLFGRKMTGGAVEILLERVLDERHCLAHVRASKAPKAGARIVLCKAGPGVEPAEAGAAVFEVSGRQGDLFKIELLVNSTTRHVDIDSVLAHYGIVPLPPYIERSVESPEDLQRYQTVYASKPGAIAAPTAGLHFDEAMLATLKGRGIETAYTTLHVGAGTFQPVRVEQIASHAMHTELYEVPEAVVTAVQAAKARGNKVMAVGTTVVRALESAARSGELRPGHGETDIFIHPGYEFRVIDALLTNFHLPRSTLLMLVSALAGRDAIMSAYAEAIRERYRFFSYGDAMLLY

SEQ ID NO: 67113 - protein, 342 aa, Halalkalibacillus sp.
  misc_feature (1)..(342): tr|A0A2I0QXN8|A0A2I0QXN8_9BACI S-adenosylmethionine:tRN A ribosyltransferase-isomerase OS=Halalkalibacillus sp. B3227 OX=2018042 GN=queA PE=3 SV=1
MNVNDFDFDLPEELIAQTPLKDRAASKLMVIDRDKGSVENKQFPSVVDYLNPGDCLVLNNTKVLPARLLGEKEETKGKVEMLLLHQTGEDEWEALVKPAKKIKVGTRVSFGDGLLTAECTEIRDQGLRIVKFEYDGIFLEVLDQLGEMPLPPYIKEQLDDRDRYQTVYAKEVGSAAAPTAGLHFTDEILERIRAKGIKIAYLTLHVGLGTFRPVQVDDVEEHDMHSEFYQLDQETADLLNDVKQNGNSVVAVGTTSVRTLETIARDEQGKFKGSSGWTDIFIYPPYRFQAIDAMITNFHLPKSTLIMLVSAFASKELILRAYEEAVRDRYRFFSFGDAMIIL

SEQ ID NO: 67114 - protein, 347 aa, Halanaerobium congolense
  misc_feature (1)..(347): tr|A0A4R7E849|A0A4R7E849_9FIRM S-adenosylmethionine:tRN A ribosyltransferase-isomerase OS=Halanaerobium congole nse OX=54121 GN=queA PE=3 SV=1
MKVEEFDYHLPEELIAQKPLPKRDESRLMVLNPKQNKIEENVFKNLKKFLDPGDMIIMNNSRVIPARLYGAKIPTGTEIEVLLLNELTEGHWEVLVRPGRRAKKGVKINFNDILKAEVVEYTDFGGRIVEFSWDENNYDFEEILNQLGEMPLPPYINEKLDDPERYQTIYSKKKGSAAAPTAGLHFTENLLNELQDYGIILDYITLHVGLGTFRPVKSEEIEDHEMHEEYAEISAETAAKIKEVKARGSKVIAVGTTVTRTLESAAQDGGLSEYKGWTDIFIYPGYEFKVIDSLITNFHLPKSTLLMLVSALAGKDFILSAYKKAVEDKYRFFSLGDAMLILNRKED

SEQ ID NO: 67115 - protein, 347 aa, Halanaerobium congolense
  misc_feature (1)..(347): tr|A0A1G6PJQ7|A0A1G6PJQ7_9FIRM S-adenosylmethionine:tRN A ribosyltransferase-isomerase OS=Halanaerobium congole nse OX=54121 GN=queA PE=3 SV=1
MKVEEFDYHLPEELIAQKPLPKRDESRLMVLNPKQNKIEENVFKNLKKFLDPGDMIIMNNSRVIPARLYGAKIPTGTEIEVLLLNELTEGRWEVLVRPGRRAKKGVKINFNDILKAEVVEYTDFGGRIVEFSWDENNYDFEEILNQLGEMPLPPYINEKLDDPERYQTIYSKKKGSAAAPTAGLHFTENLLNELQDYGIILDYITLHVGLGTFRPVKSEEIEDHEMHEEYAEISAETAAKIKEVKARGSKVIAVGTTVTRTLESAAQDGGLSEYKGWTDIFIYPGYEFKVIDSLITNFHLPKSTLLMLVSALAGKDFILSAYKKAVEDKYRFFSLGDAMLILNRKED

SEQ ID NO: 67116 - protein, 347 aa, Halanaerobium hydrogeniformans
  misc_feature (1)..(347): tr|E4RIK4|E4RIK4_HALHG S-adenosylmethionine:tRNA ribosy ltransferase-isomerase OS=Halanaerobium hydrogeniforman s OX=656519 GN=queA PE=3 SV=1
MRVEEFDYQLPEELIAQKPLPERDMSRLMVLDPQNKMIREDLFKNLKRYLEPGDRLILNNSRVIPARLYGEKIPTGTEIEILLLNELKEGRWEVLVKPGRRAKKGVKIQFQNILEAEVLEYTDFGGRIVEFSWDDGCSSFEEILNKLGEMPLPPYINEKLDNPERYQTVYSKKRGSAAAPTAGLHFTDQLLRDLENYGVKIDYITLHVGLGTFRPVKSEKIEDHKMHAEYAEISPETVARIKKTQANGNKVVAVGTTVTRTLETAAQSGSIKAFKGWTDIFIYPGYEFKVIDSLITNFHLPKSTLLMLVSALAGKELILKAYNQAVEEEYRFFSLGDAMLILNRKED

SEQ ID NO: 67117 - protein, 347 aa, Halanaerobium kushneri
  misc_feature (1)..(347): tr|A0A1N6V7E9|A0A1N6V7E9_9FIRM S-adenosylmethionine:tRN A ribosyltransferase-isomerase OS=Halanaerobium kushner i OX=56779 GN=queA PE=3 SV=1
MKVEEFDYHLPEELIAQTPLPERDESRLMILNPEQDRIKEDIFKNLKDYLEPGDMIVMNNSRVIPARLYGEKIPTGTEIELLLLNELAEGRWEVLVRPGRRAKKGVKINFEDILEAEVVEYTDFGGRIVEFSWDQQEYNFEEILNQLGEMPLPPYINEKLDDPERYQTVYSEKKGSAAAPTAGLHFTDRLLEELQEYGVILDYITLHVGLGTFRPVKSEDIEDHEMHEEYAEISAETAKKIKEVKARGNKVVAVGTTVTRTLESAAQDGELSEYKGWTDIFIYPGYEFKVIDSLITNFHLPKSTLLMLVSALAGKEFVLEAYEQAVENEFRFFSLGDAMLILNRKED

SEQ ID NO: 67118 - protein, 347 aa, Halanaerobium praevalens
  misc_feature (1)..(347): tr|E3DQD6|E3DQD6_HALPG S-adenosylmethionine:tRNA ribosy ltransferase-isomerase OS=Halanaerobium praevalens (str ain ATCC 33744 / DSM 2228 / GSL) OX=572479 GN=queA PE=3 SV=1
MKVEEFNYQLPEELIAQKPLSKRDESRLMVLNPEQQIIEENIFKNLKEYLDPGDMIIMNNSRVIPARLYGAKIPTGTEIELLLLNELSEGRWEVLVRPGRRAKKGVKIKFQDILEAEVVEYTDFGGRIVEFSWDHKKYNFEEVLNQLGEMPLPPYINEKLDDPERYQTVYSKKRGSAAAPTAGLHFTDSLLKELEEYGIILDYITLHVGLGTFRPVKSENIEEHEMHEEYAEISAETAAKIKKVKTQGNKVVAVGTTVTRTLESAAANGELSEYQGWTDIFIYPGYEFKVIDSLITNFHLPKSTLLMLVSALAGKELVLSAYQKAVEKEYRFFSLGDAMLILNRKED

SEQ ID NO: 67119 - protein, 347 aa, Halanaerobium saccharolyticum
  misc_feature (1)..(347): tr|M5E2P3|M5E2P3_9FIRM S-adenosylmethionine:tRNA ribosy ltransferase-isomerase OS=Halanaerobium saccharolyticum subsp. saccharolyticum DSM 6643 OX=1293054 GN=queA PE= 3 SV=1
MKVEEFDYHLPEELIAQKPLPKRDESRLMVLNPQENTIEENVFKNLKDHLDPGDMIIMNNSRVIPARLYGAKIPTGTEIELLLLNELAEGRWEVLVRPGRRAKKGVKINFEDILEAEVVEYTDFGGRIVEFSWNQNNYDFEEVLNQLGEMPLPPYINEKLDDPERYQTVYSKKKGSAAAPTAGLHFTDRLLEELTEYGIILDYITLHVGLGTFRPVKSEDIEDHEMHEEYAEISAATVDKIKKVKANGNKVVAVGTTVTRTLESAAQTDELSEYKGWTDIFIYPGYEFKVIDSLITNFHLPKSTLLMLVSALAGKEFVLNAYQKAVEEEYRFFSLGDAMLILNRKED

SEQ ID NO: 67120 - protein, 347 aa, Halanaerobium saccharolyticum
  misc_feature (1)..(347): tr|A0A4V3CYN2|A0A4V3CYN2_9FIRM S-adenosylmethionine:tRN A ribosyltransferase-isomerase OS=Halanaerobium sacchar olyticum OX=43595 GN=queA PE=3 SV=1
MKVEEFDYHLPEELIAQKPLPERDESRLMVLNPQQDTIEENIFKNLKEYLEPGDMIIMNNSRVIPARLYGAKIPTGTEIELLLLNELAEGRWEVLVRPGRRAKKGVKINFEDILEAEVVEYTDFGGRIVEFSWDQQNYDFEEILNQLGEMPLPPYINEKLDDPERYQTVYSQKKGSAAAPTAGLHFTDRLLKELQEYGVILDYITLHVGLGTFRPVKSEDIEDHEMHEEYAEISAETAAKIKEVKANGNKVVAVGTTVTRTLESAAQEGDLSEYKGWTDIFIYPGYEFKVINSLITNFHLPKSTLLMLVSAMAGKEFILKAYKKAVEDEFRFFSLGDAMMILNRKED

SEQ ID NO: 67121 - protein, 347 aa, Halanaerobium salsuginis
  misc_feature (1)..(347): tr|A0A1I4GBX3|A0A1I4GBX3_9FIRM S-adenosylmethionine:tRN A ribosyltransferase-isomerase OS=Halanaerobium salsugi nis OX=29563 GN=queA PE=3 SV=1
MNLDEFDYHLPEELIAQDPLPERDSSRLMVLDPLTKTIKESIFKDIKQFIEPGDLIIMNNSRVIPARLYGNKIPTGTQIEVLLLNELQTGRWEVLVKPGRRAKKGVKIDFNNLLQAEVVEYTDFGGRIVEFSWNKSNYDFEEILNKLGEMPLPPYINHKLANPERYQTVYSKKRGSAAAPTAGLHFTKSLLADLQQNGVLLDYITLHVGLGTFRPVKTEKIEDHKMHAEYAEVSAETVAKIKACKQRGNKVIAVGTTVTRTLESAAAGEELTDFKGWTDIFIYPGYEFKVIDALITNFHLPKSTLLMLVSALAGQDFVLKAYQKAVADKYRFFSLGDAMFILNRKED

SEQ ID NO: 67122 - protein, 347 aa, Halanaerobium sp.
  misc_feature (1)..(347): tr|A0A424YFJ4|A0A424YFJ4_9FIRM S-adenosylmethionine:tRN A ribosyltransferase-isomerase OS=Halanaerobium sp. MSA O_Bac5 OX=2293859 GN=queA PE=3 SV=1
MRVEEFDYQLPEELIAQKPLPERDMSRLMVLDPQNKEIKDDLFKNIKKYLEPGDRLVLNNSRVIPARLYGEKIPTGTEIEVLLLNELKEGRWEVLVKPGRRAKKGVKVQFQNILEAEVVEYTDFGGRIVQFSWDEKAGSFEEILNKLGEMPLPPYIKQKLDNPERYQTVYSKKRGSAAAPTAGLHFTDQLLNDLKNYGVKIDYITLHVGLGTFRPVKSEKIEDHKMHAEYAEISSETVAKIKETKARGNKVVAVGTTVTRTLEAAAQSGSLKAFKGWTDIFIYPGYDFKVIDSLITNFHLPKSTLLMLVSALAGKEFILKAYNKAVAEEYRFFSLGDAMLILNRKED

SEQ ID NO: 67123 - protein, 347 aa, Halanaerobium sp.; identical to SEQ ID NO: 67120
  misc_feature (1)..(347): tr|A0A315REL4|A0A315REL4_9FIRM S-adenosylmethionine:tRN A ribosyltransferase-isomerase OS=Halanaerobium sp. OX= 1895664 GN=queA PE=3 SV=1

SEQ ID NO: 67124 - protein, 342 aa, Halarsenatibacter silvermanii
  misc_feature (1)..(342): tr|A0A1G9JS53|A0A1G9JS53_9FIRM S-adenosylmethionine:tRN A ribosyltransferase-isomerase OS=Halarsenatibacter sil vermanii OX=321763 GN=queA PE=3 SV=1
MDVDKFSFDLPEELIAQEPAQRRDESRLLVMNKDGNIKDHSIFKNLLDFLQPGDRIVLNNSRVIPARLYGQKRTSGIEIEILLLNELETGRWEVLANPGRRVKPGTEIEFEGEISARCDDVTDFGGRILSFSPENKLRSVLDEIGEMPLPPYIKKKPEDPGRYQTIYASSDREGSVAAPTAGLHFTERLIEELRSKGIGISYLTLHVGLGTFRPVRSERVENHDMHSEYFELPEKTAKEINATRQQGGRIIAVGTTVTRTLEGASEALNRGEGKKGWTDLFIYPGYEFQVIDSLITNFHLPESTLIMLVSALVGREEVLEAYREAIERRYRFYSFGDAMLIL

SEQ ID NO: 67125 - protein, 368 aa, Haliangium ochraceum
  misc_feature (1)..(368): tr|D0LJ83|D0LJ83_HALO1 S-adenosylmethionine:tRNA ribosy ltransferase-isomerase OS=Haliangium ochraceum (strain DSM 14365 / JCM 11303 / SMP-2) OX=502025 GN=queA PE=3 S V=1
MRLRSDYHFDLPDGQIAQLPSAQRDDSRLLLLRAGAAAEDRGFRDIIDLLPADAVLVVNDTRVLPARLRARKHSGGAVELLFLERVEVRGVSEQWRCMGRSSKPLREGAQLRVLASDAEGVLAETGDTVSIAGERGEDGTLLVDIAGDGRLLLERAGELPLPPYIARPEGPETLDSERYQTIFARAPGAVAAPTAGLHFTPAILDALQAKGAAIAPLTLHVGPGTFLPVRTEEIAAHHMHLERYEVPETTAALVASGRPVVAVGTTCVRALESAARAAARDQDRDRDDGARRLAVGPGQTDLFITPGYRFRAVDWMVTNFHLPESTLLMLVCAFAGYRRVLDSYRHAVDAGYRFFSYGDAMLVERAPE

SEQ ID NO: 67126 - protein, 363 aa, Haliangium ochraceum
  misc_feature (1)..(363): tr|D0LSN9|D0LSN9_HALO1 S-adenosylmethionine:tRNA ribosy ltransferase-isomerase OS=Haliangium ochraceum (strain DSM 14365 / JCM 11303 / SMP-2) OX=502025 GN=Hoch_4771 P E=3 SV=1
MLAQGQGTRALADERARPPGSAPRPSLRPGRDPGRPLEATRLLSLRGADIAHHRVGALVELLAPGDLLVLNDAATLPASLRGHVAGAEVELRLAGALGDRDFPAMFRAVLFGAGDWRQDTERRPPPPLLGPGARIELDGFSATVRARAALSPRLLTLEFDRADDQLAEAVYRAGRPVQYRHLDAPLPLSAVQTPYAWRPWAVEMPSTGRPLSWALLDRLAAAGIEHAFLTHAAGLSATGDPALDAALPLPERYAIPAQTARACRVARARGGRIVAVGTTVVRALESARGVAGAGVATERISRRHRLRAVDGILTGIHAPGESHFELLEAFAAPAALRRVHAEAVAGDYLAHELGDLMMIMPAR

SEQ ID NO: 67127 - protein, 356 aa, Haliea salexigens
  misc_feature (1)..(356): tr|A0A3C1KI02|A0A3C1KI02_9GAMM S-adenosylmethionine:tRN A ribosyltransferase-isomerase OS=Haliea salexigens OX= 287487 GN=queA PE=3 SV=1
MQLDEFHYALPPELIAQYPLQDRSASRLLALDGASGATRHLAFTDVPGCLQPGDLLVFNNTRVIPARLWGQKATGGRVEILIERVTGEHTALAHIRSSKSPRPGGVIHLSAQPGEAPGPLQLTVTGRDGALFKLLSPPGVPLHAILADIGHMPLPPYIERADEVADQERYQTVYAERAGAVAAPTAGLHFTQALLEQLDAAGIERGTVTLHVGAGTFQPVRVDNIRDHHMHAEYLEVDADLCAAVEATRARGGRVVAVGTTAVRSLESAACGHGRVAPQTGDTQIFIYPGYRFQVVDAMITNFHLPESTLLMLVSAFSGREAILAAYREAIEQRYRFFSYGDAMFLTPQPDAVGPR

SEQ ID NO: 67128 - protein, 356 aa, Haliea sp.
  misc_feature (1)..(356): tr|A0A2D5F9L4|A0A2D5F9L4_9GAMM S-adenosylmethionine:tRN A ribosyltransferase-isomerase OS=Haliea sp. OX=1932666 GN=queA PE=3 SV=1
MRKSDFFYDLPPELIAQHPLPERGASRLLCLEGASGAVAHRRFTDLPELLRPEDLLVFNNTRVIPARLWGQKSSGGRVEILIERLTGVDTALAHIRSSKSPKPGTTLLLAEREGEEPGPWQLEVTGREGALFCLRTPDGSPLTALLNQIGHMPLPPYIAREDEQLDQSRYQTVYAEKEGAVAAPTAGLHFTDSLLAQLDAQGVHRAAVTLHVGAGTFQPVRTDNIEDHHMHAEYLEVDEQVCAAVEACRARGGRVVAVGTTAVRSLESAACGKGRVAPMTGDTDIFIYPGYRFRVVDALVTNFHLPESTLVMLVSAFAGREAVLAAYAEAIAQRYRFFSYGDAMFLTPRPDSLEPR

SEQ ID NO: 67129 - protein, 356 aa, Haliea sp.
  misc_feature (1)..(356): tr|A0A2E7C2B7|A0A2E7C2B7_9GAMM S-adenosylmethionine:tRN A ribosyltransferase-isomerase OS=Haliea sp. OX=1932666 GN=queA PE=3 SV=1
MKLDDFHYELPPELIAQYPLKERSASRLLVLDGASGATRHGVFSALPGCLQPGDLLVFNNTRVIPARLWGQKATGGRVEILIERITGEHTALAHIRSSKSPKPGSVIHLSAEPGGAPGPLQLTVTGREGALFQLASPPQVALHSVLADIGHMPLPPYIERGDEAADQERYQTVYAERAGAVAAPTAGLHFTEALLEQLDAAGIQRATVTLHVGAGTFQPVRVDNIQEHHMHAEYLEVDAGVCAAVEATRLRGGRVVAVGTTAVRSLESAACGQGRIAPLTGDTDIFIYPGYRFQVVDAMITNFHLPESTLLMLVSAFCGRDNMLAAYREAIAERYRFFSYGDAMFLTPTPAAMGPR

SEQ ID NO: 67130 - protein, 354 aa, Halieaceae bacterium
  misc_feature (1)..(354): tr|A0A2D7J8J9|A0A2D7J8J9_9GAMM S-adenosylmethionine:tRN A ribosyltransferase-isomerase OS=Halieaceae bacterium OX=2026743 GN=queA PE=3 SV=1
MKRTDFTFELPAELIAQEPLAERSASRLLEVNAGLESVAHRAFRDLPSLLSPNDLLVFNNTRVLPARLFAQKQTGGKVEILFERVLGDGSALAHVRASKSPKEGTLLLVTPDDQSDVSEFTLRVTGRTGALFALSPESGSLKEMMQCFGHIPLPPYIDREDTHEDRDRYQTVYARREGAVAAPTAGLHFDPPLLNALDALGVRRTELTLHVGAGTFQPVRADNLEDHVMHREYVDVDQTCCDAVNACRDRGGRVIAVGTTAVRSLESAACQSEQGVLAPFEGDTDIFLYPGCRFHVVDAMITNFHLSESTLLMLVSAFAGVETIRRAYAAAIENRYRFFSYGDAMFLTKSEFAA

SEQ ID NO: 67131 - protein, 356 aa, Halieaceae bacterium
  misc_feature (1)..(356): tr|A0A359EML3|A0A359EML3_9GAMM S-adenosylmethionine:tRN A ribosyltransferase-isomerase OS=Halieaceae bacterium OX=2026743 GN=queA PE=3 SV=1
MQLDEFHYALPPELIAQYPLQDRSASRLLALDGASGATRHLAFTDVPGCLQPGDLLVFNNTRVIPARLWGQKATGGRVEILIERVTGEHTALAHIRSSKSPRPGGVIHLSAQPGEAPGPLQLTVTGRDGALFKLLSPPGVPLHAILADIGHMPLPPYIERADEAADQERYQTVYAERAGAVAAPTAGLHFTQALLDQLDAAGIERGTVTLHVGAGTFQPVRVDNIRDHHMHAEYLEVDAALCAAVEATRARGGRVVAVGTTAVRSLESAACGHGRVAPQTGDTQIFIYPGYRFQVVDAMITNFHLPESTLLMLVSAFSGREAILAAYREAIEQRYRFFSYGDAMFLTPQPDAVGPR

SEQ ID NO: 67132 - protein, 354 aa, Halioglobus japonicus
  misc_feature (1)..(354): tr|A0A2N5YGS5|A0A2N5YGS5_9GAMM S-adenosylmethionine:tRN A ribosyltransferase-isomerase OS=Halioglobus japonicus OX=930805 GN=queA PE=3 SV=1
MLRSDFHFELPDELIAQYPLPERSASRLLCLDGASGAIDHRHFSQLPSLLREGDLLVFNDTRVIPARLWGQKETGGKLEILVERLTGTHTALAHIRSSKSPKPGTRILLTPEQGAEPCGLELTVTGRDDALFLLSSEGGPALSQMMREVGHMPLPPYIERSDEAADQERYQTVFAAREGAVAAPTAGLHFTDALLNEIATMGVQRCTVTLHVGAGTFQPVRADNIEDHRMHSEYIEVDEAACAAVRETRARGGRVIAVGTTAVRSLESASQGGEIAPFTGDTDIFIYPGYRFRSVDAMVTNFHLPESTLLMLVSAFAGREPIMAAYAAAVAERYRFFSYGDAMFITPANAQESA

SEQ ID NO: 67133 - protein, 352 aa, Halioglobus lutimaris
  misc_feature (1)..(352): tr|A0A2N5X0S2|A0A2N5X0S2_9GAMM S-adenosylmethionine:tRN A ribosyltransferase-isomerase OS=Halioglobus lutimaris OX=1737061 GN=queA PE=3 SV=1
MKRTDFSFELPQDLIAQYPLAQRSASRLLCLDGVSGQVVHRRFTDLIEQLSPQDLLVFNNTRVIPARLWGQKETGGKLEILIERVTGSHTALAHVRCSKSPRPGTRILLADAEGAQPGEYSFKVTGREGALFALSSEGGPELAKILKQIGHMPLPPYIKRQDEQSDQDRYQTVYADREGAVAAPTAGLHFTDELLMRLDEKGVHRATVTLHVGAGTFQPVRADEIEDHVMHAEFVEVDASVCAAVRQARERGGRVVAVGTTAVRSLESASASGEIAPFTGDTDIFMYPGYRFRSVDAMITNFHLPESTLLMLVSAFAGREAIMRAYREAVAQRYRFFSYGDAMFITAAMEAR

SEQ ID NO: 67134 - protein, 352 aa, Halioglobus sp.
  misc_feature (1)..(352): tr|A0A3L7E206|A0A3L7E206_9GAMM S-adenosylmethionine:tRN A ribosyltransferase-isomerase OS=Halioglobus sp. U0301 OX=2283635 GN=queA PE=3 SV=1
MKRSDFNYQLPQELIAQYPLPGRSDSRLLCLDGMTGQVEHRRFTDLTSLLRPDDLLVFNNTRVIPARLWGQKETGGRLELLVERVTGSHTALAHIRCSKSPKPGTAILLAAEEGAQPGRYRLQVTGREDALFAISSEGGPALADIMGDIGHMPLPPYIEREDEGSDQERYQTVFAEREGAVAAPTAGLHFTRELLADIARLGVRSVTVTLHVGAGTFQPVRADNIEDHVMHAEFVEVDEAVCAAVRETRARGGRVVAVGTTAVRSLESASQGGDIAPFTGDTDIFIYPGYRFRAVDAMVTNFHLPESTLLMLVSAFAGKAHIMNAYGSAVENRYRFFSYGDAMFITAGAGHA

SEQ ID NO: 67135 - protein, 351 aa, Halioglobus sp.
  misc_feature (1)..(351): tr|A0A5B0X1B2|A0A5B0X1B2_9GAMM S-adenosylmethionine:tRN A ribosyltransferase-isomerase OS=Halioglobus sp. NY5 O X=2606449 GN=queA PE=3 SV=1
MKRSDFAFELPPELIAQHPLPERSASRMLCLDGGSGEVAHLSFTDIVDELSPDDLLVFNNTRVIPARLWGQKASGGKVEILIERVTGSHSAVAHVRCSKSPRPGTRILLAAERGGEPGEHSLEVTGRQEDLFLLSSAGGPPLADILQQTGHMPLPPYIEREDELADRNRYQTVYAEREGAVAAPTAGLHFSEELLARIDARGVQRAMVTLHVGAGTFQPVRADNIEDHQMHAEFADVSESVCAAVREAQQRGGRVIAVGTTAVRSLESASAGGEIQPFTGDTDIFIFPGYRFRTVDAMITNFHLPESTLMMLVSAFAGREHIMRAYREAIAERYRFFSYGDAMFIRSRKPY

SEQ ID NO: 67136 - protein, 354 aa, Haliscomenobacter hydrossis
  misc_feature (1)..(354): tr|F4KTT4|F4KTT4_HALH1 S-adenosylmethionine:tRNA ribosy ltransferase-isomerase OS=Haliscomenobacter hydrossis ( strain ATCC 27775 / DSM 1100 / LMG 10767 / O) OX=760192 GN=queA PE=3 SV=1
MRTKLSQFTYELPKKLIAQYPADSRHEARMMVVNRQTGTIEHKVFKDVLNIFSEGDVMVFNNTKVFPARLYGRKEKTGAKIEVFLLRELNNESRLWDVLVDPARKIRVGNKLYFSDDNDNDILVAEVVDNTTSRGRTIRFLYDGTDDEFQRELATLGNTPLPKYIIRPAEDVDRDRYQTVYAKEIGAVAAPTAGLHFSRELMKRLELKGIDFAELTLHVGLGTFRSIDVEDLSKHKMDAEYFRIPAVSVDLVNSAKERNHRICAVGTTSMRAIESAVSAEGLLKPAEGWTNKFIYPPYEFSIADSMITNFHLPKSSLLIMICAFGGYELIMQAYEEAVKEEYRFFSYGDSMLII

SEQ ID NO: 67137 - protein, 431 aa, Haliscomenobacter hydrossis
  misc_feature (1)..(431): tr|F4KSN7|F4KSN7_HALH1 S-adenosylmethionine:tRNA ribosy ltransferase-isomerase OS=Haliscomenobacter hydrossis ( strain ATCC 27775 / DSM 1100 / LMG 10767 / O) OX=760192 GN=Halhy_0088 PE=3 SV=1
MRVQDIRIEDYQYVLPEGRIAKYPLPLRDASKLLVAIDVASGFQEDIYANIHHYIPNGALMLFNNTKVIPARLHMAKPTGGMVEIFCLEPIGELSVEMARHGETTWKCFVGGAKKWKEGTVTAVWGTDSYREYLLSAEVIERTDTYFHIKFRWQPSEFTFAEVLSAIGQIPLPPYLDREAEELDRERYQTIYANLEGSVAAPTAGLHFTEKVFDDLRAKNIDLAYVTLHVGAGTFKPVSATTIGNHDMHAEYFDVSRYLIQDLYTAYSEKRPVIAVGTTTLRTLESLFLMGCKLLDASASLSNRASASLSNRASASLSDLSHEDLEIKQWDAYQLAHETTDVPRALSALLDWMDQQGLDRMVAKTQLLIAPGYTIRMISGLCTNFHQPGSTLLLLVAALMGNRWKEMYQYALEHDYRFLSYGDGCYIELKS

SEQ ID NO: 67138 - protein, 344 aa, Haloarcobacter mediterraneus
  misc_feature (1)..(344): tr|A0A4V1M1M6|A0A4V1M1M6_9PROT S-adenosylmethionine:tRN A ribosyltransferase-isomerase OS=Haloarcobacter medite rraneus OX=2023153 GN=queA PE=3 SV=1
MMKSNLDPLKTSSYDYNLPKELIATKPVYPADSAKLLVYNRETDTITHTTFKSLMHVLPDNLSVFLNDTKVIKARIFGEKESGGKVELLFNKPLFMDRYLVMIRGKVKIGTKLFFPMNLQAEVLEVNDDGSRVVNFIQNDKKLDFLSLVEILNEIGHLPLPPYMNREDEEKDNEDYQTLFAKNYGAVAAPTASLHFTEELLEKINNKYDVNYLTLHVGAGTFKPVDSEDILSHPMHSEYFEIGSEAKKSLDEAQKVLAVGTTVTRTVEYYARTNKIQGECDLFLNPANKPIKVDHLLTNFHLPKSTLIMLIASFVGLEKTLEIYEEAIKEKYRFYSYGDGMLII

SEQ ID NO: 67139 - protein, 341 aa, Halobacillus aidingensis
  misc_feature (1)..(341): tr|A0A1H0P1L9|A0A1H0P1L9_HALAD S-adenosylmethionine:tRN A ribosyltransferase-isomerase OS=Halobacillus aidingen sis OX=240303 GN=queA PE=3 SV=1
MDIKQYDFDLPEELIAQVPLEDRTASRLMVCDRNEQTIEHRHFSQITDYLEKGDCLVLNDTKVLPARLYGAKEGTGGKVEVLLLHQTEDDEWDVLVKPAKKVKVGTKIVFGEGKLVAECTELQEHGGRKVKFSYDGIFLEVLESLGEMPLPPYIKEQLSDRDRYQTVYAKEEGSAAAPTAGLHFTEELLKDLQSNGIELAYLTLHVGLGTFRPVSVDQVEEHDMHAEFYQLSEETADQLNAVKERGGRIISVGTTSTRTLETIIRDHGTFKEASGWTDIFIYPPQKLKAIDGLITNFHLPKSTLIMLVSAFAGRDFILEAYRQAVEERYRFFSFGDAMFIK

SEQ ID NO: 67140 - protein, 341 aa, Halobacillus alkaliphilus
  misc_feature (1)..(341): tr|A0A1I2JE90|A0A1I2JE90_9BACI S-adenosylmethionine:tRN A ribosyltransferase-isomerase OS=Halobacillus alkaliph ilus OX=396056 GN=queA PE=3 SV=1
MDIKQYDFELPEELIAQVPLQDRSSSRLMVCDRSAETIEHYHFSDIERLLKPGDCLVLNDTRVLPARLFGAKEDTGGKVEVLLLHQDSKDEWDVLIKPAKKVKPGSRIVFGDGQLIAECTELQEHGGRKVRFSYEGIFMEVLESLGEMPLPPYIKEQLSDRERYQTVYAKEEGSAAAPTAGLHFTNELLENLQASGVTIAYLTLHVGLGTFRPVSVDKVEDHDMHAEFYQVSQETADQLNQVKKQGGRIISVGTTSTRTLETIIRDYGTFQEASGWTDIFIYPPQKLKAIDGLITNFHLPKSTLIMLVSAFAGRDFVLEAYARAVENKYRFFSFGDAMLII

SEQ ID NO: 67141 - protein, 341 aa, Halobacillus dabanensis
  misc_feature (1)..(341): tr|A0A1I3P774|A0A1I3P774_HALDA S-adenosylmethionine:tRN A ribosyltransferase-isomerase OS=Halobacillus dabanens is OX=240302 GN=queA PE=3 SV=1
MDIKQYDFELPEELIAQVPLEDRTASRLMVCDRNKETIEHRHFSQITDYLEEGDCLVLNDTKVLPARLYGAKEDTGGKVEVLLLHQTESDEWEVLVKPAKKVKLGTKIVFGDGQLIAECTDLQEHGGRKVKFSYEGIFLEVLESLGEMPLPPYIKEQLPDRERYQTVYAKEEGSAAAPTAGLHFTRELLQELENLGVEIAYLTLHVGLGTFRPVSVEQVEDHDMHAEFYQLNKETADKLNAVRASGGRIISVGTTSTRTLETIIRDYGTFKEAKGWTDIFIYPPQKLKAIDGLITNFHLPKSTLIMLVSAFAGRDFILEAYNRAVEEKYRFFSFGDAMFIK

SEQ ID NO: 67142 - protein, 341 aa, Halobacillus faecis
  misc_feature (1)..(341): tr|A0A511WNT7|A0A511WNT7_9BACI S-adenosylmethionine:tRN A ribosyltransferase-isomerase OS=Halobacillus faecis O X=360184 GN=queA PE=3 SV=1
MEIKQYDFDLPEELIAQVPLEDRTASRLMVCDRTEQTIEHRHFSQITDYLEKGDCLVLNNTKVLPARLYGAKEGTGGKVEVLLLHQTEDDEWDVLVKPAKKVKVGTKIVFGEGKLVAECTELQEHGGRKVKFRYEGIFLEVLESLGEMPLPPYIKEQLSDRDRYQTVYAKEEGSAAAPTAGLHFTEELLEDLQAKGIEIAYLTLHVGLGTFRPVSVDQVEEHDMHAEFYQLSEETANQLNAVKERGGRIISVGTTSTRTLETIIRDHGTFKEASGWTDIFIYPPQQLKAIDGLITNFHLPKSTLIMLVSAFAGRDFILEAYKQAVEERYRFFSFGDAMFIK

SEQ ID NO: 67143 - protein, 341 aa, Halobacillus halophilus
  misc_feature (1)..(341): tr|I0JPB7|I0JPB7_HALH3 S-adenosylmethionine:tRNA ribosy ltransferase-isomerase OS=Halobacillus halophilus (stra in ATCC 35676 / DSM 2266 / JCM 20832 / NBRC 102448/ NCI MB 2269) OX=866895 GN=queA PE=3 SV=1
MDIKQYDFELPEELIAQVPLQDRSSSRLMVCDRSAETIEHYHFSDIERLLKPGDCLVLNDTRVLPARLFGAKEDTGGKVEVLLLHQDTKDEWDVLIKPAKKVKPGTRIVFGDGQLIAECTEMQEHGGRKVRFSYEGIFMEVLESLGEMPLPPYIKEQLSDRERYQTVYAKEEGSAAAPTAGLHFTNELLENLQASGVTIAYLTLHVGLGTFRPVSVDKVEDHDMHAEFYQVSQETADQLNQVKKQGGRIISVGTTSTRTLETIIRDYGTFQEASGWTDIFIYPPQKLKAIDGLITNFHLPKSTLIMLVSAFAGREFVLEAYARAVENKYRFFSFGDAMLIV

SEQ ID NO: 67144 - protein, 341 aa, Halobacillus karajensis
  misc_feature (1)..(341): tr|A0A024P6Q7|A0A024P6Q7_9BACI S-adenosylmethionine:tRN A ribosyltransferase-isomerase OS=Halobacillus karajens is OX=195088 GN=queA PE=3 SV=1
MDIKQYDFELPEELIAQVPLEDRTSSRLMICDRQEQTIEHRHFSQITDYLVEGDCLVLNDTKVLPARLYGSKEGTGGKVEVLLLHQTKEDEWEVLVKPAKKVKIGTKIVFGEGKLVAECTDLQDHGGRKVRFEYEGIFLEVLESLGEMPLPPYIKEQLSDRDRYQTVYAKEEGSAAAPTAGLHFTNELLDELQNRGVEIAYLTLHVGLGTFRPVNVDQIEEHDMHAEFYQLNEDTATQLNAVKDRGSRIISVGTTSTRTLETIIRDHGIFKEAKGWTDIFIYPPQQLKAIDGLITNFHLPKSTLIMLVSAFAGRDFILEAYQEAVKERYRFFSFGDAMFIK

SEQ ID NO: 67145 - protein, 341 aa, Halobacillus litoralis
  misc_feature (1)..(341): tr|A0A410MHD9|A0A410MHD9_9BACI S-adenosylmethionine:tRN A ribosyltransferase-isomerase OS=Halobacillus litorali s OX=45668 GN=queA PE=3 SV=1
MDIKQYDFELPEELIAQVPLENRSSSRLMVCNRRTNEIEHRHFSQITEYLNSGDCLVLNDTRVLPARLYGAKEDTGGKVEVLLLHQTEKDEWEVLIKPAKKVKVGTRIVFGEGQLTAECTEIQEHGGRKVKFSYDGIFLEVLDSLGEMPLPPYIKEQLPDRERYQTVYAKEEGSAAAPTAGLHFTEDLLEELQAKGIEMAYLTLHVGLGTFRPVSVDNVEEHDMHAEFYQLNQQTADQLNEVRQRGGRIISVGTTSTRTLETIIRDHGTFTAASGWTDIFIYPPQTLKAIDGLITNFHLPKSTLIMLVSAFAGRDFILEAYRKAVEERYRFFSFGDAMFIT

SEQ ID NO: 67146 - protein, 344 aa, Halobacillus mangrovi
  misc_feature (1)..(344): tr|A0A1W5ZVX8|A0A1W5ZVX8_9BACI S-adenosylmethionine:tRN A ribosyltransferase-isomerase OS=Halobacillus mangrovi OX=402384 GN=HM131_11355 PE=3 SV=1
MNEISTAFQIPNHLNAHIPAEQRGLRRDQVKMMVVGIDRKPVHSRFDLLDQFLNSGDVLVLNKSRTIPPVLRGSQGNNPIEIRLSRKLSTNQWEALVLGRVINRKQPIYFPDGVTARIAGMGSERPLVSLTFSETGSSLFSFIYDYGDPIRYEYIDYPWPLDTYQTVYGSVPGSAEMPSAGRAFTWKMIKHLKAKGIKIAFLHLHTGLSYYEDDRWPDPKNHPEPYHVPLETVKIIQQAKAARKRIIAVGTTVVRALETSVNEEGNLYESEGNTSLYVDQHYKHAVVDGLLTGFHEPEASHLDMLSSFLPANELLKAYEEALQNNYLWHEFGDMNLLFSSSDQS

SEQ ID NO: 67147 - protein, 341 aa, Halobacillus mangrovi
  misc_feature (1)..(341): tr|A0A1W5ZUH3|A0A1W5ZUH3_9BACI S-adenosylmethionine:tRN A ribosyltransferase-isomerase OS=Halobacillus mangrovi OX=402384 GN=queA PE=3 SV=1
MDIKQYDFDLPEELIAQVPLQDRSSSRLMVLDRAQETIEHHYFSDISQFIQPGDCLVLNDTRVLPARLYGAKEGTGGKVEVLLLHQSEGDEWEVLVKPAKKVKAGTKITFGNGQLVAECTEIQEHGGRKVRFSYEGIFLEVLESLGEMPLPPYIKEQLPDRERYQTVYAKEEGSAAAPTAGLHFTTELLQSLEEKGVEIAYLTLHVGLGTFRPVSVDQIEEHDMHAEFYQLSEETAEQLNRVKENGGKIISVGTTSTRTLETVIRDYGTFTAASGWTDIFIYPPQKLKAIDGLITNFHLPKSTLIMLVSAFAGRDFILEAYNRAVQERYRFFSFGDAMLIL

SEQ ID NO: 67148 - protein, 335 aa, Halobacillus salinus
  misc_feature (1)..(335): tr|A0A4Z0H055|A0A4Z0H055_9BACI S-adenosylmethionine:tRN A ribosyltransferase-isomerase OS=Halobacillus salinus OX=192814 GN=E4663_02095 PE=3 SV=1
MHAFSIPENLNAQTPAEIVRGRRDQVRLLSIDKDQQLFHNNFNEIDQFLNPGDLLVLNNSRTIPPVLEASQGNHTFEIRLSRKRSSTSWEALVVGDFLAIDRPIQLEEKVEAMITGHGSEHPLVTLEFSISGSNLLDFIYRNGEPVRYEYIHRPFSLDTYQTVYGSVPGSVEMPSAGRAFTWGLLEKLKRKGVRLAFIQLHAGLSYYEKDRWPNPNNHPEAFCVPEATAELIQDTRRTGNRVIAVGTTVVRALESAVTSHGEVEPIEGTTRLYVDEGYTIAAVDGLLTGFHEPEASHLHMLTAFLPKKKLMSAYHQALEKGYLWHEFGDMNLILK

SEQ ID NO: 67149 - protein, 341 aa, Halobacillus salinus
  misc_feature (1)..(341): tr|A0A4Z0H1B4|A0A4Z0H1B4_9BACI S-adenosylmethionine:tRN A ribosyltransferase-isomerase OS=Halobacillus salinus OX=192814 GN=queA PE=3 SV=1
MDIKQYDFELPEELIAQVPLEDRTSSRLMVLNREDQTIKHQQFSDIKQFIQPGDCLVLNDTKVLPARLYGAKEDTGGKVEVLLLHQTEEDEWDVLVKPAKKVKEGTRIEFGDGQLVAECTDIQEHGGRRVRFSYEGIFLEVLESLGEMPLPPYIKEQLSDRDRYQTVYAKEEGSAAAPTAGLHFTNELLQELKDEGVELAYLTLHVGLGTFRPVSVDNVEEHDMHAEFYQLSEETAAQLNRVRENGGRIISVGTTSTRTLETVIRDYGTFQEASGWTDIFIYPPQKLKAIDGLITNFHLPKSTLIMLVSAFADRDFILEAYHRAVEERYRFFSFGDAMLIL

SEQ ID NO: 67150 - protein, 345 aa, Halobacillus sp.
  misc_feature (1)..(345): tr|A0A0B0D0N1|A0A0B0D0N1_9BACI S-adenosylmethionine:tRN A ribosyltransferase-isomerase OS=Halobacillus sp. BBL2 006 OX=1543706 GN=LD39_12300 PE=3 SV=1
MSNLPERFQVPDNLNAVSPAEYEGGSRDQVRMMVLDQSLPKPLHNQFNQIGQYLNPGDILVLNNSRTIPPVLKGKQGKNPVEVRLSREISTNQWEALVLGPLTQANAAIILPDEMKAYITGTGSEHPLVTLTFSESGRSLLDFLYRYGEPVRYEYIDQPWPLDAYQTVYGSLPGSVEMASAGRAFTWKLLNSLKAKGIKLAFIQLHTGLSYYEKNRWPDPRNHPENYRVPEDTVKMIQSVKSEGNRVIAVGTTVVRALESSVNCNGELVAHSGVTTLYVDHHHKHSVVDGLLTGFHEPEASHLDMLASFLPESTLMNGYNEAIQKGYLWHEFGDMNLLLPSRKRT

SEQ ID NO: 67151 - protein, 341 aa, Halobacillus sp.
  misc_feature (1)..(341): tr|A0A3S3ZPH7|A0A3S3ZPH7_9BACI S-adenosylmethionine:tRN A ribosyltransferase-isomerase OS=Halobacillus sp. SKP4 -6 OX=2498856 GN=queA PE=3 SV=1
MDIKQYDFELPEELIAQVPLKDRSSSRLMVLNRQEEKIEHQHFADIKSYIQPGDCLVLNDTRVLPARLYGAKEETGGKVEVLLLHQQEGDEWEVLVKPAKKVKLGTRIVFGDGQLIAECTEVQEHGGRKVRFLYEGIFLEVLESLGEMPLPPYIKEQLSDKERYQTVYAKEEGSAAAPTAGLHFTHELLEELEASGVEIAYLTLHVGLGTFRPVSVDQIEEHDMHAEFYRLSKETADQLNRVRANGGRIISVGTTSTRTLETIIRDHGTFKEASGWTDIFIYPPQKLQAIDGLITNFHLPKSTLIMLVSAFASREFILDAYREAVQERYRFFSFGDAMLIL

SEQ ID NO: 67152 - protein, 341 aa, Halobacillus trueperi
  misc_feature (1)..(341): tr|A0A3E0JCQ7|A0A3E0JCQ7_9BACI S-adenosylmethionine:tRN A ribosyltransferase-isomerase OS=Halobacillus trueperi OX=156205 GN=queA PE=3 SV=1
MDIKQYDFDLPEELIAQVPLEDRTASRLMVCDRNEQTIEHRHFSQITDYLEKGDCLVLNDTKVLPARLYGAKEGTGGKVEVLLLHQTEDDEWDVLVKPAKKVKVGTKIVFGEGKLVAECTELQEHGGRKVTFSYEGIFLEVLESLGEMPLPPYIKEQLSDRDRYQTVYAKEEGSAAAPTAGLHFTEELLKDLQSKGIELAYLTLHVGLGTFRPVSVDQVEEHDMHAEFYQLSEETADQLNAVKERGGRIISVGTTSTRTLETIIRDHGTFKEASGWTDIFIYPPQKLKAIDGLITNFHLPKSTLIMLVSAFAGRDFILEAYKQAVEERYRFFSFGDAMFIK

SEQ ID NO: 67153 - protein, 341 aa, Halobacillus trueperi
  misc_feature (1)..(341): tr|A0A3D8VRI5|A0A3D8VRI5_9BACI S-adenosylmethionine:tRN A ribosyltransferase-isomerase OS=Halobacillus trueperi OX=156205 GN=queA PE=3 SV=1
MDIKQYDFDLPEELIAQVPLEDRTASRLMVCDRNEQTIEHRHFSQIIDYLEKGDCLVLNDTKVLPARLYGAKEGTGGKVEVLLLHQTEDDEWDVLVKPAKKVKVGTKIVFGEGKLVAECTELQEHGGRKVKFSYDGIFLEVLESLGEMPLPPYIKEQLSDRDRYQTVYAKEEGSAAAPTAGLHFTEELLKDLQSNGIELAYLTLHVGLGTFRPVSVDQVEEHDMHAEFYQLSEETADQLNAVKERGGRIISVGTTSTRTLETIIRDHGTFKEASGWTDIFIYPPQKLKAIDGLITNFHLPKSTLIMLVSAFAGRDFILEAYRQAVEERYRFFSFGDAMFIK

SEQ ID NO: 67154 - protein, 347 aa, Halobacteriovoraceae bacterium
  misc_feature (1)..(347): tr|A0A2E5X0T9|A0A2E5X0T9_9PROT S-adenosylmethionine:tRN A ribosyltransferase-isomerase OS=Halobacteriovoraceae bacterium OX=2026745 GN=queA PE=3 SV=1
MKREDLLTESYDYELPEELIAQRPAPERDHSKLMVYKHKSETVDHSKFHNIADYLPAGTLLVLNQSKVFPCRLMGKKPTGGKAEVLFLSLLDEGGLYPVMLKTSGKKKLGDVFLFGELKLKIERILEDGSFYVQTNLEGEDLLDYLESRAHIPIPPYIREGVADESDKKDYQTVYAKHAGSVAAPTAGLHFTNKVFDSLKEKGIEIAKVTLHVGAGTFKPVSADEITDHKMHREHFDISDEDLEKLNSAKNIFAVGTTTLRVLESCYSDGKFALPEEKSTDIFLYPGKEVKSIQGLITNFHLPKSTLLMLVSSIVGREKTLSLYKEAVEKKYRFFSYGDSMMIMRNE

SEQ ID NO: 67155 - protein, 350 aa, Halobacteriovoraceae bacterium
  misc_feature (1)..(350): tr|A0A2E2EJA4|A0A2E2EJA4_9PROT S-adenosylmethionine:tRN A ribosyltransferase-isomerase OS=Halobacteriovoraceae bacterium OX=2026745 GN=queA PE=3 SV=1
MKNIDLLTESYHYELDPKFIADRPTKHRHDSKLMVYYEQDDRIEHVLFKDLPRFLEPEHLLVLNQSKVFPCRLLGQKVSGGKAELFLLSLIANNGVYPAMIKASGKKNIGDRLLFGDLEATITQRNSQGEFFVSFNKSHSELTELLHTQAHIPIPPYIRSGQADKKDMTDYQTVYAKELGSVAAPTAGLHFTESVFSELESKGIQKAFVTLHVGAGTFKPVKSDHILEHTMHEECFYIDPKNLSLLNANSKRIAVGTTSLRVLESCASQERIIFESGEGMKTTDIFLYPGKKIESISGLITNFHLPKSTLLMLVSSLIGREKTLELYEVAKKMNYRFFSYGDAMLILRKK

SEQ ID NO: 67156 - protein, 348 aa, Halobacteriovorax marinus
  misc_feature (1)..(348): tr|E1X0T2|E1X0T2_HALMS S-adenosylmethionine:tRNA ribosy ltransferase-isomerase OS=Halobacteriovorax marinus (st rain ATCC BAA-682 / DSM 15412 / SJ) OX=862908 GN=queA P E=3 SV=1
MSSADLTLSNYDFDLPKELVASRPIAGRHNSKLLVYKVKSGEIIHEHFYNLANYLPEDSLLVLNQSKVFPCRLIGKKPTGGKCEVFLLESYPNSNGEYKSLIKTSSKKSVGDEFFFEDELVAKIERIDEGNFYISFNRENLAEYLNEYAKIPIPPYIRNGESDELDKSDYQTVFAKNIGSVAAPTAGLHFTEDVFKSLQEKNIERAYVTLHVGLGTFAPVKTDNLQDHKMHSENYFIDTENKEKILSKKEIFAVGTTSLRVLESSHNGENFDIEANEIKETDIFLHPGVDVHSINGLITNFHLPKSTLLMLVSSLIGREKTLELYKEAIANEYRFFSYGDSMLILRDQ

SEQ ID NO: 67157 - protein, 348 aa, Halobacteriovorax marinus
  misc_feature (1)..(348): tr|A0A1Y5F8U7|A0A1Y5F8U7_9PROT S-adenosylmethionine:tRN A ribosyltransferase-isomerase OS=Halobacteriovorax mar inus OX=97084 GN=queA PE=3 SV=1
MNEQDLLLSKYDFDLPKELIATRPVAGRHHSKLLVYKVKSNEVIHDEFRNISNYIPKSSLLVVNQSKVFPCRLMGTKSTGGKCEIFILDIEKNAEGLREVLIKTTSKKRLEQEFFFEDGLVAKLKKIEEGQFFVEFNLDDLGSYLESHGKIPIPPYIRNGQSDEQDKSDYQTVFAKDTGSVAAPTAGLHFTEDVFADLRAKEIERAEVTLHVGLGTFAPVKTDNLKDHNMHTERYFVDVENLKKLKSHKSIFAVGTTSLRVLESCHDGSDFVIEPNVIKETNIFLHPGVEVKSISGLLTNFHLPKSTLLMLVSSLIGREKTLELYKTAIENEYRFFSYGDAMLILRDQ

SEQ ID NO: 67158 - protein, 347 aa, Halobacteriovorax sp.
  misc_feature (1)..(347): tr|A0A2D5YRB0|A0A2D5YRB0_9PROT S-adenosylmethionine:tRN A ribosyltransferase-isomerase OS=Halobacteriovorax sp. OX=2020862 GN=queA PE=3 SV=1
MTIDNDLKLSSYSYDLPKSFIADRPVVGRQNSKLLVFDNKTQEVVHDYFYNIDKYLPKESLIVFNQSKVFPCRLIGEKRTGGKVEVFLLDAKANEDGLHRALVKSSGKKRVGDTYFFDNDLELTIKEVLDGTFFLKANIEDLESFLFKYAKVPIPPYIRDGDSDEKDLEDYQTVYAKHTGSVAAPTAGLHFTDEVFQKLGNKDIKQAYVTLHVGLGTFAPVKVDDLTTHKMHTEEYFIEKKDLETIKGEQFVTAVGTTSLRTLESAHRIGLDNFKPSEIYDTDIFLYPGVEVKSINALVTNFHLPESTLLMLVSSLIGREKTLELYEVAKENQYRFFSYGDAMLILR

SEQ ID NO: 67159 - protein, 343 aa, Halobacteriovorax sp.
  misc_feature (1)..(343): tr|A0A4Z0KWX3|A0A4Z0KWX3_9PROT S-adenosylmethionine:tRN A ribosyltransferase-isomerase OS=Halobacteriovorax sp. Y22 OX=2505978 GN=queA PE=3 SV=1
MQLSAYDYDLPKELIATRPVEGRHHSRLLVYNCQTDTVSHHTFNELVNFLPQETTLVLNQSKVFPCRLKGKKETGGSIEVFFLTVEPNKDGLYRALVKANGKKKAGDIYHFEDGLKIEINGNIEGEFLIRPSLIGNDLINYLNAHALVPIPPYIRGGESDEQDKKDYQTVFANELGSVAAPTAGLHFTDELLSKIKEEGHDIAKVTLHVGLGTFAPVKVDNLEDHKMHSENYCVDKNDFEKIKNAKKRFAVGTTSLRTLETIWQAGVENYTPGELKDTDIFLHPGVDVKSIDGLITNFHLPKSTLLMLVSALIGREKTLELYDIAVKEKYRFFSYGDAMLILR

SEQ ID NO: 67160 - protein, 341 aa, Halobacteroides halobius
  misc_feature (1)..(341): tr|L0K9T1|L0K9T1_HALHC S-adenosylmethionine:tRNA ribosy ltransferase-isomerase OS=Halobacteroides halobius (str ain ATCC 35273 / DSM 5150 / MD-1) OX=748449 GN=queA PE= 3 SV=1
MKVEEFDFDLPEELIAQQPVEPRDESRLMVVDRQKDEIKEEVFKNIIDYFEPGDLLVRNNTKVIPARLFGNKEKTGGKVEFLLLNRVKLDTWETLVKANGKVKVGTRIVFGEGKLIAEVKDKTDFGGRIVEFEHDGIFEEILDELGSMPLPPYIKEELDNPEKYQTVYAKNRGAAAAPTAGLHFTDRLLQQIKDKGVKIADVTLHVGLGTFRPVKVDDVEEHDMHSEYYEVSQETAQLINQTKKKGKRVFAVGTTTTRTLETVVSEDGQIEAKKGWTDIFIYPGYNFKAIDALITNFHLPQSTLIMMVAALAGKSRILTAYQRAIEEEYRFYSLGDGMLII

SEQ ID NO: 67161 - protein, 340 aa, Halocella sp.
  misc_feature (1)..(340): tr|A0A3Q9B882|A0A3Q9B882_9FIRM S-adenosylmethionine:tRN A ribosyltransferase-isomerase OS=Halocella sp. SP3-1 O X=2382161 GN=queA PE=3 SV=1
MDVNEFDYYLPEKLIAQQPVPNRDESRLMVLDKATGEIEDRIFKDIIDLLDPGDLLVMNNSRVIPARLYGKKVSTGTDIEVLLLTEKEEGVWEVLVRPGKRVKKGVEISFGDNELMAKAVEYTEFGGRIMEFSYQGKFNEIIERLGELPLPPYIHEKLAEPGRYQTVYARKPGSAAAPTAGLHFTPQLIKQLEEKGIDIAYITLHVGLGTFRPVKVDKVEKHQMHSEYYELDTATAELIKEKKESGKRVISVGTTVTRTLETIAAKGEIKAKKGWTDIFIYPPYKFKVIDSLITNFHLPRSTLLMLVSAFAGKEKVLTAYKEAVNREYRFFSLGDAMFIK

SEQ ID NO: 67162 - protein, 348 aa, Halocynthiibacter arcticus
  misc_feature (1)..(348): tr|A0A126V2C3|A0A126V2C3_9RHOB S-adenosylmethionine:tRN A ribosyltransferase-isomerase OS=Halocynthiibacter arc ticus OX=1579316 GN=queA PE=3 SV=1
MKLSDFDFDLPEDRIAVRPAVPREAARLLVAQGTGIADLHVADLLDQFRAGDRLVLNDTKVIPARLFGTRARDGVEGLTQAKIDVTLLAPRGDGNWLALVKPLRKIKEGETVVFTDGLSARLIAKEDGAAILAFNLEGSAFDEALEAAGAMPLPPYIAAKRPADAQDHVDYQTVFARHKGAVAAPTASLHLTTEMLEALAKKGVDVTYVTLHVGAGTFLPVKVDDISDHKMHAEWGEVTAQAVAEIAGTKAAGHRVIPVGTTALRLIETAARAGELAPWVGPTDIFITPGFEFRVADGLMTNFHLPKSTLMMLVSAFLTPKAIRYIYEHAIAEGYRFFSYGDSSLLWR

SEQ ID NO: 67163 - protein, 372 aa, Halodesulfovibrio marinisediminis
  misc_feature (1)..(372): tr|A0A1N6EVB7|A0A1N6EVB7_9DELT S-adenosylmethionine:tRN A ribosyltransferase-isomerase OS=Halodesulfovibrio mar inisediminis DSM 17456 OX=1121457 GN=queA PE=3 SV=1
MERDSHCIKQNLQTIPEDFRLSAYTYELPEDQIAQNPADKRGSSRLFVIDRKSGKNHSAMFADLGKFLPKNALLVVNNSKVLPARLYGQRPSGGKVEFLMLTPLPLIKPVDNGEWKSATVEGLMRMSKRVKVGTKAEFGDDLWIEVTKTAEFGRCEATINWRGELKDHFLKQGHLPLPPYIKREDTTADKDRYQTVYANDSQLGSVAAPTAGLHFTEEMREELSQSGIEWAEVTLYVGYGTFSPVRCDDIREHSMHKEFIELSEETAKKIAKAKAEGRPVIAVGTTSSRVLEGAFKEVGHIAPFKGWTDIFIYPGYKFNVVDHMITNFHLPESSLLMMISAFASKQRILDGYAEAIEQGFRVFSYGDSMLIL

SEQ ID NO: 67164 - protein, 358 aa, Halodesulfovibrio spirochaetisodalis
  misc_feature (1)..(358): tr|A0A1B7XCY2|A0A1B7XCY2_9DELT S-adenosylmethionine:tRN A ribosyltransferase-isomerase OS=Halodesulfovibrio spi rochaetisodalis OX=1560234 GN=queA PE=3 SV=1
MPEDFRLSSYTYDLPEDQVAQHPADKRGSSRLFVINRESGENHAAMFTDLADFLPKNALLVVNNSKVLPARLYGQRPSGGKVEFLMLTPLPLIEPIESGEWKSATVEGLMRMSKRVKVGTKAEFGNDLWIEVTETAEFGRCEATMHWRGELRDHFLNQGHLPLPPYIKREDTTADKDRYQTVYADDSQLGSVAAPTAGLHFTEEMREQLSQSGIEWAEVTLYVGYGTFSPVRCDDIREHTMHKEFIELTDETAQKIAKAKAEGRPVIAVGTTSSRVLEGAFKEAGGIAPFKGWTDIFIYPGYKFNVVDHMITNFHLPESSLLMMISAFASKKRILEGYAEAIEKGFRVFSYGDSMLII

SEQ ID NO: 67165 - protein, 342 aa, Halolactibacillus alkaliphilus
  misc_feature (1)..(342): tr|A0A511WY31|A0A511WY31_9BACI S-adenosylmethionine:tRN A ribosyltransferase-isomerase OS=Halolactibacillus alk aliphilus OX=442899 GN=queA PE=3 SV=1
MNIEDFDFDLPKELIAQTPLIDRSSSRLLVMNREKRTIEHGRFTNILNYLNKGDALVLNNTKVLPARIFGTKEDTGANIELLLLTQREGDSWEVLAKPAKKVKVGTVISFGEGKLKATCTELLEHGGRLVSFSYEGIFLEVLTELGEMPLPPYIKETLDDQSRYQTVYAKEQGSAAAPTAGLHFTEALLDEAKAKGVEICFVTLHVGLGTFRPVSVEKIEEHDMHSEFYILTEQEAEKINRVKSSGGRVISVGTTSTRTLETIARDYDGAIQAASGWTNIFIYPGYKFKAIDGLITNFHLPKSTLVMLVSAFSDRDFIMEAYHQAINERYRFFSFGDAMFIY

SEQ ID NO: 67166 - protein, 342 aa, Halolactibacillus halophilus
  misc_feature (1)..(342): tr|A0A1I5L0S7|A0A1I5L0S7_9BACI S-adenosylmethionine:tRN A ribosyltransferase-isomerase OS=Halolactibacillus hal ophilus OX=306540 GN=queA PE=3 SV=1
MNIEDFDFDLPDELIAQTPLQDRSSSRLLVMNRQTRKIEHHHFKDILTYLNKGDALVLNNTKVLPARVFGTKEDTGANIEMLLLTQHEGDTWEVLAKPAKKVKEGTVVSFGDGKLKATCAKLLDHGGRLVEFSYDGIFLEVLTTLGEMPLPPYIKETLDDQSRYQTVYAKEQGSAAAPTAGLHFTEALLEEAKQKGVEICFVTLHVGLGTFRPVSVDSIEDHDMHSEFYVLSETEAEKINRVKQAGGRIISVGTTSTRTLETIARDHGGTITAASGWTNIFIYPGYQFKAIDGLITNFHLPKSTLVMLVSAFSDRDFIMEAYHAAINERYRFFSFGDAMFIQ

SEQ ID NO: 67167 - protein, 342 aa, Halolactibacillus miurensis
  misc_feature (1)..(342): tr|A0A1I6PKI0|A0A1I6PKI0_9BACI S-adenosylmethionine:tRN A ribosyltransferase-isomerase OS=Halolactibacillus miu rensis OX=306541 GN=queA PE=3 SV=1
MNIEDFDFHLPEELIAQTPLKDRSSSRLLVMNRQTRTIEHRHFKDILDYLNKGDALVLNNTKVLPARVFGTKEETGANIEMLLLTQHEGDTWEVLAKPAKKVKEGTIVSFGDGRLTATCTKILDHGGRLVEFSYDGIFLEVLTELGEMPLPPYIKETLDDQSRYQTVYAKEEGSAAAPTAGLHFTEALLEEAKEKGIEICFVTLHVGLGTFRPVSVDKIEEHDMHSEFYILTEAEAEKINRVKQSGGRIISVGTTSTRTLETIARDHDGAITAATGWTNIFIYPGYPFKAIDGLITNFHLPKSTLVMLVSAFSDRDFIMEAYHAAINERYRFFSFGDAMFIQ

SEQ ID NO: 67168 - protein, 368 aa, Halomicronema excentricum
  misc_feature (1)..(368): tr|A0A4Q7E0M0|A0A4Q7E0M0_9CYAN S-adenosylmethionine:tRN A ribosyltransferase-isomerase OS=Halomicronema excentr icum str. Lakshadweep OX=2294035 GN=queA PE=3 SV=1
MGVLPNSAKSMGIPDNSDFQLSAYNYELPPDRIAQNPVEPRDHARLLTITSARGHEHRHVYDLPSLLQPGDLLVLNDTKVLPARLFGQKVGGAAVEILLLEERASLEWLALVKPGKRLKPGAQIHFGENLDQPALIADVVASDPETNGRILKFTIPGPESFYEVCDRLGKMPLPPYITESTAPDDRYQTIYAEKLGAVAAPTAGLHFTPELFAQLDDRGIDRTFITLHVGVGTFRPVEAATITDHTMHAEWLDVPAATVEKIRQTKANGGRVIAVGTTVTRALEGAAQSGELQPLQGKTNLFIYPGYQWQVLDGLMTNFHLPESSLMMLVSAMIGRQRLLDLYAEAVRQDYRFYSFGDAMLILPTARR

SEQ ID NO: 67169 - protein, 371 aa, Halomicronema hongdechloris
  misc_feature (1)..(371): tr|A0A1Z3HR32|A0A1Z3HR32_9CYAN S-adenosylmethionine:tRN A ribosyltransferase-isomerase OS=Halomicronema hongdec hloris C2206 OX=1641165 GN=queA PE=3 SV=1
MSDPKHQSPHSSISNHHSLAAYHYVLPPECIAQTPARPRDHSRLLAVTSPTQHQHHRFRDLPDLLQPGDLLILNDTQVIPARLWGHKPAGAAVEVLLLEPQKTDRWLALVKPGRRLKPGATIHFGSKDSEPDLIAQVIATDADTNGRWLQFTTPKQDSLETVLQRLGQVPLPPYITHTDIPAEHYQTIYAEKPGAVAAPTAGLHFTPELFARLDQAGIQRAFITLHVGVGTFRPVETDNITQHTMHSEWVDVPPSVVKKIQTTHARGHRVIAVGTTVVRALEGAAQSGTLRPFRGKTNLFIYPGYKWQVIDGLITNFHLPGSSLLMLVSALIGRQRLLGLYQEAITSGYRFYSFGDAMIILPTALTHHKFS

SEQ ID NO: 67170 - protein, 346 aa, Halomonadaceae bacterium
  misc_feature (1)..(346): tr|A0A139CBN3|A0A139CBN3_9GAMM S-adenosylmethionine:tRN A ribosyltransferase-isomerase OS=Halomonadaceae bacter ium T82-2 OX=1783518 GN=queA PE=3 SV=1
MQRSDFHFDLPEDLIARYPSEQRSDCRLLCVDAETQTLAHHHFPDLLTLLAPGDVVVFNDTRVIPARLHGQKASGGRVEMLLERPLDAQRGLAHLRASKSPKPGTELIFEGDIHAVVEGRRDALFELRFLGDTPLIELLERHGHMPLPPYITREDELSDRERYQTVYARRHGAVAAPTAGLHFDEPLLAAMRERGIETAFVTLHVGAGTFQPVRVDDIREHHMHSEWLEVDERVCEQINAARARGNRVIAVGTTSVRCLETAAAGREDGTIAPYRGETDIFIYPGYRWRCVDALVTNFHLPESTLVMLVSAFAGHDLTLRAYREAVAERYRFFSYGDAMFLTRKTP

SEQ ID NO: 67171 - protein, 347 aa, Halomonadaceae bacterium
  misc_feature (1)..(347): tr|A0A2E2BKV3|A0A2E2BKV3_9GAMM S-adenosylmethionine:tRN A ribosyltransferase-isomerase OS=Halomonadaceae bacter ium OX=2026746 GN=queA PE=3 SV=1
MQRADFHYELPDELIARYPSERRSDCRLLCVDGTSGALDHRRFPDLLEILEPGDLLVFNDTRVIPARLHGQKASGGRVEMLLERPLDAHRGLAHIRASKSPKPGTELIFEGDVRAVVEGRQDALFELRFLGETPLIALLEAHGHMPLPPYITREDELADRERYQTVYARRDGAVAAPTAGLHFDEPMMAALKEKGIESAFVTLHVGAGTFQPVRADDIRDHHMHSEWIEVDETACAKVREAKARGNRVVAVGTTGVRCLESACLKSEDGEIAPYSGETDIFIYPGYEWRCVDALVTNFHLPESTLLMLVSSFAGFEPVMNAYRAAVEEGYAFFSYGDAMFLTRADAG

SEQ ID NO: 67172 - protein, 345 aa, Halomonas aestuarii
  misc_feature (1)..(345): tr|A0A1J0VEH2|A0A1J0VEH2_9GAMM S-adenosylmethionine:tRN A ribosyltransferase-isomerase OS=Halomonas aestuarii O X=1897729 GN=queA PE=3 SV=1
MQRADFHYELPEELIARYPSEQRSDCRLLCVDGESGALAHRRFTDLVELLEPGDLLVFNDTRVIPARLHGQKDSGGRVEMLLERPLDAHRGLAHLRSSKSPKPGTELIFEGGIRAVVEGRREALFELRFLGETPLISLLEQHGHMPLPPYITREDELADRERYQTVYARRDGAVAAPTAGLHFDEPLLAALAEKGVESAFVTLHVGAGTFQPVRADDIREHQMHSEWIEVTEEACEQVRQARAAGRRVIAVGTTSVRCLESACLKSPDGEIAAFSGETDIFIYPGYAWRCVDALVTNFHLPESTLLMLVSSFAGFDTTMAAYRSAVAERYAFFSYGDAMFLERAP

SEQ ID NO: 67173 - protein, 343 aa, Halomonas alkaliantarctica
  misc_feature (1)..(343): tr|A0A4R7YRV0|A0A4R7YRV0_9GAMM S-adenosylmethionine:tRN A ribosyltransferase-isomerase OS=Halomonas alkaliantar ctica OX=232346 GN=queA PE=3 SV=1
MQRADFHYELPDELIARYPSEQRSDCRLLCVDGQSGALEHRRFPDLLELLEPGDLLVFNDTRVIPARLHGHKASGGKVEMLLERPLDAHRGLAHIRSSKSPKPGTELIFEGDIHAIVEGRRDALFELRFLGDTPMIALLEKHGHMPLPPYITREDELSDRERYQTVYARRDGAVAAPTAGLHFDQPLLDALADKGINRAFVTLHVGAGTFQPVRVDNILEHHMHSEWIEVTEATCQQVRETLAAGKRVVAVGTTSVRCLESACMKSSDGQIAPYSGDTDIFIYPGYQWRCVDALITNFHLPESTLLMLVSSFVGYDTIMHAYQRAVAERYAFFSYGDAMLLTR

SEQ ID NO: 67174 - protein, 343 aa, Halomonas alkaliphila
  misc_feature (1)..(343): tr|A0A386WXF9|A0A386WXF9_9GAMM S-adenosylmethionine:tRN A ribosyltransferase-isomerase OS=Halomonas alkaliphila OX=272774 GN=queA PE=3 SV=1
MQRADFHFELPDELIARYPSEQRSDCRLLCVDGQSGALEHRRFPDLFELLEPGDLLVFNDTRVIPARLHGHKASGGKVEMLLERPLDSHRGLAHIRSSKSPKPGTELIFEGDIHAVVEGRRDALFELRFLGDTPMIALLEKHGHMPLPPYITRDDELSDRERYQTVYARRDGAVAAPTAGLHFDQPLLDALAEKGVNSAFVTLHVGAGTFQPVRVDNILEHHMHSEWIEVSETACQQVRDTQAAGKRVIAVGTTSVRCLESACLKSSDGQIAPYSGDTDIFIYPGYEWRCVDALITNFHLPESTLLMLVSAFAGYDHMMRAYRTAVDERYAFFSYGDAMLLTR

SEQ ID NO: 67175 - protein, 343 aa, Halomonas andesensis
  misc_feature (1)..(343): tr|A0A3S0W649|A0A3S0W649_9GAMM S-adenosylmethionine:tRN A ribosyltransferase-isomerase OS=Halomonas andesensis OX=447567 GN=queA PE=3 SV=1
MQRADFHFELPDELIARYPSEQRSDCRLLCVDGQSGALEHRRFPDLLELLEPGDLLVFNDTRVIPARLHGHKASGGKVEMLLERPLDSHRGLAHIRSSKSPKPGTELIFEGDIHAVVEGRRDALFELRFLGDTPMIALLEKHGHMPLPPYITRDDELSDRERYQTVYARRDGAVAAPTAGLHFDQPLLDALAEKGINSAFVTLHVGAGTFQPVRVDNILEHHMHSEWIEVSEAACQKVRDTQAAGKRVIAVGTTSVRCLESACLKSSDGQIAPYSGDTDIFIYPGYEWRCVDALITNFHLPESTLLMLVSAFAGHEHMMRAYHAAVDERYAFFSYGDAMLLIR

SEQ ID NO: 67176 - protein, 346 aa, Halomonas anticariensis
  misc_feature (1)..(346): tr|S2KIY4|S2KIY4_HALAF S-adenosylmethionine:tRNA ribosy ltransferase-isomerase OS=Halomonas anticariensis (stra in DSM 16096 / FP35) OX=1121939 GN=queA PE=3 SV=1
MQRADFHYELPSELIARYPSERRSDCRLLCVDGTTGELAHRHFPDLLELLEPGDLLVFNDTRVIPARLHGHKASGGRVEMLLERPLDTHRGLAHLRASKSPKPGTELVFEGDIHAVVEGRREALFELRFLGETPMIELLERHGHMPLPPYITREDDPSDRERYQTVYARRDGAVAAPTAGLHFDEPLLAALAAKGVESAFVTLHVGAGTFQPVRADDIREHQMHSEWIDVSADVCEKVRTARAAGRRVVAVGTTSVRCLESACLMSDSGDIAPYSGDTDIFIYPGYEWRCVDALVTNFHLPESTLLMLVASFAGFDTVMNAYQAAVAERYAFFSYGDAMFLTRKTH

SEQ ID NO: 67177 - protein, 343 aa, Halomonas aquamarina
  misc_feature (1)..(343): tr|A0A1H8HAF2|A0A1H8HAF2_9GAMM S-adenosylmethionine:tRN A ribosyltransferase-isomerase OS=Halomonas aquamarina OX=77097 GN=queA PE=3 SV=1
MQRADFHFELPDELIARYPSEQRSDCRLLCVDGQSGALAHRRFPDLLDLLEPGDLLVFNDTRVIPARLHGHKASGGKVEMLLERPLDSHRGLAHIRSSKSPKPGTELIFEGDIHAVVEGRRDALFELRFLGDTPMIALLEKHGHMPLPPYITREDELSDRERYQTVYARRDGAVAAPTAGLHFDQPLLDALAEKGINSAFVTLHVGAGTFQPVRVDNILEHHMHSEWIEVTDATCQQIRETQAAGKRVIAVGTTSVRCLESACMKSSDGKIAPFSGDTDIFIYPGYEWRCVDALITNFHLPESTLLMLVSAFAGYEHIMQAYRTAVEERYAFFSYGDAMLLTR

SEQ ID NO: 67178 - protein, 343 aa, Halomonas arcis
  misc_feature (1)..(343): tr|A0A1H0BFT1|A0A1H0BFT1_9GAMM S-adenosylmethionine:tRN A ribosyltransferase-isomerase OS=Halomonas arcis OX=41 6873 GN=queA PE=3 SV=1
MQRADFHFELPDELIARYPSEQRSDCRLLCADGQSGALEHRRFTDLLELLEPGDLLVFNDTRVIPARLHGHKASGGKVEMLLERPLDAHRGLAHIRSSKSPKPGTELIFEGDVHAVVEGRREALFELRFLGETPMIALLEQHGHMPLPPYITREDELSDRERYQTVYARRDGAVAAPTAGLHFDQPMLDALAEKGINSAFVTLHVGAGTFQPVRVDNILEHHMHSEWIEVSETTCQQVRATQAAGKRVIAVGTTSVRCLESACLQSTDNHIAPFSGDTDIFIYPGYEWRCVDALITNFHLPESTLLMLVSAFAGYETIMHAYRAAVDERYAFFSYGDAMLLTR

SEQ ID NO: 67179 - protein, 343 aa, Halomonas axialensis
  misc_feature (1)..(343): tr|A0A455VKA0|A0A455VKA0_9GAMM S-adenosylmethionine:tRN A ribosyltransferase-isomerase OS=Halomonas axialensis OX=115555 GN=queA PE=3 SV=2
MQRADFHFELPDELIARYPSEQRSDCRLLCVDGQSGALAHRRFPDLLDLLEPGDLLVFNDTRVIPARLHGHKASGGKVEMLLERPLDSHRGLAHIRSSKSPKPGTELIFEGDIHAVVEGRRDALFELRFLGDTPMIALLEKHGHMPLPPYITREDELSDRERYQTVYARRDGAVAAPTAGLHFDQPLLDALAEKGINSAFVTLHVGAGTFQPVRVDNILEHHMHSEWIEVTDSTCQQIRETQAAGKRVIAVGTTSVRCLESACMKSSDGQIAPFSGDTDIFIYPGYEWRCVDALITNFHLPESTLLMLVSAFAGYEHIMQAYRTAVEERYAFFSYGDAMLLTR

SEQ ID NO: 67180 - protein, 367 aa, Halomonas beimenensis
  misc_feature (1)..(367): tr|A0A291P3F2|A0A291P3F2_9GAMM S-adenosylmethionine:tRN A ribosyltransferase-isomerase OS=Halomonas beimenensis OX=475662 GN=queA PE=3 SV=1
MSACQGSPEPPSIPSSGTFRPMQRADFHYELPEALIARYPSEQRSDCRLLCVDGGSGELAHRRFPDLLEILEPGDLLVFNDTRVIPARLHGHKASGGRVEMLLERPLDAHRGLAHLRASKSPKPGTELEFESGIRAVVEGRREALFELRFLGDTPLIALLERHGHMPLPPYITREDELADRDRYQTVYARRDGAVAAPTAGLHFDEPLLEALADKGVESAFVTLHVGAGTFQPVRADDIRDHEMHSEWIEVNETVCDQVRAARARGNRVIAVGTTSVRCLESACLKSADGEIAPYRGETDIFIYPGYEWRVVDALVTNFHLPESTLLMLVASFAGFETVMAAYREAVRERYAFFSYGDAMFLTRKTP

SEQ ID NO: 67181 - protein, 343 aa, Halomonas boliviensis
  misc_feature (1)..(343): tr|A0A265E317|A0A265E317_9GAMM S-adenosylmethionine:tRN A ribosyltransferase-isomerase OS=Halomonas boliviensis LC1 OX=1072583 GN=queA PE=3 SV=1
MQRADFHYELPDELIARYPSEQRSDCRLLCVDGQSGALEHRRFPDLLELLEPGDLLVFNDTRVIPARLHGHKASGGKVEMLLERPLDAHRGLAHIRSSKSPKPGTELIFEGDVHAIVEGRRDALFELRFLGDTPMIALLEKHGHMPLPPYITREDELSDRERYQTVYARRDGAVAAPTAGLHFDQPLLDALADKGINRAFVTLHVGAGTFQPVRVDNILEHHMHSEWIEVTEATCQQVRETLAAGKRVVAVGTTSVRCLESACMKSSDGQIAPYSGDTDIFIYPGYQWRCVDALITNFHLPESTLLMLVSSFVGYDTIMHAYQRAVAERYAFFSYGDAMLLTR

SEQ ID NO: 67182 - protein, 343 aa, Halomonas campaniensis
  misc_feature (1)..(343): tr|A0A060BD91|A0A060BD91_9GAMM S-adenosylmethionine:tRN A ribosyltransferase-isomerase OS=Halomonas campaniensi s OX=213554 GN=queA PE=3 SV=1
MQRADFHFELPDELIARYPSEQRSDCRLLCVDGQSGALEHRRFPDLLELLEPGDLLVFNDTRVIPARLHGHKASGGKVEMLLERPLDSHRGLAHIRSSKSPKPGTELIFEGDIHAVVEGRRDALFELRFLGDTPMIALLEKHGHMPLPPYITRDDELSDRERYQTVYARRDGAVAAPTAGLHFDQPLLDALAEKGVNSAFVTLHVGAGTFQPVRVDNILEHHMHSEWIEVSETACQQVRDTQAAGKRVIAVGTTSVRCLESACLKSSDGQIAPYSGDTDIFIYPGYEWRCVDALITNFHLPESTLLMLVSAFAGYDHMMRAYRTAVDERYAFFSYGDAMLLTR

SEQ ID NO: 67183 - protein, 343 aa, Halomonas campaniensis; identical to SEQ ID NO: 67173
  misc_feature (1)..(343): tr|A0A246RYE8|A0A246RYE8_9GAMM S-adenosylmethionine:tRN A ribosyltransferase-isomerase OS=Halomonas campaniensi s OX=213554 GN=queA PE=3 SV=1

SEQ ID NO: 67184 - protein, 356 aa, Halomonas caseinilytica
  misc_feature (1)..(356): tr|A0A1M6VHL6|A0A1M6VHL6_9GAMM S-adenosylmethionine:tRN A ribosyltransferase-isomerase OS=Halomonas caseinilyti ca OX=438744 GN=queA PE=3 SV=1
MQRADFHFDLPQELIARYPSEVRSDCRLLCVDGDSGQFSHHHFPDLVDMLEPGDLLVFNDTRVIPARLHGHKASGGKVEMLLERPLDAHRGLVHLRASKSPSPGTELNFEGGIQAVVEGRQDALFELRFLGETPMIALLEQHGHMPLPPYITRDDELSDRERYQTVYARRDGAVAAPTAGLHFDQPLLERLAAKGVESTFVTLHVGAGTFQPVRAEDIREHHMHSEWIDVGEDTCAKVRAAQQAGKRVIAVGTTSVRCLETASASGEIAPFSGDTDIFIYPGYEWRCVDALVTNFHLPESTLLMLVSSFAGHDTVMAAYREAVQEGYAFFSYGDAMFLTRHHAPSARRADIETSDA

SEQ ID NO: 67185 - protein, 346 aa, Halomonas chromatireducens
  misc_feature (1)..(346): tr|A0A109UKQ9|A0A109UKQ9_9GAMM S-adenosylmethionine:tRN A ribosyltransferase-isomerase OS=Halomonas chromatired ucens OX=507626 GN=queA PE=3 SV=1
MQRADFHYELPEDLIARYPSEQRSDCRLLCVDGASGELAHRRFVDLLELLEPGDLLVFNDTRVIPARLHGHKASGGKVEMLLERPLDAHRGLAHLRSSKSPKPGTELVFEGDIHAVVEGRRDALFELRFLGDTPLIALLERHGHMPLPPYITREDELADRERYQTVYARRDGAVAAPTAGLHFDEPLLQRLTEKGIDSAFVTLHVGAGTFQPVRADDIREHQMHSEWIDVGEAACEKVRAARAAGRRVVAVGTTSVRCLESACANSSDGEIAPYSGETDIFIYPGYEWRCVDALITNFHLPESTLLMLVSSFAGYESTMAAYREAVAERYAFFSYGDAMFLTRKSS

SEQ ID NO: 67186 - protein, 342 aa, Halomonas cupida
  misc_feature (1)..(342): tr|A0A1M7IN40|A0A1M7IN40_9GAMM S-adenosylmethionine:tRN A ribosyltransferase-isomerase OS=Halomonas cupida OX=4 4933 GN=queA PE=3 SV=1
MQRADFHFDLPQELIARYPSEVRSDCRLLCVDGNSGQFRHQRFPDLVDMLEPGDLLVFNDTRVIPARLHGHKASGGKVEMLLERPLDAHRGLVHLRSSKSPKPGTELVFEGGIQAVVEGRQDALFELRFLGETPMIALLEQHGHMPLPPYITREDELSDRERYQTVYARRDGAVAAPTAGLHFDQPLLERLAAKGVESTFVTLHVGAGTFQPVRADDIREHHMHSEWIEVGEETCARVRAAQQAGKRVIAVGTTSVRCLETASASGEIAPFSGDTDIFIYPGYEWRCVDALVTNFHLPESTLLMLVSSFAGFEPVMQAYREAVEQRYAFFSYGDAMFLTRQR

SEQ ID NO: 67187 - protein, 351 aa, Halomonas daqiaonensis
  misc_feature (1)..(351): tr|A0A1H7R053|A0A1H7R053_9GAMM S-adenosylmethionine:tRN A ribosyltransferase-isomerase OS=Halomonas daqiaonensi s OX=650850 GN=queA PE=3 SV=1
MQRADFHYALPEELIARYPSEQRSDCRLLCVDGASGELAHRRFTDLLELLEPGDLLVFNDTRVIPARLHGHKASGGKVEMLLERPLDAHRGLAHLRSSKSPKPGTEIEFEGGIRAVVEGRREALFELRFLGETPLIALLEQHGHMPLPPYITREDELADRERYQTVYARRDGAVAAPTAGLHFDEPLLEALAARGVESAYVTLHVGAGTFQPVRADDIREHHMHSEWIEVNETACEQVRAARARGNRVVAVGTTSVRCLESAARESACLKSNDGQIAPYCGETDIFIYPGYEWRCVDALITNFHLPESTLLMLVSSFAGFDTTLAAYREAVAERYAFFSYGDAMFLTRKER

SEQ ID NO: 67188 - protein, 346 aa, Halomonas daqingensis
  misc_feature (1)..(346): tr|A0A1H5U1Y9|A0A1H5U1Y9_9GAMM S-adenosylmethionine:tRN A ribosyltransferase-isomerase OS=Halomonas daqingensis OX=419596 GN=queA PE=3 SV=1
MQRADFHYELPEELIARYPSERRSDCRLLCVDGESGELAHRRFTDLLELLEPGDLLVFNDTRVIPARLHGHKASGGKVEMLLERPLDAHRGLAHIRSSKSPKPGTELIFEGDVRAVVEGRREALFELRFLGERRLIELLERHGHMPLPPYIDRADELADRDRYQTVYARRDGAVAAPTAGLHFDEPLLERLAAKGVESAFVTLHVGAGTFQPVRADDIREHKMHSEWIEVNEAACAKVRAAQAAGRRVIAVGTTSVRCLESACAKSADGAIAPYSGETDIYIYPGYEWRCVDNLITNFHLPESTLLMLVSSFAGYETIMAAYREAVAERYAFFSYGDAMLLSRKRS

SEQ ID NO: 67189 - protein, 346 aa, Halomonas desiderata
  misc_feature (1)..(346): tr|A0A243T704|A0A243T704_9GAMM S-adenosylmethionine:tRN A ribosyltransferase-isomerase OS=Halomonas desiderata SP1 OX=1191209 GN=queA PE=3 SV=1
MQRADFHYELPEELIARYPSERRSDCRLLCVDGESGELAHRRFTDLLELLEPGDLLVFNDTRVIPARLHGHKASGGKVEMLLERPLDAHRGLAHIRSSKSPKPGTELIFEGDVRAVVEGRREALFELRFLGETPLIELLERHGHMPLPPYIDRADELADRDRYQTVYARRDGAVAAPTAGLHFDEPLLERLAAKGVESAFVTLHVGAGTFQPVRADDIREHKMHSEWIEVNEAACAKVRAAQAAGRRVIAVGTTSVRCLESACAKSADGAIAPYSGETDIYIYPGYEWRCVDNLITNFHLPESTLLMLVSSFAGYETIMAAYREAVAERYAFFSYGDAMLLSRKRS

SEQ ID NO: 67190 - protein, 134 aa, Halomonas elongata
  misc_feature (1)..(134): tr|A0A1B8P6V7|A0A1B8P6V7_HALEL S-adenosylmethionine:tRN A ribosyltransferase-isomerase OS=Halomonas elongata OX =2746 GN=queA_1 PE=3 SV=1
MQRADFHYELPEALIARYPSEQRSDCRLLCVDGASGALDHRRFPELIDKLEPGDLLVFNDTRVIPARLHGHKASGGRVEMLLERPLDAHRGLAHLRSSKSPKIGTELTFEGGIQAVVEGAARRCSNCAFSARRH

SEQ ID NO: 67191 - protein, 359 aa, Halomonas elongata
  misc_feature (1)..(359): tr|A0A329Q5N0|A0A329Q5N0_HALEL S-adenosylmethionine:tRN A ribosyltransferase-isomerase OS=Halomonas elongata OX =2746 GN=queA PE=3 SV=1
MQRADFHYELPEALIARYPSEQRSDCRLLCVDGASGALDHRRFPELIDKLEPGDLLVFNDTRVIPARLHGHKASGGRVEMLLERPLDAHRGLAHLRSSKSPKIGTELTFEGGIQAVVEGRREALFELRFLGETPLIALLERHGHMPLPPYITRDDELSDRERYQTVYARRDGAVAAPTAGLHFDEPLLERLAAKGVESAFVTLHVGAGTFQPVRVEDIREHEMHSEWIEVSASVCEQVRAARARGNRVVAVGTTSVRCLESASLKSPDGDIAPYSGETDIFIYPGYEWRVVDALVTNFHLPESTLLMLVSSFAGYDTVMAAYREAVQEGYAFFSYGDAMFLTRHNSSSTRHADVETPDA

SEQ ID NO: 67192 - protein, 345 aa, Halomonas endophytica
  misc_feature (1)..(345): tr|A0A2N7U1V9|A0A2N7U1V9_9GAMM S-adenosylmethionine:tRN A ribosyltransferase-isomerase OS=Halomonas endophytica OX=2033802 GN=queA PE=3 SV=1
MQRADFHYELPEELIARYPSEQRSDCRLLCVKGATGELAHRRFTDLPGLLEPGDLLVFNDTRVIPARLHGHKASGGKVEMLLERPLDAHRGLAHLRSSKSPKPGTELIFEGDIHAVVEGRRDALFELRFLGETPLITLLERHGHMPLPPYITREDELADRERYQTVYARRDGAVAAPTAGLHFDEPLLERLAEKGIESAFVTLHVGAGTFQPVRADDIREHRMHSEWIEVSEEVCDQVRAARARGNRVVAVGTTSVRCLESACLKSADGEIVPHSGETTIFIYPGYEWRCVDVLVTNFHLPESTLLMLVSSFAGFETTLAAYREAVAERYAFFSYGDAMYLTRAA

SEQ ID NO: 67193 - protein, 359 aa, Halomonas eurihalina
  misc_feature (1)..(359): tr|A0A5D9CTB3|A0A5D9CTB3_HALER S-adenosylmethionine:tRN A ribosyltransferase-isomerase OS=Halomonas eurihalina OX=42566 GN=queA PE=3 SV=1
MQRADFHYELPEALIARYPSEQRSDCRLLCVDGASGALDHCRFPELIDKLAPGDLLVFNDTRVIPARLHGHKASGGRVEMLLERPLDAHRGLAHLRSSKSPKIGTELTFEGGIQAVVEGRREALFELRFLGETPLIALLERHGHMPLPPYITRDDELSDRERYQTVYAKRDGAVAAPTAGLHFDEPLLERLAAKGVESAFVTLHVGAGTFQPVRVDDIREHEMHSEWIEVSASVCEQVRATRARGNRVIAVGTTSVRCLESASLKSSDGDIAPYSGETDIFIYPGYEWRVVDALVTNFHLPESTLLMLVSSFAGYDTVMAAYREAVQEGYAFFSYGDAMLLTRHNSSPTRHADVETPDA

SEQ ID NO: 67194 - protein, 348 aa, Halomonas gudaonensis
  misc_feature (1)..(348): tr|A0A1G9A5Y3|A0A1G9A5Y3_9GAMM S-adenosylmethionine:tRN A ribosyltransferase-isomerase OS=Halomonas gudaonensis OX=376427 GN=queA PE=3 SV=1
MQRADFHYELPEELIARYPSEQRSDCRLLCVDGASGALEHRRFPELTELLEPGDLLVFNDTRVIPARLHGHKASGGRIELLLERPLDAHRGLAHLRSSKSPKPGTELVFEGGVRAVVEGREGPLFKLRFLGETPLVQLLEQHGHMPLPPYIDREDELADRERYQTVYARRDGAVAAPTAGLHFDEPLLEALAAKGVESAFVTLHVGAGTFQPVRVDDIREHTMHSEWVEVSPGVCEQVRTAQARGNRVVAVGTTSVRCLESACAATPDGAIAPLTGETDIFIFPGYEWRCVDALITNFHLPESTLLMLVSAFAGFDTTMTAYREAVEARYRFFSYGDAMFLTRQPMPA

SEQ ID NO: 67195 - protein, 350 aa, Halomonas halmophila
  misc_feature (1)..(350): tr|A0A4Y4F303|A0A4Y4F303_9GAMM S-adenosylmethionine:tRN A ribosyltransferase-isomerase OS=Halomonas halmophila OX=252 GN=queA PE=3 SV=1
MQRADFHYELPEALIARYPSEQRSDCRMLCVDGASGELDHQRFPALLDKLDPGDLLVFNDTRVIPARLHGHKASGGRVEMLLERPLDAHRGLAHLRSSKSPPVGSELTFEGGIQAVVEGRRDALFELRFLGETPLIALLEQHGHMPLPPYITREDELSDRERYQTVYARRDGAVAAPTAGLHFDEPLLEQLAAKGVESAFVTLHVGAGTFQPVRVDDIREHDMHSEWIEVSESACARVRAARARGNRIIAVGTTSVRCLESACQQSPDGRIAPLSGETDIFIYPGYEWQVVDGLITNFHLPESTLLMLVASFAGYETVMRAYREAVEQGYAFFSYGDAMFLTRQAPGGIR

SEQ ID NO: 67196 - protein, 345 aa, Halomonas halophila
  misc_feature (1)..(345): tr|A0A510ZAX7|A0A510ZAX7_9GAMM S-adenosylmethionine:tRN A ribosyltransferase-isomerase OS=Halomonas halophila O X=29573 GN=queA PE=3 SV=1
MQRADFHYELPEALIARYPSEQRSDCRLLCVDGESGSLAHRRFPDLLETLDPGDLLVFNDTRVIPARLHGHKASGGRVEMLLERPLDAHRGLAHLRSSKSPKPGTEIAFEGGIRAVVEGRRDALFELRFLGETPLVELLEQHGHMPLPPYITREDELSDRERYQTVYARREGAVAAPTAGLHFDEPLLEALAEKGVESAFVTLHVGAGTFQPVRADDIRDHEMHSEWIEVSEAVCEQVRAARARGNRVIAVGTTSVRCLESACLKSDDGEIAPYSGETDIFIYPGYDWRVVDALITNFHLPESTLLMLVSSFAGYETVMAAYREAVREEYAFFSYGDAMLLTRAR

SEQ ID NO: 67197 - protein, 346 aa, Halomonas heilongjiangensis
  misc_feature (1)..(346): tr|A0A2N7TI94|A0A2N7TI94_9GAMM S-adenosylmethionine:tRN A ribosyltransferase-isomerase OS=Halomonas heilongjian gensis OX=1387883 GN=queA PE=3 SV=1
MQRADFHYELPDELIARYPSERRSDCRLLCVDGAGGARAHRHFPDLLELLAPGDLLVFNDTRVIPARLHGHKASGGKVEMLLERPLDAHRGLAHLRSSKSPKPGTELIFEGDIHAVVEGRRDALFELRFLGEIPLVQLLEKHGHMPLPPYIDRSDELADRERYQTVYARRDGAVAAPTAGLHFDEPLIAALAAKGVESAFVTLHVGAGTFQPVRADDIREHRMHSEWIEVSEAVCEQVRSAKARGNRIIAVGTTSVRCLESACLKSQGGEIAPYSGETDIFIYPGYEWRCVDALVTNFHLPESTLLMLVASFAGFDQVMAAYHEAVAKRYAFFSYGDAMFLTRKSS

SEQ ID NO: 67198 - protein, 342 aa, Halomonas huangheensis
  misc_feature (1)..(342): tr|W1NA93|W1NA93_9GAMM S-adenosylmethionine:tRNA ribosy ltransferase-isomerase OS=Halomonas huangheensis OX=117 8482 GN=queA PE=3 SV=1
MQRADFHFDLPQELIARYPSEVRSDCRLLCVDGNSGQFSHHQFPDLVEMLEPGDLLVFNDTRVIPARLHGHKASGGKVEMLLERPLDAHRGLVHLRSSKSPKPGTELIFEGGIQAVVEGRRDALFELRFLGETPMIALLEQHGHMPLPPYITRDDELSDRERYQTVYARRDGAVAAPTAGLHFDQPLLERLAAKGVESTFVTLHVGAGTFQPVRAADIREHHMHSEWIEVGEEACTKVHAAQQAGKRVIAVGTTSVRCLETASASGEIAPFSGDTDIFIYPGYEWRCVDVLVTNFHLPESTLLMLVSSFAGFEPVMQAYREAVEQRYAFFSYGDAMFLTRSR

SEQ ID NO: 67199 - protein, 343 aa, Halomonas hydrothermalis
  misc_feature (1)..(343): tr|A0A291JU59|A0A291JU59_9GAMM S-adenosylmethionine:tRN A ribosyltransferase-isomerase OS=Halomonas hydrotherma lis OX=115561 GN=queA PE=3 SV=1
MQRADFHFELPDELIARYPSEQRSDCRLLCVDGQSGALAHRRFPDLLELLEPGDLLVFNDTRVIPARLHGHKASGGKVEMLLERPLDSHRGLAHLRSSKSPKPGTELIFEGDIHAVVEGRRDALFELRFLGDTPMIALLEQHGHMPLPPYITREDELSDRERYQTVYARRDGAVAAPTAGLHFDQPLLDALAEKGIQSAFVTLHVGAGTFQPVRVDNILEHHMHSEWIEVTEATCQQVRDTQATGKRVVAVGTTSVRCLESACMKSSDGEIAPFSGDTDIFIYPGYQWRCVDALITNFHLPESTLLMLVSSFAGYEHIMHAYRTAVEERYAFFSYGDAMLLTR

SEQ ID NO: 67200 - protein, 346 aa, Halomonas ilicicola
  misc_feature (1)..(346): tr|A0A1M4T7E3|A0A1M4T7E3_9GAMM S-adenosylmethionine:tRN A ribosyltransferase-isomerase OS=Halomonas ilicicola D SM 19980 OX=1121942 GN=queA PE=3 SV=1
MQRADFHFDLPDELIARYPSEQRSDCRLLCVDGESGELAHRRFPDLLELLAPGDLLVFNDTRVIPARLHGHKASGGRVEMLLERPLDAHRGLAHIRASKSPKPGTELIFEGDIHAVVEGRREALYELRFLGETPLVELLERHGHMPLPPYITREDELADRERYQTVYARREGAVAAPTAGLHFDQPLMDALGERGIEHAFVTLHVGAGTFQPVRVEDIREHHMHSEWLEVDEKACEQVRAARARGKRVVAVGTTSVRCLESACLNSTDGEITPFRGETDIFIYPGYRWRCVDALVTNFHLPESTLLMLVSAFVGRDTILHAYREAVIEQYRFFSYGDAMFLTRKTP

SEQ ID NO: 67201 - protein, 363 aa, Halomonas korlensis
  misc_feature (1)..(363): tr|A0A1I7I896|A0A1I7I896_9GAMM S-adenosylmethionine:tRN A ribosyltransferase-isomerase OS=Halomonas korlensis O X=463301 GN=queA PE=3 SV=1
MRPGCKLNLLNRTETPLMQRADFHFDLPDELIARYPSQQRSDCRLLCVEGERGALAHRRFTDLLELLEPGDLLVFNDTRVIPARLHGHKASGGKVEMLLERPLDAHRGLAHLRSSKTPKPGTEIRFEGDVLAVVEGRRDALFELRFFGETPLIELLERYGHMPLPPYIDRADELADRERYQTVYARRDGAVAAPTAGLHFDEPLLEALAAKGVNSAFVTLHVGAGTFQPMRVDDIREHQMHSEWIEVDEKACEQVRATQAAGRRVVAVGTTSVRCLESACLMSDSGDIAPLRGETDIFIYPGYAWRCVDALVTNFHLPESTLMMLVASFIGFETTMVAYREAVTERYAFFSYGDAMFLTRQRS

SEQ ID NO: 67202 - protein, 343 aa, Halomonas meridiana
  misc_feature (1)..(343): tr|A0A1N6IEE3|A0A1N6IEE3_9GAMM S-adenosylmethionine:tRN A ribosyltransferase-isomerase OS=Halomonas meridiana O X=29570 GN=queA PE=3 SV=1
MQRADFHFELPDELIARYPSEQRSDCRLLCVDGQSGALAHHRFPDLLDLLEPGDLLVFNDTRVIPARLHGHKASGGKVEMLLERPLDSHRGLAHIRSSKSPKPGTELIFEGDIHAVVEGRRDALFELRFLGDTPMIALLEKHGHMPLPPYITREDELSDRERYQTVYARRDGAVAAPTAGLHFDQPLLDALAEKGINSAFVTLHVGAGTFQPVRVDNILEHHMHSEWIEVTDATCQQIRETQAAGKRVIAVGTTSVRCLESACMKSSDGQIAPFSGDTDIFIYPGYEWRCVDALITNFHLPESTLLMLVSAFAGYEHIMQAYRTAVEKRYAFFSYGDAMLLTR

SEQ ID NO: 67203 - protein, 343 aa, Halomonas meridiana
  misc_feature (1)..(343): tr|A0A0D7UYY0|A0A0D7UYY0_9GAMM S-adenosylmethionine:tRN A ribosyltransferase-isomerase OS=Halomonas meridiana O X=29570 GN=queA PE=3 SV=1
MQRADFHFELPDELIARYPSEQRSDCRLLCVDGQSGALAHRRFPDLLDLLEPGDLLVFNDTRVIPARLHGHKASGGKVEMLLERPLDSHRGLAHIRSSKSPKPGTELIFEGDIHAVVEGRRDALFELRFLGDTPMIALLEKHGHMPLPPYITREDELSDRERYQTVYARRDGAVAAPTAGLHFDQPLLDALAEKGINSAFVTLHVGAGTFQPVRVDNILEHHMHSEWIEVTDATCQQIRETQAAGKRVIAVGTTSVRCLESACMKSSDGQIAPFSGDTDIFIYPGYEWRCVDALITNFHLPESTLLMLVSAFAGYEHIMQAYRTAVEERYAFFSYGDAMLLTR

SEQ ID NO: 67204 - protein, 348 aa, Halomonas muralis
  misc_feature (1)..(348): tr|A0A1G9RYD7|A0A1G9RYD7_9GAMM S-adenosylmethionine:tRN A ribosyltransferase-isomerase OS=Halomonas muralis OX= 119000 GN=queA PE=3 SV=1
MQRADFHFDLPDELIARYPSEQRSDCRLLCVDGESGALAHRRFADLLELLDPGDLVVFNDTRVIPARLHGHKASGGRVEMLLERPLDAHRGLAHIRASKSPKPGTELIFEGGINAVVEGRVDALFELRFLGDTPLIELLERHGHMPLPPYITREDELADRERYQTVYARRDGAVAAPTAGLHFDEPLMAAMRERGIETAFVTLHVGAGTFQPVRVDNIREHHMHSEWIEVDEAVSEQVRAARARGNRIVAVGTTSVRCLESACLHDPDGEIAPYSGETDIFIYPGYQWRCVDALVTNFHLPESTLLMLVSSFAGYDNTMHAYRAAVDERYSFFSYGDAMFLTRTPQDS

SEQ ID NO: 67205 - protein, 343 aa, Halomonas nigrificans
  misc_feature (1)..(343): tr|A0A2A4HQ80|A0A2A4HQ80_9GAMM S-adenosylmethionine:tRN A ribosyltransferase-isomerase OS=Halomonas nigrificans OX=2042704 GN=queA PE=3 SV=1
MQRADFHFELPDELIARYPSEQRSDCRLLCVDGQNGALEHRRFADLLELLEPGDLLVFNDTRVIPARLHGHKASGGKVEMLLERPLDSHRGLAHIRSSKSPKPGTELIFEGDIHAVVEGRRDALFELRFLGDTPMIALLEKHGHMPLPPYITREDELSDRDRYQTVYARRDGAVAAPTAGLHFDQPLLDALAAKGINSAFVTLHVGAGTFQPVRVDNILEHHMHSEWVEITATACKKVRDTQAAGKRVIAVGTTSVRCLESACMKSTDGQIAPYSGDTDIFIYPGYEWHCVDALITNFHLPESTLLMLVSAFAGYDHMMQAYRAAVEERYAFFSYGDAMLLTR

SEQ ID NO: 67206 - protein, 345 aa, Halomonas nitroreducens
  misc_feature (1)..(345): tr|A0A431V1I2|A0A431V1I2_9GAMM S-adenosylmethionine:tRN A ribosyltransferase-isomerase OS=Halomonas nitroreduce ns OX=447425 GN=queA PE=3 SV=1
MQRADFHYELPEALIARYPSEQRSDCRLLCVDGASGRLAHRRFPDLLEHLATGDLLVFNDTRVIPARLHGHKASGGRVEMLLERPLDAHRGLAHLRSSKSPKPGTEIVFEGGIHAVVEGRREALFELRFLGETPLIALLEAHGHMPLPPYITREDELADRERYQTVYARRDGAVAAPTAGLHFDEPLLEALAAKGIESAFVTLHVGAGTFQPVRADDIREHQMHSEWIEVSETVCEQVRAARARGNKVVAVGTTSVRCLESACLKSADGEIAPYSGETDIFIYPGYEWRVVDALVTNFHLPESTLLMLVSSFAGFETVMTAYREAVREGYAFFSYGDAMYLTRAR

SEQ ID NO: 67207 - protein, 343 aa, Halomonas olivaria
  misc_feature (1)..(343): tr|A0A3T1DIN7|A0A3T1DIN7_9GAMM S-adenosylmethionine:tRN A ribosyltransferase-isomerase OS=Halomonas olivaria OX =390919 GN=queA PE=3 SV=1
MQRADFHYELPDELIARYPSEQRSDCRLLCVDGQSGALEHRRFPDLLELLEPGDLLVFNDTRVIPARLHGHKASGGKVEMLLERPLDAHRGLAHIRSSKSPKPGTELIFEGDVHAVVEGRRDALFELRFLGDTPMIALLEKHGHMPLPPYITREDELSDRERYQTVYARRDGAVAAPTAGLHFDQPLLDALADKGINRAFVTLHVGAGTFQPVRVDNILEHHMHSEWIEVTEETCRQVRETLAAGKRVVAVGTTSVRCLESACMKSSDGQIAPYSGDTDIFIYPGYQWRCVDALITNFHLPESTLLMLVSAFVGYDTIMHAYQRAVAERYAFFSYGDAMLLTR

SEQ ID NO: 67208 - protein, 343 aa, Halomonas pacifica
  misc_feature (1)..(343): tr|A0A510X411|A0A510X411_9GAMM S-adenosylmethionine:tRN A ribosyltransferase-isomerase OS=Halomonas pacifica OX =77098 GN=queA PE=3 SV=1
MQRADFHYELPEELIARYPSEQRSDCRLLCVDGNSGELAHRRFPDLLDLLQPGDLLVFNDTRVIPARLHGHKASGGKVEMLLERPLDAHRGLAHLRASKSPKPGTELHFEGGIRAVVEGRREALFELRFLGETPMIELLERHGHMPLPPYITRDDELSDRDRYQTVYARRDGAVAAPTAGLHFDEPLLERLAAKGVESAFVTLHVGAGTFQPVRADDIREHQMHSEWVEVNEVVCEQVRAARAAGRRVIAVGTTSVRCLESASAGGEIAPLRGDTDIFIYPGYEWRCVDALITNFHLPESTLLMLVSSFAGYDSVMTAYREAVRKRYAFFSYGDAMFLTRKTR

SEQ ID NO: 67209 - protein, 346 aa, Halomonas pantelleriensis
  misc_feature (1)..(346): tr|A0A1G9S7E1|A0A1G9S7E1_9GAMM S-adenosylmethionine:tRN A ribosyltransferase-isomerase OS=Halomonas pantellerie nsis OX=48727 GN=queA PE=3 SV=1
MLRADFHYDLPEELIARYPSEQRSDCRLLCVDGASGALSHRRFPDLLELLEPGDLLVFNDTRVIPARLHGHKASGGKVEMLLERPLDAHRGLAHIRSSKSPKPGTELIFEGDVRAVVEGRRDALFELRFLGDTPMITLLERHGHMPLPPYITREDELNDRERYQTVYARRDGAVAAPTAGLHFDEPLLEALAEKGVESAFVTLHVGAGTFQPVRADDIRDHHMHSEWIEVDESACAKVQAARAAGRRVIAVGTTSVRCLESACQKSGSGEIAPYRGETDIFIYPGYAWQCVDALITNFHLPESTLLMLVSSFTGYDTMMAAYREAVAERYAFFSYGDAMFLTRESS

SEQ ID NO: 67210 - protein, 345 aa, Halomonas saccharevitans
  misc_feature (1)..(345): tr|A0A1I7AZ17|A0A1I7AZ17_9GAMM S-adenosylmethionine:tRN A ribosyltransferase-isomerase OS=Halomonas saccharevit ans OX=416872 GN=queA PE=3 SV=1
MQRADFHYELPEALIARYPSEQRSDCRLLCVDGESGSLAHRRFPDLVELLEPGDLLVFNDTRVIPARLHGHKASGGKVEMLLERPLDAHRGLAHLRSSKSPKPGTEIIFEGDIRAVVEGRQDALFELRFLGETPLIALLEAHGHMPLPPYITREDELADRERYQTVYARRDGAVAAPTAGLHFDEPLLAALAEKGVESAYVTLHVGAGTFQPVRADDIRDHHMHSEWIEVSETACEQVRRARAAGRRVIAVGTTSVRCLESACLKSVDGEIAPYSGETDIFIYPGYEWRVVDALVTNFHLPESTLLMLVSSFAGYDTTMAAYREAVAEGYAFFSYGDAMFLERAR

SEQ ID NO: 67211 - protein, 344 aa, Halomonas shengliensis
  misc_feature (1)..(344): tr|A0A1H0CGQ4|A0A1H0CGQ4_9GAMM S-adenosylmethionine:tRN A ribosyltransferase-isomerase OS=Halomonas shengliensi s OX=419597 GN=queA PE=3 SV=1
MQRADFHFELPDELIARYPSEQRTDCRLLCVEGASGTLTHRRFPDLLELLEPGDLLVFNDTRVIPARLHGHKASGGKVEMLLERPLDAHRGLAHLRSSKSPKPGTELEFEGGIRAVVEGRREALFELRFLGETPLVELLERHGHMPLPPYIDREDELADRERYQTVYARREGAVAAPTAGLHFDEPLLEALAEKGVERAFVTLHVGAGTFQPVRADDIREHVMHSEWLEVDETVCEKVRAARAAGRRVIAVGTTSVRCLESASDEHGEIAPYRGETDIFIYPGYRWRCVDALITNFHLPESTLLMLVASFAGFETTLSAYREAVAERYAFFSYGDAMFLTRQPS

SEQ ID NO: 67212 - protein, 343 aa, Halomonas songnenensis
  misc_feature (1)..(343): tr|A0A2T0V4L2|A0A2T0V4L2_9GAMM S-adenosylmethionine:tRN A ribosyltransferase-isomerase OS=Halomonas songnenensi s OX=1176243 GN=queA PE=3 SV=1
MQRADFHFELPDELIARYPSEQRSDCRLLCVDGQSGELAHRRFPDLLELLEPGDLLVFNDTRVIPARLHGHKASGGKVEMLLERPLDSHRGLAHIRSSKSPKPGTELIFEGDIHAVVEGRRDALFELRFLGDTPMIALLEQHGHMPLPPYITREDELSDRERYQTVYARRDGAVAAPTAGLHFDQPLLDALKEKGVESAFVTLHVGAGTFQPVRVDNILEHHMHSEWIEVTEATCQKVRDTQAAGKRVIAIGTTSVRCLESACQKSGNGQIAPYSGDTDIFIYPGYEWRCVEALITNFHLPESTLLMLVSSFAGYEHTMHAYQQAVEERYAFFSYGDAMLLTR

SEQ ID NO: 67213 - protein, 343 aa, Halomonas sp.
  misc_feature (1)..(343): tr|A0A2N0G590|A0A2N0G590_9GAMM S-adenosylmethionine:tRN A ribosyltransferase-isomerase OS=Halomonas sp. es.049 OX=1761788 GN=queA PE=3 SV=1
MQRADFSYELPEELIARYPSEQRSDCRLLCVDAQDGSLAHRRFPDLLEILEPGDLLVFNDTRVIPARLHGQKASGGKVEMLLERPLDAHRGLAHLRSSKSPKPGTELIFEGDIHAIVEGRHDALFELRFLGDTPMIALLEKHGHMPLPPYITREDELSDRERYQTVYARQDGAVAAPTAGLHFDQPLLDALAEKGINSAFVTLHVGAGTFQPVRVDDIREHAMHSEWIDVSEATCQQVRETRAAGNRVVAVGTTSVRCLESACAQTPDGSIAPFTGDTDIFIYPGYEWRCVDALITNFHLPESTLMMLVSAFAGYDTIMRAYQAAVEERYAFFSYGDAMLLTR

SEQ ID NO: 67214 - protein, 343 aa, Halomonas sp.; identical to SEQ ID NO: 67179
  misc_feature (1)..(343): tr|A0A355PFD4|A0A355PFD4_HALSX S-adenosylmethionine:tRN A ribosyltransferase-isomerase OS=Halomonas sp. OX=1486 246 GN=queA PE=3 SV=1

SEQ ID NO: 67215 - protein, 363 aa, Halomonas subglaciescola
  misc_feature (1)..(363): tr|A0A1M7G281|A0A1M7G281_9GAMM S-adenosylmethionine:tRN A ribosyltransferase-isomerase OS=Halomonas subglaciesc ola OX=29571 GN=queA PE=3 SV=1
MQRADFAYELPEELIARYPSEQRSDCRLLCVDGEDGQIAHRRFPDLLELLEPGDLLVFNDTRVIPARLHGHKASGGRVEMLLERPLDTHRGLAHLRASKSPKPGTEIIFEGDIHAVVEARHDALFELRFLGETPMIALLERHGHMPLPPYITRDDELSDRERYQTVYARRDGAVAAPTAGLHFDQPLLDALADKGVDSAFVTLHVGAGTFQPVRADDIRDHHMHSEWVDVDDAACQKVRAAKAAGKRVIAVGTTAVRCLESACGQHDQGSADGGIAPYRGDTDIFIYPGYEWRCVDALVTNFHLPESTLLMLVSAFIGYDTTLRAYHTAVVERYAFFSYGDAMLLTRATPDTCATAELNDQRD

SEQ ID NO: 67216 - protein, 343 aa, Halomonas subterranea
  misc_feature (1)..(343): tr|A0A1H9U2Y4|A0A1H9U2Y4_9GAMM S-adenosylmethionine:tRN A ribosyltransferase-isomerase OS=Halomonas subterranea OX=416874 GN=queA PE=3 SV=1
MQRADFHFELPDELIARYPSEQRSDCRLLCVDGQSGALEHRRFPDLLELLEPGDLLVFNDTRVIPARLHGQKASGGKVEMLLERPLDTHRGLAHIRSSKSPKPGTELVFEGDIHAVVEGRRDALFELRFLGDTPMIALLEKHGHMPLPPYITREDELSDRERYQTVYARRDGAVAAPTAGLHFDQPLLDALAEKGINSAFVTLHVGAGTFQPVRVDNILEHHMHSEWIDVSEDTCQQVRATQAAGKRVIAVGTTSVRCLESACLKSPDNQIAPFSGDTDIFIYPGYEWRCVDALITNFHLPESTLLMLVSAFAGYDNIMHAYQAAVDERYAFFSYGDAMLLTR

SEQ ID NO: 67217 - protein, 343 aa, Halomonas sulfidaeris
  misc_feature (1)..(343): tr|A0A365TRI2|A0A365TRI2_9GAMM S-adenosylmethionine:tRN A ribosyltransferase-isomerase OS=Halomonas sulfidaeris OX=115553 GN=queA PE=3 SV=1
MQRADFHYELPDELIARYPSEQRSDCRLLCVDGQIGSLEHRRFPDLLELLEPGDLLVFNDTRVIPARLHGHKASGGKVEMLLERPLDAHRGLAHIRSSKSPKPGTELIFEGDVHAIVEGRRDALFELRFLGDTPMIALLEKHGHMPLPPYITREDELSDRERYQTVYARRDGAVAAPTAGLHFDQPLLDALADKGINRAFVTLHVGAGTFQPVRVDNILEHHMHSEWIEVTESTCQQVRDTLAAGKRVIAVGTTSVRCLESACQKSSDGQIAPYSGDTDIFIYPGYQWRCVDALITNFHLPESTLLMLVSSFVGYDTIMHAYQRAVAERYAFFSYGDAMLLTR

SEQ ID NO: 67218 - protein, 89 aa, Halomonas sulfidaeris
  misc_feature (1)..(89): tr|A0A455U7X5|A0A455U7X5_9GAMM S-adenosylmethionine:tRN A ribosyltransferase-isomerase OS=Halomonas sulfidaeris OX=115553 GN=HSBAA_09400 PE=3 SV=1
MAPPACAAWKAPAKSSDGQIAPYSGDTDIFIYPGYQWRCVDALITNFHLPESTLLMLVSSFVGYDTIMHAYQRAVAERYAFSAMVMPCC

SEQ ID NO: 67219 - protein, 347 aa, Halomonas taeanensis
  misc_feature (1)..(347): tr|A0A1G7SL30|A0A1G7SL30_9GAMM S-adenosylmethionine:tRN A ribosyltransferase-isomerase OS=Halomonas taeanensis OX=284577 GN=queA PE=3 SV=1
MQRADFHYELPDELIARYPSERRSDCRLLCVDGTSGALDHRRFPDLLEILEPGDLLVFNDTRVIPARLHGQKASGGRVEMLLERPLDAHRGLAHIRASKSPKPGTELIFEGDVRAVVEGRQDALFELRFLGETPLIALLEAHGHMPLPPYIAREDELADRERYQTVYARRDGAVAAPTAGLHFDEPMMAALEEKGIESAFVTLHVGAGTFQPVRADDIRDHHMHSEWIEVDETACAKVREAKARGNRVVAVGTTGVRCLESACLKSEDGEIAPYSGETDIFIYPGYEWRCVDALVTNFHLPESTLLMLVSSFAGFEPVMNAYRAAVEEGYAFFSYGDAMFLTRANAG

SEQ ID NO: 67220 - protein, 352 aa, Halomonas taeanensis
  misc_feature (1)..(352): tr|A0A328XPH4|A0A328XPH4_9GAMM S-adenosylmethionine:tRN A ribosyltransferase-isomerase OS=Halomonas taeanensis OX=284577 GN=queA PE=3 SV=1
MQRADFHYELPDELIARYPSERRSDCRLLCVDGASEALDHRRFPDLLEILEPGDLLVFNDTRVIPARLHGQKASGGRVEMLLERPLDAHRGLAHIRASKSPKPGTELIFEGDVRAVVEGRQDALFELRFLGETPLIALLEAHGHMPLPPYITREDELADRERYQTVYARRDGAVAAPTAGLHFDEPMMAALAEKGIESAFVTLHVGAGTFQPVRADDIRDHHMHSEWIEVDEAACAKVREAKARGNRVVAVGTTGVRCLESACMKSPGDNKEAGEIAPYSGETDIFIYPGYEWRCVDALVTNFHLPESTLMMLVASFAGFEPVMNAYRAAVEERYAFFSYGDAMFLTRADAT

SEQ ID NO: 67221 - protein, 343 aa, Halomonas titanicae; identical to SEQ ID NO: 67173
  misc_feature (1)..(343): tr|L9UB87|L9UB87_9GAMM S-adenosylmethionine:tRNA ribosy ltransferase-isomerase OS=Halomonas titanicae BH1 OX=12 04738 GN=queA PE=3 SV=1

SEQ ID NO: 67222 - protein, 343 aa, Halomonas titanicae
  misc_feature (1)..(343): tr|A0A558JBP9|A0A558JBP9_9GAMM S-adenosylmethionine:tRN A ribosyltransferase-isomerase OS=Halomonas titanicae O X=664683 GN=queA PE=3 SV=1
MQRSDFYYQLPDELIARYPSEQRSDCRLLCVDGQSGALEHRRFPDLLKLLEPGDLLVFNDTRVIPARLHGHKASGGKVEMLLERPLDAHRGLAHIRSSKSPKPGTELIFEGDVHAVVEGRRDALFELRFLGDTPMIALLEKHGHMPLPPYITREDELSDRERYQTVYARRDGAVAAPTAGLHFDQPLLDALSDKGINRAFVTLHVGAGTFQPVRVDNILEHHMHSEWIEVTEETCRQVRETLAAGKRVVAVGTTSVRCLESACMKSSDGQIAPYSGDTDIFIYPGYQWRCVDALITNFHLPESTLLMLVSAFVGYDTTMHAYQRAVAERYAFFSYGDAMLLTR

SEQ ID NO: 67223 - protein, 346 aa, Halomonas urumqiensis
  misc_feature (1)..(346): tr|A0A2N7UMX2|A0A2N7UMX2_9GAMM S-adenosylmethionine:tRN A ribosyltransferase-isomerase OS=Halomonas urumqiensis OX=1684789 GN=queA PE=3 SV=1
MQRADFHYDLPDELIARYPSEQRSDCRLLCLEGASGEITHRRFPDLLALLAPGDLLVFNDTRVIPARLHGHKASGGRVEMLLERPLDAHRGLAHLRSSKSPKPGTELVFEGDIHAVVEGRQEALFELRFLGETPLITLLERHGHMPLPPYITREDELADRDRYQTVYARRDGAVAAPTAGLHFDEPLLERLADKGVESAFVTLHVGAGTFQPVRADNIREHHMHSEWIEVSETVCGQVRAAQARGNRVIAVGTTSVRCLESACMKSATGEIAPYSGETDIFIYPGYEWQCVDALVTNFHLPESTLLMLVASFTGFDHIMQAYREAVAERYAFFSYGDAMFLTRKER

SEQ ID NO: 67224 - protein, 343 aa, Halomonas ventosae
  misc_feature (1)..(343): tr|A0A4R6HKE1|A0A4R6HKE1_9GAMM S-adenosylmethionine:tRN A ribosyltransferase-isomerase OS=Halomonas ventosae OX =229007 GN=queA PE=3 SV=1
MQRADFHYELPEELIARYPSEQRSDCRLLCVDGANGQLAHRRFPDLVELLAPGDLLVFNDTRVTPARLHGHKASGGKVEMLLERPLDAHRGLAHLRSSKSPRPGTELVFEGGIRVVVEGRREALFELRFLGETPLITLLEQHGHMPLPPYITREDELADRERYQTIYARRDGAVAAPTAGLHFDAPLFEALAAKGVESAYVTLHVGAGTFQSVRADDIREHHMHSEWIEVDETACEQVRAAQARGNRVVAVGTTSVRCLESATDEDGHIAPYSGETDIFIYPGYAWRCVDALITNFHLPESTLLMLATSFAGFETTLAAYRAAVAERYAFFSYGDAMFLTRKP

SEQ ID NO: 67225 - protein, 343 aa, Halomonas ventosae
  misc_feature (1)..(343): tr|A0A2T0VI43|A0A2T0VI43_9GAMM S-adenosylmethionine:tRN A ribosyltransferase-isomerase OS=Halomonas ventosae OX =229007 GN=queA PE=3 SV=1
MQRADFHYELPEELIARYPSEQRSDCRLLCVDGATGALAHRRFPELLELLAPGDLLVFNDTRVIPARLHGHKASGGKVEMLLERPLDAHRGLAHLRSSKSPKPGTELVFEGGIRAVVEGRQEALFELRFLGETPLIALLEQHGHMPLPPYITREDELADRERYQTVYARRDGAVAAPTAGLHFDQPLLEALAARGVESAYVTLHVGAGTFQPVRADDIREHVMHSEWLEVDEAACAKVQAARAAGRRVVAVGTTSVRCLESATDEGGEIAPYRGETDIFIYPGYEWRCVDALITNFHLPESTLLMLVASFAGFDTTLAAYRAAVAERYAFFSYGDAMFLTRKP

SEQ ID NO: 67226 - protein, 343 aa, Halomonas venusta
  misc_feature (1)..(343): tr|A0A3S8YNW3|A0A3S8YNW3_9GAMM S-adenosylmethionine:tRN A ribosyltransferase-isomerase OS=Halomonas venusta OX= 44935 GN=queA PE=3 SV=1
MQRADFHFELPDELIARYPSEQRSDCRLLCVDGQSGALEHRQFDDLLELLEPGDLLVFNDTRVIPARLHGHKASGGKVEMLLERPLDSHRGLAHIRSSKSPKPGTELIFEGDIHAVVEGRRDALFELRFLGDTPMIALLEKHGHMPLPPYITRDDELSDRERYQTVYARRDGAVAAPTAGLHFDQPLLDALAEKGVNSAFVTLHVGAGTFQPVRVDNILEHHMHSEWIEVSETACQQVRDTQAAGKRIIAVGTTSVRCLESACLKSSDGQIAPYSGDTDIFIYPGYEWRCVDALITNFHLPESTLLMLVSAFAGYDHMMRAYRTAVDERYAFFSYGDAMLLTR

SEQ ID NO: 67227 - protein, 348 aa, Halomonas xianhensis
  misc_feature (1)..(348): tr|A0A4R8FX68|A0A4R8FX68_9GAMM S-adenosylmethionine:tRN A ribosyltransferase-isomerase OS=Halomonas xianhensis OX=442341 GN=queA PE=3 SV=1
MQRADFHYDLPDELIARYPSEQRSDCRLLCVDGASGELAHRRFPDLLDLLAPGDLVVFNDTRVIPARLHGHKASGGRVEMLLERPLDAHRGLAHLRASKSPKPGTELIFEGDVHAVVEGRRDALFELRFLGETPLIELLERHGHMPLPPYITREDELADRDRYQTVYARRDGAVAAPTAGLHFDEPLMEAMHERGIETAFVTLHVGAGTFQPVRVDDIREHHMHSEWIEVDESVSEQVRAARARGNRVVAVGTTSVRCLESACLKSDDGEIAPFRGETDIFIYPGYEWRCVDALITNFHLPESTLLMLVSSFAGYDTVMRAYREAVDERYRFFSYGDAMFLTRTPTLS

SEQ ID NO: 67228 - protein, 359 aa, Halomonas xianhensis
  misc_feature (1)..(359): tr|A0A1I2YUQ2|A0A1I2YUQ2_9GAMM S-adenosylmethionine:tRN A ribosyltransferase-isomerase OS=Halomonas xianhensis OX=442341 GN=queA PE=3 SV=1
MQRSPSWPSSFMQRADFHYDLPDELIARYPSEQRSDCRLLCVDGTSGELAHRRFPDLLDLLAPGDLVVFNDTRVIPARLHGQKASGGRVEMLLERPLDAHRGLAHLRASKSPKPGTELIFEGDVRAVVEGRRDALFELRFLGETPLIELLERHGHMPLPPYITREDELADRDRYQTVYARRDGAVAAPTAGLHFDEPLMDAMRERGIETAFVTLHVGAGTFQPVRVDDIREHHMHSEWIEVDETVTEQVRAARARGNRIVAVGTTSVRCLESACLKSDDGTIAPFRGETDIFIYPGYQWRCVDALITNFHLPESTLMMLVSSFAGYDTVMRAYREAVDERYRFFSYGDAMFLTRTPTLS

SEQ ID NO: 67229 - protein, 347 aa, Halopeptonella vilamensis
  misc_feature (1)..(347): tr|A0A4Q8D0S1|A0A4Q8D0S1_9GAMM S-adenosylmethionine:tRN A ribosyltransferase-isomerase OS=Halopeptonella vilame nsis OX=531306 GN=queA PE=3 SV=1
MQVSDFNYELPEDLIASEPLPNRTDSRLLVLDPDTGGVADRQFPTIREYLRPGDLLVVNDTRVLPARLYGHKETGGAVEILLERLTGGNEALAQMRANKMPPIPSRITLEGDLAVEVTGRDGDFFRLRFPDDEPLPTLLERHGHMPLPPYIKREDTPADRERYQTVFADRPGAVAAPTAGLHFDEALLAALRGDGVETATLTLHVGAGTFQPIRTEALEDHRMHAEWLSVPAPVCAAVARTRARGGRVIAVGTTVVRALESAAQTGDLQPFEGETEIFIYPGFEFRVIDGLVTNFHLPGSTLVMLVSALAGREGILAAYDHAVRERYRFFSYGDAMLILAGAGGERP

SEQ ID NO: 67230 - protein, 342 aa, Haloplasma contractile
  misc_feature (1)..(342): tr|F7PX09|F7PX09_9BACT S-adenosylmethionine:tRNA ribosy ltransferase-isomerase OS=Haloplasma contractile SSD-17 B OX=1033810 GN=queA PE=3 SV=1
MQVKDFDFELPQELIAQTPLEDRDQSRLLVLDKETGDITHKRFYDIIDFFEVGDTLVLNDTRVMPARLFGVKEDTGANIEILLLKQVEGDRWETLCKPAKRVKQGTVIEFGDGLLKAKCIETLDEGGRIFEFIYDGIFYEVLDELGEMPLPPYITEKLDDQERYQTVYSKNVGSAAAPTAGLHFTQELLKKVEEKGINIAYITLHVGLGTFRPVTADTIDEHKMHAEYYQMTADTAKLLNDTREKNKRIITVGTTSTRTLETIAGKFDGTFQESSGWTDIFIYPGYEFKGIDSLITNFHLPKSTLVMMVSALAGRDPIMKAYHEAIKERYRFFSFGDAMFIR

SEQ ID NO: 67231 - protein, 342 aa, Halorhodospira halochloris
  misc_feature (1)..(342): tr|A0A0X8XA76|A0A0X8XA76_HALHR S-adenosylmethionine:tRN A ribosyltransferase-isomerase OS=Halorhodospira haloch loris OX=1052 GN=queA PE=3 SV=1
MHKSDFHYQLPERLIAERPAQRRTDSRMLVLERSSGEIADRQFTDLLNYLRPGDLLVLNDTRVIPARLAARKSSGGAVEVLLERIVDPDNGEILCHLRANRAPKPGAVIILPEGVEADVEGRAGRLFRLKLRNVDRDLIDYLERVGRVPLPPYIRRQDDACDRERYQTVFAARPGAVAAPTAGLHFDERMLEELRALGVEITQVTLHVGAGTFTPVDSEDLTAHQMHAEYLDVSAQAVSAIDAARERGGRVVAVGTTVVRALESAAAQGQLRPYSGETDLFITPGFRFRVVDVMLTNFHLPESSLLMLVSAFGGYEQVMAAYRHAVEQEYRFFSYGDAMLLL

SEQ ID NO: 67232 - protein, 345 aa, Halorhodospira halophila
  misc_feature (1)..(345): tr|A1WXR5|A1WXR5_HALHL S-adenosylmethionine:tRNA ribosy ltransferase-isomerase OS=Halorhodospira halophila (str ain DSM 244 / SL1) OX=349124 GN=queA PE=3 SV=1
MTEWRRSDFDYALPERLIAHRPAAQRAASRMLVLRTDSGALADRRFTDLPAYLRAGDLLVLNDTRVIPARLEAAKPTGARVEVLIERVEDPDAGLITCQLRANRTPKPGGRLGLADGVQAEVLEREGRFFRLQLAGLVESLWDYLERVGHVPLPPYIRRPDDDEDRTRYQTVFAARPGAVAAPTAGLHFDDALLERLRADGVGTARVTLHVGAGTFAPVESDDLSAHTMHAEWLEVSAETVAAVNATRERGGRVVAVGTTVVRALESAAADGQLAPYSGETRLFITPGYCFRAVDGLLTNFHLPESTLLMLVSAFGGYESVMAAYRHAVAEEYRFFSYGDAMLLI

SEQ ID NO: 67233 - protein, 351 aa, Halospina denitrificans
  misc_feature (1)..(351): tr|A0A4R7JUN6|A0A4R7JUN6_9GAMM S-adenosylmethionine:tRN A ribosyltransferase-isomerase OS=Halospina denitrifica ns OX=332522 GN=queA PE=3 SV=1
MKRSDFHYELPDELIARYPLAERTASRLLCLDGADGAVDHRRFEELPDLLQPQDLLVFNDTRVIPARVYGKKASGGQLEMLVERVLATDAALVHLKVSRSPAVGARLILEGGHEAVVEAREEGLFRLRFTDSPVMAVLEAVGHMPLPPYIDRPDEVTDEERYQTVFGEKPGAVAAPTAGLHFDESVMARLEARGIRRTFVTLHVGAGTFQPVRTEDIREHHMHQEWLSVEQSVVDAVAETRARGGRVVAVGTTAVRALESASASGRLAPFAGETNIFIYPGYRFRSTDAMVTNFHLPESTLIMLVSAFAGREQTLAAYRAAISERYRFFSYGDAMLIFPHPDAIEDGSTHS

SEQ ID NO: 67234 - protein, 351 aa, Halospina sp.
  misc_feature (1)..(351): tr|A0A5J5FKD6|A0A5J5FKD6_9GAMM tRNA preQ1(34) S-adenosy lmethionine ribosyltransferase-isomerase QueA OS=Halosp ina sp. K52047b OX=2614160 GN=queA PE=4 SV=1
MKRSDFHFELPDELIARYPLAEREASRLLRLDGTDGAVSHHGFRELPDLLEPGDLLVFNDTRVIPARVYGQKASGGKVEMLVERVLDSDRALVHLKVSRTPSPGGEITLDGGHRVVVDEHTPEGLFRVHFPDADVMTVLEAVGHMPLPPYIDRPDEMTDEERYQTVFGEKPGAVAAPTAGLHFTDAIMDELAARGIERTFVTLHVGAGTFQPVRSEDIREHHMHQEWLSVGQEAVDAVTRTRQRGGRVVAVGTTAVRALESASGEGHLAPFAGETRIFIYPGYRFRSVDAMVTNFHLPESTLIMLVSAFAGRDNVLDAYQAAIGERYRFFSYGDAMLVFPHSEAVAPEVSE

SEQ ID NO: 67235 - protein, 358 aa, Halotalea alkalilenta
  misc_feature (1)..(358): tr|A0A172YKG1|A0A172YKG1_9GAMM S-adenosylmethionine:tRN A ribosyltransferase-isomerase OS=Halotalea alkalilenta OX=376489 GN=queA PE=3 SV=1
MQRSDFQFDLPTELIARYPSESRSDCRLLCVDGDLASLEHRRFKDLLERVQPGDLMVFNDTRVVPARLHGQKRSGGRVEILLERPLDAHRALVHLRSSKSPKPGSELDFEGGVTAVVEGRRDALFELRFHGETPLLELLERHGHMPLPPYIERADDERDRERYQTVYARRKGAVAAPTAGLHFDQAMMAALEARGVETAFVTLHVGAGTFQPVRVNDITEHHMHSEWLEVDETTCAKVRAAKAAGRRVIAVGTTSVRCLETAAASGEIAPYRGDTDIFIRPGYAWRCVDALVTNFHLPESTLLMLVCAFAGFDTTMRAYREAVAQGYAFFSYGDAMFLTRRTLPDPWPAPAPSSGQSE

SEQ ID NO: 67236 - protein, 360 aa, Halothece sp.
  misc_feature (1)..(360): tr|K9YC80|K9YC80_HALP7 S-adenosylmethionine:tRNA ribosy ltransferase-isomerase OS=Halothece sp. (strain PCC 741 8) OX=65093 GN=queA PE=3 SV=1
MKVDASPLDQKLSSYDYHLPESYIAQTPVTPRDHSRLLVVDSPTSHHHQRFYDLPQWLQAGDLLVVNNTKVIPARIYGYKTTGAAIEVLLLEEKSQNCWLALVKPGKRLQIGAKIQFYPHQAQEKPILEATVTGKDEATGGRFLEFDLPVETSLISLLEDYGEIPFPPYVTSTEAQPEQYQTVYAQEQGAIAAPTAGLHFTDELLTTLAEKGINQAEVTLHVGVGTFRPVETESITDHQMHQEWINVPATTVEKIKETKAQGGRVIAVGTTVVRALEGAVAAKEGNFEAFCGKTDLFIYPGYELQVVDGLITNFHLPRSSLLMLVSAFIGRERLLSLYDSAIAHQYRFYSFGDAMLIISH

SEQ ID NO: 67237 - protein, 341 aa, Halothermothrix orenii
  misc_feature (1)..(341): sp|B8CXG1|QUEA_HALOH S-adenosylmethionine:tRNA ribosylt ransferase-isomerase OS=Halothermothrix orenii (strain H 168 / OCM 544 / DSM 9562) OX=373903 GN=queA PE=3 SV=1
MKVEEFDYELPEELIAQKPLPNRDDSRLMVLHRKTGEIEETVFKNIIKFLEPGDLLVLNDTKVIPARLFGEKIPSGTRIEVLLLKSITEGLWEVLVRPGRRMKKGNRVSFGDGKLVGIVKDYTDFGGRIMQFEYDGDFDKVIEELGEMPLPPYITRKVEDKGRYQTVYARKKGSVAAPTAGLHFTDRLLKKIKEQGIGIIYLTLHVGLGTFRPVRAENVEDHKMHSEYFEVSTDVVNRIKETKEKGKKVIAVGTTVTRALESAAVEKRHLKAMRGWTDIFIYPGYNFKVIDGLITNFHLPKSTLLMLVSAFAGKDMVMSAYKLAIKNKYRFFSFGDAMLIL

SEQ ID NO: 67238 - protein, 352 aa, Halothiobacillaceae bacterium
  misc_feature (1)..(352): tr|A0A545SJD3|A0A545SJD3_9GAMM S-adenosylmethionine:tRN A ribosyltransferase-isomerase OS=Halothiobacillaceae b acterium OX=2268194 GN=queA PE=3 SV=1
MKVSDFDFELPEAQIAQAPLAERSAARLLVVDGAAGAWRDARVRDLPSLLREGDLLVLNDTRVIPARLHGRKDSGGKVEVLLERLLNEREGIFHVRASKSPRAGARLLLEGGIVLDMVGREDALFRLKLIEGGETLLAALEAHGHMPLPPYIERADTAADRTRYQTVFADRPGAVAAPTAGLHFDEDLLAAIRARGVETARVTLHVGAGTFQPVRGEDLSQHHMHAEWVEVSAATVEAIRATRARGGRVVAIGTTAVRALESAAAASPSGALEPFAGDTRLFITPGRRFRVVDALFTNFHLPRSTLLMLVCAFGGHETVMGAYRHAVAAGYRFFSYGDAMFLTPAEGGGKAA

SEQ ID NO: 67239 - protein, 352 aa, Halothiobacillaceae bacterium
  misc_feature (1)..(352): tr|A0A539EFI2|A0A539EFI2_9GAMM S-adenosylmethionine:tRN A ribosyltransferase-isomerase OS=Halothiobacillaceae b acterium OX=2268194 GN=queA PE=3 SV=1
MAVMLRQDFFFDLPVELIAQAPVADRPASRLLCLNSTPGSFEDRIFGDLPQLLHPGDLLVFNDTRVIPARLHGHKESGGKVEVLIERIVNDQEALAMIRSSKTLQKGTRLTLGEQISAAVIGREGDLYRLHFDDARPLLLLLEEEGAIPLPPYITRLPGATDRARYQTVYARHPGAVAAPTAGLHFDEPLLQQLAKRGVGAAFVTLHVGAGTFQPLRVAEITSHKMHSEYIQVPADTVAKIEATRAAGGRVIAVGTTVVRALESAARPGELAAYAGETDIFIYPGYRFTTIDGLITNFHLPESTLLMLVCALGGQQQVMAAYHHAVAQRYRFFSYGDAMLLWSEPACFHTMG

SEQ ID NO: 67240 - protein, 367 aa, Halothiobacillus neapolitanus
  misc_feature (1)..(367): tr|D0KW94|D0KW94_HALNC S-adenosylmethionine:tRNA ribosy ltransferase-isomerase OS=Halothiobacillus neapolitanus (strain ATCC 23641 / c2) OX=555778 GN=queA PE=3 SV=1
MHTKLFDYTLPPELIAHRPIEPREHARLLVLEKEHTPNDLRECRIADFPDLLHPGDLLILNNTRVIPARVFGHKASGGKIEVLIERLQDGFSAWCHIRASKSPAPGTTLHMDGQATLTVKNRQDALFLVELTPDSLNPDVLTWLNRAGHMPLPPYIDRADDAQDRHDYQTVFAAHDGAVAAPTASLHLTENLLEQIAAKGVKTAFVTLHVGAGTFQPVRVDNIQEHTMHSEWLNVPEETVAAIDATRERGGRVVCVGTTALRAIETAARENPTAAAQRRIAPYQGDTRLFLYPGQPVHVTDALLTNFHLPQSTLLMLVSALAGRERILAAYDYAVRAGFRFFSYGDAMFIPVNQSIAPAGGEQSHAI

SEQ ID NO: 67241 - protein, 346 aa, Halothiobacillus sp.
  misc_feature (1)..(346): tr|A0A258QD73|A0A258QD73_9GAMM S-adenosylmethionine:tRN A ribosyltransferase-isomerase (Fragment) OS=Halothioba cillus sp. 28-55-5 OX=1970386 GN=B7Y53_07880 PE=3 SV=1
RESARLLVLAASPHSALHDRHIADFPALLQAGDLLILNDTRVIPARVFGHKASGGKVEVLVERLINPQSAWCHVRASKSPPVGTVLHMAGGAELTLTERADALFLLTLTPNADTPDLLTWLKRAGHMPLPPYIERADDEQDRADYQTVFARHDGAVAAPTASLHLTCDLLAKITQRGVETAFVTLHVGAGTFQPVRVDNILSHVMHREWLDVPEATAQAIARTRARGGRVICVGTTALRAIESAARAHPAAAARREVRAHQGDTQLFLYPGQPVHIADALLTNFHLPQSTLLMLVSALAGRERILAAYAHAIAQGYRFFSYGDAMFIPITPHTEPSAPSDGKVLAP

SEQ ID NO: 67242 - protein, 361 aa, Halothiobacillus sp.
  misc_feature (1)..(361): tr|A0A191ZI70|A0A191ZI70_9GAMM S-adenosylmethionine:tRN A ribosyltransferase-isomerase OS=Halothiobacillus sp. LS2 OX=1860122 GN=queA PE=3 SV=1
MHTQLFDYDLPQELIALRPAEPRESARLLILDDDAPGGLKDAYIADFPDLLRAGDLLVLNDTRVIPARVFGQKESGGRVEILVERLVDTQSAWCHVRASKSPKMGGCLDMEGGVRLTVAARDEGLFLLQLVPGATETDFLGWLKRAGHMPLPPYIDRADDAADRADYQTVFARRDGAVAAPTASLHLTASLLAQIAARGVETTFVTLHVGAGTFQPVRVTDISAHKMHREWLDVPAAAADAIKAARARGGRVVCVGTTAVRALETAARAHPEAAARREVGAYQGDTSLFLYPGQPTYVVDALLTNFHLPQSTLLMLVSALAGRERMLAAYEHAVAHGYRFFSYGDAVFIPVTSSGHAPDNG

SEQ ID NO: 67243 - protein, 351 aa, Halovibrio sp.
  misc_feature (1)..(351): tr|A0A2A2F8F5|A0A2A2F8F5_9GAMM S-adenosylmethionine:tRN A ribosyltransferase-isomerase OS=Halovibrio sp. YL5-2 OX=2032626 GN=queA PE=3 SV=1
MKRSDFHFELPDELIARYPLAEREASRLLRLDGTDGAVSHHSFRELPDLLEPGDLLVFNDTRVIPARVYGQKASGGKVEMLVERVLDPDRALVHLKVSRTPSPGGEITLEGGHRVVVEEHTPEGLFRVHFPDADVMTVLEAVGHMPLPPYIDRPDEMTDEERYQTVFGEKPGAVAAPTAGLHFTDAIMDELAARGIERTFVTLHVGAGTFQPVRSEDIREHHMHQEWLSVEQEAVDAVTRTRQRGGRVVAVGTTAVRALESASQEGGLAPFAGETRIFIYPGYRFRSVDAMVTNFHLPESTLIMLVSAFAGRDSVLDAYQAAIDERYRFFSYGDAMLVFPHPEAVAPEVSA

SEQ ID NO: 67244 - protein, 343 aa, Halovibrio variabilis
  misc_feature (1)..(343): tr|A0A511UMZ8|A0A511UMZ8_9GAMM S-adenosylmethionine:tRN A ribosyltransferase-isomerase OS=Halovibrio variabilis OX=31910 GN=queA PE=3 SV=1
MQRSDFYYQLPDELIARYPSEQRSDCRLLCVDGQSGALEHRRFPDLLELLEPGDLLVFNDTRVIPARLHGHKASGGKVEMLLERPLDAHRGLAHIRSSKSPKPGTELIFEGDVHAIVEGRRDALFELRFLGETPMIALLEKYGHMPLPPYITREDELSDRERYQTVYARRDGAVAAPTAGLHFDQPLLDALADKGIKRTFVTLHVGAGTFQPVRVDNILEHHMHSEWIEVTEATCQQVRETLAAGKRVVAVGTTSVRCLESACQKSSDGQIAPYSGDTDIFIYPGYQWRCVDALITNFHLPESTLLMLVSAFAGYETIMHAYQRAVAERYAFFSYGDAMLLTR

SEQ ID NO: 67245 - protein, 357 aa, Hamiltonella defensa
  misc_feature (1)..(357): sp|C4K8M4|QUEA_HAMD5 S-adenosylmethionine:tRNA ribosylt ransferase-isomerase OS=Hamiltonella defensa subsp. Acy rthosiphon pisum (strain 5AT) OX=572265 GN=queA PE=3 SV =1
MRLSDFSFELPESLVAQYPLEKRSDCRLLCLNGETGTMTEGVFTDLLYQLEQGDLLVLNNTRVIPARVFGRKPSGGKLEILVERILSPNRVLVHLKSSKTPKLGAQFLLGDTANIPVTLMARHASLFELRFDVREDALMLLQSIGHIPLPPYIPRADEPKDHELYQTVYGQHLGAVAAPTAGLHFDNPLLNALKARGIETAFVTLHVGAGTFQPVKTDNITEHVMHSEYAEVSQEVVDAVLACKARGKRVVAVGTTSVRSLETAAQKTKNSFLTPFSGETSIFIYPGYQYQIVDALITNFHLPKSTLIMLVCAFAGYQNTLRAYKKAIDEKYRFFSYGDAMFISHNPKAAQENRVKK

SEQ ID NO: 67246 - protein, 337 aa, Handelsmanbacteria sp.
  misc_feature (1)..(337): tr|A0A1F6CW65|A0A1F6CW65_HANXR S-adenosylmethionine:tRN A ribosyltransferase-isomerase OS=Handelsmanbacteria sp . (strain RIFCSPLOWO2_12_FULL_64_10) OX=1817868 GN=queA PE=3 SV=1
MKLSDFDYDLPEGLIAPHPAPVRDESRLMVLHRSGERIEHRVFRDLVDYVRRGDALVVNETKVLPARLLGRGPGGGKVELLLLRRVEGEGWEALGRPGRRLRKGAQVQIGDGDLTAEVREVLPDGRRQVHLRGEDVEAALHRIGRPPLPPYLRREETPEDRERYQTVYARTPGAVAAPTAGLHFTQDLLDRIRGRGVDVAPVLLHVGPGTFRPVTAEDPALHRMEAEYYEIGPDAAAQVASARQRGGRAIAVGTTAVRALETAATTGEHSGWTEIFIYPPYAFRAVDALITNFHLPRSTLLMLVSAFAGREFVLRAYREAIQRGYRFYSYGDAMLIL

SEQ ID NO: 67247 - protein, 361 aa, Hansschlegelia sp.
  misc_feature (1)..(361): tr|A0A4Q9GSA2|A0A4Q9GSA2_9RHIZ S-adenosylmethionine:tRN A ribosyltransferase-isomerase OS=Hansschlegelia sp. Du b OX=2528245 GN=queA PE=3 SV=1
MDVGLFDFDLPEALIALRPVAPRDSARLLVVRSGAEPELDDRTVSELPAFLQPGDALVVNATKVIPARLRGVRRRGEALARVELLLHRRLDAGRWLAFARPAKKLALGDRIELGEASGETSLLGRLDATVEARGEAGEITIAFDLAGPDLDIAIARAGELPLPPYIAGKRPTDDRDATDYQTLFAREAGAVAAPTAGLHFTPTLMDALAARGVIRHETVLHVGAGTFLPVKADDTDDHRMHAETGYLDAETADALNAVRARGGRVVAVGTTAARLLESAADADGRLRPFAGDTDIFITPGYRFRAVDALMTNFHLPRSTLMMLISAFAGLDTVKRAYAHAVAERYRFYSYGDACLFLPKTP

SEQ ID NO: 67248 - protein, 363 aa, Hansschlegelia zhihuaiae
  misc_feature (1)..(363): tr|A0A4Q0MMK5|A0A4Q0MMK5_9RHIZ S-adenosylmethionine:tRN A ribosyltransferase-isomerase OS=Hansschlegelia zhihua iae OX=405005 GN=queA PE=3 SV=1
MDVSLFDFELPEELIALRPAVPRDAARLLVVRPGGEPELEDRVVCDLPELLAPGDALVVNATRVIPARLYGLRRRGETAARTEILLHRRLDAARWLAFARPAKKLAPGDRLSFGETSEGMACLLGRLDATVESRGEGGEVTLAFDLAGPDLDLAIAASGDIPLPPYIAGQRPTDARDADDYQTMFAREPGAVAAPTAGLHFTPALSEALAARGVARHETVLHVGAGTFLPVKVEDTDDHRMHAEFGVLDAATAGALNETRGRGGRVVAVGTTSCRLLESAVGPDGRLAGFSGETDIFMTPGFRFRAVDALLTNFHLPRSTLMMLIAAFAGLDVVRRAYAHAVRERYRFYSYGDACLFLPERRG

SEQ ID NO: 67249 - protein, 349 aa, Hanstruepera neustonica
  misc_feature (1)..(349): tr|A0A2K1E0W1|A0A2K1E0W1_9FLAO S-adenosylmethionine:tRN A ribosyltransferase-isomerase OS=Hanstruepera neustoni ca OX=1445657 GN=queA PE=3 SV=1
MKLSHFNFNLPDELLAEYPSENRDEARLMVLNRKDESIEHKYFKDLIDYFDEDDVMILNNTKVFPARLYGNKEKTGARIEVFLLRELNEEQRLWDVLVDPARKIRIGNKLYFGDDETLVAEVIDNTTSRGRTLRFLYDGSYRDFRMKLNELGQTPLPKYIKRDVEPEDEERYQTIFAKNEGAVAAPTAGLHFSKHLLKRLEIKGVNFAEVTLHVGLGTFNPVEVEDLSKHKMDSEEIIINKPAVDTINKGIKNKKRVCAVGTTVMRAIESSVSSSGTLNEFEGWSNKFIFPPYDFSIANCMITNFHTPKSTLLMMASAFAGHDFIKRAYDEAVKEKYKFYSYGDAMLIL

SEQ ID NO: 67250 - protein, 400 aa, Hapalosiphon sp.
  misc_feature (1)..(400): tr|A0A0M0SJX0|A0A0M0SJX0_9CYAN S-adenosylmethionine:tRN A ribosyltransferase-isomerase OS=Hapalosiphon sp. MRB2 20 OX=1704290 GN=queA PE=3 SV=1
MQEQLAKTNSHLISEQIPENSELDLSLAGYDYELPTELIAQNPVVPRDSSRLLVVNSQNVGTEVAPRHHIFRDLPEILRPGDLLVMNNTRVLPARLYGQKLTGAEVEVLLLEERQHNCWLALVKPGKRFKRGSKIVFTAKNRKEDTEKKSENISASPCLGVSPSSSLTATVIASDTATGGRLLQFELPEEVSLLQLLDAFGEIPLPPYITTSEAQSEQYQTVYAQNPGAVAAPTAGLHFTPELLQKLREQNINQAFVTLHVGVGTFRPVEVENVTTHTMHEEWIEVPQNTVEQIHATKAAGGRIIAVGTTVVRALEGAATKGELQPFCGRTNLFIYPGYKWRVVEGMITNFHLPRSSLLMLVSALIGRQRLLNIYQEAIASRYRFYSFGDAMLILPEATI

SEQ ID NO: 67251 - protein, 390 aa, Hapalosiphonaceae cyanobacterium
  misc_feature (1)..(390): tr|A0A328I4M2|A0A328I4M2_9CYAN S-adenosylmethionine:tRN A ribosyltransferase-isomerase OS=Hapalosiphonaceae cya nobacterium JJU2 OX=2109628 GN=queA PE=3 SV=1
MQEQLAKTNSHLISKQTPENSELDFSLAGYDYELPTELIAQNPAVPRDSSRLLVVNSQNVGTETAPQHYIFRDLPQILRPGDLLVMNNTRVLPARLYGHKLTGAEVEVLLLEERQHNRWLALVKPGKRFKRGSQIVFTAKVNTDGDHLTTPVPYHSLTATVIATDAATGGRLLQFELPEEVSLLQLLDAFGEIPLPPYITTTEAQSEQYQTVYAQNPGAVAAPTAGLHFTPELLQKLREQNINQAFVTLHVGVGTFRPVEVENVTTHTMHEEWIEVPQNTVEQIRATKAAGGRIIAVGTTVVRALEGAATKGELQPFCGKTNLFIYPGYQWRVVEGMITNFHLPRSSLLMLVSALIGRQRLLNIYQEAIASQYRFYSFGDAMLILPEATI

SEQ ID NO: 67252 - protein, 349 aa, Harryflintia acetispora
  misc_feature (1)..(349): tr|A0A3E2SV07|A0A3E2SV07_9FIRM S-adenosylmethionine:tRN A ribosyltransferase-isomerase OS=Harryflintia acetispo ra OX=1849041 GN=queA PE=3 SV=1
MDKFESGSWNKSDFWFELPEHLIAQTPITPRDHSRMMEISRAGGAISHRHFYDLPQALKKGDLLVINDSRVLPARLYGEKRETGGAMEFLLLEQKEQDIWEVLVRPGKRAKEGARFVFGGGLLEGEVLTTVEGGNRLVRFSYEGSFYEVLEKIGQMPLPPYITQKLEDKERYQTVYSKEVGSAAAPTAGLHFTPRLMEELEGMGVRFASVTLHVGLGTFRPVKVDDIKEHKMHSEHYFVPEETARLVEETKAAGGRVIAVGTTSTRTLESVYAKYGKIIPCEGYTDIFIYPGYRFGVLDGLITNFHLPESTLIMLVSAFLGYRETMEAYREAVREQYRFFSFGDCMLIL

SEQ ID NO: 67253 - protein, 349 aa, Harryflintia acetispora
  misc_feature (1)..(349): tr|A0A4R1Q6I7|A0A4R1Q6I7_9FIRM S-adenosylmethionine:tRN A ribosyltransferase-isomerase OS=Harryflintia acetispo ra OX=1849041 GN=queA PE=3 SV=1
MDKFESGSWNKSDFWFELPEHLIAQTPITPRDHSRMMEISRAGGVISHRHFYDLPQALKKGDLLVINDSRVLPARLYGEKRETGGAMEFLLLEQKEQDIWEVLVRPGKRAKEGARFVFGGGLLEGEVLTTVEGGNRLVRFSYEGSFYEVLEKIGQMPLPPYITQKLEDKERYQTVYSKEVGSAAAPTAGLHFTPRLMEELEGMGVRFASVTLHVGLGTFRPVKVDDIKEHKMHSEHYFVPEETARLVEETKAAGGRVIAVGTTSTRTLESVYAKYGKIIPCEGYTDIFIYPGYRFGVLDGLITNFHLPESTLIMLVSAFLGYRETMEAYREAVREQYRFFSFGDCMLIL

SEQ ID NO: 67254 - protein, 361 aa, Hartmannibacter diazotrophicus
  misc_feature (1)..(361): tr|A0A2C9D5V3|A0A2C9D5V3_9RHIZ S-adenosylmethionine:tRN A ribosyltransferase-isomerase OS=Hartmannibacter diazo trophicus OX=1482074 GN=queA PE=3 SV=1
MKVDLFDFELPQERIALRPARPRDSARLLRIGSDGDLADHVVSDLPSLLRAGDILVFNDTRVIPAQLEGVRLRDGEPGPVVGATLHMRVAPDRWRAFVRGARKLKTGDRVAFGAVKDGTCLGERLDATVSWKGEAGEVEFAFDFSGPDLDAAIAKVGHIPLPPYIAAKRAEDAEDRRDYQTIYAREEGAVAAPTAGLHFTPELLAALEKAGIETAFVTLHVGAGTFLPVKADDTEEHRMHAEIGHVTQEIADRLNAVRAKGGRIVSVGTTSLRLLESAAGEDGIIRPFAGPTDIFITPGYRFRAIDVLMTNFHLPRSTLFMLVSAFSGLETMRAAYAHAIETGYRFYSYGDASLLLPKKTP

SEQ ID NO: 67255 - protein, 344 aa, Hasllibacter halocynthiae
  misc_feature (1)..(344): tr|A0A2T0X808|A0A2T0X808_9RHOB S-adenosylmethionine:tRN A ribosyltransferase-isomerase OS=Hasllibacter halocynt hiae OX=595589 GN=queA PE=3 SV=1
MRLDAFDFDLPEELIAVRPARPRSSARLLVAEAGAIADRRASDLPSVLRPGDRLVLNDTKVIPARLTGTRRRGEAEARMDVTLLEPRGDGRWSALVRPLRKLSEGEIIVFPGGLSATFAGREGDAAILSFRAEEDFDTALERAGRMPLPPYIEGRRAADDADRTDYQTVWAREAGAVAAPTASLHFDEPLLAALRARGVGFTHVTLHVGAGTFLPVKAEDTDDHVMHAERGRIAPRAAAEIAATRAEGGRVIPVGTTAMRLLETAARETGMVQPWEGATDIFITPGFRFRASDALMTNFHLPRSTLMMLVGAFMGMDRIRGIYAYAIAERYRFFSYGDASLLVP

SEQ ID NO: 67256 - protein, 341 aa, Hathewaya histolytica
  misc_feature (1)..(341): tr|A0A4U9RKR1|A0A4U9RKR1_HATHI S-adenosylmethionine:tRN A ribosyltransferase-isomerase OS=Hathewaya histolytica OX=1498 GN=queA PE=3 SV=1
MRVKDFSFDLPEEYIAQHPLEKRDHSRLMVLDKKTGNIEHRVFKDIIEYFNPGDCLILNDTRVLPARLIGHKEGTMGRMEFLLLKRVDKNKWETLVKPGKRAKIGSKFVFGSGELKAEVIDMGEDGSRVVEFSYEGIFEEVLDRLGEMPLPPYITEKLEEKERYQTVYSKEPGSAAAPTAGLHFTEELLGEIKNKGIIVAFVTLHVGLGTFRPVKADTIEEHHMHSEYYQMSKETADIINNTKKNGGRIIGVGTTSCRTIESIGNEHGKVKECSGWTDIFIFPGYKFKVLDALITNFHLPESTLIMLVSALAGKENVMNAYEVAVKEKYRFFSFGDAMFIK

SEQ ID NO: 67257 - protein, 341 aa, Hathewaya proteolytica
  misc_feature (1)..(341): tr|A0A1M6P8U8|A0A1M6P8U8_9CLOT S-adenosylmethionine:tRN A ribosyltransferase-isomerase OS=Hathewaya proteolytic a DSM 3090 OX=1121331 GN=queA PE=3 SV=1
MKVTDFDFDLPQEYIAQHPIENRDQSRLMVLDKKTGDIEHKVFKDILDYLEPGDCLVLNNTKVIPARLIGHKEDSMGKMEFLLLKRIDDNHWETLVKPGKRAKVGSRFVFGNGELKATVVDIIEEGTRIVEFQYEGIFEEVLDKLGEMPLPPYITEKLEEKNRYQTVYSKELGSAAAPTAGLHFTTELLDAIRKKGVNVEFVTLHVGLGTFRPVKAENIEEHHMHSEFYVMGKETADVINKTKNAGKKVVAVGTTSCRTIESIADENGMVRECSGWTDIFIYPGYRFKVLDCLITNFHLPQSTLIMLVSALAGKENVMNAYAVAVEKKYRFFSFGDAMFVK

SEQ ID NO: 67258 - protein, 344 aa, Hazenella coriacea
  misc_feature (1)..(344): tr|A0A4R3LEV0|A0A4R3LEV0_9BACL S-adenosylmethionine:tRN A ribosyltransferase-isomerase OS=Hazenella coriacea OX =1179467 GN=EDD58_102570 PE=3 SV=1
MVTIPFSLPNELNADSPPERRGIRRDHVRMMVSDLRSGESQHVRFFDLPQMLKTGDVVVLNASRTVPAVLYVDQMRDGKCISLKRELRLAHRIDHQTWDVWIVGDQVQQGDELIFSDKLTAIVTQTDFSFPLVQVQFSLSGAQLFEQIYSLGDPVRYEYIKQPWSLDYYQTVYASVPGSVEIPSAGRAFSWELIFRLREQGIQIVTLTLHTGLSYFHDDLPFLSPEQNSESYEIPEYTALTINHAKQHGGRVIAVGTTVVRALESAAKSDKVCLARRGKTNLKITEETPLQIADGLITGFHEPEASHLDLLSAFVEPSLLKKMYEEAIQQRYLWHEFGDIHLIL

SEQ ID NO: 67259 - protein, 344 aa, Hazenella coriacea
  misc_feature (1)..(344): tr|A0A4R3L9G4|A0A4R3L9G4_9BACL S-adenosylmethionine:tRN A ribosyltransferase-isomerase OS=Hazenella coriacea OX =1179467 GN=queA PE=3 SV=1
MDVSLYDFLLPKELIAQTPAQERISSRLMVVNRETKEIQHSHFPQILEYVQPGDVLIFNDSRVRPARLIGVKEETGARIELLLLKPLGEDRWEALVKPAKRVKEGTVIDFGEGELKAIAEEQIEVAGGRVFRLQYQTDNIEALFEKLGEMPLPPYIHERLDDPERYQTVFSKVVGSAAAPTAGLHFNDDLLNQLKQKGVQLGFITLHVGLGTFRPVTTERIEEHQMHAEYYELSVETVEMIQQAKERGNRVFAVGTTSVRTLETVAKRFAGQIQPCHGWTDIFIYPGYRFQVVDGLLTNFHLPQSTLLMLVSAFASRELILKAYDEAVKAQYRFFSFGDAMLIL

SEQ ID NO: 67260 - protein, 340 aa, Helcococcus kunzii
  misc_feature (1)..(340): tr|H3NN93|H3NN93_9FIRM S-adenosylmethionine:tRNA ribosy ltransferase-isomerase OS=Helcococcus kunzii ATCC 51366 OX=883114 GN=queA PE=3 SV=1
METKDFDYDLDPSFIAQHPEEKRTESKLMILNRKDNTIEHKHFYDIIDYLNPGDCLVVNNSRVIPARLYGHRKDREEMIEVFLLKNVEDKKWECLVKPGKKMKMDTEIIFSEKLKAKVIGITDEGHRILDMQFDGIFNEILEEIGNIPLPPYITEKLEDKSKYQTVYAKHDGSVAAPTAGLHFTKELLEKIKEKGIKIAYVTLHVGLGTFKPVSDDKIENHKMHSEYYVLDKENSDIINNTRKNNGRVIAVGTTSVRTLESIALKYGEIRPDNDWTEIFIYPGYEFKVIDAMITNFHLPKSTLIMLVSSFYDRENILKAYEEAKSNNYRFFSFGDAMFIN

SEQ ID NO: 67261 - protein, 340 aa, Helcococcus ovis
  misc_feature (1)..(340): tr|A0A4R9BZV5|A0A4R9BZV5_9FIRM S-adenosylmethionine:tRN A ribosyltransferase-isomerase OS=Helcococcus ovis OX=7 2026 GN=queA PE=3 SV=1
MDTKDFDYELDHSFIAQHPEDKRSESKLMILDRKNETIEHKRFYDIIDYLNEGDVLVVNNSKVIPARLFGHRKDKKEALEVFLLTNIEEKKWECLVKPGRKFKIGSEIIFDEKLKAEVIDITEEGHRILEMKYDGIFNEILNEIGNVPLPPYITERLEDKSKYQTVYAKHDGSVAAPTAGLHFTTQLLQQIKDKGIKLAYLTLHVGLGTFKPVNDEKIEEHKMHSEYYILDKENAETINEAKNKGNRVIAVGTTSVRTLESISRKYGKVQADSDWTDIFIYPGFNFKTVDAMITNFHLPKSTLIMLISSFYNRERILEAYEEAKRNNYRFFSFGDAMLIK

SEQ ID NO: 67262 - protein, 340 aa, Helcococcus ovis
  misc_feature (1)..(340): tr|A0A5F0K427|A0A5F0K427_9FIRM S-adenosylmethionine:tRN A ribosyltransferase-isomerase OS=Helcococcus ovis OX=7 2026 GN=queA PE=3 SV=1
MDTKDFDYELDHSFIAQHPEDKRSESKLMILDRKNETIEHKRFYDIIDYLNEGDVLVVNNSKVIPARLFGHRKDKKEALEVFLLTNIEEKKWECLVKPGRKFKIGSEIIFDEKLKAEVIDITEEGHRILEMKYDGIFNEILNEIGNVPLPPYITERLEDKSKYQTVYAKHDGSVAAPTAGLHFTTQLLQQIKDKGIKLAYLTLHVGLGTFKPVTDDKIEEHKMHSEYYILDKENAETINEAKNKGNRVIAVGTTSVRTLESISRKYGKVQADSDWTDIFIYPGFNFKTVDAMITNFHLPKSTLIMLISSFYNRERILEAYEEAKRNNYRFFSFGDAMLIK

SEQ ID NO: 67263 - protein, 345 aa, Helicobacter acinonychis
  misc_feature (1)..(345): sp|Q17WP4|QUEA_HELAH S-adenosylmethionine:tRNA ribosylt ransferase-isomerase OS=Helicobacter acinonychis (strai n Sheeba) OX=382638 GN=queA PE=3 SV=1
MKEFDLESYDYHLPKELIANYPILPKEKAKLLIYERHSQKITHTTFEHVLDFFPKNTLVVLNDTKVIKARLFGSKYAFLPSKTTEVFFHRFLKNNTALTQIKGKIKVGDKIFFDENHYAEVLELLNNGQRLIAFYDNKTPLDQASILKLLEQYGHMPLPPYIKRADESLDTLEYQSVFAKHIGAVAAPTASLHFSQNTLENLLKDFKHTFLTLHVGAGTFASVETKDIREHQIHTEVLHIPKKSQEILQKSQEILCIGTTALRSVEYFKRLKTPKQEAFECDIFLHLANPIQHANYLLTNFHLPKSSLLMLVSAMIGLEKTKEIYQIAIEKKYRFYSYGDGMLIL

SEQ ID NO: 67264 - protein, 342 aa, Helicobacter ailurogastricus
  misc_feature (1)..(342): tr|A0A0K2X2I8|A0A0K2X2I8_9HELI S-adenosylmethionine:tRN A ribosyltransferase-isomerase OS=Helicobacter ailuroga stricus OX=1578720 GN=queA PE=3 SV=1
MPNIPKEFKRASYAYHLPQHLIATHPINPKENAKLMVYERASGKITHTIFKEIFSFFPKDALVVLNDTKVMKARLFAHTAQKRRVEILLHHAASPTACLAQVRGKVRPGLVLELEQGYSCEVLEVLSDGLRVLGFRHEGKPLEWAKVLGMLELLGHMPIPPYLKRPDTSQDTQDYQSVFAKNLGAIAAPTASLHFSQSAKDHLLKNFKHVFITLHVGAGTFLSVQSEDIREHPMHAEFVEVSFKAGQALDEARYILCVGTTALRATEHYKRGLGLEPCNLFLHPGNPVRAAQALLTNFHLPESTLIMLVASMVGLDKCLELYKIAIEHHYRFYSYGDGMLIL

SEQ ID NO: 67265 - protein, 342 aa, Helicobacter ailurogastricus
  misc_feature (1)..(342): tr|A0A0K2Y356|A0A0K2Y356_9HELI S-adenosylmethionine:tRN A ribosyltransferase-isomerase OS=Helicobacter ailuroga stricus OX=1578720 GN=queA PE=3 SV=1
MPNIPKEFKRASYAYHLPQHLIATHPINPKENAKLMVYERASDRLTHTTFKKIFDFFPKDALVVLNDTKVMKARLFAHTAQKRRVEILLHHAASPTACLAQVRGKVRPGLVLELEQGYSCEVLEVLNDGLRVLGFRHEGKPLEWAKVLGMLELLGHMPIPPYLKRPDTSQDTQDYQSVFAKNLGAIAAPTASLHFSQSAKDHLLKNFKHVFITLHVGAGTFLSVQSEDIREHPMHAEFVEVSFKAGQALDEARYILCVGTTALRATEHYKRGLGLEPCNLFLHPGNPVRAAQALLTNFHLPESTLIMLVASMVGLDKCLELYKIAIEHHYRFYSYGDGMLIL

SEQ ID NO: 67266 - protein, 338 aa, Helicobacter anseris
  misc_feature (1)..(338): tr|A0A3D8J9A5|A0A3D8J9A5_9HELI S-adenosylmethionine:tRN A ribosyltransferase-isomerase OS=Helicobacter anseris OX=375926 GN=queA PE=3 SV=1
MREFDLKSYDYHLPVDLIAKYPVSPKEDARLLVFNRKDKTIVHTSFKYLFDFVPKDYLFVFNDTKVIKARVFGKKTTGAKVEVLFHKKISDGFLVQIRGKIKVDDIIILDQNFYIKVCKLFEDGYRLVRCFHLNQEIFEISKMCDLIGHVPLPPYIKREDEQLDIEEYQSVFAKNYGAVAAPTASLHFSESMMRYVLEHYKKVFLTLHVGAGTFASVESKDIREHKIHSETLLASKQSIDSIKKAKSIICVGTTAMRSVEFLARIGDEEYEGECDIFLHLGNPPIKTSALLTNFHLPKSSLIMLVSSMVGLDTCMWLYDEAIKHQYRFYSYGDGMLIL

SEQ ID NO: 67267 - protein, 351 aa, Helicobacter apodemus
  misc_feature (1)..(351): tr|A0A4U8UF91|A0A4U8UF91_9HELI S-adenosylmethionine:tRN A ribosyltransferase-isomerase OS=Helicobacter apodemus OX=135569 GN=queA PE=3 SV=1
MDVLSLRSYDYILPKELIAKYPANPKENAKLLVYNRRDKNIIHSNFWNFANFLPQDTLLVFNDTKVIPARFYGKKVLKDSKISQQGAKIEALFHKELESNSYLLQCKGRLKEGERIAFVGNIIAEIIKDKGMGFKEVRFFEVADGVLKPLKKEKFFAFLEQYGHIPLPPYIKRETKIQDREDYNAVFAKHLGAIAAPTASLHFSEGTFNALTQNFKHTYVTLHIGAGTFMGVSVDNILEHKIHKESFYISQESQQKISEATHITAIGTTATRVVEYFGLTGYGRGECDLFLHLPNKPLLTKALLTNFHLPKTTLLMLVASFVGLEEMQRIYKEAIKEKYRFYSYGDGMLIL

SEQ ID NO: 67268 - protein, 351 aa, Helicobacter apodemus
  misc_feature (1)..(351): tr|A0A2U8FG19|A0A2U8FG19_9HELI S-adenosylmethionine:tRN A ribosyltransferase-isomerase OS=Helicobacter apodemus OX=135569 GN=queA PE=3 SV=1
MDVLSLQSYDYILPKELIAKYPENPKENAKLLVYNRRDKSIIHSNFWNFASFLPQDTLLVFNDTKVIPARFYGKKVLKDSKIGQQGAKIEALFHKELESNSYLLQCKGRLKEGARIAFVGNIIAEIIKDKGMGFKEVRFFEVEDGILKPLKKEKFFAFLEQYGHIPLPPYIKRETKIQDREDYNAVFAKHLGAIAAPTASLHFSEETFNALTQNFKHTYVTLHIGAGTFMGVSVDNILEHKIHKESFYISQESQQKISEATHITAIGTTATRVVEYFGLTGYGRGECDLFLHLPNKPLLTKALLTNFHLPKTTLLMLVASFVGLEEMQRIYKEAIKEQYRFYSYGDGMLIL

SEQ ID NO: 67269 - protein, 386 aa, Helicobacter aurati
  misc_feature (1)..(386): tr|A0A3D8J8A8|A0A3D8J8A8_9HELI S-adenosylmethionine:tRN A ribosyltransferase-isomerase OS=Helicobacter aurati O X=137778 GN=CQA66_00710 PE=3 SV=1
MNKDLLLSSYCFSLPKNLIATTPVYPKESARLLVYHKDTQKITHTYFEYLFDFVPRDYLIVLNNTKVIHARFYASKLANQSTIQMQNTSKEFLYHKSLGNTKHLVQIRGRASVQNLFLANDLQTLIELSRVCDDGYREVVFYKMPAHVTTLRVDSREFLTNLQNKTIMQDSEVMAFLQRYGKIPLPPYIKRKVTRQDYKDYQSIFADINGSIAAPTASLHFSESMLTFLQQHYNYTFVTLHVGAGTFAPLQVSSILEHKIHSEYCNLTQESAQKIMQHNNILCVGTTALRCVEWFANLNGLSLDKNVLHSMKYSDWQLSGENTLFLHPFNRPRVVRALLTNFHLPQSSLLLLVSSLIGREEMLRIYAEAIQKEYRFYSYGDGMLIV

SEQ ID NO: 67270 - protein, 460 aa, Helicobacter bilis
  misc_feature (1)..(460): tr|N2BR92|N2BR92_9HELI S-adenosylmethionine:tRNA ribosy ltransferase-isomerase OS=Helicobacter bilis WiWa OX=12 35804 GN=C826_00043 PE=3 SV=1
MSKDLDLSSYDFTLPNDLIATEPIKPKENAKLLIYHNGKITHTTFYELFNYIPKDYLIVLNDTRVINARLFANKLSLESLHKTQILNDLILPTKREIFYHKHLSNNLHLVQIKGKAKLHDIFTLQYNNTNVFIQVVDIKDDGYKVVSFFTLNDEFSLKSNLQNNFTTTNNLALHNDLNMQNNLALNNSTLHNDFTLNKTLTQNNNENLKNHSTQNNKNHNNNKDSTQNSSKVLNNTLNLQKLLALKQLKQNILSQEKVLSLLQTCGNIPLPPYMKRESTEKDSKDYQSIFAKSEGSVAAPTASLHFSESMFKYLKENYNHAFVTLHVGAGTFKPITCENILKHKIHTESCIIAKQEAQKILESKKILCVGTTAMRSVEWLIRENVAQIESDIIGENAIFLNPFNPPKKVKALLTNFHLPKSSLLMLVSSIIGREETLRIYEEAIANKYRFYSYGDGMLII

SEQ ID NO: 67271 - protein, 380 aa, Helicobacter bilis
  misc_feature (1)..(380): tr|A0A4U8UFI9|A0A4U8UFI9_9HELI S-adenosylmethionine:tRN A ribosyltransferase-isomerase OS=Helicobacter bilis OX =37372 GN=queA PE=3 SV=1
MSNDLDLSSYDFTLPNDLIATEPIKPKENAKLLIYHNGKITHTTFYELFNYIPKDYLIVLNDTRVINARLFANKLSLESLHNAHGKTQILSDLILPTKREIFYHKHISNNLHLVQIKGKAKSHDIFTLQYNNTNIFIQVVDIKDDGYKIVSFFTLKDILALKQNSPQDHAKELSQEKVFSILQTCGNIPLPPYMKREGTEKDSKDYQSIFAKSEGSVAAPTASLHFSESMFEILKENYNHAFVTLHVGAGTFKPVTCENILNHKIHTETCIIAKKEAQKILESKKILCVGTTAMRSVEWLIRENVAQIKSDIIGENAIFLNPFNPPKKVNALLTNFHLPKSSLLMLVSSIIGRKETLRIYEEAIANKYRFYSYGDGMLII

SEQ ID NO: 67272 - protein, 341 aa, Helicobacter bizzozeronii
  misc_feature (1)..(341): tr|F8KT74|F8KT74_HELBC S-adenosylmethionine:tRNA ribosy ltransferase-isomerase OS=Helicobacter bizzozeronii (st rain CIII-1) OX=1002804 GN=queA PE=3 SV=1
MSIPREFKRTSYAYDLPQHLIATHPIDPKEEAKLMVYERASNKLTHSTFKEIFDFFPKHALVVLNDTKVIKARLYGYKEQGKPVEILIHQPQGLDYMVQMRGRVRTGLVLDLGHGYCVQVQKVLENGMRLVRFIKEGEGFLEWAGVLEMLELLGHVPLPPYLKRPDESADITDYQSVFAKYPGAIAAPTASLHFSQSAKDHLLKNFKHVFITLHVGAGTFLSVQSEDIREHPMHAEFVEVSPQAGLALDEAPYILCVGTTALRATEHYKRGFGLKPCNLFLHLGNPVKHAQALLTNFHLPESTLIMLVASMVGLDKCLELYKIAIEHHYRFYSYGDGMLIL

SEQ ID NO: 67273 - protein, 308 aa, Helicobacter bizzozeronii
  misc_feature (1)..(308): tr|Q8GBB0|Q8GBB0_HELBI S-adenosylmethionine:tRNA ribosy ltransferase-isomerase (Fragment) OS=Helicobacter bizzo zeronii OX=56877 PE=3 SV=1
LMVYERASNKLTHSTFKEIFDFFPPHALVVLNDTKVIKARLFAHTAQKRPVEILLHHATSPTACLAQMRGKVRPGLVLGLEGGYSCEVLEVLDNGLRVLSFKHGGELLEWAGVLEMLELLGHVPLPPYLKRPDEAQDLQDYQSVFAKYPGAIAAPTASLHFSQSAKDHLLKNFKHVFITLHVGAGTFLSVQSEDIREHPMHAEFCRSLPQAGLTLDEAPYILCVGTTALRATEHYKRGFGLKPCELFLHLGNPVKHAQALLTNFHLPESTLIMLVASMVGLDKCLELYKIAIEHHYRFYSYGDGMLIL

SEQ ID NO: 67274 - protein, 348 aa, Helicobacter brantae
  misc_feature (1)..(348): tr|A0A3D8J4Y5|A0A3D8J4Y5_9HELI S-adenosylmethionine:tRN A ribosyltransferase-isomerase OS=Helicobacter brantae OX=375927 GN=queA PE=3 SV=1
MQDLYLQSYDYTLPQERIATYPASPRESAKLLVYDRKKDLITHSDFFHFYDFLPKDYLVILNDTKVIKARMYGNKLKEDKSLGGRVEVLYHRHLSDERFLVQIRGKVKPHTLIILDEDFSLEVVALLENGFREVRFFTQGKIATLSEVLEKFEKIGHIPLPPYIKREDERLDESEYQSVFAKNLGAVAAPTASLHFSDISYLKSHYSHCFVTLHVGAGTFLSVESEEITEHKIHTESFEVSKEAWEKIASAKHTLCIGTTSARVVEYLYQNPPKFEGEIYQGECDLFLHPLNPPKKLDSLLTNFHLPKSTLIMLVSSLVGREKCLELYSEAIKHNYRFYSYGDGMLIL

SEQ ID NO: 67275 - protein, 351 aa, Helicobacter canadensis
  misc_feature (1)..(351): tr|C5ZZ68|C5ZZ68_9HELI S-adenosylmethionine:tRNA ribosy ltransferase-isomerase OS=Helicobacter canadensis MIT 9 8-5491 OX=537970 GN=queA PE=3 SV=1
MSKMRMNELLLESYDYDLPKELIALNPIMPQENARLLVYDRKDHSITHTTFRDFAKFLPKETLLVFNDTKVIPARIYGKKLQKEALGGGKIEALFHKEIMENLYLMQLKGRLKIGNIVEFVGVFAKILKDCGMGFKEVSFFRDEKCLLPLSRQEFFDFLEQFGHIPLPPYIKREDNQEDRVNYNSVFAKNVGAIAAPTASLHFNQEAFKALQRDFESAFVTLHVGAGTFIGVSTENILEHKMHQETFVIPKESVEKIKKVSHITAIGTTATRVVEYFARTKQTQGECDLFLHPQNKPIITNALLTNFHLPKTTLLMLVASFVGLEETKRIYKQAIEEKYRFYSYGDGMLVL

SEQ ID NO: 67276 - protein, 439 aa, Helicobacter canis
  misc_feature (1)..(439): tr|V8CEC0|V8CEC0_9HELI S-adenosylmethionine:tRNA ribosy ltransferase-isomerase OS=Helicobacter canis NCTC 12740 OX=1357399 GN=HMPREF2087_01599 PE=3 SV=1
MFALSSYDYPLPKHLIATAPIYPREAAKLLVYDRAKEHITHTTFAHLLEFIPKDCIIALNNTRVLKARIYGKKLGTQTSREIFFHRFATRDDFSALASSANTLESTCASLLDSSALALCQIRGRVKLGDIFVCARFYAQVVALLDNGYRAIRFFSLKDSALGEQCGSVAKIMKGTTAKVANLPQFLQSSHSPTAKPAIAVQGVAEAGFFRNPRILEEAKGAERESIATLTPLSQEAVLAMLEEIGHIPLPPYIKRASNDNDIKDYQTLFATQAGAIAAPTASLHLSSTMLEALKEQLVYLTLHIGAGTFASVDVPDIREHTMHTESLHITAQALERLLCAKSRLCVGTSALRSVEFAARLYETHPKPYADLHAQCDIFLHLGNKPRYVDYLLTNFHLPKSTLTMLVASMVGYEQWRKIYEQAIAKEYRFYSYGDAMLIL

SEQ ID NO: 67277 - protein, 443 aa, Helicobacter canis
  misc_feature (1)..(443): tr|A0A377J7U1|A0A377J7U1_9HELI S-adenosylmethionine:tRN A ribosyltransferase-isomerase OS=Helicobacter canis OX =29419 GN=queA PE=3 SV=1
MFALSSYDYALPKHLIANAPIYPREAAKLLVYERATGHITHTTFAHLLEFIPKDCIIALNNTRVLKARIYGKKLGTQTTREIFFHRFIRADEAKSLEPPLLESTYKQALESISTHLQDPLAHSISLDSSCLDPSVLALCQIRGRVKLGDIFACGRFYAQVVGVLDNGYRITRFFLLESTFAKADSRRKVDPMDCFDKSKSRNESKNTMSEKVDSSNAKILAQSSKQKPTPTTLAPLDQAAALTMLEEIGHIPLPPYIKRQATSDDTSDYQSLFATQAGAIAAPTASLHLSASMLESLQERIAYLTLHIGAGTFASVEAKDIREHIMHTEALHITAKSLEKLLNAPSRLCVGTSTLRSVEYAARLYAHHPKPYTDLHAQCDIFLHPGNKPCYVEYLLTNFHLPKSTLTMLVASMVGYEQWREIYEQAIAREYRFYSYGDAMLIL

SEQ ID NO: 67278 - protein, 345 aa, Helicobacter cetorum
  misc_feature (1)..(345): tr|I0ELZ5|I0ELZ5_HELC0 S-adenosylmethionine:tRNA ribosy ltransferase-isomerase OS=Helicobacter cetorum (strain ATCC BAA-429 / MIT 00-7128) OX=182217 GN=queA PE=3 SV=1
MREFDLESYDYNLPKELIANYPILPKEKAKLLVYERHSQKITHTTFEHVLDFFPKNALVVLNDTKVIKARLFGAKHAFSHSRTTEVFFHRFIKDNIALTQINGKVKVGTKIFFDANTYAEVLELLDNGQRLIAFYENNNPLKEASILRLLEQYGHMPLPPYIKRADESLDLNEYQSVFAKHSGAIAAPTASLHFSKNCLETLQKNFKHTFLTLHVGAGTFVNVETKDIREHKIHTEILQISKNSQKILQESKEILCIGTTALRSVEYFKRLENPKQETFECDIFLHLANPIKHVNYLLTNFHLPKSSLLMLVSALIGLEKAKEIYSIAIEKQYRFYSYGDGMLIL

SEQ ID NO: 67279 - protein, 345 aa, Helicobacter cetorum
  misc_feature (1)..(345): tr|I0ETJ4|I0ETJ4_HELCM S-adenosylmethionine:tRNA ribosy ltransferase-isomerase OS=Helicobacter cetorum (strain ATCC BAA-540 / MIT 99-5656) OX=1163745 GN=queA PE=3 SV= 1
MREFDLESYDYNLPKELIANYPILPKEKAKLLVYERHSQKITHTTFEHVLDFFPKNALVVLNDTKVIKARIFGSKHTFSHSRTTEVFFHRFLKDNIALTQIKGKVKAGTKIFFDSNNYAEVLELLNNGQRLIAFYENKNPLKEASILRLLEQHGHMPLPPYIKRADESLDLNEYQSVFAKHSGAIAAPTASLHFSKNCLETLQKNFKHTFLTLHVGAGTFVNVETKDIREHKIHTEILQISKESQKILQEEKEILCIGTTALRSVEYFKRLEDPKQETFECDIFLHLANPIKHVNYLLTNFHLPKSSLLMLVSALIGLEKAKEIYSIAIENKYRFYSYGDGMLIL

SEQ ID NO: 67280 - protein, 353 aa, Helicobacter cholecystus
  misc_feature (1)..(353): tr|A0A3D8J029|A0A3D8J029_9HELI S-adenosylmethionine:tRN A ribosyltransferase-isomerase OS=Helicobacter cholecys tus OX=45498 GN=queA PE=3 SV=1
MSDLYLQNYDYILPPERIATFPASPRESAKLLVYLRQEDRVIHSDFFHFYDFLPKDYLVVLNNTKVIKARMFGHKILEESIGKKVKMGGKVEVLYHRYLKDVEFLVQIKGRVKVGTLISLSHNFTLEVLRLLDNGFRVVRFYDHHSLLGINEVLTRVQEIGHIPLPPYIKREDQGSDESEYQSVFAQKLGAVAAPTASLHFSDISYLKSHYEHCFLTLHVGAGTFLSVESENITHHQIHTESFEISRSSWEKICNAKHTLCVGTTSARVVEYLYRNPLEFKEEIYKGECNLFLHPLNPPQKLDALLTNFHLPKSTLIMLVSSLVGRQKCLELYDLAIKNHYRFYSYGDGMLIL

SEQ ID NO: 67281 - protein, 373 aa, Helicobacter cinaedi
  misc_feature (1)..(373): tr|I7HDB6|I7HDB6_9HELI S-adenosylmethionine:tRNA ribosy ltransferase-isomerase OS=Helicobacter cinaedi CCUG 188 18 = ATCC BAA-847 OX=537971 GN=queA PE=3 SV=1
MPHHNAHSKDSEDFLLSSYDYALPQSAIAQSPSIPRESAKLLVYERKSDKITHSDFYHFSDFIPKDTLLVFNNTKVINARIYAHKLNSQAKPNPKRMEIFFHKALDSFRFLVQIKGRVKSGDRLILESHKAFTRPIIAQVLECCEDGMRIVEFMESTKTHSSQENRILNDKEVFELFNNHGYIPLPPYIKRDEANQNLQEDSVFYQSVFAKELGSVAAPTASLHFSKQSLESLQKSFQTCFVTLHIGAGTFINVESEDIRNHAIHKEYFSISSSSAKAITHAKKVLCVGTTSARCVEYMMRYKVLCGECDIFLYPGVEFKRVDYLLTNFHLPKSTLIMLVSAMVGREKCLELYNIALEKGYKFYSYGDGILIL

SEQ ID NO: 67282 - protein, 373 aa, Helicobacter cinaedi
  misc_feature (1)..(373): tr|A0A377JVM9|A0A377JVM9_9HELI S-adenosylmethionine:tRN A ribosyltransferase-isomerase OS=Helicobacter cinaedi OX=213 GN=queA PE=3 SV=1
MPHHNAHSKDSKDFLLSSYDYTLPQSAIAQSPSNPRESAKLLVYERKSGKITHSDFYHFSDFIPKDTLLVFNNTKVINARIYAHKLNSQAKPNPKRMEIFFHKVLDSFRFLVQIKGRVKSGDRLILQSHKAFTRPIIAQVLECCENGMRIVEFMESIKTHSSQENRILNDKEVFELFNNHGYIPLPPYIKRDEANQNMQEDSVFYQSVFAKELGSVAAPTASLHFSKQSLESLQKSFQTCFVTLHIGAGTFMNVESEDIRHHAIHKEYFSISNSSAKAITHAKKVLCVGTTSARCVEYMMRYKVLCGECDIFLYPGVEFKRVDYLLTNFHLPKSTLIMLVSAMVGREKCLELYNIALEKGYKFYSYGDGILIL

SEQ ID NO: 67283 - protein, 357 aa, Helicobacter equorum
  misc_feature (1)..(357): tr|A0A3D8IS91|A0A3D8IS91_9HELI S-adenosylmethionine:tRN A ribosyltransferase-isomerase OS=Helicobacter equorum OX=361872 GN=queA PE=3 SV=1
MQEHLLPSDFSLSSYDYTLPQELIAMHPTSPRRDGKLLVYYRNSGEIRHCHFRDFSEIVPRDYTLVCNDTKVLRARLYGYKQGGENIREILFHKAYSVDSAPSFLVQIRGRVKRGTEFRICDHNHCPTNFSMRVLEVLDNGLRVVSFYDDTRNAPLHLTDLYAMLEAFGHIPLPPYMKRQDTLQDSIDYQSAFAKNEGAVAAPTASLHFSDEDFSYLKTLYDICYITLHVGAGTFANVEAQDIRTHIMHTESYAITPKAREKILGDSKLLCIGTTAARAVEYFWRVRETEGLCDLFLHPGNTPKRVDALLTNFHFPKSTLLMLVSAFVSCEEMIRIYTCAIAHKYKFFSYGDGMLIL

SEQ ID NO: 67284 - protein, 341 aa, Helicobacter felis
  misc_feature (1)..(341): tr|E7A950|E7A950_HELFC S-adenosylmethionine:tRNA ribosy ltransferase-isomerase OS=Helicobacter felis (strain AT CC 49179 / NCTC 12436 / CS1) OX=936155 GN=queA PE=3 SV= 1
MTDIPLEFSLSSYHYDLPAEYIASTPLLPPERAKLLVYKRATGRITHSTFAHVFDFFPQDALVVLNDTKVIKARLYGRKASGGKVELLIHNPHSLHHFNAQIKGRVPQGGLIELDQGYSCEVLTPPANLRQVCFYHHQHPLKWEEVLDMLELLGHMPIPPYLKRADTPTDTQTYQSVFAKHAGAIAAPTASLHFSESAKEHLLAHFQHAFLTLHVGAGTFVGVECEDIRQHPMHSEALFIPEETQRALDHAPYILCVGTTALRGVEHYKRGNVLKPCDLFLHPGNPVSHVQALLTNFHLPKSTLIMLVASMVGLEKCLELYKIAIEHHYRFYSYGDGMLIL

SEQ ID NO: 67285 - protein, 375 aa, Helicobacter fennelliae
  misc_feature (1)..(375): tr|A0A2X3BBH3|A0A2X3BBH3_9HELI S-adenosylmethionine:tRN A ribosyltransferase-isomerase OS=Helicobacter fennelli ae OX=215 GN=queA PE=3 SV=1
MYAKSSHNAPKHLNSYDLNTNDVSDFALANYDYTLPSHCIASYPANPKESAKLLIYNRLDKSIIHSDFYHLFDFIPKDSTIILNDTRVIKARIYGTKQSGGKSEILFHYFLDLANTAMSATHTIAICQVRNSAPNGTIISLSNGYVAKVIDTFRQSYKQIIFYHHDVPMHQAQVFEMLESIGQIPLPPYIKRHVEAQDSAQYQSVFAKHNGSIAAPTASLHFSKSMLASLKAHFTLSYVTLHIGAGTFFGVESSDIRNHHIHSESLFISKQNANLIYNAKKILCIGTTAMRSVECLARANHNPSQDFSVQCNLFLHPGNKPIKTDYLLTNFHLPKSTLIMLVASMIGIKECQRVYQEALKNSYRFFSYGDGMLIL

SEQ ID NO: 67286 - protein, 375 aa, Helicobacter fennelliae
  misc_feature (1)..(375): tr|T1CT73|T1CT73_9HELI S-adenosylmethionine:tRNA ribosy ltransferase-isomerase OS=Helicobacter fennelliae MRY12 -0050 OX=1325130 GN=queA PE=3 SV=1
MYAKSSHNAPKHLNSYDLNTNDVSDFALANYDYTLPSHCIASYPANPKESAKLLIYNRLDKSIIHSDFYHLFDFIPKDSTIILNDTRVIKARIYGTKQSGGKSEILFHYFLDLADTAMSATHTIAICQVRNSAPNGTIISLSNGYVAKVIDTFRQSYKQIIFYHHDVPMHQAQVFEMLESIGQIPLPPYIKRHVEAQDSAQYQSVFAKHNGSIAAPTASLHFSKSMLASLKAHFTLSYVTLHIGAGTFFGVESSDIRNHHIHSESLFISKQNANLIYNAKKILCIGTTAMRSVECLARANHNPSQDFSAQCNLFLHPGNKPIKTDYLLTNFHLPKSTLIMLVASMIGIKECQRVYQEALKNSYRFFSYGDGMLIL

SEQ ID NO: 67287 - protein, 369 aa, Helicobacter ganmani
  misc_feature (1)..(369): tr|A0A3D8ICZ6|A0A3D8ICZ6_9HELI S-adenosylmethionine:tRN A ribosyltransferase-isomerase OS=Helicobacter ganmani OX=60246 GN=queA PE=3 SV=1
MRELQLKSYDYILPKERIATYPIVPKEEAKLLVYERASDKITHTTFKDFANFLPQDTLLVFNNTKVLPARLYGTKVVQDSKNPNTKGAKIEALFHKEITPNVYLMQFKGRLKVGLLVAFEGGIFARILKDNQDSTLGAGFKEAEFFRIPQKNLQNYLQSFSKTLESPLNREEFFEFLEHFGHIPLPPYLKRQDTQADKKDYQSVFAKHLGAIAAPTASLHFSEESYKNLKQNFQNTEITLHVGAGTFVGVQSENILEHKMHKEYFFISQDSADKIYQASHITAIGTTATRVIEEFARNGKLRGECDLFLHPQNKPRKTNALLTNFHLPKTTLLMLVASFVSLDTMQRLYKEAIARNYRFYSYGDGMLIL

SEQ ID NO: 67288 - protein, 342 aa, Helicobacter heilmannii
  misc_feature (1)..(342): tr|A0A0K2XPU9|A0A0K2XPU9_HELHE S-adenosylmethionine:tRN A ribosyltransferase-isomerase OS=Helicobacter heilmann ii OX=35817 GN=queA PE=3 SV=1
MPNVPKEFQRASYRYDLPQHLIATHPISPKENAKLMVYERASGRITHATFKEVFSFFPRDALVVLNDTKVMKARLFANTPNKRQVEILLHHALSPTACLAQMRGRVRPGLILELDQGYSCEVLEVRQDGLRVLAFKHEGRILEWAKVLHMLEYLGHMPIPPYLKRPDTSQDTQDYQSVFAKNLGAIAAPTASLHFSESAKNYLLRNFQHVFITLHVGAGTFLSVESKDIREHPMHTEFVEVSFKAGKALDEAHYILCVGTTALRATEHYKRGFGSKPCNLFLHPGNPVKHASALLTNFHLPESTLIMLVASMVGLDKCLELYKIAIEHHYRFYSYGDGMLIL

SEQ ID NO: 67289 - protein, 342 aa, Helicobacter heilmannii
  misc_feature (1)..(342): tr|A0A0K2XNZ3|A0A0K2XNZ3_HELHE S-adenosylmethionine:tRN A ribosyltransferase-isomerase OS=Helicobacter heilmann ii OX=35817 GN=queA PE=3 SV=1
MPSIPKEFNRTSYAYDLPEHLIATHPIQPKESAKLMVYERSSNKLTHATFQEIFDFFPKHALVVLNDTKVMKARLFANTPNKRQVEILLHHALSPTACLAQMRGRVRPGLILELDQGYSCEVLEVRQDGLRVLAFKHEGRILEWAKVLHMLEYLGHMPIPPYLKRPDTSQDTQDYQSVFAKNLGAIAAPTASLHFSESAKNYLLRNFQHVFITLHVGAGTFLSVESKDIREHPMHTEFVEVSFKAGKALDEAHYILCVGTTALRATEHYKRGFGSKPCNLFLHPGNPVKHASALLTNFHLPESTLIMLVASMVGLDKCLELYKIAIEHHYRFYSYGDGMLIL

SEQ ID NO: 67290 - protein, 365 aa, Helicobacter hepaticus
  misc_feature (1)..(365): sp|Q7VG37|QUEA_HELHP S-adenosylmethionine:tRNA ribosylt ransferase-isomerase OS=Helicobacter hepaticus (strain ATCC 51449 / 3B1) OX=235279 GN=queA PE=3 SV=1
MTYFDPKIQESDFALSSYDYTLPFSAIAQNPANPRERAKLLIYQRDSGRIIHSDFYHFCDFVPKDTLLVFNDTRVIKARIYAHKLDCNTQKLSDKTFEIFYHKPLQSTSSAIPLFLVQIKGRVKCGDKLLINTDSTNPFLIAQVQECLDNGLRVVSFMQNEHALEYIQVLDMLEKYGHTPLPPYIKREDSCQDAHFYQSVFSKQLGSIAAPTASLHFSKESIESIKAQFETCFLTLHIGAGTFMNVESADIRHHLIHKEFFSLSPQSAAAIQNAHKVLCIGTTSARCVEYYARYKILQGECDIFLYPSKSFKRVDYLLTNFHLPKSTLMMLVSAMVGREKCLELYKLALEKGYRFYSYGDGMLIL

SEQ ID NO: 67291 - protein, 376 aa, Helicobacter jaachi
  misc_feature (1)..(376): tr|A0A4U8T7G1|A0A4U8T7G1_9HELI S-adenosylmethionine:tRN A ribosyltransferase-isomerase OS=Helicobacter jaachi O X=1677920 GN=queA PE=3 SV=1
MSQIYDDFVLDNYNYTLPPHAIAQSPSVPRESAKLLVYERKSGKITHSNFYHFSDFVPKDTLLVFNDTKVLKARIYAHKLTHNAPSQKQYEIFFHKPIIESSSPQEATSYLVQIKGRIKCGDRLMLTRSLDSMDIDSINIESAKVDSIIAIVQACYDNGMREVIFTQNTLPLTYPQVLCMLNDYGHIPLPPYIKRDKKAYNAQDAAFYQSIFAKSIGSIAAPTASLHFGEQSMEALKKHFETCFITLHIGAGTFKSVDCPDIRQYNIHTESFSLSPQSAKAIDNARKVLCIGTTSARCVEYYAKYKILQGECDIFLYPSINLRRVDYLLTNFHLPKSSLIMLVSAMIGRKECLRLYEIALQEGYKFYSYGDGMLIL

SEQ ID NO: 67292 - protein, 363 aa, Helicobacter japonicus
  misc_feature (1)..(363): tr|A0A4U8TRU9|A0A4U8TRU9_9HELI S-adenosylmethionine:tRN A ribosyltransferase-isomerase OS=Helicobacter japonicu s OX=425400 GN=queA PE=3 SV=1
MSQYSLISNDFLLESYDYTLPQNAIAQNPANPRESAKLLVYERQSGRITHSNFYHFCDFIPQGTLIVLNDTKVIQARIYAHKINSLTQGLSQKHYEIFFHKPLDSINQSTLFLAQIKGRVKKGDRLIIADSISTQASIIVEIKECLTNGLRIVKFIQNNQDLNYPLVLNMLEKYGHIPLPPYIKRNDEKSDVLFYQSVFANHLGSIAAPTASLHFSEKSLESMRKHFELCFITLHVGAGTFMSVESADIRHHNIHTESYSLSIESAKALQKANKVLCVGTTSARCVEHYMRHKALNGECDIFLYPSVKFERVDYLLTNFHLPKSTLLMLVSAMIGREKCLELYQLALQQGYRFYSYGDGMLIL

SEQ ID NO: 67293 - protein, 411 aa, Helicobacter macacae
  misc_feature (1)..(411): tr|V8C984|V8C984_9HELI S-adenosylmethionine:tRNA ribosy ltransferase-isomerase OS=Helicobacter macacae MIT 99-5 501 OX=1357400 GN=queA PE=3 SV=1
MDSYALQSYEYDLPSELIASYPASPRESARLLIYERASKKITHSSFKNLFKFIPPSTTIILNDTRVLKARIYGTRLGKITAQNPLSKNDKANNKSQNQSSGGKREILFHRFISKDEVLQEISQDKNLAEILSQSKVDFCSLCQTKGKLKNGDIIALEKGYEARVLATLPSGYKVIAFFYRQRQCAQYEIIKMLETIGHIPLPPYIKREDSSLDESEYQTVFATQNGSIAAPTASLHFSKSMLKELYLRFPTATLTLHIGAGTFAPVVSEDIRLHNMHKEWLSIPPKTQKAIKNASKILCVGSSSMRSVECYARALTKLKTTQKSQHLSSDFTNDFTSEVASDFQTQCDIFLHPQNPPIKTDFLLTNFHLPKSTLIMLVASMVGLDEWRKIYNEAIAQKYRFYSYGDAMLIL

SEQ ID NO: 67294 - protein, 373 aa, Helicobacter magdeburgensis
  misc_feature (1)..(373): tr|A0A4U8SYI6|A0A4U8SYI6_9HELI S-adenosylmethionine:tRN A ribosyltransferase-isomerase OS=Helicobacter magdebur gensis OX=471858 GN=queA PE=3 SV=1
MPHHNAHSKDSKDFLLSSYDYALPQSAIAQSPSNPRESAKLLVYERKSGKITHSDFYHFSDFIPKDTLLVFNNTKVINARIYAHKLNPQAKPNPKRMEIFFHKVLDSFRFLVQIKGRVKSGDRLILQSHKAFTCPIIAQVLECCENGMRIVEFMESIKTHSSQENRILNDKEVFELFNNHGYIPLPPYIKRDEANQNMQEDSVFYQSVFAKELGSVAAPTASLHFSKQSLESLQKSFQTCFVTLHIGAGTFMNVESEDIRHHTIHKEYFSISNSSAKAITHAKKVLCVGTTSARCVEYMMRYKVLCGECDIFLYPGVEFKRVDYLLTNFHLPKSTLIMLVSAMVGREKCLELYNIALEKGYKFYSYGDGILIL

SEQ ID NO: 67295 - protein, 350 aa, Helicobacter marmotae
  misc_feature (1)..(350): tr|A0A3D8I9H1|A0A3D8I9H1_9HELI S-adenosylmethionine:tRN A ribosyltransferase-isomerase OS=Helicobacter marmotae OX=152490 GN=queA PE=3 SV=1
MKHKYMEYDFMLDGYNYTLPSSAIANHPANPRESAKLLVYERESGRITHSDFYHFCDFIPKETLVVLNNTKVIKARLYAHKLTNLQKSQKLYEIFFHKMLEDSLYLVQIRGRVKNGDRFILGDDICIELKECVDGGMRKVCFIKEGKLLKGEDVLEVLEHYGHMPIPPYIKRPSMESDTYFYQSVFAKNAGSVAAPTASLHFSTQSLEMLEQHFQTCFVTLHIGAGTFIGVEKPDIRDHIIHTESYSLSPQSAQSIEQAKKVLCIGSTSARCVEYYMRHKTLSGECDIFLYPGVALKRVDYLLTNFHLPKSTLLMLVSAMIGREKCLELYELALKENYRFYSYGDGMLIL

SEQ ID NO: 67296 - protein, 432 aa, Helicobacter muridarum
  misc_feature (1)..(432): tr|A0A377PUH5|A0A377PUH5_9HELI S-adenosylmethionine:tRN A ribosyltransferase-isomerase OS=Helicobacter muridaru m OX=216 GN=queA PE=3 SV=1
MIAYNKDYRDLFLDSYSFSLPQNLIATSPKYPKESAKLLVYYKDTGEIIHTTFASLFDFIPRDYLIVLNNTKVIPARFYASKLDKPISYDTSISISYLHNKVREFLYHKPLGELRHLVQIRGRVRQNDFFMASDLKTLVRVIRVLDYGYKEVLFYDILSISSATKHGNLEFTESNIYSISPMSDFQVIAFLRECGKVPIPPYIKREANIKDAVDYQSIFASIDGSVAAPTASLHFSESMFAFLKENFHYTFVTLHIGAGTFAPIKTNSILEHRIHSEYCSIADSSAIKIAKHNKILCVGTTALRCIEWFARTSAYEQGFDLEANLNNKCLHNDKSINIGISKDRLVLSKNIEDKQGQDRQIGVLCGENSLFLHPFNPPRLANALLTNFHLPKSSLLLLVSSLIGREEVLRVYDNAIRSRYRFYSYGDGMLII

SEQ ID NO: 67297 - protein, 342 aa, Helicobacter mustelae
  misc_feature (1)..(342): tr|D3UFV3|D3UFV3_HELM1 S-adenosylmethionine:tRNA ribosy ltransferase-isomerase OS=Helicobacter mustelae (strain ATCC 43772 / LMG 18044 / NCTC 12198 / 12198) OX=679897 GN=queA PE=3 SV=1
MREFSLQSYDYALPQELIAKYPLERKEDARLLVYDRKSGGITHTHFDALFDFIPRDFTLVFNDTKVIKARIFGEKGSGGKIELLYHKSLPDGALVQIRGRVKVGEHIHFPHGYSAKVCALLDHGMRIVEFLYHGRPIRDLAPLFESIGHIPLPPYLKRADESADEQEYQSVFATHHGAIAAPTASLHFSPRMRDFALQHYPHAFVTLHVGAGTFLGVESEDIRGHEIHSEELWVSAANLSLIEGAKKILCIGTTALRSVEFLSQRDLLRQEGDYVGDCDIFLHCGNPPKKASALLTNFHLPKSSLIMLVASMVGLDTCKNLYAEAIAKKYRFYSYGDGMLIL

SEQ ID NO: 67298 - protein, 402 aa, Helicobacter pametensis
  misc_feature (1)..(402): tr|A0A3P6LFS9|A0A3P6LFS9_9HELI S-adenosylmethionine:tRN A ribosyltransferase-isomerase OS=Helicobacter pametens is OX=95149 GN=queA PE=3 SV=1
MKEEQNRAGRERRFKNIGLKLLPIFQVAFASMRLPENANPNTQAKRLYNARFSPTAYCAMQLADFDFHLPEHLIAQQPPEQRGSSRLLDARPDRSLCDRLFAELPNLLEVGDLLVFNNTRVMKARLFGHKASGGRIEALIERVLDEHCALAHIRSSKSPKPGSLLEFDGSIQAQMEEREGELFKLRFSGSLNVYQILEQTGRLPLPPYIERAADAADDERYQTVYAKHQGAVAAPTAGLHFTPELLAGLQAKGIRRAEVTLHVGAGTFQPVRSENIAEHKMHKEWYSIPAKTVAAIAETKATSKRVWAVGTTSMRSLEAAAQNGCLQAGEGDTDIFITPGYRFQVADGLITNFHLPKSTLLMLVSAFSGVEHIRAAYRHAIEQQYRFFSYGDAMLLTRAEVS

SEQ ID NO: 67299 - protein, 347 aa, Helicobacter pullorum
  misc_feature (1)..(347): tr|A0A0N1ECJ5|A0A0N1ECJ5_9HELI S-adenosylmethionine:tRN A ribosyltransferase-isomerase OS=Helicobacter pullorum OX=35818 GN=queA PE=3 SV=1
MNELLSTSYDYELPKELIATQPIIPKEDAKLLVYNRKDRSIIHSTFRDFMQFLPKETLLVFNDTKVIPARIYGVKIFQNAQQEGGKIEALFHKEISENLYLMQFRGRLKEGSRVKFEGGIFAKIIKDCGMGFKEASFFRIDDESPLDKQEFFGFLDSCGHTPLPPYIKREASQQDREEYNSVFAKNLGAIAAPTASLHFSQESFQQLQREFNNAFVTLHVGAGTFLGVSVENILEHKMHKESFIIPQESIQKIQEATHITAIGTTAARTIEYFARTKQAQGECDLFLHLQNKPILTDALLTNFHLPKTTLLMLVASFMGLEETKRIYQEAIKKKYRFYSYGDGMLVL

SEQ ID NO: 67300 - protein, 347 aa, Helicobacter pullorum
  misc_feature (1)..(347): tr|A0A377Q3N1|A0A377Q3N1_9HELI S-adenosylmethionine:tRN A ribosyltransferase-isomerase OS=Helicobacter pullorum OX=35818 GN=queA PE=3 SV=1
MNELLSTSYDYELPKELIATQPITPKEDAKLLVYNRKDRSIIHSTFRDFKQFLPKETLLVFNDTKVIPARIYGVKIFQNTQQEGGKIEALFHKEIGENLYLMQFRGRLKEGSRVKFEGGIFAKIIKDCGMGFKEASFFKIDDESPLDKQEFFGFLDSCGHTPLPPYIKREASQQDREEYNSVFAKNLGAIAAPTASLHFSQESFQQLQREFNNAFVTLHVGAGTFLGVSVENILEHKMHKESFIIPQESIQKIQEATHITAIGTTAARTIEYFARTKQAQGECDLFLHLQNKPILTDALLTNFHLPKTTLLMLVASFVGLEETKRIYQEAIKKKYRFYSYGDGMLVL

SEQ ID NO: 67301 - protein, 345 aa, Helicobacter pylori
  misc_feature (1)..(345): sp|O25702|QUEA_HELPY S-adenosylmethionine:tRNA ribosylt ransferase-isomerase OS=Helicobacter pylori (strain ATC C 700392 / 26695) OX=85962 GN=queA PE=3 SV=1
MKEFDLESYDYYLPKELIASYPVLPKEKAKLLVYERRSQKITHTTFEHVLDFFPKNALIVLNDTKVIKARLFGSKHAFLPSKTTEVFFHRFFKNNTALTQIKGKIKVGDKIFFDANYHAEVLELLHNGQRLIAFYDNKTPLNQENILKLLEQYGHMPLPPYIKRADESLDAHEYQSVFAKHMGAVAAPTASLHFSQNTLEKLLKDFKHAFLTLHVGAGTFLSVETKDIREHQIHTEVLRIPKKSQEILQKSQEILCVGTTALRSVEYFKRLENPNQEAFECDIFLHFANPILHVNYLLTNFHLPKSSLLMLVSTMIGLEKTKEIYKTAIEKKYRFYSYGDGMLIL

SEQ ID NO: 67302 - protein, 345 aa, Helicobacter pylori
  misc_feature (1)..(345): tr|J0NA56|J0NA56_HELPX S-adenosylmethionine:tRNA ribosy ltransferase-isomerase OS=Helicobacter pylori Hp H-6 OX =992061 GN=queA PE=3 SV=1
MKEFDLESYDYHLPKELIANYPVLPKERAKLLVYERRSQTITHTTFEHVLDFFPKNALVVLNDTKVIKARLFGSKHAFLPSKTTEVFFHRFFKGNTALTQIKGKIKAGDKIFFDANYYAEVLELLHNSQRLIAFYDNQTPLNQENILKLLEQYGHMPLPPYIKRADESLDAHEYQSVFAKHIGAVAAPTASLHFSQNTLEKLLKDFKHAFLTLHVGAGTFLGVETKDIREHQIHTEVLRIPKKSQEILQESQEILCIGTTALRSVEYFKRLKNPNQESFECDIFLHLANPIQHVNHLLTNFHLPKSSLLMLVSAMIGLEKTKEIYKIAIEKKYRFYSYGDGMLIL

SEQ ID NO: 67303 - protein, 436 aa, Helicobacter saguini
  misc_feature (1)..(436): tr|A0A347VS94|A0A347VS94_9HELI S-adenosylmethionine:tRN A ribosyltransferase-isomerase OS=Helicobacter saguini OX=1548018 GN=DCO59_09325 PE=3 SV=1
MQDSINIDSKDCLLESYDFILPSHLIAFEPCNPKENAKLLVYKNGEIIHTTFKHFFDFVPRDYLIVLNDTRVIKARIFGEKILNLDSIKSYENTNFENFKVTCDLESNATFHKKSREIFYHKALDSNNHLVQIKGRVKENDIFKLDSNIFMCVVKLRNDGFREVVFFKIIESSKLYSIKNSKNNNFIESSTINSKIPNFLESKFGENIQILNQSEIFSLLENKGKIPLPPYIKRESTKRDCKDYQSLFAKVNGSVAAPTASLHFSREMLGFLESNFNVAYVTLHVGAGTFKPVETADITTHKMHEEYCEISLKNAKKILNTQKILCVGSTAMRSVEWLNDNILKSSKNTNLENFKVSPDSKDFIESKLIGQNSIFLHPQNKPKKVNALLTNFHLPKSSLIMLVSSLIGRENTLKLYHEAILHNYKFYSYGDCMLII

SEQ ID NO: 67304 - protein, 342 aa, Helicobacter sp.
  misc_feature (1)..(342): tr|A0A553UL06|A0A553UL06_9HELI S-adenosylmethionine:tRN A ribosyltransferase-isomerase OS=Helicobacter sp. L8b OX=2593541 GN=queA PE=3 SV=1
MPVPREFLRTSYTYHLPPHLIATHPISPKEEAKLMVYERTSDKLTHTTFKEIFNFFPPNALVVLNDTKVIKARLYGYKEQGKPVEILIHQPQGLLDCMVQMRGRVRAGLVLDLRHGYCVQVQKVLENGMRLVRFIKEREGFLEWAGVLEMLELLGHVPLPPYLKRSDEVQDLQDYQSVFAKYPGAIAAPTASLHFSQSAKNHLLKNFRHVFITLHVGAGTFLSVQSEDIRQHPMHAEFVQVSPQAGEALDNAPYILCVGTTALRATEHYKRGFGLEPCNLFLHPGNPVRHAQALLTNFHLPESTLIMLVASMVGLDKCLELYKIAIEHHYRFYSYGDGMLIL

SEQ ID NO: 67305 - protein, 378 aa, Helicobacter sp.
  misc_feature (1)..(378): tr|A0A4U8SIQ9|A0A4U8SIQ9_9HELI S-adenosylmethionine:tRN A ribosyltransferase-isomerase OS=Helicobacter sp. MIT 03-1616 OX=1548148 GN=queA PE=3 SV=1
MSYNPSDFLLSNYDYNLPQNAIAQNPANPRENAKLLVYERSSGRIIHSDFYHFCDFVPQDTLIVMNDTKVLKARIYAHKLDSNTQSLSQKKYEIFFHKALDCVNPTNHPASATRFLAQIKGRVKIGSRLVLSSESKADNANISHTQHSANPPIIAEVKECLRNGLRVVCFMQGEKILSYLDVLSMLEVCGHIPLPPYIKRDDSLSDETFYQSVFAHNLGSIAAPTASLHFSERSLESLQNCFETCFITLHIGAGTFMSVESDDIRQHEIHTETYSLEKNCANAIENARKVLCVGTTSARCVEHYMRCKSLSGECDMFLYPSVEFKRVDYLLTNFHLPKSTLLMLVSAMIGREKCLELYTLALSKGYRFYSYGDGMLIL

SEQ ID NO: 67306 - protein, 341 aa, Helicobacter suis
  misc_feature (1)..(341): tr|A0A510HCN4|A0A510HCN4_9HELI S-adenosylmethionine:tRN A ribosyltransferase-isomerase OS=Helicobacter suis OX= 104628 GN=queA PE=3 SV=1
MSIPKEFLRASYTYHLPKHLIASHPIKPKEEAKLMIYERARNRLTHTTFAHIFEFFPKNALIVLNDTKVIKARLFGRKKSGHLVEILIHHPKDNFCLVQIRGKVHVGLILQLDHGYFCQVLEVLSNGMRLVGFFKESGHFLEWVEVLDMLEILGHMPIPPYLKRADEIKDLQDYQSVFAKNLGAIAAPTASLHFSESTKAYLLSHFKHAFLTLHVGAGTFLGVECEDIREHGMHSEFVDIPLITQQALDHAPCILCIGTTALRAVEHYKRGFKTPHCDLFLHAGNPVKHVQALLTNFHLPQSTLIMLVASMLGLDKCLELYKQAIKHHYRFYSYGDGMLIL

SEQ ID NO: 67307 - protein, 349 aa, Helicobacter suis
  misc_feature (1)..(349): tr|E7G2Y9|E7G2Y9_9HELI S-adenosylmethionine:tRNA ribosy ltransferase-isomerase OS=Helicobacter suis HS5 OX=7103 94 GN=queA PE=3 SV=1
MLPPKKKKMSIPKEFLRASYTYHLPKHLIASHPIKPKEEAKLMIYERARNRLTHTTFAHIFEFFPKNALIVLNDTKVIKARLFGRKKSGHLVEILIHHPKDNFCLVQIRGKVHVGLILQLDHGYFCQVLEVLSNGMRLVGFFKESGHFLEWVEVLDMLEILGHMPIPPYLKRADEIKDLQDYQSVFAKNLGAIAAPTASLHFSESTKAYLLSHFKHAFLTLHVGAGTFLGVECEDIREHGMHSEFVDIPLITQQALDHAPCILCIGTTALRAVEHYKRGFKTPHCNLFLHAGNPVKHVQALLTNFHLPQSTLIMLVASMLGLDKCLELYKQAIKHHYRFYSYGDGMLIL

SEQ ID NO: 67308 - protein, 388 aa, Helicobacter trogontum
  misc_feature (1)..(388): tr|A0A4U8TDE2|A0A4U8TDE2_9HELI S-adenosylmethionine:tRN A ribosyltransferase-isomerase OS=Helicobacter trogontu m OX=50960 GN=queA PE=3 SV=1
MCDDLDLLGYDFVLPNNLIATTPIIPKENARLLIYHDGKITHTTFHRLFDYIPQDYLIVLNDTKVINAQLFVNKLSLESLHKTRPHEMQTLQDYILPTKREIFYHKWLSNNLHLVQIKGKAKLYDIFVLRWNNIDVFIQVLDIKNDGYKLVSFFTLHDIAAVREIALCKSHTDIFSHVDILSQSQVLSVLQACGNIPLPPYMKRTSTEKDSKDYQSIFARHDGSVAAPTASLHFSESMFKVLKEKYDHAFVTLHVGAGTFKPVTSQNILNHKIHSESCLIKEQEVKKILNAEKLLCVGTTSMRSVEWLIREDLTQLNGDIMGENTIFLHPLNPPKKVHALLTNFHLPKSSLLMLVSSMIGRKETLRIYQEVIENKYRFYSYGDGMLII

SEQ ID NO: 67309 - protein, 388 aa, Helicobacter trogontum
  misc_feature (1)..(388): tr|A0A4U8SDJ3|A0A4U8SDJ3_9HELI S-adenosylmethionine:tRN A ribosyltransferase-isomerase OS=Helicobacter trogontu m OX=50960 GN=queA PE=3 SV=1
MCDDLDLLGYDFVLPNNLIATTPITPKENARLLIYHDGKITHTTFHKLFDYIPQDYLIVLNDTKVINARLFVNKLSLESLHKTRPHEMQTLQDYILPTKREIFYHKWLSNNLHLVQIKGKAKLYDIFVLRWNNIDIFIQVLDIKNDGYKLVSFFTLHDIAAVREIALCKSHTDIFSHVDVLSQSQVLSVLQACGNIPLPPYMKRTSTEKDSKDYQSIFARHDGSVAAPTASLHFSESMFKVLKEKYDHAFVTLHVGAGTFKPVTSQNILNHKIHSESCLIKEQEVKKILNAKKLLCVGTTSMRSVEWLIREDLTQLNGDIMGENTIFLHPLNPPKKVHALLTNFHLPKSSLLMLVSSMIGRKETLRIYQEAIENKYRFYSYGDGMLII

SEQ ID NO: 67310 - protein, 378 aa, Helicobacter typhlonius; identical to SEQ ID NO: 67305
  misc_feature (1)..(378): tr|A0A0S4PYZ1|A0A0S4PYZ1_9HELI S-adenosylmethionine:tRN A ribosyltransferase-isomerase OS=Helicobacter typhloni us OX=76936 GN=queA PE=3 SV=1

SEQ ID NO: 67311 - protein, 343 aa, Helicobacter valdiviensis
  misc_feature (1)..(343): tr|A0A2W6NIH0|A0A2W6NIH0_9HELI S-adenosylmethionine:tRN A ribosyltransferase-isomerase OS=Helicobacter valdivie nsis OX=1458358 GN=queA PE=3 SV=1
MNELTLSAYDYHLPSHLIASKPLKNKEDSKLLVYNRQDRSIIHSTFLEFAKFLPKNTLIVFNDTKVIPARIYGSKIHENLQEGAKIEGLFHKILGENLYLFQFRGRLKEGNRVDFYGITCKILKDLEMGFKEVGFFKNNKALNLEEFLKFLEEFGHIPLPPYLKREDTKEDREDYQSVFAKNIGAIAAPTASLHFSEESYKYLKENFQTTFVTLHVGAGTFLPVSVENILEHKMHKESYEINKNTQEMLEKAEHITAIGTTATRTIEFYARTKQESGECDLFLHPKNPPLKTHALLTNFHLPKSTLLMLVASFVGLEEMQRIYQEAILKEYRFYSYGDGMLIL

SEQ ID NO: 67312 - protein, 361 aa, Helicobacter winghamensis
  misc_feature (1)..(361): tr|A0A2N3PIZ3|A0A2N3PIZ3_9HELI S-adenosylmethionine:tRN A ribosyltransferase-isomerase OS=Helicobacter winghame nsis OX=157268 GN=queA PE=3 SV=1
MNILSLSSYNYTLPKECIATEPITPKEAAKLLVFNRKDCSITHSTFRNFANFLPKDTLLVFNNTKVLPARIYGKKILQNLKNDSNLCGAKIEALFHKEISENRYLMQFKGRLKAGSIISFGSVYARILGNLANIGIGFKEAEFFILKENKEIPLSRDAFFAFLEHSGHIPLPPYIKRDDTQADKQDYQSVFAKHLGAIAAPTASLHFSKEAYKYLKEHFSTTEITLHTGAGTFLGVNTENILEHKMHTESFFIPQDSAKKMKVASHITAIGTTAARTIETYARSEAFKEGKALSGECDLFLHPQNPPKATSALLTNFHLPKTTLLMLVASFIGLEQTLKLYQEAIAKNYRFYSYGDGMLIL

SEQ ID NO: 67313 - protein, 342 aa, Helicobacteraceae bacterium
  misc_feature (1)..(342): tr|A0A1J5F708|A0A1J5F708_9HELI S-adenosylmethionine:tRN A ribosyltransferase-isomerase OS=Helicobacteraceae bac terium CG2_30_36_10 OX=1805215 GN=queA PE=3 SV=1
MSNPELLTSSYDFHLPQELIATHPASPRDHARLLVYDRTTQQITHANFYEFEKFIPKECALIFNDTKVIKARLFGKKHSGGKLELLINRALNANDVNVYIRGKVKVGSEIFFDENLVAVVKELHDDGSRIVNFWACGNSLRFEEILPIIDRIGHVPLPPYIQREDNKEDESEYQSVFALNEGAVAAPTASLHFTPEQHKKVCKKFAHAYVTLHVGSGTFKPVEAETITDHPMHSEYYDISPKAKELLDSGRAILSVGTTSTRTIEFYARNRHATSGEANLFLHPNNKPLRVNHLLTNFHLPKSTLLMLVASFVGVEKAQELYAEAIKNRYRFYSYGDAMLIL

SEQ ID NO: 67314 - protein, 340 aa, Helicobacteraceae bacterium
  misc_feature (1)..(340): tr|A0A1W9PPN9|A0A1W9PPN9_9HELI S-adenosylmethionine:tRN A ribosyltransferase-isomerase OS=Helicobacteraceae bac terium 4484_230 OX=1968531 GN=queA PE=3 SV=1
MQNPLKTSSYDFILPQELIATHPAEPRENARLLVYRRDTDTIIHARFYEIEKFLPENSAVIFNDTKVIKARLFGKKESGGKIELLINRMLDACRINVYIRGKVKVGTKLFFDEDLAAAVTALHDDGSRDVNFFRHEKMLRFEELLPIVDKIGHTPLPPYIQREDNKEDEADYQSVFAKKEGAVAAPTASLHFSDTLFRQICEKHDNAYVTLHVGAGTFKPVESEIITDHPMHSEYYSVSPEAEEIINGKQPLLCVGTTSTRTVEYYVRTKKLSGEANLFLHPGNPPQRVNYLLTNFHLPKSTLLMLVASFAGLETTHRLYEEAIKEKYRFYSYGDAMLIV

SEQ ID NO: 67315 - protein, 344 aa, Heliobacterium modesticaldum
  misc_feature (1)..(344): sp|B0TF76|QUEA_HELMI S-adenosylmethionine:tRNA ribosylt ransferase-isomerase OS=Heliobacterium modesticaldum (s train ATCC 51547 / Ice1) OX=498761 GN=queA PE=3 SV=1
MEVALYDYELPKEAIAQTPVEPRDASRLMVLERRTGAVDHRIFRDLVHILHPGDLLVVNRTRVIPARLFGKKRDSDVTVEIVLLTPMGDDRWEVLVRPGRRLKPGVFVDLGEGRLAAEIVETTDFGGRVVRFHYSGDFDTLIDEIGQMPLPPYIETALPRQEAERYQTVYSQERGSAAAPTAGLHFTPQLLEDLKKRGIEITSVLLHVGLGTFRPVQVDRIEEHKMHSEFFQVDPEAARAIAKAKQEGRRVIAVGTTVARTLETAAGLHNGTVAAGSGWTDIFIYPGYTFQCIDGLITNFHLPRSTLLMLVSAFAGREQVLAAYREALEKGYRFFSFGDAMLII

SEQ ID NO: 67316 - protein, 344 aa, Heliophilum fasciatum
  misc_feature (1)..(344): tr|A0A4R2RYY2|A0A4R2RYY2_9FIRM S-adenosylmethionine:tRN A ribosyltransferase-isomerase OS=Heliophilum fasciatum OX=35700 GN=queA PE=3 SV=1
MEVALFDYHLPPEAIAQYPIEPRDASKLMILDRRDGTVEHKQFRDLLEELQRGDVLVLNRSRVLPARLYGQKAGTDVAVEMVLLTPQGNDCWDVLVRPGRRLKPGSTIIFADGRLHADVIGTTAFGGRRVKLRYAGDLAPLLDEIGQMPLPPYIVQALPPEQAERYQTVYARERGSAAAPTAGLHFTPELLEALAARGVEITSVLLHVGLGTFRPVQAERIDEHVMHAEFYQIEADAAERINRARQEGRRVIAVGTTVTRTLETVASQHSGKIIAASGWTDIFIYPGYTFQAIDGLITNFHLPKSTLLMLISALAGREAVLNAYQQAIAADYRFFSFGDAMFIR

SEQ ID NO: 67317 - protein, 350 aa, Henriciella algicola
  misc_feature (1)..(350): tr|A0A399RE17|A0A399RE17_9RHOB S-adenosylmethionine:tRN A ribosyltransferase-isomerase OS=Henriciella algicola OX=1608422 GN=queA PE=3 SV=1
MDLSAFAFELPEELIALRPVEPQDAARLLVVHGDGRLEDAGVRDLPRYLSAGDTLVFNDTRVIPAALKGVRPARDETGADVNVDANLVERVSPDTWRALARPGKRLKPGDTIAFGEGFEATVREKGDGADLLLVFNRAGDALDEALDAFGAMPLPPYIARRRAADAKDRETYQTSFAGEEAQSVAAPTAGLHFTPRLREEIAAAGIKSEWVRLHVGLGTFSPLQESQLESGRLHEEWRRVSPEVAEKLNAVRAKGGRVVPVGTTALRTLESSVEGGTIVPTLGPTDIFLKPGDRLQATDALVTNFHLPESSLFMLVCALMGTDIMQAAYAHAIKEGYRFYSYGDACLLRP

SEQ ID NO: 67318 - protein, 350 aa, Henriciella barbarensis
  misc_feature (1)..(350): tr|A0A399QND7|A0A399QND7_9RHOB S-adenosylmethionine:tRN A ribosyltransferase-isomerase OS=Henriciella barbarens is OX=86342 GN=queA PE=3 SV=1
MDLSAFAFELPDELIALRPVEPQDSARLLVVHGDGRLEDAGIRHLPRYLTSGDTLVFNDTRVIPAALKGVRPARDAAGTDVNIDANLVERVSPDTWRALARPGKRLRLGDAIAFGENFEAIITEKGQGADLLLQFNRAGEALDEALDAFGAMPLPPYIARRRSADAKDRETYQTSFAGEEAQSVAAPTAGLHFTPRLRDEITASGIASEWVRLHVGLGTFSPLQESQLESGRLHEEWRRVSPEVADRLNKVRAAGRRVVPVGTTALRTLESSVEDGKIVPTLGPTDIFLKPGDRLQATDALVTNFHLPESSLFMLVCALMGTEVMQAAYAHAVKEKYRFYSYGDACLLLP

SEQ ID NO: 67319 - protein, 350 aa, Henriciella sp.
  misc_feature (1)..(350): tr|A0A399RED3|A0A399RED3_9RHOB S-adenosylmethionine:tRN A ribosyltransferase-isomerase OS=Henriciella sp. JN25 OX=2305466 GN=queA PE=3 SV=1
MDLTAYAFDLPEALIALRPAEPQDAARLLVVHGDGRLEDAGVRDLPRYLAAGDTLVFNDTRVIPAALKGTRLARDSSGSDIAVDANLVERAGPSEWRALARPGKRLKPGDRIIFGEGFEAALTSKAETGEITLDFNVEGEALDLALDAFGAMPLPPYIARRRAADGKDRETYQTSFAGEDAQSVAAPTAGLHFTPRLREELAAVGILNETVRLHVGLGTFSPLKESQLESGKLHEEWRRVSPEVAERLNAVREAGKRIVPVGTTALRTLESSVAGGLIVPTVGPTDIFLKPGDRLQATDALVTNFHLPESSLFMLVCALMGTDVMQAAYAHAIRQEYRFYSYGDACLLLP

SEQ ID NO: 67320 - protein, 350 aa, Henriciella sp.
  misc_feature (1)..(350): tr|A0A2E6L5L1|A0A2E6L5L1_9RHOB S-adenosylmethionine:tRN A ribosyltransferase-isomerase OS=Henriciella sp. OX=19 68823 GN=queA PE=3 SV=1
MDLSAFAFDLPEELIALRPVEPQDAARLLVVHGDGRLEDAGVRDLPRYLSAGDTLIFNDTRVIPAALKGVRPARDEAGSDVPVDANLVERLAPETWRALARPGKRLKPGDMIRFGEGFEAIVAEKGDGADLLLTFNRSGDALDEALDAFGAMPLPPYIARRRAADARDRETYQTSFAGDEAQSVAAPTAGLHFTPRLREEIAAAGIGTEWVRLHVGLGTFSPLQESQLESGRLHEEWRRVSPEVAERLNGVRAGGRRLVPVGTTALRTLESSVEGGQIVSTLGPTDIFLKPGDRLKATDALVTNFHLPESSLFMLVCALMGTEVMQAAYAHAIKEKYRFYSYGDACLLLP

SEQ ID NO: 67321 - protein, 344 aa, Hephaestia caeni
  misc_feature (1)..(344): tr|A0A397NQ51|A0A397NQ51_9SPHN S-adenosylmethionine:tRN A ribosyltransferase-isomerase OS=Hephaestia caeni OX=6 45617 GN=queA PE=3 SV=1
MKVDLFDFELPPERIALRPATPRDAARMLVLDGAGTRDARVSDLPQMLRPGDLLVFNDTRVIPAQLDGRRGDATIGATLHKREGPRRWRAFIRNAKRLREGDAIDFGNAVSAIASDRAEDGSFALTFAGDDPVELLLERAGRMPLPPYIAGKRATDARDAEDYQTMFARAAGAVAAPTAALHFTPALIEALTAAGIGHTTLTLHVGAGTFLPVKTDDTNDHRMHAEWGRLDAATADRLNAVRASGGRVIAIGTTSLRVIESATGDDNIIRPFEGDTAIFITPGYRFKGIDGLMTNFHLPRSTLFMLVSALMGRERMQAAYAHAIESGYRFYSYGDASLLLPERS

SEQ ID NO: 67322 - protein, 338 aa, Herbaspirillum aquaticum
  misc_feature (1)..(338): tr|A0A225SML8|A0A225SML8_9BURK S-adenosylmethionine:tRN A ribosyltransferase-isomerase OS=Herbaspirillum aquati cum OX=568783 GN=queA PE=3 SV=1
MYSLSDFDFELPPELIAQTPLAERSASRLLQVQGAQLTDRRFSDIVDLLQPGDLLVFNDTRVIKARLFGVKETGGKIEALVERILDARTVHAQVRASKSPPPGTRIRLADAFDVTVGERFGEFFTLHFPADAFELLEQYGSLPLPPYIDHEADAYDETRYQTVYAKEPGAVAAPTAGLHFDEALLQQLTARGVKQAFVTLHVGAGTFQPVRVEDLSQHKMHSEWYTISPETVEAVRATKAAGRRVIAVGTTSMRALESGSQSGELKAGSDDTQLFITPGYTFKTVDQLVTNFHLPKSTLLMLVSAFAGYEHIRAAYAHAIAHKYRFFSYGDAMLLTRT

SEQ ID NO: 67323 - protein, 349 aa, Herbaspirillum hiltneri
  misc_feature (1)..(349): tr|A0A561JIQ7|A0A561JIQ7_9BURK S-adenosylmethionine:tRN A ribosyltransferase-isomerase OS=Herbaspirillum hiltne ri OX=341045 GN=queA PE=3 SV=1
MYSLSDFDFDLPSGLIAQLPLPERSASRLLQVDAQSGSLALTDRRFADVVDLLAPGDLLVFNNTRVLKARFFGVKETGGKVEVLVERVLDNRSVYAQVRASKSPPPGTGIRLADAFDVVVGERYGEFYTLQFPSDVFALLEQYGSLPLPPYIEHAADEFDETRYQTVYAKEPGAVAAPTAGLHFDEALLAQLKAKGIDTAFVTLHVGAGTFQPVRVEDLSEHKMHSEWYTIAQETVDKVRAVKAAGGKIVAVGTTSMRALESASQSGALEAGSADTKLFITPGYTFKTVDRLITNFHLPKSTLLMLVSAFAGYDNIRAAYAHAIAQQYRFFSYGDAMLLTCDALTSDHA

SEQ ID NO: 67324 - protein, 338 aa, Herbaspirillum huttiense
  misc_feature (1)..(338): tr|A0A561K7R0|A0A561K7R0_9BURK S-adenosylmethionine:tRN A ribosyltransferase-isomerase OS=Herbaspirillum huttie nse OX=863372 GN=queA PE=3 SV=1
MYSLSDFDFELPPELIAQTPLAERSASRLLQVQGAQLTDRRFSDIVDLLQSGDLLVFNDTRVIKARLFGVKETGGKIEALVERILDPRTVHAQVRASKSPPPGTRIRLADAFDVTVGERFGEFFTLHFPADAFELLEQYGSLPLPPYIDHEADAYDETRYQTVYAKEPGAVAAPTAGLHFDEALLQQLAARGVKQAFVTLHVGAGTFQPVRVEDLSQHKMHSEWYTISPETVAAVRATKAAGGRVIAVGTTSMRALESGSQSGELKAGSDDTQLFITPGYTFKTVDQLVTNFHLPKSTLLMLVSAFAGYEHIRAAYAHAIAQKYRFFSYGDAMLLTRT

SEQ ID NO: 67325 - protein, 338 aa, Herbaspirillum huttiense
  misc_feature (1)..(338): tr|A0A4P7A722|A0A4P7A722_9BURK S-adenosylmethionine:tRN A ribosyltransferase-isomerase OS=Herbaspirillum huttie nse OX=863372 GN=queA PE=3 SV=1
MYSLSDFDFELPPELIAQTPLAERSASRLLQVQGAQLTDRRFSDIVELLQPGDLLVFNDTRVIKARLFGVKETGGKIEALVERILDPRTVHAQVRASKSPPPGTRIRLADAFDVTVGERFGEFFTLHFPADAFELLEQYGSLPLPPYIDHEADAYDETRYQTVYAKQPGAVAAPTAGLHFDEALLQQLAARGVKQAFVTLHVGAGTFQPVRVEDLSQHKMHSEWYTISPETVEAVRATKAAGGRVIAVGTTSMRALESGSQSGQLQAGSDDTQLFITPGYTFKTVDQLVTNFHLPKSTLLMLVSAFAGYEHIRAAYAHAIAQQYRFFSYGDAMLLTRT

SEQ ID NO: 67326 - protein, 343 aa, Herbaspirillum robiniae
  misc_feature (1)..(343): tr|A0A246WLB0|A0A246WLB0_9BURK S-adenosylmethionine:tRN A ribosyltransferase-isomerase OS=Herbaspirillum robini ae OX=2014887 GN=queA PE=3 SV=1
MYSLSDFDFELPPELIAQTPLAERSASRLLQVDGAQLSDRRFADILDLLNPGDLLVFNDTRVLKARFFGVKETGGKIEALVERVLDARTVHAQVRASKSPPPGTRIRLADAFDVTVGERFGEFFTLHFPSDVFELLEQYGSLPLPPYIEHEADAYDETRYQTVYAKEPGAVAAPTAGLHFDQALLDQLSARGVRQAFVTLHVGAGTFQPVRVEDLSQHKMHSEWYTISQATVDAVRATKAAGGRVVAVGTTSMRALESGSQSGRLEAGSADTQLFITPGYTFKTVDRLVTNFHLPKSTLLMLVSAFAGYDHIRAAYAHAIAQKYRFFSYGDAMLLTCNKANEG

SEQ ID NO: 67327 - protein, 338 aa, Herbaspirillum rubrisubalbicans
  misc_feature (1)..(338): tr|A0A0U3CIN3|A0A0U3CIN3_9BURK S-adenosylmethionine:tRN A ribosyltransferase-isomerase OS=Herbaspirillum rubris ubalbicans M1 OX=1078773 GN=tsaA PE=3 SV=1
MYSLSDFDFALPPELIAQTPLAERSASRLLQVQGAQLSDRRFSDIVDLLQPGDLLVFNDTRVIKARLFGVKETGGKIEALVERILDARTVHAQVRASKSPPPGTRIRLADAFDVTVGERFGEFYTLHFPADAFDLLEQYGSLPLPPYIDHEADAYDETRYQTVYAKEPGAVAAPTAGLHFDQTLLEQLSARGVQQAFVTLHVGAGTFQPVRVEDLSQHQMHSEWYTIPPETVAAVRAAKAAGGRVVAVGTTSMRALESGSQSGELKAGSDDTQLFITPGYTFKTVDQLVTNFHLPKSTLLMLVSAFAGYEHIRAAYAHAIAQKYRFFSYGDAMLLTRT

SEQ ID NO: 67328 - protein, 338 aa, Herbaspirillum rubrisubalbicans
  misc_feature (1)..(338): tr|A0A328IST8|A0A328IST8_9BURK S-adenosylmethionine:tRN A ribosyltransferase-isomerase OS=Herbaspirillum rubris ubalbicans OX=80842 GN=queA PE=3 SV=1
MYSLSDFDFALPPELIAQTPLAERSASRLLQVQGAQLSDRRFSDIVDLLQPGDLLVFNDTRVIKARLFGVKETGGKIEALVERILDARTAHAQVRASKSPPPGTRIRLADAFEVTVGERFGEFYTLHFPADAFDLLEQYGSLPLPPYIDHEADAYDETRYQTVYAKEPGAVAAPTAGLHFDQALLEQLSARGVQQAFVTLHVGAGTFQPVRVEDLSQHQMHSEWYTIPPETVAAVRATKAAGGRVVAVGTTSMRALESGSQSGELKAGSDDTQLFITPGYTFKTVDQLVTNFHLPKSTLLMLVSAFAGYENIRAAYAHAIAQKYRFFSYGDAMLLTRT

SEQ ID NO: 67329 - protein, 338 aa, Herbaspirillum seropedicae
  misc_feature (1)..(338): tr|A0A5B8E0B6|A0A5B8E0B6_HERSE S-adenosylmethionine:tRN A ribosyltransferase-isomerase OS=Herbaspirillum serope dicae OX=964 GN=queA PE=3 SV=1
MYSLSDFDFELPPELIAQTPLAERSASRLLQVQGAQLTDRRFSDIVDLLQAGDLLVFNDTRVIKARLFGVKETGGKIEALVERILDPRTVHAQVRASKSPPPGARIRLADAFEVTVGERFGEFYTLHFPEDAFALLEQYGSLPLPPYIDHEADAYDETRYQTVYAKEPGAVAAPTAGLHFDQALLEQLAARGVQQAFVTLHVGAGTFQPVRVEDLSQHKMHSEWYTIPPETVEAVRAAKAAGRRVIAVGTTSMRALESGSQSGALKAGSDDTQLFITPGYTFKTVDQLVTNFHLPKSTLLMLVSAFAGYEHIRAAYAHAIAQKYRFFSYGDAMLLTRT

SEQ ID NO: 67330 - protein, 338 aa, Herbaspirillum seropedicae
  misc_feature (1)..(338): tr|D8INS4|D8INS4_HERSS S-adenosylmethionine:tRNA ribosy ltransferase-isomerase OS=Herbaspirillum seropedicae (s train SmR1) OX=757424 GN=tsaA PE=3 SV=1
MYSLSDFDFELPPELIAQTPLAERSASRLLQVQGAQLTDRRFSDIVDLLQAGDLLVFNDTRVIKARLFGVKETGGKIEALVERILDPRTVHAQVRASKSPPPGTRIRLADAFEVTVGERFGEFYTLHFPEDAFALLEQYGSLPLPPYIDHEADAYDETRYQTVYAKEPGAVAAPTAGLHFDQALLEQLAARGVQQAFVTLHVGAGTFQPVRVEDLSQHKMHSEWYTIPPETVEAVRAAKAAGRRVIAVGTTSMRALESGSQSGALKAGSDDTQLFITPGYTFKTVDQLVTNFHLPKSTLLMLVSAFAGYELIRAAYAHAIAQKYRFFSYGDAMLLTRT

SEQ ID NO: 67331 - protein, 373 aa, Herbaspirillum sp.
  misc_feature (1)..(373): tr|J3DH85|J3DH85_9BURK S-adenosylmethionine:tRNA ribosy ltransferase-isomerase OS=Herbaspirillum sp. CF444 OX=1 144319 GN=queA PE=3 SV=1
MSRKRKIEGSALFYCVYLQCCRFHDLFSMYSLSDFDFDLPPELIAQLPLAERSASRLLQVDAQSGNLALTDRRFADVVDLLSPGDLLVFNDTRVLKARFFGVKETGGKVEVLVERVLDSRSVHAQVRASKSPPAGTQIRLADAFDVIVGERYGEFYTLQFPSDVFELLEQYGSLPLPPYIEHEADEFDETRYQTVYAKEPGAVAAPTAGLHFDETLLDKLKAKGIDTAFVTLHVGAGTFQPVRVENLSEHKMHSEWYTIAQETVDKVRAVKAAGGKVVAVGTTSMRALESASQSGTLEAGSADTRLFITPGYAFKTVDRLITNFHLPKSTLLMLVSAFAGYDNIRAAYAHAIAHQYRFFSYGDAMLLTCTHHA

SEQ ID NO: 67332 - protein, 354 aa, Herbaspirillum sp.
  misc_feature (1)..(354): tr|J3CC32|J3CC32_9BURK S-adenosylmethionine:tRNA ribosy ltransferase-isomerase OS=Herbaspirillum sp. YR522 OX=1 144342 GN=queA PE=3 SV=1
MPAAYVWFLQVFFMYSLSDFDFVLPPELIAQTPLPERSGSRLLEVAGAQLTDRHFGDIVSLLAPGDLLVFNDTRVLKARFFGVKETGGKIEALVERVLDTRTVHAQVRASKSPPAGTRIRLADAFDVTVGERCGEFFTLHFPSDVFALLEQYGSLPLPPYIEHEADSFDETRYQTVYAKTPGAVAAPTAGLHFDQALLAALAARGVRHAFVTLHVGAGTFQPVRVEDLSQHNMHSEWYTIGQATVDAVRATKAAGARVVAVGTTSMRALESASQGAQLEAGSADTRLFITPGYRFRTVDRLVTNFHLPKSTLLMLVSAFAGYDNIRAAYAHAIAQHYRFFSYGDAMLLTCTNHA

SEQ ID NO: 67333 - protein, 325 aa, Herbidospora sp.
  misc_feature (1)..(325): tr|A0A4V5UZT6|A0A4V5UZT6_9ACTN S-adenosylmethionine:tRN A ribosyltransferase-isomerase OS=Herbidospora sp. NEAU -GS14 OX=2575442 GN=FDA94_08080 PE=3 SV=1
MSIDFALPSVNEAHRPPEARDSVKLMVSERETGAITHHAFTDLPELLDPGDLVVVNNSRTLPAAVKLDRLWVHFSTELPWGEWLVELRCPGGTTYKGGAPGEWLPLPGGATLRLVERFTPRLWKARLDTDVVGYLQRHGTPIRYSYVDRDWPIDDYQTVFGRILGSAEMPSAGRPFTTRLVTDLVARGITIAPVTLHTGVASPEKDEPPYAERFDVPAATRRLVAMTKENGGRVVAVGTTVVRALETSHDSGWTSRIVSPEHPPEVVDGLLTGLHEPRSTHLMMLSAIGGADLVMKSYEAALDDGYLWHEFGDVHLILGTRRIDI

SEQ ID NO: 67334 - protein, 342 aa, Herbihabitans rhizosphaerae
  misc_feature (1)..(342): tr|A0A4Q7KJU8|A0A4Q7KJU8_9PSEU S-adenosylmethionine:tRN A ribosyltransferase-isomerase OS=Herbihabitans rhizosp haerae OX=1872711 GN=EV193_10663 PE=3 SV=1
MKTLEFTLPAELEAPAPPEARGLERDGVRLLAGSAATGRVSHHRFTELPSLLKPGDVLVVNTSATLPAAVGVVGSGLVVHFSTELAHGRWLIELRRSDGKATAQYVEGMAGDRYPLPGGGSVTLREPFSTGRLWEADVDTGTVLGVRSFLRHFGSPIRYGYVRRPWPLSFYQSVFATTPGSAEMPSAARPFTDAVVTRLVSAGVEFAPLLLHTGVASPEAHERPYPERYAVSEHTARVVNQARAAGGRVIAIGTTAVRALETATGEDGVVRAASGWTELVVTPERGVRAVDGLLTGFHEPRASHLDMLAAVAGFGLLERVYAEAVAEGYLWHEFGDVNLLLP

SEQ ID NO: 67335 - protein, 351 aa, Herbinix hemicellulosilytica
  misc_feature (1)..(351): tr|A0A0H5SE15|A0A0H5SE15_HERHM S-adenosylmethionine:tRN A ribosyltransferase-isomerase OS=Herbinix hemicellulos ilytica OX=1564487 GN=queA PE=3 SV=1
MKTSDFYYDLPQELIAQDPLEDRSSSRLMVLDKNTGKYEHRIFKDITEYLRKGDCLVLNNTKVIPARLIGEKINMTGENSGEPGRGARIELLLLKRKENDIWETLVKPGKKAKPGTKISFGDGILFGEILDVVEEGNRLVKFYYQGIFEEILDRLGQMPLPPYITRELKDKNRYQTVYAKYEGSAAAPTAGLHFTNELLEEIKSMGVNIAYVTLHVGLGTFRPVKVDDVSKHHMHSEYYQVLKEEADKVNEAKKNGGRIICVGTTSCRTIESSCDENGYLKAGSGETSIFIYPGYRFKIMDGLITNFHLPESTLLMLVSAFAGRENILNAYKEAVDKRYRFFSFGDAMLII

SEQ ID NO: 67336 - protein, 371 aa, Herbinix hemicellulosilytica
  misc_feature (1)..(371): tr|A0A428MBL1|A0A428MBL1_HERHM S-adenosylmethionine:tRN A ribosyltransferase-isomerase OS=Herbinix hemicellulos ilytica OX=1564487 GN=queA PE=3 SV=1
MRTHDFYYELPEELIAQDPLEDRASSRLMVLDKETGRIEHKIFRQIKDYLRPGDCLVINDTKVIPARLIGEKLHESRQAAADKEMTDKREVQDNKAAAARDESVRGAKIELLLLKRRENDIWETLVKPGKKAKPGARISFGDGILTAEIIDCLEDGNRLVKFYYKGIFEEILDRLGQMPLPPYITHQLSDKNRYQTVYAKYEGSAAAPTAGLHFTRELLEEIKAMGVHLVSVTLHVGLGTFRPVKVEDISQHHMHSEFYNVSREAADMINRVKAAGGRIICVGTTSCRTVESAADEQGIVHPGSDETSIFIYPGYRFKVMDGLITNFHLPESTLMMLVSAFAGREKIMAAYKEAVKERYRFFSFGDAMFIQ

SEQ ID NO: 67337 - protein, 349 aa, Herbinix luporum
  misc_feature (1)..(349): tr|A0A0K8J6Z7|A0A0K8J6Z7_9FIRM S-adenosylmethionine:tRN A ribosyltransferase-isomerase OS=Herbinix luporum OX=1 679721 GN=queA PE=3 SV=1
MLTRDFYYDLPEELIAQDPLRDRSGSRLLVLDRHTGEYEHRIFKDISKYLKAGDCLVLNNTKVIPARLIGEKVSGHSPDNNSPGARIELLLLKRKENDIWETLVKPGKKAKPKTKISFGNGLLMGEILDIVDEGNRLVKFSYDGIFEEILDQLGEMPLPPYITHKLEDKNRYQTVYARYEGSAAAPTAGLHFTEELLEEIKKMGVEIAYVTLHVGLGTFRPVKVEDISQHHMHSEYYQILQEEADKINKAKKKGGRIICVGTTSCRTLESSSDEDGYLRAGSGDTSIFIYPGYKFKIMDGLITNFHLPESTLLMLVSAFAGREHILRAYNEAVKERYRFFSFGDGMLII

SEQ ID NO: 67338 - protein, 341 aa, Herminiimonas arsenicoxydans
  misc_feature (1)..(341): sp|A4G1Z2|QUEA_HERAR S-adenosylmethionine:tRNA ribosylt ransferase-isomerase OS=Herminiimonas arsenicoxydans OX =204773 GN=queA PE=3 SV=1
MYSLSDFDFELPQELIAQTPLAERSASRLLHVAQDGMIDRAFADIVDLLNPGDLLVFNDTRVLKARFFGVKETGGKVEVLVERVIDSAHVHAQIRASKSPVPGMKIRLADAFDVIVGERAGEFYELQFPGDIFALIEAHGRLPLPPYIEHAADAYDETRYQTVYAKTPGAVAAPTAGLHFDQALLDTLKAKGVQFAYVTLHVGAGTFQPVRNENLAEHNMHSEWYTISQETVGAVHAAQAAGHNIVAVGTTSMRALESASQSGSLQAGSADTRLFITPGYTFKTVTRLITNFHLPKSTLLMLVSAFAGYDAIRAAYQHAISQRYRFFSYGDAMFLTRMPPC

SEQ ID NO: 67339 - protein, 341 aa, Herminiimonas fonticola
  misc_feature (1)..(341): tr|A0A4R6G5E3|A0A4R6G5E3_9BURK S-adenosylmethionine:tRN A ribosyltransferase-isomerase OS=Herminiimonas fontico la OX=303380 GN=queA PE=3 SV=1
MYSLSDFDFELPQELIAQTPLAERSASRLLQVTQDKMTDRAFADIVDLINPGDLLVFNDTRVLKARFFGIKETGGKVEVLVERVIDSAYVHAQIRASKSPVPGMKIRLADAFDVIVGERVGEFYELQFPGDVFELIEAHGRLPLPPYIEHAADAYDETRYQTVYAKTPGAVAAPTAGLHFDQALLDALQAKGVQFAYVTLHVGAGTFQPVRNENLAEHNMHSEWYTISQETVDAVRATQAAGHNIVAVGTTSMRALESASQSGSLQAGSADTRLFITPGYTFKTVTRLITNFHLPKSTLLMLVSAFAGYDAIRAAYQHAISQRYRFFSYGDAMFLTRMPTC

SEQ ID NO: 67340 - protein, 341 aa, Herminiimonas sp.
  misc_feature (1)..(341): tr|A0A3N6ZW80|A0A3N6ZW80_9BURK S-adenosylmethionine:tRN A ribosyltransferase-isomerase OS=Herminiimonas sp. KBW 02 OX=2153363 GN=queA PE=3 SV=1
MYSLSDFDFDLPQELIAQTPLAQRSASRLLQVLPGQMADRNFADIVDLLSPGDLLVFNDTRVLKARFFGVKETGGKVEVLVERVIDQRNVHAQIRASKSPAAGMRIRLADAFDVIVGERAGEFYELQFPDDVFELIEAHGRLPLPPYIEHAADAYDETRYQTVYAKTPGAVAAPTAGLHFDQALLDTLTAKGVKLAYITLHVGAGTFQPVRSENLAEHNMHSEWYTISQQTVDLVQATQAAGGNVVAVGTTSMRALESASQSGVLQAGSADTRLFITPGYTFKTVTRLITNFHLPKSTLLMLVSAFAGYDTIRAAYQHAISQRYRFFSYGDAMFLTRMPPC

SEQ ID NO: 67341 - protein, 346 aa, Herpetosiphon aurantiacus
  misc_feature (1)..(346): tr|A9B1Z1|A9B1Z1_HERA2 S-adenosylmethionine:tRNA ribosy ltransferase-isomerase OS=Herpetosiphon aurantiacus (st rain ATCC 23779 / DSM 785 / 114-95) OX=316274 GN=queA P E=3 SV=1
MLPIADFDYHLPPERIAQTPIEPRDHSRLLVLDRATGQLEHRHFYEIGRYLRPGDLLVANDSRVLPARLYGQKASGGKTELLLLKQRDAQRWEALIKGKVAVGTRLIITGHRGAQVQATVEELLESGSRIICFEQPINDRLPELGSMPTPPYITAPLTDPERYQTVYSAQAGSAAAPTAGLHWTPALIEQVKALGVGWASVTLHVGLDTFRPVQTENALDHQIHSEWYELSAETAQAINATRAAGGRIITVGTTSTRVLETVSQSQDVSLTAGEIQAAAGWSSIYIYPPYEYRVVNSLITNFHLPKSTLLLLVSALASRDLIMQAYAEAVERQYRFFSFGDAMLII

SEQ ID NO: 67342 - protein, 349 aa, Herpetosiphon aurantiacus
  misc_feature (1)..(349): tr|A9B1X6|A9B1X6_HERA2 S-adenosylmethionine:tRNA ribosy ltransferase-isomerase OS=Herpetosiphon aurantiacus (st rain ATCC 23779 / DSM 785 / 114-95) OX=316274 GN=Haur_2 780 PE=3 SV=1
MLATIDFELPAVLEAGEPPEARGLERDQVRLMVSHSRSNTIEHYRFDQLSMILQAGDVLAINTSGTLNAAIPATDASGQRFMVHLSTQLLAELWLVEVRLPHGTSSQPYRAALAGNSLNLPSGGQIDIHRGYANDGSAINRLWIASLRLPQPLPHYLAEHAKPIHYQYVAADWPNSYYQTVYATELGSAEMPSAGRAFSERLLTRLVAQGIQIAPLLLHTGVASLEDHEPPYAEWYRVPATSADLINRARADHRRVIAVGTTSVRAIESTVDQRGLVHPQAGWTELVITPEHGLQAVDGILTGLHEPKATHLAMLAALAGYQHLELCYQAALEQHYLWHEFGDLHLILP

SEQ ID NO: 67343 - protein, 346 aa, Herpetosiphon geysericola
  misc_feature (1)..(346): tr|A0A0N8GT59|A0A0N8GT59_9CHLR S-adenosylmethionine:tRN A ribosyltransferase-isomerase OS=Herpetosiphon geyseri cola OX=70996 GN=queA PE=3 SV=1
MLPIADFDYHLPPERIAQTPVEPRDHSRLLVLDRATGQLEHRHFYEIGHYLRPGDLLVANDSRVLPARLYGQKASGGKTELLLLKQRDAQRWEALIKGKVAIGTRLIITGHSGAQAEATVEELLESGSRIVCFNQPINQRLPELGSMPTPPYITAPLTDPERYQTVYSAQAGSAAAPTAGLHWTPALIEQVKAQGVGWASVTLHVGLDTFRPVQTENALDHQIHSEWYELSAETAQAINATRAAGGRIITVGTTSTRVVETVAQAQGIHLDAGEIQPASGWSDIYIYPPYEYRVVNSLITNFHLPKSTLLLLVSALASREQIMHAYAEAVEHEYRFFSFGDAMLIL

SEQ ID NO: 67344 - protein, 349 aa, Herpetosiphon geysericola
  misc_feature (1)..(349): tr|A0A0P6YKQ9|A0A0P6YKQ9_9CHLR S-adenosylmethionine:tRN A ribosyltransferase-isomerase OS=Herpetosiphon geyseri cola OX=70996 GN=SE18_07125 PE=3 SV=1
MLTTIDFELPTILEAGEPPEARGLERDQVRLMVSHSRSNQIEHYRFNQLPTILQPGDVLAINTSGTLNAAIPATTKAGQQLIVHLSTQLLAELWMVEIRLPHGTSSQPYREALATTSLALPAGGSLDIHRSYAANGATTNRLWIASLRLPKPLPKYLAEHAKPIHYSYVDQDWPTSYYQTVYATELGSAEMPSAGRAFSERLLTRLVAQGIQIAPLLLHTGVASLEDHEPPYAEWYSLPATSADLINRARADGRRVIAVGTTSVRAIESTVDQRGLVHPQTGWTELVITAERGLRAIDGILTGLHEPKATHLAMLAALAGYEHLELCYRAALEQHYLWHEFGDLHLLLS

SEQ ID NO: 67345 - protein, 364 aa, Hespellia stercorisuis
  misc_feature (1)..(364): tr|A0A1M6PCH4|A0A1M6PCH4_9FIRM S-adenosylmethionine:tRN A ribosyltransferase-isomerase OS=Hespellia stercorisui s DSM 15480 OX=1121950 GN=queA PE=3 SV=1
MNSDNNKTNMKKEDFFFDLPEELIAQDPLEDRSSSRLLVMDKETGEVSHHVFREITDYLNAGDCLVINDTKVIPARLIGAKVGTDAKIEVLLLKRKEVAASVDEAGQATGTDTVWETLVKPGKKAKVGTKISFGDGLLVGEVIDVVEEGNRLIRFTYDGIFEEILDQLGQMPLPPYITHQLQDKNRYQTVYAKHTGSAAAPTAGLHFTPELLREIEEKGVDIARVTLHVGLGTFRPVKVENILEHHMHSEFYHIDEEAAQKINRTKENGGRVICVGTTSCRTIESAADENGRLKECSGWTEIFIYPGYRFKALDCLITNFHLPESTLIMLVSALAGREHVLAAYEEAVKERYRFFSFGDAMFIK

SEQ ID NO: 67346 - protein, 343 aa, Hippea maritima
  misc_feature (1)..(343): tr|F2LXW0|F2LXW0_HIPMA S-adenosylmethionine:tRNA ribosy ltransferase-isomerase OS=Hippea maritima (strain ATCC 700847 / DSM 10411 / MH2) OX=760142 GN=queA PE=3 SV=1
MEVSLFDYNLPKELIAQHPHIPRDECKLLVCNRQNHTIEHRIFKEIINYIDENDLLVLNDTKVIPARIFAQKPTGGKIEIFLLEEIGKGRFLCLTRGKLKKDTIVYLKNSKTARITRIENSDKRIVEFETNENIYELLEDIGEVPLPPYIQRNYDNYNKEKDFKYYQTVFAKKEGAVASPTAGLHFTEKLINSIKAKGVKIAYITLHVGIGTFRPVKEKEVEKHKMHSEKYQISKETADLFNQTKSKRRRVIAVGTTVVRALESSINKDGILKPQKSSTDIFIYPGYKYKAVDALITNFHLPKSTLLMLVSAFYEREKILNCYKEAIDKHYRFFSFGDAMFIY

SEQ ID NO: 67347 - protein, 351 aa, Histidinibacterium lentulum
  misc_feature (1)..(351): tr|A0A3N2R9J6|A0A3N2R9J6_9RHOB S-adenosylmethionine:tRN A ribosyltransferase-isomerase OS=Histidinibacterium le ntulum OX=2480588 GN=queA PE=3 SV=1
MKLSEFDFDLPEALIATRPARPRSSARLLLAEGDGIEDRLVRDLVEILRPGDRLILNDTRVIPARLTGERRRTGEAGESAARIEVTLLEPQPDGLWTALVKPLRKLREGEEVVFSPDLAARLEGRRDGQGLLRFNCAGEDFDRALAEAGAMPLPPYIAALRAPDEADKEDYQTVWASRPGAVAAPTASLHFDAPLLEALERRGVAFTHVTLHVGAGTFLPVKVDDVSLHRMHAEWGEVSESAAAEITATRAAGGRVLPVGTTALRLIESAADGRGGVRPFRGDTDIFITPGFEFRVADGLMTNFHLPKSTLMMLVSALMGVERIRAIYAHAVAERYRFFSYGDASLLLPKG

SEQ ID NO: 67348 - protein, 349 aa, Histidinibacterium sp.
  misc_feature (1)..(349): tr|A0A5J5GKX3|A0A5J5GKX3_9RHOB tRNA preQ1(34) S-adenosy lmethionine ribosyltransferase-isomerase QueA OS=Histid inibacterium sp. 176SS1-4 OX=2613962 GN=queA PE=4 SV=1
MKLSEFDFDLPEELIATRPARPRSSARLLLAQGDAIEDRVVSELPDILRPGDRLVLNDTKVIPARLSGRRYREGPEGEGGARIEATLLEPRADGAWSALVKPLKKLRDGEEVIFSPRLSARLEGRDEGVGRLRFNLAGEDFDAALAEAGAMPLPPYIAAKRPADEADKQDYQTIWAERPGAVAAPTASLHFDDPLMEALAVRGVQFTHVTLHVGAGTFLPVKVDDISEHRMHAEWGEVSERAAAEIEATRAEGGRIIPVGTTALRLIESAATGDGLGPWRGETDIFITPGFRFRVADGLMTNFHLPKSTLMMLVSALMGVDRIRAVYRHAISERYRFFSYGDASLLLPG

SEQ ID NO: 67349 - protein, 356 aa, Histophilus somni; identical to SEQ ID NO: 67100
  misc_feature (1)..(356): tr|A0A1Y0JWJ9|A0A1Y0JWJ9_HISSO S-adenosylmethionine:tRN A ribosyltransferase-isomerase OS=Histophilus somni OX= 731 GN=queA PE=3 SV=1

SEQ ID NO: 67350 - protein, 356 aa, Histophilus somni; identical to SEQ ID NO: 67100
  misc_feature (1)..(356): sp|B0UWJ9|QUEA_HISS2 S-adenosylmethionine:tRNA ribosylt ransferase-isomerase OS=Histophilus somni (strain 2336) OX=228400 GN=queA PE=3 SV=1

SEQ ID NO: 67351 - protein, 358 aa, Hoeflea halophila
  misc_feature (1)..(358): tr|A0A286IFR9|A0A286IFR9_9RHIZ S-adenosylmethionine:tRN A ribosyltransferase-isomerase OS=Hoeflea halophila OX= 714899 GN=queA PE=3 SV=1
MRVDLFDFELPDERIALRPAAPRDSARLLRVDADGSLKDLSVSDLAGLLAPGDALVFNDTRVIPAQLEGFRLRGENRQRISATLHMRAGPDRWKAFVRPAKRIKQGDRLHFGGDGATCLSGVLDATAGTRGEGGELELIFDLSGPALDEAIMASGQIPLPPYIASKRGEDDQDRKDYQTIYAREDGAVAAPTAGLHFTDALFDKLDARGISRHFVTLHVGAGTFLPVKADDTTEHRMHSEVGHVSAKTAEALNQVHARGGRVVSVGTTSLRLLESATSEDGTIQPWSGPTDIFITPGYRFRAVDVLMTNFHLPRSTLFMLVSAFSGLETMRAAYRHAIDNGYRFYSYGDSSLLFRSAP

SEQ ID NO: 67352 - protein, 361 aa, Hoeflea marina
  misc_feature (1)..(361): tr|A0A317PUK6|A0A317PUK6_9RHIZ S-adenosylmethionine:tRN A ribosyltransferase-isomerase OS=Hoeflea marina OX=274 592 GN=queA PE=3 SV=1
MRVDLFDFDLPDERIALRPASPRDAARMLRVDAGGQFSDFTVTDLPDLLEPGDALVFNDTRVIPAQLEGFRVRGENRAGMSATLHMRTGPDRWKAFVRPAKRVREGDRVEFGGTANACLAGRLDASIGARGEAGEIELIFDLSGPALDEAIAGVGHIPLPPYIASKRGEDERDRLDYQTIYAREDGAVAAPTAGLHFTPDLFARLEARGVSSHFVTLHVGAGTFLPVKVDDTADHKMHAEIGQVSPETADALNAVHARGGRIVSVGTTSLRLLESATGADGVIAPWTGATSIFITPGYRFRAVDVLMTNFHLPRSTLFMLVSAFSGYETMVVAYRRAIDTGYRFYSYGDSSLLFRPRESAE

SEQ ID NO: 67353 - protein, 358 aa, Hoeflea olei
  misc_feature (1)..(358): tr|A0A1C1YXM7|A0A1C1YXM7_9RHIZ S-adenosylmethionine:tRN A ribosyltransferase-isomerase OS=Hoeflea olei OX=14806 15 GN=queA PE=3 SV=1
MRVDLFDFDLPEERIALRPASPRDSARMLRVGPDGALSDRVVAELPDLLEPGDALVFNDTKVIPAQLEGVRLREEAESRISATLHMRSGPDRWKAFVRPAKRVKEGDRLRFGARGETCLDGVLDATAGERGEGGEIELLFDLSGPALDQAIAAAGHIPLPPYIASKRPEDARDRFDYQTIYAREEGAVAAPTAGLHFTPDLISRLDARGIGRQFVTLHVGAGTFLPVKADDTAEHRMHSEIGHVSAETADALNAVRARGGRIVSVGTTSLRLLESAAREDGRLVAWSGATDIFITPGYRFRAVDVLMTNFHLPRSTLFMLVSAFSGLETMQAAYRHAIDEGYRFYSYGDSSLLFRSVG

SEQ ID NO: 67354 - protein, 359 aa, Hoeflea phototrophica
  misc_feature (1)..(359): tr|A9D9G3|A9D9G3_HOEPD S-adenosylmethionine:tRNA ribosy ltransferase-isomerase OS=Hoeflea phototrophica (strain DSM 17068 / NCIMB 14078 / DFL-43) OX=411684 GN=queA PE =3 SV=1
MRVDLFDFHLPDESIALRPASPRDSARMLCVAPDGGLSDAIVRDLAAQLQPGDALVFNDTRVIPAQLEGFRNRGDNQVRVSATLHMRSGPDRWKAFVRPGKRIKPGDRLSFGGDGSACLQGVLDATAGERGEGGEIELIFDLSGPALDEAIMATGHIPLPPYIASKRGEDAQDRKDYQTIYAREDGAVAAPTAGLHFTDALFASLDARGIVRHFVTLHVGAGTFLPVKADDTAEHRMHSEIGHVSAETAAALNQVRASGGRIVSVGTTSLRLLESAADENGTIQPWSGPTDIFITPGYRFRAVDVLMTNFHLPRSTLFMLVSAFCGLETMRAAYDHAIETGYRFYSYGDSSLLFRSDQR

SEQ ID NO: 67355 - protein, 357 aa, Hoeflea sp.
  misc_feature (1)..(357): tr|A0A2E2X0Z2|A0A2E2X0Z2_9RHIZ S-adenosylmethionine:tRN A ribosyltransferase-isomerase OS=Hoeflea sp. OX=194028 1 GN=queA PE=3 SV=1
MRVDLFDFDLPEDNIALRPANPRDSAKLLSVKPDGTLDDLVVRDLPSLLQPGDALVFNDTRVIPAQLEGWRIRGENRSRISATLHMRAGPDTWLAFVRPAKRVSEGDRLSFGDDNPACDQGSLLATAGPRGNRGEFELRFDLSGPALDQAIMTAGHIPLPPYIASKRAEDERDRADYQTIYAREEGAVAAPTAGLHFTPELFAALEARGISRHFVTLHVGAGTFLPVKADDTDDHRMHSEIGHVSDEVAHALNETRAKGGRIVSVGTTSLRLLESAASEDGVIHPWSGATDIFITPGYAFRAVDLLMTNFHLPRSTLFMLVSAFSGSETMKAAYAHAIENNYRFYSYGDSSLLERAP

SEQ ID NO: 67356 - protein, 358 aa, Hoeflea sp.
  misc_feature (1)..(358): tr|A0A0F7PN85|A0A0F7PN85_9RHIZ S-adenosylmethionine:tRN A ribosyltransferase-isomerase OS=Hoeflea sp. IMCC20628 OX=1620421 GN=queA PE=3 SV=1
MRVDLFDFELPDERIALRPANPRDSARLLRVGADGTLADLSVGDLADLLEPGDALVFNDTKVIPAQLEGFRTRGENLQRISATLHMRSGPDRWKAFVRPGKRIKEGDRLSFGGDGAVCLTGVLDATAGKRGEGGELELIFDLSGPALDEAIMATGHIPLPPYIASKRGEDDQDRLDYQTIYAREDGAVAAPTAGLHFTDALFAKLDARGISRHFVTLHVGAGTFLPVKVDDTAEHLMHSEIGHVSAETAAALNAVHARGGRVVSVGTTSLRLLESATEADGTIKAWSGPTDIFITPGYRFRAVDILMTNFHLPRSTLFMLVSAFSGFETMHGAYRHAIDNNYRFYSYGDSSLLFRSDL

SEQ ID NO: 67357 - protein, 341 aa, Holdemanella biformis
  misc_feature (1)..(341): tr|A0A412IVR9|A0A412IVR9_9FIRM S-adenosylmethionine:tRN A ribosyltransferase-isomerase OS=Holdemanella biformis OX=1735 GN=queA PE=3 SV=1
MKVSELDFFLPSELLAREPRETRGESRSDSKLMVMNRKTQTIEHKKFNDVIDYLEKGDVLVLNNSKVINANLIGWLGYKERKIKIDLAGILDNGNWQIYIDDNEINPGDTCEFGDGMLTGTFEKMEENHVWQIKFDQDNVIELANKIGRPIMSPYVKKQYDLSYYQNVYASKEGSAELPSAGRHFTKELLEKIKQKGVRVVYVTLHTGLSSMMVTEDTFEEHHMHKEYIEITSAVANTINEAKKNGHSVVCVGTTVVRTLETVADEQGNLKPFTGYSTLYIYPGYCFKIVDKFITNFHGPNTSRIAMAAAFTGKDLLLKGYAEAIQRKYLFYEFGDTTLTI

SEQ ID NO: 67358 - protein, 340 aa, Holdemania filiformis
  misc_feature (1)..(340): tr|B9YAX0|B9YAX0_9FIRM S-adenosylmethionine:tRNA ribosy ltransferase-isomerase OS=Holdemania filiformis DSM 120 42 OX=545696 GN=queA PE=3 SV=1
MKTSEFDFELPQELIAQTPLAKRSASRLLVLHRSTGAIEHRHFYDIVDYLKPGDVLVRNNTRVIPARLFGTKEGTGAHVELLLLRQEGDEWECLVGNAKVVKLGTIISFNEGELKAECIGIGEKGLRQFRMIYDGIFYEILEKLGNVPLPPYIKEKLNDPERYQTVYAKVKGSAAAPTAGLHFTPELFDQLKAKGVEVEDITLHVGLGTFRPMDTEDIADHHMHSEFFMMDQATADRLNQAKAEGRRIIAVGTTSCRTLEAIMSKYGEFRECHEDTDIFIFPGYSFQAIDGLITNFHLPKSTLVMLVSAFATKDQIMTAYQAAIDEKYRFFSFGDSMFIE

SEQ ID NO: 67359 - protein, 340 aa, Holdemania filiformis
  misc_feature (1)..(340): tr|A0A412FH25|A0A412FH25_9FIRM S-adenosylmethionine:tRN A ribosyltransferase-isomerase OS=Holdemania filiformis OX=61171 GN=queA PE=3 SV=1
MKTSEFDFELPQELIAQTPLAKRSASRLLVLHRSTGEIEHRHFYDIVDYLKPGDVLVRNNTRVIPARLFGTKEETGAHVELLLLRQEGDEWECLVGNAKVVKLGTIIPFNEGELKAECIGIGEKGLRQFRMIYDGIFYEILEKLGNVPLPPYIKEKLNDPERYQTVYAKVKGSAAAPTAGLHFTPELFDQLKAKGVEVEDITLHVGLGTFRPMDTEDIADHHMHSEFFMMDQATADRLNQAKAEGRRIIAVGTTSCRTLEAIMSKYGEFRECHEDTDIFIYPGYSFQAIDGLITNFHLPKSTLVMLVSAFATKDQIMTAYQAAIDEKYRFFSFGDSMFIE

SEQ ID NO: 67360 - protein, 436 aa, Hormoscilla sp.
  misc_feature (1)..(436): tr|A0A533P6U6|A0A533P6U6_9CYAN S-adenosylmethionine:tRN A ribosyltransferase-isomerase OS=Hormoscilla sp. GUM20 2 OX=2480853 GN=queA PE=3 SV=1
MSCNDFSNWINQTEPVPVCQVAFFILLQLGLYSNLDGRNFTPVLSPDRSNLDLTLASYDYDLPPDLIAQNPVTPRDSSRLLVVDSPTHHQHRYFRDLPDLLQPGDLLVLNDTRVLRARLYGRKDTGTPVEVLLLEPRQSNCWLALVKPGRRLKPGAKIIFTPCINIDRELKATVVATDADTAGRLLQFELPPGTDLEQLLPDFGHVPFPPYITASQALPEQYQTVYARPADFRFRSAHPCSAQDATQQGGRSRKRPKNRQPGSVAAPTAGLHFTPELLRRLRQRGIEQRYVTLHVGVGTFRPVEVEDVTSHQMHGEWISVPETTVAQIHQTQVRGGRVLAVGTTVARSLEGAADSGGLEAYTGKTELFIYPGYHWRVVDGLITNFHLPRSSLLMLVSAMLGRDRLLHLYREAIGHQYRFYSFGDAMLILPEAWKNI

SEQ ID NO: 67361 - protein, 405 aa, Hormoscilla sp.
  misc_feature (1)..(405): tr|A0A533NLI4|A0A533NLI4_9CYAN S-adenosylmethionine:tRN A ribosyltransferase-isomerase OS=Hormoscilla sp. GUM00 7 OX=2480854 GN=queA PE=3 SV=1
MPCKDFSNFINQTEPVPVCQVAFFILLQLGLYSNLDGRNFTPVLSPDRSNLDLTLASYDYELPEDLIAQNPVTPRDSSRLLVVDSPTHHQHRYFRDLPDLLQPGDLLVLNDTRVLRARLYGRKDTGTPVEVLLLEPRQSNCWLALVKPGRRLKPDAKIIFTPCINIDKKLKATVVATDADTAGRLLQFELPPGTDLEQLLPDFGHVPFPPYITASQALPEQYQTVYARQPGSVAAPTAGLHFTPELLKRLRQRGIEQRYVTLHVGVGTFRPVEVEDVTSHQMHGEWISVPETTVAQIHQTQVRGGRVLAVGTTVARSLEGAAHSGGLEAYTGKTELFIYPGYHWRVVDGLITNFHLPRSSLLMLVSAMLGRDRLLHLYREAIGHQYRFYSFGDAMLILPDAWKII

SEQ ID NO: 67362 - protein, 357 aa, Humitalea rosea
  misc_feature (1)..(357): tr|A0A2W7I653|A0A2W7I653_9PROT S-adenosylmethionine:tRN A ribosyltransferase-isomerase OS=Humitalea rosea OX=99 0373 GN=queA PE=3 SV=1
MTGWLQGGPDPATRPRVHTSDFDFCLPEALIAQEPARPRDMARLLVLRDGAIADHRMLDLPDLLEPGDVLVVNDTQVIPARLTARRGEARVGLLLNRNEGGGIWHALVRNARRLHAEDIIAIEGAENCTARVLEAPEDGAVRLDFGPDQGALARALEVAGEIPLPPYIPRPDGPRPEDATDYQTIFARTPGAVAAPTASLHFSERLLAALDARGVTRATVTLHVGAGTFLPMRAEDPREHRIHAEWGEITEAAAATINAAKRVIAVGTTALRLLESAAREDGTVAPFRGLTDIFILPGFRFRVTDGLVTNFHLPKSTLFMLVCAFAGTEAVKSAYAHAIAEGYRFYSYGDGSLMWRA

SEQ ID NO: 67363 - protein, 346 aa, Hungateiclostridiaceae bacterium; identical to SEQ ID NO: 62897
  misc_feature (1)..(346): tr|A0A1C7GVC8|A0A1C7GVC8_9FIRM S-adenosylmethionine:tRN A ribosyltransferase-isomerase OS=Hungateiclostridiacea e bacterium KB18 OX=1834198 GN=queA PE=3 SV=1

SEQ ID NO: 67364 - protein, 341 aa, Hungateiclostridium clariflavum
  misc_feature (1)..(341): tr|G8LZ37|G8LZ37_HUNCD S-adenosylmethionine:tRNA ribosy ltransferase-isomerase OS=Hungateiclostridium clariflav um (strain DSM 19732 / NBRC 101661 / EBR45) OX=720554 G N=queA PE=3 SV=1
MKVSEFYYDLPQELIAQEPLKDRKQSRLMVLDRETGAIEHRIFKDIIEYLNPGDCLVLNDTRVIPARLLGEKEGTGGKIEFVLLKNVGGDIWEVILKPGKRAKPGARFVFGNGELKAEIVDVIEEGNRLVRFEYDGIFEQILDKIGIMPLPPYITKPLEDRERYQTVYSKHKGSAAAPTAGLHFTKDLLEQIKQKGVEIAYVTLHVGLGTFRPVKVENVSEHKMHSEYYNLSEEECNKINTTKKKGGNVIAVGTTSCRVLETVGDESGLLNPKSGWTDIFIYPGYKFKVVDKLITNFHLPESTLLMLVSALAGKDKIMNAYSEAIKEKYRFFSFGDAMFIK

SEQ ID NO: 67365 - protein, 341 aa, Hungateiclostridium saccincola
  misc_feature (1)..(341): tr|A0A2K9EQF7|A0A2K9EQF7_9FIRM S-adenosylmethionine:tRN A ribosyltransferase-isomerase OS=Hungateiclostridium s accincola OX=1677857 GN=queA PE=3 SV=1
MKVSDFYYDLPEELIAQEPLKDRHLSRLLVLDRETGNIEHRVFKDIIGYLNKGDCLVLNDTRVLPARLLGKKEGTGGKIEFVLLKKIEKDIWEVILKPGKRAKPKARFIFGDGELKAEILEIVEEGNRLVKFEYDGVFEEVLDRVGIVPLPPYITKKLDDSERYQTVYSKHKGSAAAPTAGLHFTKELLEEARNKGVEIAFVTLHVGLGTFRPVKAEDVKEHKMHSEYYWIDEKNCNRINKAKKDGKKVISVGTTSSRVLETVGDENGMVKPQRGWTDIFIYPGYNFKVVDALITNFHLPCSTLLMLVSALAGRENILKAYNEAVQERYRFFSFGDAMFIK

SEQ ID NO: 67366 - protein, 341 aa, Hungateiclostridium sp.
  misc_feature (1)..(341): tr|A0A4Q0I647|A0A4Q0I647_9FIRM S-adenosylmethionine:tRN A ribosyltransferase-isomerase OS=Hungateiclostridium s p. N2K1 OX=2487273 GN=queA PE=3 SV=1
MKVSDFYYDLPQELIAQEPTAKRDMSRLLVLDREAGGICHKQFKDIGEYINKGDCLVLNDTRVIPARLLGEKEGTGGKIEFVLLKKINGDVWEVILKPGKKAKPGSRFVFGNGELKAEVIEIIEEGNRLVRFEYDGIFEQILDRVGIVPLPPYITKKIDDAERYQTVYSKYRGSAAAPTAGLHFTVELLEELANRGVNIAYVTLHVGLGTFRPVKVENLQEHKMHSEFYRINEEDCNKINAAKENGCKVIAVGTTSCRVLETVGDEKGRLKPQSGWTDIFIYPGYEFKVVDSLITNFHLPESTLIMLVSALAGRDRIMEAYNAAVREKYRFFSFGDAMFIK

SEQ ID NO: 67367 - protein, 339 aa, Hungateiclostridium straminisolvens
  misc_feature (1)..(339): tr|W4V6Z7|W4V6Z7_9FIRM S-adenosylmethionine:tRNA ribosy ltransferase-isomerase OS=Hungateiclostridium straminis olvens JCM 21531 OX=1294263 GN=queA PE=3 SV=1
MKVSDFYYDLPQELIAQEPIAKRDMSRLLVLDKETGRICHKKFKDIVEYINKGDCLVLNDTRVMPARLLGEKEGTGGKIEFVLLKRINGDVWEVILKPGKKAKPGARFVFGNGELKAEIIEIIEEGNRLVRFEYDGIFEEILDRVGIVPLPPYITKRLDDAERYQTVYSKYKGSAAAPTAGLHFTVELLDELASRGVNIAYVTLHVGLGTFRPVKAENLEEHKMHSEFYRINEEDCRKINEAKENGCRVIAVGTTSCRVLETVGDEKGKLNPQSGWTDIFIYPGYKFKVVDSLITNFHLPESTLIMLVSALAGRDKIMEAYNAAVRERYRFFSFAMPCL

SEQ ID NO: 67368 - protein, 341 aa, Hungateiclostridium thermocellum
  misc_feature (1)..(341): sp|A3DE14|QUEA_HUNT2 S-adenosylmethionine:tRNA ribosylt ransferase-isomerase OS=Hungateiclostridium thermocellu m (strain ATCC 27405 / DSM 1237 / JCM 9322 / NBRC 10340 0 / NCIMB 10682 / NRRL B-4536 / VPI 7372) OX=203
MKVSDFYYDLPQELIAQEPVEKRDMSRLMVLDKETGKISHKRFKDIVEYINKGDCLVLNDTRVIPARLLGEKEGTGGKIEFVLLKRINGDVWEVILKPGKKAKPGARFVFGNGELKAEVIEIVEEGNRLVRFEYDGIFEEILDRIGIVPLPPYITKKLDDAERYQTVYSRYKGSAAAPTAGLHFTLELLEELAGRGVKIAYVTLHVGLGTFRPVKVENLEEHKMHSEFYRIKEEDCDKINSTKQNGGKIIAVGTTSCRVLETVGDENGIVRPQSGWTDIFIYPGYKFKVVDSLITNFHLPESTLIMLVSALAGREKILEAYNIAVKERYRFFSFGDAMFIK

SEQ ID NO: 67369 - protein, 341 aa, Hungateiclostridium thermocellum; identical to SEQ ID NO: 67368
  misc_feature (1)..(341): tr|A0A4S5EY38|A0A4S5EY38_HUNTH S-adenosylmethionine:tRN A ribosyltransferase-isomerase OS=Hungateiclostridium t hermocellum OX=1515 GN=queA PE=3 SV=1

SEQ ID NO: 67370 - protein, 377 aa, Hungatella effluvii
  misc_feature (1)..(377): tr|A0A2V3Y0L4|A0A2V3Y0L4_9CLOT S-adenosylmethionine:tRN A ribosyltransferase-isomerase OS=Hungatella effluvii O X=1096246 GN=queA PE=3 SV=1
MNVKDFDFELPQELIAQDPLEDRSSSRLLVLDKKTGEIEHRTFRDILSYLRKGDCLVINDTKVIPARLFGVKEGTEAKIEILLLKRRENDIWETLVKPGKKAKIGTVITFGDGLLTGTVVDIVEEGNRLIQFSYEGIFEEILDRLGQMPLPPYITHQLKDQTRYQTVYAKHEGSAAAPTAGLHFTKDLLAEIEAMGVAIAHVTLHVGLGTFRPVKVDEIEEHHMHSEFYIVDEAEAKKVNDTKKNGGRIVCVGTTSCRTVESASTDDGVLKAGSGWTEIFIYPGYRFKTLDCLITNFHLPESTLVMLVSALAGREHVLNAYEEAIRERYRFFSFGDAMFITDLHEGAVPDVGEQNGDGDQAGDGDQVGNEAGERTEK

SEQ ID NO: 67371 - protein, 365 aa, Hungatella hathewayi; identical to SEQ ID NO: 65431
  misc_feature (1)..(365): tr|A0A174X1W4|A0A174X1W4_9CLOT S-adenosylmethionine:tRN A ribosyltransferase-isomerase OS=Hungatella hathewayi OX=154046 GN=queA_3 PE=3 SV=1

SEQ ID NO: 67372 - protein, 349 aa, Hungatella hathewayi
  misc_feature (1)..(349): tr|A0A3E2UB80|A0A3E2UB80_9CLOT S-adenosylmethionine:tRN A ribosyltransferase-isomerase OS=Hungatella hathewayi OX=154046 GN=queA PE=3 SV=1
MDVKDFDYELPEELIAQDPLEDRSASRLMVLDRETGEVQHRIFKDITEYLRPGDCLVINDTKVIPARLFGVKKDTGAKIEILLLKRRENDIWETLVRPGKKAKPGTVIEFGEGLLTGTVVDTVDDGNRLIQFHYTGIFEEILDQLGQMPLPPYITHQLKDKNRYQTVYARHEGSAAAPTAGLHFTQELLAEIEGMGVKIAHVTLHVGLGTFRPVKVENVQDHHMHSEFYIVEESEAKKVNDTRAAGGRVICVGTTSCRTVESASTEEGVLKAGTGWTEIFIYPGYRFKVLDALITNFHLPQSTLVMLVSALAGREHILDAYREAVKKGYRFFSFGDAMFIAAHPAAEKR

SEQ ID NO: 67373 - protein, 349 aa, Hwanghaeella grinnelliae
  misc_feature (1)..(349): tr|A0A437QL33|A0A437QL33_9PROT S-adenosylmethionine:tRN A ribosyltransferase-isomerase OS=Hwanghaeella grinnell iae OX=2500179 GN=queA PE=3 SV=1
MKVDLFDFDLPAELIAQHPVEPRDAARMLDLTSGSPVDRIVSALPDLLRPDDVMVVNDTKVIPARLIGRRGQAKVEVTLHRRVDGNRWRAFAKPAKKLKIGDDFVCELGLVGEVVEKFDGGEVELLFPYSGEALLDQIRMQGVMPLPPYIKRQDIAEDAEAQQQDREDYQPIFAKHEGAVAAPTASLHFTDRLLAALEAKGVTRETLTLHVGAGTFLPVKVSDTDDHVMHEEIGILTPEVAERLNAAKAEGRRIVAVGTTALRLLESAADEGGKIHPFDATTDLFITPGYRFKAVDLLLTNFHLPKSTLFMLVSAFAGLERMKAAYEHAKAEGYRFYSYGDCCLLERTE

SEQ ID NO: 67374 - protein, 352 aa, Hwanghaeicola aestuarii
  misc_feature (1)..(352): tr|A0A2W7Q2P6|A0A2W7Q2P6_9RHOB S-adenosylmethionine:tRN A ribosyltransferase-isomerase OS=Hwanghaeicola aestuar ii OX=568105 GN=queA PE=3 SV=1
MKLSEFDFELPDEFIATRPARPRSSARMLVAQGAAITDAQVSDLPDWLRPGDRLVLNDTRVIPARLAGTRTRDGHVAKVEATLLEPEPDGRWTALVKHLRKIEDGEEIAFDAGLRAQLFRRGDGMVSLRFNLEGEAFDAALAEAGLMPLPPYIAARRPADAQDMQDYQTIWARHTGAVAAPTASLHFDDALMKALRERGVELTYVTLHVGAGTFLPVKVDDILEHRMHAERGLVTAEAAAEIAATRADGGRVIAVGTTALRLIETAAQKTGAIEPWEGATDIFITPGFRFAVADGLVTNFHLPKSTLMMLVSAFLGVEEIRAVYAHAIAGAYRFYSYGDASLLLPRGGNPRA

SEQ ID NO: 67375 - protein, 341 aa, Hyalangium minutum
  misc_feature (1)..(341): tr|A0A085W4Z8|A0A085W4Z8_9DELT S-adenosylmethionine:tRN A ribosyltransferase-isomerase OS=Hyalangium minutum OX =394096 GN=DB31_3875 PE=3 SV=1
MNPAHWPREHPEANRLLHVSPSSGRISDRRVEHLPELLRSGDLLVVNDAATLPSSLHGLTVAGGPIELRLLAREEEGTWTAVLFGAGDWRMRTEDRPAPPLLTVGTQLVLGTLKACVVEVLPPSPRLLRVAFEAQGAELWAGLYRSGKPVQYSYLSGPLALWHIQTAYAARPWAAEAPSAGLPLTWALLLELRRRGVRFASLTHAAGLSSTGDAALDAALPRPERFELPASTVEAIHATRASGGRVVAVGTTVVRALEGRAAQAGGRLTAGEGVTDLLMGPGFIPKVVSGLLTGVHEPATSHYMLLQAFAPLALLREAAQIAEKRGYLGHEFGDSCLILDA

SEQ ID NO: 67376 - protein, 361 aa, Hyalangium minutum
  misc_feature (1)..(361): tr|A0A085WFY3|A0A085WFY3_9DELT S-adenosylmethionine:tRN A ribosyltransferase-isomerase OS=Hyalangium minutum OX =394096 GN=queA PE=3 SV=1
MSSLLSDYDFELPEAQIAQQPLGTRDASRLMTVSRSSGTWEHRRFSDLPSLLRSGDVLVVNDARVIPARLLGAKSGTGGRVELLVVRPAASTLTSAALSQAAEASDWICLGQASKGLKPGARVDFPSGLSAEVLEALGGGEYRVRFHAPPGASFQELLQQAGKLPLPPYITREPDAADAERYQTVYARASGSVAAPTAGLHFTEATFAALEARGVKRVTVTLDVGPGTFLPVREEDLDRHKMHPERYGVSEETAATINAAKAEGRRIVAVGTTVVRTLESATDPQTGKLRAGLGDTVLFIRPGFPFRQVDLLLTNFHLPRSTLVMLVSALLGRERTLAAYREAVQAGYRFFSYGDAMLVTE

SEQ ID NO: 67377 - protein, 349 aa, Hydrobacter penzbergensis
  misc_feature (1)..(349): tr|A0A1H2RIF6|A0A1H2RIF6_9BACT S-adenosylmethionine:tRN A ribosyltransferase-isomerase OS=Hydrobacter penzberge nsis OX=1235997 GN=queA PE=3 SV=1
MKLSQFKFDLPLNLIAQNPTKRREDSRMMVVDRKSGHMENRHFRDIIEYFDDKDVFVVNNTKVFPARMYGRKEKTGAKIEVFLLRELNKPNRLWDVIVDPARKIRVGNKLYFGDNEELVAEVIDNTTSRGRTIRFLWDDDDESFKKMLEFLGETPLPKYIKRKPDEEDKERYQTVYAKYEGAVAAPTAGLHFSKELIKRCEILGIRFAEVTLHTGLGTFRPIEVEDLSKHKMDAEYYAITEEACRIVNKAKETGRRVCSIGTTTMRAMESSFTAQKLLKPSEGWTNHFIHPPYTFNVADSLVTNFHLPKTSLLIMTCAFAGYDLAMEAYKKAIKDKYRFFSYGDALLII

SEQ ID NO: 67378 - protein, 408 aa, Hydrobacter penzbergensis
  misc_feature (1)..(408): tr|A0A1H2WTE3|A0A1H2WTE3_9BACT S-adenosylmethionine:tRN A ribosyltransferase-isomerase OS=Hydrobacter penzberge nsis OX=1235997 GN=SAMN05444410_10692 PE=3 SV=1
MHPKALSILDFTYTLPDDRIARFPLEARDQSRLLVYRGGQISETVYVSLAGELPGGSLLVFNNTKVVEARLLFQKNTGSIIEIFCLEPHEQYPDITSAMLEKGKVWWKCLVGGAKKWKEPVLHKALSDSGIVLSAKKIEQRADHYIIELSWNDANLSFAELLHLAGALPLPPYLNRAAEESDKERYQTIYARYDGSVAAPTAGLHFTDAVFASLSQKNIRHEFVTLHVGAGTFKPVKSATMEEHDMHAEFIDVPLSVIEKLLQQWPDTIVPVGTTSLRTIESLYWLGVKTILHPDIQPAALHLTQWEPYQLKHEAISPSLALQSLINWMQQHQLQKLLTKTQIIMAPGYTLKIAKGLITNFHQPQSTLLLLVAAIVGDDWKRIYNYALEHGFRFLSYGDGCLLMSDIV

SEQ ID NO: 67379 - protein, 350 aa, Hydrocarboniclastica marina
  misc_feature (1)..(350): tr|A0A4P7XHD3|A0A4P7XHD3_9ALTE S-adenosylmethionine:tRN A ribosyltransferase-isomerase OS=Hydrocarboniclastica marina OX=2259620 GN=queA PE=3 SV=1
MQVSDFDFHLPDELIARYPLKNRSDSRLLCLDSDSGQISHRHFREIETLLEPGDLLVFNDTRVIPARLYAQKETGGKVEILIERVTGERTCLAHVRASKSPKAGQALVLEDGTRLAVTGREDALFMLAVERDEPVFRVLERLGHMPLPPYIDRPDELADRERYQTVYARNAGAVAAPTAGLHFDRNLLERLTAKGVSQAFVTLHVGAGTFQPVRVDRVEDHQMHSEWLEVGQEAVAAVERTRTLGGRVIAVGTTSVRALESAAADGALRPFQGETTIFIYPGRPFRVIDSLITNFHLPQSTLLMLVSALAGRDAVMQAYQAAIAERYRFFSYGDAMFIDDRLGLTGEQPE

SEQ ID NO: 67380 - protein, 354 aa, Hydrocarboniphaga daqingensis
  misc_feature (1)..(354): tr|A0A1M5RME4|A0A1M5RME4_9GAMM S-adenosylmethionine:tRN A ribosyltransferase-isomerase OS=Hydrocarboniphaga daq ingensis OX=490188 GN=queA PE=3 SV=1
MRRSDFSYDLPPELIAQTPAGQRSGSRLLDVGLDGDAPLADLRMTDLPDLLDPRDLLIFNDTRVIPARLFGRKPTGGRVQMLVERVLGEHEMLAQIGASKTPKPGGTILIDLPDGRIAELVMIGRDDDLFHLRLSSGGTVMQLLDTAGRLPLPPYITHSPGSEDAERYQTLFAAKPGAVAAPTAGLHFDDALLQRLRERGLRIETLTLHVGAGTFQPMRVDDLSEHRMHAERYEIPPALADAIAQTRANGGRVVAVGTTVARALESAATAPGIVAVGEGETRLFITPGYRFRIVDRLVTNFHLPESTLLMLVSAFAGYERIFDAYRHAVAQRYRFFSYGDAMLLTRAEPAHPTE

SEQ ID NO: 67381 - protein, 346 aa, Hydrocarboniphaga effusa
  misc_feature (1)..(346): tr|I8T7S5|I8T7S5_9GAMM S-adenosylmethionine:tRNA ribosy ltransferase-isomerase OS=Hydrocarboniphaga effusa AP10 3 OX=1172194 GN=queA PE=3 SV=1
MRRSDFNYELPPELIAQFPAERRSASRLLELAPNGTLADRQMRDFASLIEPGDLLIFNDTRVIPARLFGRKPTGGRVEILIERLLGEREALAQVGASKTPKPGGEILIDLADGEAPAVLVMIDRQDDMFRLQLHSAGSFERLMERVGRLPLPPYIEHAPGGFDAERYQTVFAAKPGAVAAPTAGLHFDDTLLADLNSRGVRTATLTLHVGAGTFQPLRVDDVSEHRMHAERYEISPELCEAIVRTKARGGRVVAVGTTVTRALESAALSGTLQSGAGETRLFITPGYRFNVVDRLLTNFHLPESTLLMLVSAFAGYERIMAAYRHAVQQRYRFFSYGDAMLLTRQG

SEQ ID NO: 67382 - protein, 379 aa, Hydrococcus rivularis
  misc_feature (1)..(379): tr|A0A1U7HB62|A0A1U7HB62_9CYAN S-adenosylmethionine:tRN A ribosyltransferase-isomerase OS=Hydrococcus rivularis NIES-593 OX=1921803 GN=queA PE=3 SV=1
MTDPPEKTANQLLSNYDYELPTELIAQNPVVPRDNSRLLVVNSPTTHVHSIFRDLPDWLQPGDLLVLNNTRVIPARLYGHKSTGSPVEILLLEEKQENCWLALVKPGKRFKIGTKILFHPASGELPEGVFLKATVIARDEATSGRLLEFELPSGQSLWDLLDKFGQIPFPPYVTHSQALPDQYQTIYAQQAGSVAAPTAGLHFTEELFQRLEEKGIQKAHITLHVGVGTFRPIEVEDITQHVMHQEWLEVPEATVEKIKGTKAKGGRIIAVGTTVARALEGAAQETEKAGEEFLRPFRGKTDLFIYPGYRWRVVEGMITNFHLPRSSLLILLSALIGRDRVLALYREAVQQRYRFYSFGDAMLILPAATISNQSFDAIN

SEQ ID NO: 67383 - protein, 367 aa, Hydrocoleum sp.
  misc_feature (1)..(367): tr|A0A261KKI0|A0A261KKI0_9CYAN S-adenosylmethionine:tRN A ribosyltransferase-isomerase OS=Hydrocoleum sp. CS-95 3 OX=1671698 GN=queA PE=3 SV=1
MTDLDWSIESYDYELPLELIAQNPVVPRDSSRLMVVESLTHRNCIFRDLPDLLQPEDLLVLNNTRVIPARLYGQKTSGAQVEILLLKPITSDSWLALVKPGKRFITGATIEFEPNSSFACDYKLQARVLATDGETGGRVLKFDLPPGVSLINLLDKFGHVPFPPYVTDSQTLSEQYQTVYSKVAGAIAAPTAGLHFTDELLEKLEQRNIGQAFITLHVGIGTFRPVEVKDITTHNIHSEWVEVSSLTVDKILQTKAKGGRIIAVGTTVVRAIEGAALANDSYGSDECLIKPFCDYTDIYIYPGYKWRVVDGLITNFHLPRSSLLMLVSAMIGRKRLLSLYKEAITQKYRFYSFGDAMLILPSARIDF

SEQ ID NO: 67384 - protein, 390 aa, Hydrogenibacillus schlegelii
  misc_feature (1)..(390): tr|A0A179ITY8|A0A179ITY8_HYDSH S-adenosylmethionine:tRN A ribosyltransferase-isomerase OS=Hydrogenibacillus sch legelii OX=1484 GN=queA PE=3 SV=1
MDVSLFDYALPEELIAQRPLERRDASRLMVLDRFRRTIEHRQFDALPDLLRRGDVLVLNDSRVIPARLFGEKPETGAHVEVLLLHPTTDGPDVWATLVRPARRARVGTAIVFGRDGRRGAAAGGQREGRAGEGGTARSDEPSSAAGEDRGDGVGEAPGREEGPLWAEVVREGEEGVRFLRFRYRGTFEAVLQALGEMPLPPYIRERLDDPERYQTVFAREPGSVAAPTAGLHFTPELIDRLRAAGIETVFVTLHVGLGTFRPVTAASVEAHRMHSEFFRVSPEAAEALNRFRNEGRRIIAVGTTAVRALESAADEGGRLRAREGWTDLFIVPGYRFRAVDGLITNFHLPRSTLLMLVAAFAGRAFILEAYQEAIRKRYRFYSFGDAMLIL

SEQ ID NO: 67385 - protein, 349 aa, Hydrogenimonas sp.
  misc_feature (1)..(349): tr|A0A3G9GXI3|A0A3G9GXI3_9PROT S-adenosylmethionine:tRN A ribosyltransferase-isomerase OS=Hydrogenimonas sp. OX =2231112 GN=queA PE=3 SV=1
MRPEAKSLPKNSLKTESYDYTLPPELIATEPAEPKESSRLLVIERESGKITHALFKDILSFIPEGCAVLYNDTKVIKARLFGRKSSGGSVELLINRPLGGSRYSVLIRGRVRAGTILHFGKTLKAGVEKLCGDGSRVVTFFDKEDRPLPFEELLPYLERLGHMPLPPYIGREDTKADEKSYQPVFAEKEGAVAAPTASLHFSDKLFEELKKRFETAPVTLHVGAGTFKPVEAETITDHPMHSEYYEIPDKAASIIDSQKEILAIGTTVTRTVEYYVRTAKRSGECDLFLHPGNPPMRVDHLLTNFHLPKSTLIMLVASFLGIEETIKVYNEAIKKRYRFYSYGDAMLIL

SEQ ID NO: 67386 - protein, 348 aa, Hydrogenimonas sp.
  misc_feature (1)..(348): tr|A0A432R330|A0A432R330_9PROT S-adenosylmethionine:tRN A ribosyltransferase-isomerase OS=Hydrogenimonas sp. OX =2231112 GN=queA PE=3 SV=1
MRVSESETPDILKTDSYDYQLPSELIATEPANPKDSSRLMVIDRTNGTITHTIFREILSFIPKECAIIYNNTKVIKARLFGEKPSGGKIELLINRQLDANRYNVLIRGKVKPQTELIFDDQLKATVLELCDDGSRIVHFMNHKGEILSFETLLPHLERLGHVPLPPYMQREDRKEDEELYQPIFAKHEGAVAAPTASLHFTETLFETMQKQFTTAPITLHVGAGTFKPVEADIITQHPMHSEYYEISPQTEALINSDRDILAIGTTVTRTIEYYARTSKPFGECDLFLHPKNPPIRVNHLLTNFHLPKSTLIMLVASFLGLEMTMKVYNIAIQERYRFYSYGDAMLII

SEQ ID NO: 67387 - protein, 341 aa, Hydrogenimonas thermophila
  misc_feature (1)..(341): tr|A0A1I5MLE8|A0A1I5MLE8_9PROT S-adenosylmethionine:tRN A ribosyltransferase-isomerase OS=Hydrogenimonas thermo phila OX=223786 GN=queA PE=3 SV=1
MSKELKTESYDYTLPPELIATEPAEPRDSARLLVVDRKSGKVAHTIFSDIFSFLPQESAIIYNNTKVIKARLFGKKSSGGKIELLINKQLDANRYNVLIRGKVKEDTQLIFDENLYAKVLQLCDDGSRVVSFYDQNDRLIKFEELLQHLDRLGHIPLPPYMQREDSKEDEKNYQPVFAKYEGAVAAPTASLHFTDKLFEKMQQNYTTSPITLHVGAGTFKPVEADIITDHPMHSEYYDIPLQTKKIIDSDTPITAIGTTVTRTIEYYARSGKPFGECDLFLHPKNKPIRVNHLLTNFHLPKSTLIMLVSSFLGIEMTMKVYNLAIKERYRFYSYGDAMLII

SEQ ID NO: 67388 - protein, 340 aa, Hydrogenispora ethanolica
  misc_feature (1)..(340): tr|A0A4V2QDU9|A0A4V2QDU9_9FIRM S-adenosylmethionine:tRN A ribosyltransferase-isomerase OS=Hydrogenispora ethano lica OX=1082276 GN=queA PE=3 SV=1
MLVSQFDYELPPELIAQEAVEPRDHSRLMVIRRAGPSVTDHHFYDLPEFLRAGDLLVFNDTRVIPARLHGQKDGPDGARVEVFLLKECRAGHWECLVRPGKRLKVGAVIRFPGDMTGRVVESGAEGTRIIAFSGPSDFREWLRANGTTPLPPYITKPVADPERYQTVYGVHEGSVAAPTAGLHFTTRLLDQLRQAGIAFGYLTLNVGLGTFRPVQAETIEEHHMHSEIFTLPEELVAQIAATKQAGGRVIAVGTTVVRVLESQARGGPLQAGSGDTDIFIYPGFQFRVIDGLVTNFHLPKSTLLMLVSALAGRELILESYRHAVAEGYRFFSFGDATLIL

SEQ ID NO: 67389 - protein, 334 aa, Hydrogenivirga caldilitoris
  misc_feature (1)..(334): tr|A0A497XPQ2|A0A497XPQ2_9AQUI S-adenosylmethionine:tRN A ribosyltransferase-isomerase OS=Hydrogenivirga caldil itoris OX=246264 GN=queA PE=3 SV=1
MRVEEFDYELPEELIAKYPAVPRHSARLMVLDRRTQEIKHDTFWNLPDYLERGDLLVFNNTKVLPARLYGRKSTGGKVEVVLTDYIKPDMWRALIGGKKIKPGLVIDIAPDFKVEVLEHIEESKFLIRLVGDNPLKLLDRYGYIPIPPYLGREEESIDREYYQTVFAKEEGAVAAPTASLHFSEELLGKLEDRGIEKTFVTLHVSYGTFKPVKVNEVEKHHVEPEYVKVDEEAVEKIVKAKRRGSRVIAVGTTVVRALETSPFKSYEGWTELYIYPGFGFKVVDALITNFHLPRSSLLFLVCAFGGKDFVLRAYREAVSKRYRFYSYGDGMLIL

SEQ ID NO: 67390 - protein, 334 aa, Hydrogenivirga sp.
  misc_feature (1)..(334): tr|A8UTB1|A8UTB1_9AQUI S-adenosylmethionine:tRNA ribosy ltransferase-isomerase OS=Hydrogenivirga sp. 128-5-R1-1 OX=392423 GN=queA PE=3 SV=1
MRVEEFDYELPEELIAKYPVVPRHSARLMVLDRGSQSIKHDTFWNLPDHLEEGDLLVFNNTKVIPARLYGRKPTGGKVEVVLTDYVKPDLWKALVGGKKIRKGLSIEIAPDFGIEVLEHIEDGKFLVRLMGKDPLKLVDRYGHIPIPPYLRREEEDIDREYYQTIFAEEEGAVASPTASLHFSEELLEKLERKGIGRTFVTLHVSYGTFKPVKTDSVEEHVVEPEYIRVPEETVEKIHNTKERGGRVVAVGTTVVRALETSPFKSYEGWTELYIYPGYEFKVVDALITNFHLPRSSLLFLVSAFGGKEFVLKAYREAVSKEYRFYSYGDGMLIL

SEQ ID NO: 67391 - protein, 355 aa, Hydrogenoanaerobacterium saccharovorans
  misc_feature (1)..(355): tr|A0A1H7ZPT9|A0A1H7ZPT9_9FIRM S-adenosylmethionine:tRN A ribosyltransferase-isomerase OS=Hydrogenoanaerobacter ium saccharovorans OX=474960 GN=queA PE=3 SV=1
MKTSDFWFDLPEELIAQTPIEPRNHSRMLCMNGDTGELKHKHFYDLTQMLQAGDTLILNDSRVLPARLYGVKEHTGAAIEFLLLEQHQKDVWEILVRPGKKAKTGVRFVFGDGLLVAEILETIDGGNRLVKFTYPEGENFYTILEKIGQMPLPPYITKRLEDKERYQTVYSKELGSAAAPTAGLHFTKDMMQELRDKGVNIGYVTLHVGLGTFRPVKVDNVNDHHMHSEHYHMPQETVDLINCTKANGHRVIGVGTTACRTVESVATKFGGVLQADDGYTDIFIYPGYDFKVLDCLITNFHLPESTLIMLVSAFAGYNHILNAYKVAVEEKYRFFSFGDCMFLTKCNGDTKNGLE

SEQ ID NO: 67392 - protein, 334 aa, Hydrogenobacter hydrogenophilus
  misc_feature (1)..(334): tr|A0A285NRY9|A0A285NRY9_9AQUI S-adenosylmethionine:tRN A ribosyltransferase-isomerase OS=Hydrogenobacter hydro genophilus OX=35835 GN=queA PE=3 SV=1
MRLEDFDYELPPELIAKYPLTERHKARLMVLDRKDKSIKHDIFWNLPLYLEEGDLLVFNNTKVLPARLYGEKPTGGKVEVLLTDFVENNLWEALVGGKNIKGGLSIRIADDFEVKILKHISEGKFLVELCAHDPVQALYKHGHIPIPPYLEREEEEIDKVYYQTVFAQKEGSVAAPTASLHFSEELLKRLDEFGIRKAFITLHVSYGTFKPVKVSDVKEHKVDAEYAEVPEETVELIKQVKEEGKRVVAVGTTVVRALETKPFCAFRGKTDLYIYPGYEFKVVSAMITNFHLPRSSLLLLVSAFAGREFVLEAYKLAVKERYRFYSYGDGMLIL

SEQ ID NO: 67393 - protein, 334 aa, Hydrogenobacter thermophilus
  misc_feature (1)..(334): tr|D3DIM9|D3DIM9_HYDTT S-adenosylmethionine:tRNA ribosy ltransferase-isomerase OS=Hydrogenobacter thermophilus (strain DSM 6534 / IAM 12695 / TK-6) OX=608538 GN=queA PE=3 SV=1
MRLEDFDFELPPELIAKYPLKERHMARLMVLNRKDKSIKHDIFWNLPLYLEEGDLLVFNNTKVIPARLYGKKPTGGRVEILLTDMLKEHLWYALVSGKNIREGLCVYIAQDLSVNILKHISEGKFLVELLSQDPIKALYTYGHIPIPPYLEREEEHIDRVYYQTVFAQKEGSVAAPTASLHFSEELLNRLDEYGIRKAFITLHVSYGTFKPIKVSDIREHKVDEEYMEVPEETVELIKKVKQEGKKVVAVGTTVVRALETKPFSPFSGKTDLYIYPGYTFKVVDAMITNFHLPRSSLLLLVSAFAGREFILSAYQIAIKERYRFYSYGDGMLIL

SEQ ID NO: 67394 - protein, 343 aa, Hydrogenobaculum sp.
  misc_feature (1)..(343): sp|B4U7T2|QUEA_HYDS0 S-adenosylmethionine:tRNA ribosylt ransferase-isomerase OS=Hydrogenobaculum sp. (strain Y0 4AAS1) OX=380749 GN=queA PE=3 SV=1
MDISLFDYDLPEELIAKYPVNPRHSAKLMVLDRKSSNITHSTFWHIDEFLEEGDLLIFNDTKVLPARLLGKKKGIENSNVEILLLRHLENEKWEALVGGKNIKPGLVIEISYDFEAIVESQIEKSKFLVLLKAKNQNQIEAINKYGKIPIPPYLGRDEEPIDKEFYQTVFAKKEFSVAAPTASLHFSNELLEKLKKKVNIDFVTLHVSYGTFKPVTVQNIEEHKVDEEYIEVSESLIKNIKKTKKMCKRVIAVGTTVTRALETAIDKPYFGFTDLYIKPGFKFKVLDGFITNFHLPKSSLLILVSAFCNEENLDGREFILKSYKEAVKHKYRFYSYGDGMLIL

SEQ ID NO: 67395 - protein, 343 aa, Hydrogenobaculum sp.
  misc_feature (1)..(343): tr|M1RCK6|M1RCK6_9AQUI S-adenosylmethionine:tRNA ribosy ltransferase-isomerase OS=Hydrogenobaculum sp. HO OX=54 7144 GN=queA PE=3 SV=1
MDISLFDYDLPEELIAKYPVNPRHSAKLMVLDRKSSNITHSTFWHIDEFLEEGDLLIFNDTKVLPARLLGKKKGIENSNVEILLLRHLENEKWEALVGGKNIKPGLVIEISDDFEAIIHSQIEKSKFLVLLKAKNQNQIEAINKYGKIPIPPYLGRDEEPIDKEFYQTVFAKKEFSVAAPTASLHFSKELLEKLKKKVNIDFVTLHVSYGTFKPVTVQNIEEHKVDEEYIEVSESLIKNIKKTKEMGKRVIAVGTTVTRALETAIDKPYFGFTDLYIKPGFKFKVLDGLITNFHLPKSSLLILVSAFCNTKNLNGREFILKAYKEAVKHKYRFYSYGDGMLIF

SEQ ID NO: 67396 - protein, 372 aa, Hydrogenophaga crassostreae
  misc_feature (1)..(372): tr|A0A162SVW5|A0A162SVW5_9BURK S-adenosylmethionine:tRN A ribosyltransferase-isomerase OS=Hydrogenophaga crasso streae OX=1763535 GN=queA PE=3 SV=1
MQPQRTRDFTVADFDFTLPDELIAQHPAAERSASRLLDGRSDEAPVDRIFRELPSLLNPGDLLVFNDTQVVKARLFGEKASGGKLELLIERVLLPHEALDGSANEVVGHIRVSKKPQPGGLLHMVGGLKGGGFDATFLGRWPDAQGQLFRLRLQGPGTETPYDLMAQHGHVPLPPYITHADDADDERRYQTVFARVPGAVAAPTASLHFDEGVLAALKARGVETASVTLHVGAGTFAPMKTEQISEHVMHHERYAMPPETVQAIAACQARGGRVVAVGTTTVRTLETWARNSETQGDTNIFITPGFRFEVVDLLVTNFHLPKSTLMMLVSAFAGYERVMDLYRHAVASRYRFFSYGDAMLLQRQPPSTQRCS

SEQ ID NO: 67397 - protein, 347 aa, Hydrogenophaga intermedia
  misc_feature (1)..(347): tr|A0A1L1PP37|A0A1L1PP37_HYDIT S-adenosylmethionine:tRN A ribosyltransferase-isomerase OS=Hydrogenophaga interm edia OX=65786 GN=queA PE=3 SV=1
MTISSAPRAFTLSDFDFALPPELIAQHPAPERSGSRLLDGSATAPVDRVFRELPDLLNPGDLLVFNDTQVIKARLFGRKATGGALELLVERVLQNHEVVAHMKVSKKPLVGAVVEMDGGFTAELLGRWPDDDGTLFRFRFSGEPHALMAAHGHVPLPPYIEHGDTAEDERRYQTVFAKHPGAVAAPTAALHFDEALLAALRARGVHMAEVTLHVGAGTFQPVKTENIAEHTMHAEWYRVPEPTIAAIEACRARGARVVAVGTTTVRTLESWAAFGHTEGDTQIFITPGFRFQVVDRLITNFHLPRSTLMMLVSAFAGYERVMALYAHAIAQRYRFFSYGDAMLLQRR

SEQ ID NO: 67398 - protein, 369 aa, Hydrogenophaga pseudoflava
  misc_feature (1)..(369): tr|A0A4P6WWF5|A0A4P6WWF5_HYDPS S-adenosylmethionine:tRN A ribosyltransferase-isomerase OS=Hydrogenophaga pseudo flava OX=47421 GN=queA PE=3 SV=1
MTSSSSSSARHFTVADFDFSLPEHLIAQHPAAERSASRLLDGTGELPVDRIFRELPGLLQPGDLLVFNDTQVVKARLFGEKASGGKLELLIERVLLPHEALDGSPNEVVGHLRVSKKPLPGGRLHLAGGLKGGGFDAVFIGRWPDEHGQLFRLRLEGPAGEDPYTLMARHGHVPLPPYITHADEADDERRYQTVFARVPGAVAAPTAALHFDEGVLSGLEARGVHRANVTLHVGAGTFAPMKTERIEEHVMHHERYAIPPATVRAIEECRARGGRVVAVGTTTVRTLESWAKTGELQGDTNIFITPGFDFRVVDVLVTNFHLPKSTLMMLVSAFAGYDHVMALYRHAVAQGYRFFSYGDSMLLARSTQA

SEQ ID NO: 67399 - protein, 370 aa, Hydrogenophaga sp.
  misc_feature (1)..(370): tr|A0A1B3LWY2|A0A1B3LWY2_9BURK S-adenosylmethionine:tRN A ribosyltransferase-isomerase OS=Hydrogenophaga sp. RA C07 OX=1842537 GN=queA PE=3 SV=1
MPSSASSARTLTVADFDFRLPPELIAQHPAPERSASRLLDGTGSAPVDRIFRELPGLLKDGDLLVFNDTQVMKARLFGQKASGGQLEMLIERVLLPLEASDGTVHEVVAHLRVSKKPQLGGRLHMAGGLGRGGFDAVFIGRWPDEQGQLFRFRLHGPAGETPYELMARHGHVPLPPYITHTDEADDERRYQTVFARVPGAVAAPTAALHFDETVLAALDARGVRRASVTLHVGAGTFAPMKAGRIEDHVMHHERYAIPPATLQAIADCRARGGRVVAVGTTTVRTLESWARSGETEGDTNIFITPGFGFQVVDLMVTNFHLPQSTLMMLVSAFAGFDHIRALYAHAIEHRYRFFSYGDAMLLSRNPDAAV

SEQ ID NO: 67400 - protein, 353 aa, Hydrogenophaga sp.
  misc_feature (1)..(353): tr|A0A1Y2QFX6|A0A1Y2QFX6_9BURK S-adenosylmethionine:tRN A ribosyltransferase-isomerase OS=Hydrogenophaga sp. IB VHS2 OX=1985170 GN=queA PE=3 SV=1
MTSSPAAPRAFTLGDFDFALPPELIAQHPAAERSASRLLDGTGPAPVDRVFRDLPGLLQPGDLLVFNDTQVIKARLFGEKSTGGKVELLVERVLTDHEVVAHMKVSKKPAVGGVIHLAGGCTATLTGRWPDEHGALFRFRFSEEPHAVMQAHGHVPLPPYITHEDTADDERRYQTVFAKNPGAVAAPTAALHFDEGVLAGLRERGVHTAEVTLHVGAGTFQPVKTDNIAEHTMHAEWYRVPASTIAAIEACRARGGRVVAVGTTSVRTLESWARTGQTEGDTSIFITPGFAFRVVDLLITNFHLPKSTLMMLISALAGHREVMDLYAHAIAQRYRFFSYGDAMLLSRNPHAAV

SEQ ID NO: 67401 - protein, 344 aa, Hydrogenophilaceae bacterium
  misc_feature (1)..(344): tr|A0A1J4Z5P3|A0A1J4Z5P3_9PROT S-adenosylmethionine:tRN A ribosyltransferase-isomerase OS=Hydrogenophilaceae ba cterium CG1_02_62_390 OX=1805218 GN=queA PE=3 SV=1
MKTSDFDYFLADDLIARYPLPDRTASRLLHVDGPAKRFEDRLFADLPAFFKPGDLLIFNDTRVIKARLFGEKATGGRVEALVERVLSDREALAFIRASHKPKPGARLRFSDAFEAEVVERQDDLYRLAFDPTRTVLSWLDQYGLLPLPPYIDRAAEVSDDARYQTVYARDPGAVAAPTAGLHFDQAMLTRLQEAGVETAFVTLHVGAGTFQPVRVEAIADHHMHSECYEIPVATVAAVAKAQAAGGRIGAVGTTSLRALESAARAGELKAGAGETDIFITPGYKFRLIERLVTNFHLPKSTLLMLVSAFGGHDLMRRAYDHAVAERYRFFSYGDAMLIEKNDEI

SEQ ID NO: 67402 - protein, 247 aa, Hydrogenophilales bacterium
  misc_feature (1)..(247): tr|A0A258SLF7|A0A258SLF7_9PROT S-adenosylmethionine:tRN A ribosyltransferase-isomerase (Fragment) OS=Hydrogenop hilales bacterium 16-62-9 OX=1970520 GN=B7Y33_04395 PE= 3 SV=1
MQVSDFDFDLPDELIAQLPPEVRGGSRLLHVEASGLRHDRSFSDLPSLLHPDDLLVMNDTRVIKARLFGNKDSGGKVELLVERVTDEFDALAFIRASHAPKPGSRILLADDVWADVLARQDDLTQLRFQRPVLEVLEQLGRLPLPPYITHTPTADDEARYQTVYANEPGAVAAPTAGLHFTPDLMARLRDNGISIEFVTLHVGAGTFLPVKADRIEDHQMHAEWGSIDDQTALRLNAARATGGRIIA

SEQ ID NO: 67403 - protein, 345 aa, Hydrogenophilales bacterium
  misc_feature (1)..(345): tr|A0A259FK66|A0A259FK66_9PROT S-adenosylmethionine:tRN A ribosyltransferase-isomerase OS=Hydrogenophilales bac terium 17-64-34 OX=1970527 GN=queA PE=3 SV=1
MRVADFDFDLPPDLIAQFPPATRGASRLLHIDPAGACHDRQFADLPDLLRPDDLLVLNDTRVIKARLFGQKDSGGKVELLVERVTDEFEALAFIRASHAPKPGSRIVLADSTALDVLARQADLTRLRFPRPVLDVLDALGRLPLPPYIEHDPTVDDDARYQTVYANEPGAVAAPTAGLHFDDAMLARLAAQGTRTARVTLHVGAGTFQPVRVDEVADHKMHSERYTIPQATVDAIAETRARGGRVVAVGTTSLRALESAAQAGPLRAGSDETDIFITPGFTFRVVDALITNFHLPKSTLLMLVSAFSSLDIIHAAYAHAIQNRYRFFSYGDATFLERPANLNRPT

SEQ ID NO: 67404 - protein, 358 aa, Hydrogenophilus thermoluteolus
  misc_feature (1)..(358): tr|A0A2Z6DVW6|A0A2Z6DVW6_HYDTE S-adenosylmethionine:tRN A ribosyltransferase-isomerase OS=Hydrogenophilus therm oluteolus OX=297 GN=queA PE=3 SV=1
MRLCQELDRLDAYDFPLPPERIARYPQPERDASRLLVVGEERFDDRTFRDLPALLVPGDLLVLNDSRVIHARLFGHKATGGEVEVLFERLIGEKEALALVRASKSPKPGTTLHLAKAFTVEVVDRHGDLFHVRLRDDGTLFDWIERFGQLPIPPYLERQPEETDETRYQTVFARHPGSVAAPTAGLHFTEPLLAQLQNQGVGLAWVTLHVGAGTFQPVRTERVNEHRMHAERFVIPEATVEAIARTKAAGKRVIAVGTTAMRTLEGAAHHWGRLRAGQGETDLFIRPGFRFQVVDALITNFHLPRSTLIMLVAAFAGYQRTMAAYRHALAGDYRFFSYGDAMFLPQRYDTDWAPHETH

SEQ ID NO: 67405 - protein, 337 aa, Hydrogenothermus marinus
  misc_feature (1)..(337): tr|A0A3M0B830|A0A3M0B830_9AQUI S-adenosylmethionine:tRN A ribosyltransferase-isomerase OS=Hydrogenothermus mari nus OX=133270 GN=queA PE=3 SV=1
MIKLSDFDYNLPKELIAKYPHEPRDECRLMVLNRKKKTIEHKIFKDIIDYLEEGDLLVLNDTKVIPARLKGKKKTGANIEIFLLRPFSENQWEVLIKNIKRLKEGQEVIIANDFKIKLIEKYEEGKAKVELIGENINQLIKKYGHIPLPPYIEREDEEKDKDYYQTVFAKKEGAVASPTAGLHFTERLLKQLEEKGVKKAFCTLHVGLGTFRPIKTEDITKHKMHEEFYQIPDETLQLINETKKKGKKVVAVGTTVVRTLETYAQTNKKEGFSDIFIYPPYKFKIVDTLITNFHLPKSTLLLLVSAFANRDFILKAYEIAIKERYRFFSYGDAMLII

SEQ ID NO: 67406 - protein, 337 aa, Hydrogenothermus sp.
  misc_feature (1)..(337): tr|A0A432R9L1|A0A432R9L1_9AQUI S-adenosylmethionine:tRN A ribosyltransferase-isomerase OS=Hydrogenothermus sp. OX=2231113 GN=queA PE=3 SV=1
MIKLSDYDYELPKELIAKYPVEPRDSCKLMVLNRKTKTIEHRIFRDLGDYLEEGDLLVLNDTKVIPARLKGKKKTGANIEIFLLRPFSENIWEVLVKNIKRLKEGQEVIIAPDFKVKLLEKYEEGKAKVELIGENIKQLIEKYGHVPLPPYIEREDEEKDKDYYQTVFAKKEGAVASPTAGLHFTKELLEKLEKKGVKKAFCTLHVGLGTFRPIQTEDITKHKMHEEFYQIPDETLKLIKETKQKGKKVVAVGTTVVRTLETYAQTGKKEGFSDIFIYPPYKFKIIDALITNFHLPKSTLILLVSAFADRDFILKAYKIAVEKKYRFFSYGDAMLIL

SEQ ID NO: 67407 - protein, 351 aa, Hydrogenovibrio crunogenus
  misc_feature (1)..(351): tr|A0A4P7P085|A0A4P7P085_9GAMM S-adenosylmethionine:tRN A ribosyltransferase-isomerase OS=Hydrogenovibrio cruno genus OX=39765 GN=queA PE=3 SV=1
MRRQDFNFELPEALIAQQPAKERTQSRLLVMNGDGSVSDCHFPDILSYVNENDCLIFNNTKVIPARLFGQKLTGGKVELLIERVLDEHRVLTHIRSSNAPKSGAQLRIADAFEAEVLGRDGALFELRLSKDDAPELTALELIEAYGHMPLPPYIEREDQLEDKERYQTVYSEKPGAVAAPTAGLHFDNDLLDKIKAKGAATGFVTLHVGAGTFKPVQVDDISEHVMHSEVIEVLPETVELIKQTRQKGGRVIAVGTTSIRCLESAATFSETGELAPYQGETDIFITPGYDFKVVDVLLTNFHLPESTLIMLVSALAGYERTMQAYAHAVEQKYRFFSYGDAMLVHPPTSES

SEQ ID NO: 67408 - protein, 351 aa, Hydrogenovibrio crunogenus
  misc_feature (1)..(351): sp|Q31FZ4|QUEA_HYDCU S-adenosylmethionine:tRNA ribosylt ransferase-isomerase OS=Hydrogenovibrio crunogenus (str ain XCL-2) OX=317025 GN=queA PE=3 SV=1
MRRQDFNFELPEALIAQQPAKERTQSRLLVMNADGSVSDCHFPDILSYVNENDCLIFNNTKVIPARLFGQKLTGGKVELLIERVLDERRVLTHIRSSNAPKSGAKLRIEEAFDAEVLGREGALFEVQLSKDEAPELTALELIEAHGHMPLPPYIEREDQLEDKERYQTVYSEKPGAVAAPTAGLHFDNDLLDKIKAKGAAAGFVTLHVGAGTFKPVQVDDISEHVMHSEVIEVLPETVELIKQTRQKGGRVIAVGTTSVRCLESAASFSENGELAPYQGETDIFITPGYDFKVVDVLLTNFHLPESTLIMLVSALAGYDRTMQAYAHAVEQKYRFFSYGDAMLVHPPTSDS

SEQ ID NO: 67409 - protein, 349 aa, Hydrogenovibrio marinus
  misc_feature (1)..(349): tr|A0A066ZSU9|A0A066ZSU9_HYDMR S-adenosylmethionine:tRN A ribosyltransferase-isomerase OS=Hydrogenovibrio marin us OX=28885 GN=queA PE=3 SV=1
MKRQDFYFDLPETLIAQTPAKERTGSRLLVIEPNGGVSDKQFPDLLDYIQPNDCLIFNNTKVIPARLFGHKHSGGKVEFLVERILDDQRVLTHIRSSNAPKPGTKIRIEDQIEVEVLGRDDALFEVAFELPDGETALSLIEACGHMPLPPYIERADGEEDKSRYQTVYSEKPGAVAAPTAGLHFDEIMLDKIRQKGTQIGFVTLHVGAGTFKPVQVDDISEHRMHSEVIEVLPETVELIHSTKQKGGRVFAIGTTSVRSLESAATFNDGVLTAYQGETDIFITPGYDFKVVDVLLTNFHLPESTLIMLVSALAGYEATMNAYRHAVEEKYRFFSYGDAMLVHPAKKAKS

SEQ ID NO: 67410 - protein, 350 aa, Hydrogenovibrio marinus
  misc_feature (1)..(350): tr|A0A5A4WP26|A0A5A4WP26_HYDMR S-adenosylmethionine:tRN A ribosyltransferase-isomerase OS=Hydrogenovibrio marin us OX=28885 GN=queA PE=3 SV=1
MMKRQDFYFDLPETLIAQTPAKERTGSRLLVIEPNGGVSDKQFPDLLDYIQPNDCLIFNNTKVIPARLFGHKHSGGKVEFLVERILDDQRVLTHIRSSNAPKPGTKIRIEDQIEVEVLGRDDALFEVAFELPDGETALSLIEACGHMPLPPYIERADGEEDKSRYQTVYSEKPGAVAAPTAGLHFDEIMLDKIRQKGTQIGFVTLHVGAGTFKPVQVDDISEHRMHSEVIEVLPETVELIHSTKQKGGRVFAIGTTSVRSLESAATFNDGVLTAYQGETDIFITPGYDFKVVDVLLTNFHLPESTLIMLVSALAGYEATMNAYRHAVEEKYRFFSYGDAMLVHPAKKAKS

SEQ ID NO: 67411 - protein, 350 aa, Hydrogenovibrio sp.
  misc_feature (1)..(350): tr|A0A2I2A2G5|A0A2I2A2G5_9GAMM S-adenosylmethionine:tRN A ribosyltransferase-isomerase OS=Hydrogenovibrio sp. S C-1 OX=2065820 GN=queA PE=3 SV=1
MRRQDFHFKLPDELIAQKPPQSRTDSRLLVMEADGSLSDRHFPDILDYLQPNDCLIFNNTRVIPARLFGHKQSGGKVELLIERVLDDQRVLTHIRASNAPKPGVQLKIADAFNAVVLGREGALFELVFQSDDEPDLTALDLIERHGHMPLPPYITREDVVEDKTRYQTVYSEKPGAVAAPTAGLHFDEALLDQVADLGVKVGFVTLHVGAGTFKPVQVDDIATHKMHSEVIEVLPETVALIEQTRQNGGRVIAVGTTSVRCLESAARFSKTGELAPYQGETDIFITPGVDFKVVDVLLTNFHLPESTLIMLVSAFAGHQRTLEAYTHAVAQSYRFFSYGDAMLVFPKNKV

SEQ ID NO: 67412 - protein, 354 aa, Hydrogenovibrio thermophilus
  misc_feature (1)..(354): tr|A0A410H3I2|A0A410H3I2_9GAMM S-adenosylmethionine:tRN A ribosyltransferase-isomerase OS=Hydrogenovibrio therm ophilus OX=265883 GN=queA PE=3 SV=1
MRRQDFYFDLPEELIAQQPTEERTQSRLLVMEADGGVSDQHFPDLLSYLNENDCLIFNDTKVIPARLFGQKSTGGQVELLIERVLDNERVLSHVRSSRAPKAGAVLHIADAFEAEVLGREGALFELKLSQKESDLSALELIEAHGHMPLPPYIEREDELEDKERYQTVYSAKPGAVAAPTAGLHFDEALLERIRAKGVSTGFVTLHVGAGTFKPVQVDDIAEHVMHSEVIEVLPETVALIEETKRKGGRVIAVGTTSVRCLESAARFSGDGPLQPYQGETDIFITPGYEFQVVDVLLTNFHLPESTLIMLVSALAGYKRTMQAYAHAVAQGYRFFSYGDAMLVHPAQKTAAKAE

SEQ ID NO: 67413 - protein, 366 aa, Hydromonas duriensis
  misc_feature (1)..(366): tr|A0A4R6Y3F8|A0A4R6Y3F8_9BURK S-adenosylmethionine:tRN A ribosyltransferase-isomerase OS=Hydromonas duriensis OX=1527608 GN=queA PE=3 SV=1
MNMIENRFPTPLPTDATPLTLAHFNYDLPEQLIAQMPAAERSASRLLVVHGENDVVDERFTDIVKHLKAGDVLVMNNTKVIKARLFGHKASGGKVEVMFDRVTGTHRGIAQIRASKTPAIGSTLRINDAFHLTVLAKNDRFYELESDAPILEMLEQHGHLPLPPYIDHAADDFDANRYQTVFAEHAGAVAAPTAGLHFDEHILKALTDKGVQLAYVTLHVGAGTFLPVSSENLDAHVMHQEWFEIPAHTADVINAARLKGGRVVAVGTTSLRALESAAALQNPEYARDWQLQPHSADTKLFIRPPYRFRLVDVLVTNFHLPQSTLLMLVSAFSGVETMRGAYNHAISQGYRFFSYGDAMILTCCQK

SEQ ID NO: 67414 - protein, 370 aa, Hydromonas sp.
  misc_feature (1)..(370): tr|A0A345DE32|A0A345DE32_9BURK S-adenosylmethionine:tRN A ribosyltransferase-isomerase OS=Hydromonas sp. F02 OX =2268024 GN=queA PE=3 SV=1
MSQSGQNPLNAFSTALPDDWAKLTLAHFNYELPDALIAQMPAAERSASRLLMVSDGELADGHFSDIIAHLHQGDVLVMNNTKVIKARLFGQKASGGKVEVMLDRITASNECIAQIRASKTPAIGSALNINGAFHFTVLAKNDRFYQLRSDAPLLEMLDAHGHLPLPPYIDHAADDFDETRYQTVFAEHAGAVAAPTAGLHFDEVILKALQDKGVRLAYVTLHVGAGTFLPVQTDDLDAHVMHQEWFEVPEETAALINQARAQGGRVVAVGTTSLRALESAAALQNPEHEAAWQLAAQSADTRLFIRPPYRFRLVDVLITNFHLPQSTLLMLVSAFSGVHTMRGAYNHAIANDYRFFSYGDAMLLTRQDTL

SEQ ID NO: 67415 - protein, 349 aa, Hydrotalea sandarakina
  misc_feature (1)..(349): tr|A0A2W7RRU2|A0A2W7RRU2_9BACT S-adenosylmethionine:tRN A ribosyltransferase-isomerase OS=Hydrotalea sandarakin a OX=1004304 GN=queA PE=3 SV=1
MKLSQFRFDLPLNLIAQTPTKRREDSRMMVVDRKTGNMENKHFRDILDYFDDKDVFVVNNTKVFPARMYGRKEKTGAKIEVFLLRELNKPNRLWDVIVDPARKIRVGNKLYFGDNEELVAEVIDNTTSRGRTIRFLWDGDDASFKEMLETLGETPLPKYIKRKPDEEDKERYQTVYAKYEGAVAAPTAGLHFSKELIKRCEIKGIRFAEVTLHTGLGTFRPIEVEDLSKHKMDAEYYQITEEACRIVNTAKQTGHRVCSIGTTTMRAMESSFTAQKLLKPSEGWTNHFIHPPYEFSVADSLVTNFHLPKTSLLIMTCAFAGYELTMEAYKKAIKDKYRFFSYGDALLIL

SEQ ID NO: 67416 - protein, 415 aa, Hydrotalea sandarakina
  misc_feature (1)..(415): tr|A0A2W7S970|A0A2W7S970_9BACT S-adenosylmethionine:tRN A ribosyltransferase-isomerase OS=Hydrotalea sandarakin a OX=1004304 GN=queA PE=3 SV=1
MKPIPYIEIKDYQYELPEKAIAKYPLPERDASKLLVYKNGKIETSQYKFLAEFLPENATLVFNNTKVVEARLQFSKPTGGQIEIFCLEPFDENEDIIVAMQTTGKVNWKCLIGGAKKWKSGNLEKNIATPNGNVLLQACKKEQSNETGVYVIEFIWNNDSLSFAEILHYAGIIPLPPYLNRETEKEDAVRYQTVYAQKDGSVAAPTAGLHFTTRLMNELQQKGIKEVYITLHVGAGTFKPVKANNIAQHEMHAEFIDVQKNTIVHLLQQINAPIVAVGTTSLRTLESLYWIGVKIHEWFQIHRNYNELNDLHVEQWAPYQLNNNSITASEALQAILYWMDAKGTERLITKTSIIIVPGYTFKIIKGLITNFHQPQSTLLLLIAAIIGSEWKKVYQFALNNNFRFLSYGDGSLLWL

SEQ ID NO: 67417 - protein, 418 aa, Hydrotalea sp.
  misc_feature (1)..(418): tr|A0A4V1J9H2|A0A4V1J9H2_9BACT S-adenosylmethionine:tRN A ribosyltransferase-isomerase OS=Hydrotalea sp. AMD OX =2501297 GN=EO766_02190 PE=3 SV=1
MQKSINPQQIAIQEYQYELPENAIAKYPLAKRDESKLLVYKQSTIHTSTYQHLPDFLPEDSILIFNNTKVVEARLLFTKSTGSTIEIFCLEPFDTHKDITIAMQQTGNVQWKCLIGGAKKWKETILEKVITMPNGTLLLQAAKKEVLDEAGTYLVEFNWNDANVSFAEILHFAGIIPLPPYLNRATEQEDAIRYQTIYAEKDGSVAAPTAGLHFTPELMDALKQKGIQTDYVTLHVGAGTFKPVKAAYLAAHEMHAEFIDVSKQFIQHIQMQLNYPIVAVGTTSLRTLESLYWIGIKIHQYYQKNKTLNSLQDITVEQWLPYQQQENVSIDQALNYILQWMDIQGKERLITKTSIIIVPGYDFKLAKGIITNFHQPQSTLLLLIAAMIGDDWKRVYDYALNNSFRFLSYGDGSLLWRI

SEQ ID NO: 67418 - protein, 349 aa, Hydrotalea sp.
  misc_feature (1)..(349): tr|A0A4Q0AXQ0|A0A4Q0AXQ0_9BACT S-adenosylmethionine:tRN A ribosyltransferase-isomerase OS=Hydrotalea sp. AMD OX =2501297 GN=queA PE=3 SV=1
MKLSQFRFDLPLNLIAQNPTKRREDSRMMVVDRKTGNMENKHFRDILEYFDDKDVFVVNNTKVFPARMYGRKEKTGAKIEVFLLRELNKPNRLWDVIVDPARKIRVGNKLYFGDNEELVAEVIDNTTSRGRTIRFLWEGDDASFKEMLETLGETPLPKYIKRKPDEEDKERYQTVYAKYEGAVAAPTAGLHFSKELIKRCEIQGIRFAEVTLHTGLGTFRPIEVEDLSKHKMDAEYYQITEEACRIVNTAKQTGHRICSIGTTTMRAMESSFTAQKLLKPSEGWTNHFIHPPYEFSVADSLVTNFHLPKTSLLIMTCAFAGYDLTMEAYKKAIKDKYRFFSYGDALLII

SEQ ID NO: 67419 - protein, 331 aa, Hyella patelloides
  misc_feature (1)..(331): tr|A0A563VV28|A0A563VV28_9CYAN S-adenosylmethionine:tRN A ribosyltransferase-isomerase OS=Hyella patelloides LE GE 07179 OX=945734 GN=queA PE=3 SV=1
MVVNSQTSHVHSSFCNLTNWLLPGDLLILNNTRVIPARLYGQKVGGASVEILLLEEIKSNCWLALVKPGKRFKLGAEIIFTGNSAHDSDYLKATVIESARATGGRILQFEIPEGKTFWSMLDRLGEMPLPPYITSRESEAEQYQTIFAQERGAVAAPTAGLHFTDDLFTKLSNQGVETAYITLHVGVGTFRPVETETITEHNMHHEWIEVSSETVAKIKATKARGGRVIAVGTTAVRALEGTAHNSQTSEGKDLQPFRGKTNLFIYPGYQWQIVDGLITNFHLPGSSLLMLVSALTGRERLLNLYQEAIANDYRFYSFGDAMLILPDARVN

SEQ ID NO: 67420 - protein, 382 aa, Hylemonella gracilis
  misc_feature (1)..(382): tr|A0A016XM79|A0A016XM79_9BURK S-adenosylmethionine:tRN A ribosyltransferase-isomerase OS=Hylemonella gracilis str. Niagara R OX=1458275 GN=queA PE=3 SV=1
MERARPALKPMPHSSASSASQPLSTPSARVHTLSDFDFALPPELIAQHPAPERSASRLLDGRDSRPGAQPVDRIFRELPQLLQAGDLLVFNDTKVVKARLFGNKPAPTRGASSPIGGKLELLIERVLTNHEVVAHMKVSKKPAVGTVLEMTGGYTATLLGRWPDEDGKLFRLRFSDEPHALMEQHGHVPLPPYIQHSDSADDVARYQTVFAAKPGAAAAPTAALHFDESVLAALDARGVRRANVTLHVGAGTFSPVKTENLAEHRMHREWYEVPAATQQAIRETKAQGGRIVAVGTTTIRTLESWAKTGAASGDTDIFITPGFEFKVADLLVTNFHLPKSTLMMLVSAFAGFGHIMGLYRHAIAQRYRFFSYGDAMVLERAR

SEQ ID NO: 67421 - protein, 389 aa, Hylemonella gracilis
  misc_feature (1)..(389): tr|F3KTQ8|F3KTQ8_9BURK S-adenosylmethionine:tRNA ribosy ltransferase-isomerase OS=Hylemonella gracilis ATCC 196 24 OX=887062 GN=queA PE=3 SV=1
MERARPALKPMPHSPASGASLPSSAPHPRAHTLSDFDFALPPELIAQHPAPERSASRLLDGRDARPGALPVDRIFRELPGLLQPGDLLVFNDTKVVKARLFGNKPAPARGATSPIGGKLELLIERVLTGHEVVAHMKVSKKPAVGTVLQMAGGYTAELLGRWPDEDGQLFRLRFSDEPHKLMEQHGHVPLPPYINHSDNDDDVARYQTVFAAKPGAAAAPTAALHFDEAVLAALDARGVKRANVTLHVGAGTFSPVKTENLAEHRMHREWYDVPAATQQAIRDTQANGGRIVAVGTTTIRTLESWARSAGPGLSGGQTSGDTDIFITPGFEFKVADLLITNFHLPKSTLMMLVSAFAGYEHIMALYRHAIAQRYRFFSYGDAMVLERVR

SEQ ID NO: 67422 - protein, 349 aa, Hymenobacter actinosclerus
  misc_feature (1)..(349): tr|A0A1I0J1J6|A0A1I0J1J6_9BACT S-adenosylmethionine:tRN A ribosyltransferase-isomerase OS=Hymenobacter actinosc lerus OX=82805 GN=queA PE=3 SV=1
MKLSEFKFELPENLVAQHPAKNRDESRLMVLHRDSGKIEHRSFKDILEYFDEGDVFVVNDTKVFPARMFGNKEKTGAQIEVFLLRELNTEIHLWDVLVDPARKIRVGNKLYFGESDMVAEVIDNTTSRGRTIKFLYDGPPEDFYKALYSLGETPIPKEFITRDTEAADKERYQTIYANNIGAVAAPSAGLHFTREVMKRLEIKGIEVAPVTLHIGLGTFRTVDVEDLTKHKMDSENFVVPGTTAVVVNKALDAKKRVCAIGTTAMRAMESSVSAHTRLKANEGWTDRFIFPPYDFKIANALLTNFHTPESTLMMMASAFAGHDLLIEAYKLAIKEKYRFFSYGDAMLII

SEQ ID NO: 67423 - protein, 408 aa, Hymenobacter actinosclerus
  misc_feature (1)..(408): tr|A0A1I0AUU3|A0A1I0AUU3_9BACT S-adenosylmethionine:tRN A ribosyltransferase-isomerase OS=Hymenobacter actinosc lerus OX=82805 GN=queA PE=3 SV=1
MTDPRRLSIHDFTYQLPPERIAPEPLTNRDQSKLLVYQQGLLGDRTFRDLPALLPENSLLVFNDTKVVRARLFARRPTGGMVELFCLEPVAPHRAIEPAMQQTGACVWKCLVGNGRRWKDGPVTLDFEANGQPATLHAERTEQHDGYALIAFIWEPAELPFAEVLRGAGHLPLPPYLNRPDTDVDAVRYQTVYAAHEGAVAAPTAGLHFSEAVLAELAERRTAAARVTLHVGAGTFQPVKAEQMADHPMHGEPFSVTADTLRRLLAHLAEGHPLIPVGTTSLRTLESLYWLGAALVQQPARLPSWHVSQWQPYETGAEVSTPQALAALLDQLALTGSDTLHATTQLLIAPGYRFRVVRGLITNFHQPESTLLLLVAALLGPDWRRVYDHALAHDYRFLSYGDSSLLLP

SEQ ID NO: 67424 - protein, 349 aa, Hymenobacter amundsenii
  misc_feature (1)..(349): tr|A0A246FPM5|A0A246FPM5_9BACT S-adenosylmethionine:tRN A ribosyltransferase-isomerase OS=Hymenobacter amundsen ii OX=2006685 GN=queA PE=3 SV=1
MKLSEFKFELPENLVAQHPAKNRDESRLMVLHRDSGKIEHRSFKDILEYFDEGDVFVVNDTKVFPARLFGNKEKTGAQIEVFLLRELNTEIHLWDVLVDPARKIRVGNKLYFGESDMVAEVIDNTTSRGRTIKFLYDGPDEDFYKALYSLGETPIPKEFIPRDTEAADKERYQTIYAQNIGAVAAPSAGLHFTKEVMKRLEIKGIDVAPVTLHVGLGTFRTVDVEDLTKHKMDSENFMVPAATAVVVNKALDANKRVCAIGTTSMRAMESSVSAHVRLKANEGWTDRFIFPPYDFKIANALLTNFHTPESTLMMMASAFAGHDLLIEAYKLAIKEKYKFFSYGDAMLII

SEQ ID NO: 67425 - protein, 408 aa, Hymenobacter amundsenii
  misc_feature (1)..(408): tr|A0A246FNX6|A0A246FNX6_9BACT S-adenosylmethionine:tRN A ribosyltransferase-isomerase OS=Hymenobacter amundsen ii OX=2006685 GN=queA PE=3 SV=1
MSDPRQLSIHDFTYQLPAGRIAPEPLPNRDQSRLLVYEAGTLRNQTFRELPGLLPADSLLVFNDTKVVRARLFARRPTGGAVELFCLEPVAPHQAIEPAMQQTGSCVWKCLVGNGRRWKEGPVTVEFEALGQPATLQAMRTEQHDGYALIAFSWEPAELPFAEVLRAAGHLPLPPYLNRADTDVDAVRYQTVYAAQEGAVAAPTAGLHFSEAVLAELAERRTLAARVTLHVGAGTFQPVKADQMAGHPMHGEPFSVSVDTLRRLRAHLAAGLPIIPVGTTSLRTLESLYWLGTRLLQRPAQLPAWHVEQWQPYESQQNTTTPDALDALLTQLELTGADTLHATTQLLIAPGYQFRLVRGLITNFHQPESTLLLLVAALIGPDWRQVYEHALAQNYRFLSYGDSSLLLP

SEQ ID NO: 67426 - protein, 410 aa, Hymenobacter aquaticus
  misc_feature (1)..(410): tr|A0A4Z0Q0N4|A0A4Z0Q0N4_9BACT S-adenosylmethionine:tRN A ribosyltransferase-isomerase OS=Hymenobacter aquaticu s OX=1867101 GN=queA PE=3 SV=1
MSAFPDPRLLSIHDFTYQLPAGRIAPEPLPNRDQSQLLVYRRGQVQDKRFTDLPAELPADALLVFNNTKVVRARLFCQKPTGGVVELFCLEPVAPHRSVELAMQQTGGCVWKCLVGNGKRWKSGPVQVEFSVNEHSAVLSAVRLETAEGYSLIQFSWQPAELPFAEILRAAGHLPLPPYLNRADTEVDAVRYQTVYAAHEGAVAAPTAGLHFSDAVFAELKSRGIATAELTLHVGAGTFQPVKADRMEGHPMHAEPISVNAALLRQLLHHAPHPIIAVGTTSLRTLESLYWLGARLARQPTLSSPDFLVTQWQPYEGGPEVSMPEALQALLDYLERTGSDTIQATTQLLIAPGYAFRVVQGLVTNFHQPESTLLLLVAALIGPDWRRIYDHALAHDYRFLSYGDSSLLLP

SEQ ID NO: 67427 - protein, 349 aa, Hymenobacter aquaticus
  misc_feature (1)..(349): tr|A0A4Z0PTC4|A0A4Z0PTC4_9BACT S-adenosylmethionine:tRN A ribosyltransferase-isomerase OS=Hymenobacter aquaticu s OX=1867101 GN=queA PE=3 SV=1
MKLSEFKFDLPESLLAQHPAKTRDESRLMVLHRDSGKIEHRVFKDIIEYFNEGDVFVVNDTQVFPARLYGNKEKTGAKIEVFLLRELNKEIHLWDVLVDPARKIRVGNKLYFGESDMVAEVIDNTTSRGRTIKFLFDGSDEEFYKALNDLGETPLPREVITRDAEPADKERYQTIYAKNKGAVAAPSAGLHFTREVIKRLEIRGVDMVPVTLHVGLGTFRPVDVEDLTKHKMDSENFIVPAESAVVVNRALDAKKRVCAVGTTTMRALESSVSAHARLKENQGWTDKFIFPPHEFKIANSLLTNFHMPESTLMMMASAFAGHEFLIEAYQTAIKEKYKFFTYGDAMLIL

SEQ ID NO: 67428 - protein, 349 aa, Hymenobacter chitinivorans
  misc_feature (1)..(349): tr|A0A2M9AS42|A0A2M9AS42_9BACT S-adenosylmethionine:tRN A ribosyltransferase-isomerase OS=Hymenobacter chitiniv orans DSM 11115 OX=1121954 GN=queA PE=3 SV=1
MKLSEFKFDLPESLLAQHPAKTRDESRLMVLHRETGKIEHRVFKEIIEYFTDGDVFVLNDTQVFPARLYGNKEKTGAKIEVFLLRELNKEIHLWDVLVDPARKIRVGNKLYFGESDMVAEVIDNTTSRGRTIKFLFDGSDEEFYKALNDLGETPLPREVITRDAEPADKERYQTIYAKHKGAVAAPSAGLHFTREVMKRLEIKGVDVVPVTLHVGLGTFRPVDVEDLTKHKMDSENFIVPAESAVVVNRALDAKKRVCAVGTTTMRALESSVSAHARLKENQGWTDKFIFPPHEFKIANALLTNFHMPESTLMMMASAFAGHEFLIEAYQTAIKEKYKFFTYGDAMLIL

SEQ ID NO: 67429 - protein, 411 aa, Hymenobacter chitinivorans
  misc_feature (1)..(411): tr|A0A2M9AQJ3|A0A2M9AQJ3_9BACT S-adenosylmethionine:tRN A ribosyltransferase-isomerase OS=Hymenobacter chitiniv orans DSM 11115 OX=1121954 GN=CLV45_4649 PE=3 SV=1
MSATPDPRLLSIFDYTYELPAARIAPEPLPHRDQSQLLVYRAGAIADKRFTDLPAELPADALLVFNNTKVVRARLFCQKPTGGVVELFCLEPVAPHRSVELAMQQTGSCVWKCLVGNGKRWKTGPVEVAFSLQDTPAVLKAERLEAAEGYSLIQFSWQPAEVPFAEILRAAGHLPLPPYLNREDTDVDAVRYQTVYAAHEGAVAAPTAGLHFSDAVFADLKARGIATAELTLHVGAGTFQPVKAAQMEGHPMHAEPISVNAALLRQLLSHAPRPIIAVGTTSLRTLESLYWLGTRLVREPDSAKEPVFHVTQWQPYEEGAEVTLAAALQALLDYLVRTGSDTIQATTQLLIAPGYTFRIIRGLVTNFHQPESTLLLLVAALIGPDWRRVYEHALAHEYRFLSYGDSSLLLP

SEQ ID NO: 67430 - protein, 349 aa, Hymenobacter coccineus
  misc_feature (1)..(349): tr|A0A1G1THR4|A0A1G1THR4_9BACT S-adenosylmethionine:tRN A ribosyltransferase-isomerase OS=Hymenobacter coccineu s OX=1908235 GN=queA PE=3 SV=1
MKLHEFKFELPQELVATHPARNRDDSRLMVLNRATGTIEHRNFKDILDYFTEGDTFVLNDTKVFPARMYGNKEKTGATIEVFLLRELNKELRLWDVLVDPARKIRVGNKLYFGESDMVAEVIDNTTSRGRTIKFLFDGSDEDFRKALYELGETPIPKETLQRETEPADKERYQTIYAENIGAVAVPAAGLHFTREVMKRMEIKGIETAAVTLHVGLGTFRTVDVEDLTKHKTDSENFIVGPEACAIVNKALDAKKRVCAIGTTTLRAMESSVSANARMKPTQGWNDRFIFPPYEFKIANALLTNMHLPESTLIMITAAFAGYPLLMEAYKEAIKEKYRFFSYGDAMLIL

SEQ ID NO: 67431 - protein, 349 aa, Hymenobacter daecheongensis
  misc_feature (1)..(349): tr|A0A1M6IQ20|A0A1M6IQ20_9BACT S-adenosylmethionine:tRN A ribosyltransferase-isomerase OS=Hymenobacter daecheon gensis DSM 21074 OX=1121955 GN=queA PE=3 SV=1
MKLSEFKFDLPENLLAQHPAKNRDEARLMVLHRDSGKIEHRVFKDIIEYFGEGDAFVLNDTKVFPARLYGNKEKTGAKIEVFLLRELNKEIHLWDVLVDPARKIRVGNKLYFGESDMVAEVIDNTTSRGRTIKFLFDGPDEEFYKALHDLGETPLPREAITREAEPADKERYQTIYAKHTGAVAAPSAGLHFTREVMKRLEIKGVDVTSVTLHIGLGTFRPVDVEDLTKHKMDSENFIVPAEAVAVVNKALDAKKRVCAVGTTTMRALESSVSANSRLKENQGWTDRFIFPPYDFKIANALLTNFHMPESTLMMMTSAFAGHALLTEAYKLAIKEKYKFFSYGDAMLIL

SEQ ID NO: 67432 - protein, 410 aa, Hymenobacter daecheongensis
  misc_feature (1)..(410): tr|A0A1M6C8Z3|A0A1M6C8Z3_9BACT S-adenosylmethionine:tRN A ribosyltransferase-isomerase OS=Hymenobacter daecheon gensis DSM 21074 OX=1121955 GN=queA PE=3 SV=1
MSAFPDPRQLSIHDFTYQLPPERIAPEPLPDRDQSRLLVYRGGTITDQRFAQLPQVLPPDALLVFNDTKVVRARLFCQKPTGGLIELFCLEPVAPHRAIEPAMQQTGSCVWKCLVGNGKRWKTGPVTLEFMAEDQPATLTAERLEAAEGYSLIRFSWEPAALPFAEVLRGAGHLPLPPYLNRTDTAADAVRYQTVYAAHEGAVAAPTAGLHFSEAVLADLTRRGITEARVTLHVGAGTFQPVKANQMAGHAMHGEPFVVTTAVVRQLLAHAPRPVLAVGTTSLRTLESLYWLGAKLAQNPAATEETLHVSQWQPYETGPEVSTAAALQAVLDYLAQTGADALHATTQLLIAPGYRFRVAQGLITNFHQPESTLLLLVSALIGPDWRRVYDHALAHDYRFLSYGDSSLLLP

SEQ ID NO: 67433 - protein, 410 aa, Hymenobacter elongatus
  misc_feature (1)..(410): tr|A0A4Z0PLN5|A0A4Z0PLN5_9BACT S-adenosylmethionine:tRN A ribosyltransferase-isomerase OS=Hymenobacter elongatu s OX=877208 GN=queA PE=3 SV=1
MSAFPDPRLLSIHDYTYQLPASRIAPEPLPDRDQSRLLVYRGGEVQDHVFTDLPGELPADALLVFNNTKVVRARLFCQKPTGGAVELFCLEPVAPHRSVELAMQQTGSCVWKCLVGNGKRWKTGPVQVAFSWQESDALLTAERLEAADGYSLIQFSWQPAAVPFAEVLRAAGHLPLPPYLNRADTDVDAVRYQTVYAAHEGAVAAPTAGLHFSNAVFADLKNRGIATAELTLHVGAGTFQPVKAAHMEGHAMHGEPISVNAALLHHLLRHAPRPIIAVGTTSLRTLESLYWLGARLLLQPATNLTALHVTQWQPYEDGPAVTTEEALQALLAHLERTGSDTLEATTQLLIAPGYTFRLIRGLITNFHQPESTLLLLVAALVGPDWRRIYDHALAHDYRFLSYGDSSLLLP

SEQ ID NO: 67434 - protein, 349 aa, Hymenobacter elongatus
  misc_feature (1)..(349): tr|A0A4Z0PF82|A0A4Z0PF82_9BACT S-adenosylmethionine:tRN A ribosyltransferase-isomerase OS=Hymenobacter elongatu s OX=877208 GN=queA PE=3 SV=1
MKLSEFKFDLPENLLAQHPAKTRDESRLMVLHRDSGKIEHRVFKEIIEYFTEGDVLVLNDTQVFPARLYGNKEKTGAKIEVFLLRELNKEIHLWDVLVDPARKIRVGNKLYFGESDMVAEVIDNTTSRGRTIKFLFDGTDEEFYKALNDLGETPLPRDIITREAEPADKERYQTIYAKHKGAVAAPSAGLHFTREVMKRLEIKGVDVVPVTLHVGLGTFRPVDVEDLTKHKMDSENFIVSAESAVVVNRALDAKKRVCAIGTTSMRALESSVSAHNRLKENQGWTDKFIFPPHEFKIANTLLTNFHMPESTLMMMASAFAGHELLTEAYRLAIKEKYKFFTYGDAMLIL

SEQ ID NO: 67435 - protein, 349 aa, Hymenobacter gelipurpurascens
  misc_feature (1)..(349): tr|A0A212UGF1|A0A212UGF1_9BACT S-adenosylmethionine:tRN A ribosyltransferase-isomerase OS=Hymenobacter gelipurp urascens OX=89968 GN=queA PE=3 SV=1
MKLSEFKFDLPENLLAQHPAKNRDESRLMVLHRDTGKIEHRIFKDIIEYFGEGDVFVVNDTKVFPARLYGNKEKTGAKIEVFLLRELNKEIHLWDVLVDPARKIRVGNKLYFGESDMVAEVIDNTTSRGRTIKFLFDGPDEEFYKALHDLGETPIPKEFIPRETEAADKERYQTIYAKNTGAVAAPSAGLHFTREVMKRLEIKGVEVAPVTLHVGLGTFRPVDVEDLTKHKMDSENFIVPAETATIVNRALDNKKRVCAIGTTSMRAMESSVSAHSRLKATEGWTDKFIFPPYEFKISNALLTNFHTPESTLMMMASAFAGHPLLIEAYQLAIKEKYKFFSYGDAMLIL

SEQ ID NO: 67436 - protein, 412 aa, Hymenobacter gelipurpurascens
  misc_feature (1)..(412): tr|A0A212U9F5|A0A212U9F5_9BACT S-adenosylmethionine:tRN A ribosyltransferase-isomerase OS=Hymenobacter gelipurp urascens OX=89968 GN=queA PE=3 SV=1
MFVPVPPDPRQLSIHDFTYQLPPERIAPEPLANRDQSKLLLYQAGELTDRSFQELPGLLPSDSLLVFNDTKVVRARLFAHKPTGGIVELFCLEPVAPHKAIEPAMQQIESCIWKCLVGNGKRWKSGPVLLEFEANGQPATLTAERVEQGEGYALIRFSWQPSGLPFAEVLRAAGHLPLPPYLNRADTEVDAVRYQTVYAAHEGAVAAPTAGLHFSDAVLAELATLHIPSAHVTLHVGAGTFQPVKADNMLGHSMHGEPISVTAATLRQLLEHLPKPIIPVGTTSLRTLESLYWLGSRLLQQTDSAAPEWHVGQWQPYEPGADVSAADALQALLQHLETTGEQELHATTQLLIAPGYKFRLVRGLITNFHQPESTLLLLVAALIGPSWRTVYEHALGHNYRFLSYGDSSLLLP

SEQ ID NO: 67437 - protein, 432 aa, Hymenobacter glacialis
  misc_feature (1)..(432): tr|A0A1G1SUN8|A0A1G1SUN8_9BACT S-adenosylmethionine:tRN A ribosyltransferase-isomerase OS=Hymenobacter glaciali s OX=1908236 GN=queA PE=3 SV=1
MNAPHPRDLSIHDFSYPLPPDRIAPEPLPDRAASRLLVSRNGQLTDQRFRDLPNELPAGALLIFNDTRVVRARLLARRPTGGQVELFCLEPVAPHRSLEMALQQTGSCTWRCLVGNGRRWKEGPVLLEFETADGQPATLWAERQVQEAGTALIDFRWEPAELPFAEVLRAGGHLPLPPYLGRPDTATDALRYQTVYAVAEGAVAAPTAGLHFTPELLAELAQQGFSTGHITLHVGAGTFQPVKAGRMADHPMHTEPIIVTAALLRQLLSHRPQPVLAVGTTSLRTLESLYWLGVGLLKPATVAAGEVAGQPELLVTQWQPYDMAAAADNISAEVALEALLKHLEANGTDTLQASTRLLIAPGYRFRLIDGLITNFHQPESTLLLLVAALLGPGWRTVYYHALTHEYRFLSYGDSSLLLPGTAEVSANSTERC

SEQ ID NO: 67438 - protein, 349 aa, Hymenobacter glacialis
  misc_feature (1)..(349): tr|A0A1G1TAU7|A0A1G1TAU7_9BACT S-adenosylmethionine:tRN A ribosyltransferase-isomerase OS=Hymenobacter glaciali s OX=1908236 GN=queA PE=3 SV=1
MKLHEFKFELPEELVALHPARNRDESRLMVVHRATGQIEHRAFKDILDYFVEGDVFAFNDTKVFPARLYGNKEKTGAKIEVFLLRELNKELRLWDVLVDPARKIRVGNKLYFGESDMVAEVIDNTTSRGRTIKFLFDGTDEEFRKALYELGETPIPKEVINRETEPADKERYQTIYAENIGAVAAPSAGLHFTREVMKRMEIKGIEPAFVTLHVGLGTFRTVDVEDLTKHKMDSENFVVTAPACDVVNKALDTKRRVCAVGTTTVRAMEASVSANARMKPTQGWIDRFIFPPHDFKIANALLTNFHMPESTLIMLAAAFAGYPLLMEAYKEAIKEKYRFFSYGDAMLIL

SEQ ID NO: 67439 - protein, 350 aa, Hymenobacter gummosus
  misc_feature (1)..(350): tr|A0A431TZC0|A0A431TZC0_9BACT S-adenosylmethionine:tRN A ribosyltransferase-isomerase OS=Hymenobacter gummosus OX=1776032 GN=queA PE=3 SV=1
MKLSEFKFDLPESLVAQHPAKNRDESRLMVVHRDSGRIEHRSFKDIIEYFDDGDVFVVNDTKVFPARLYGNKEKTGAKIEVFLLRELNKELHLWDVLVDPARKIRVGNKLYFDDDSIMVAEVIDNTTSRGRTIKFLFDGPEEDFYKALHDLGETPLPKEVITRDPEAADKERYQTIFAKHTGAVAAPSAGLHFTREVIKRLEIKGVDMVPVTLHVGLGTFRPVDVEDLTKHKMDSENFIVPADSAVVVNKALDQKKRVCAVGTTTMRAMESSVSANARLKPTEGWTDRFIFPPYDFKIANALLTNFHLPESTLMMMASAFSGYDLLIEAYQTAIKEKYKFFSYGDAMLIL

SEQ ID NO: 67440 - protein, 409 aa, Hymenobacter gummosus
  misc_feature (1)..(409): tr|A0A3S0QID2|A0A3S0QID2_9BACT S-adenosylmethionine:tRN A ribosyltransferase-isomerase OS=Hymenobacter gummosus OX=1776032 GN=queA PE=3 SV=1
MNTPVDPRLLSIQDYTYELPAGRIAPAPLPNRDASRLLVYRRGQIADHGFRELPAQLPPDALLVFNNTKVVRARLYLHKPSGGQIELFCLEPVAPQRAIEPAMQQTSECVWRCLVGNGKRWKTGPVQATFTTPDGQPATLEAERVAAEEGSSLIRFRWQPAELPFAQVLAGAGRLPLPPYLGREATGEDDERYQTVYAAHDGAVAAPTAGLHFTPAVLAELAGRGIQSAQLTLHVGAGTFQPVKAERMADHPMHAEPISATRQVLRQLLEHAPRPVIAVGTTSLRTLESLYWLGAALVRTGELPAQVQQWDPYQPGAGEVPTATALQALLTELERRGDDALQASTQLLIAPGYQFQVVQGLVTNFHQPESTLLLLVAALLGPDWRRVYEHALGHDYRFLSYGDSSLLLP

SEQ ID NO: 67441 - protein, 432 aa, Hymenobacter lapidarius
  misc_feature (1)..(432): tr|A0A1G1T2F3|A0A1G1T2F3_9BACT S-adenosylmethionine:tRN A ribosyltransferase-isomerase OS=Hymenobacter lapidari us OX=1908237 GN=queA PE=3 SV=1
MNAPHPRDLSIHDFSYPLPPERIAPEPLPDRAASRLLVSRNGQLTDQRFRELPNELPADALLVFNDTRVVRARLLARRPTGGQVELFCLEPMAPHRSLEMALQQTGSSTWRCLVGNGRRWKEGPVLLEFETADGQPATLWAERQAQEAGTALIDFRWEPAALPFAEVLRAGGHLPLPPYLGRPDTATDALRYQTVYAAAEGAVAAPTAGLHFTPELLAELEQRGFSTGHITLHVGAGTFQPVKADRMADHPMHTEPIIVTAALLRQLLRHRPKPVLAVGTTSLRTLESLYWLGVGLLQPATTEGGEAAGQPELLVTQWQPYDMAAAAAGISTEVALEALLEYLEANGTDTLQANTRLLIAPGYRFRLIDGLITNFHQPESTLLLLVAALLGPGWRTVYNHALAHDYRFLSYGDSSLLLPGTEQTNAGIADHR

SEQ ID NO: 67442 - protein, 349 aa, Hymenobacter lapidarius
  misc_feature (1)..(349): tr|A0A1G1SVD2|A0A1G1SVD2_9BACT S-adenosylmethionine:tRN A ribosyltransferase-isomerase OS=Hymenobacter lapidari us OX=1908237 GN=queA PE=3 SV=1
MKLHEFKFELPEELVALHPARNRDESRLMVVHRATGQIEHRSFKDILDYFVEGDVFAFNDTKVFPARLYGNKEKTGAKIEVFLLRELNKELRLWDVLVDPARKIRVGNKLYFGESDMVAEVIDNTTSRGRTIKFLFDGTDEEFRKALYELGETPIPKEVINRETEPADKERYQTIYAENIGAVAAPSAGLHFTREVMKRMEIKGIEPAFVTLHVGLGTFRTVDVEDLTKHKMDSENFMVTAPACEVVNKALDTKRRVCAVGTTTVRAMEASVSANARMKPTQGWIDRFIFPPHDFKIANALLTNFHMPESTLIMLAAAFAGYPLLMEAYKEAIKEKYRFFSYGDAMLIL

SEQ ID NO: 67443 - protein, 349 aa, Hymenobacter mucosus
  misc_feature (1)..(349): tr|A0A238YVX1|A0A238YVX1_9BACT S-adenosylmethionine:tRN A ribosyltransferase-isomerase OS=Hymenobacter mucosus OX=1411120 GN=queA PE=3 SV=1
MKLTEFKFDLPENLLAQHPAKNRDESRLMVLHRDSGKIEHRVFKDIIEYFGDGDVFVVNDTKVFPARLYGNKEKTGAQIEVFLLRELNKEIHLWDVLVDPARKIRVGNKLYFGESDMVAEVIDNTTSRGRTIKFLFDGSDEEFYKALHDLGETPIPKEFIPRETEAADKERYQTIYAKHTGAVAAPSAGLHFTREVMKRLEIKGVDVVPVTLHVGLGTFRPVDVEDLTKHKMDSENFIVPADSATVVNRALDAKKRVCAVGTTSMRAMESSVSAHSRLKPTEGWTDRFIFPPYDFKIANALLTNFHTPESTLMMMAAAFAGYELLIEAYQTAIKEKYKFFSYGDAMLIL

SEQ ID NO: 67444 - protein, 410 aa, Hymenobacter mucosus
  misc_feature (1)..(410): tr|A0A238W2F9|A0A238W2F9_9BACT S-adenosylmethionine:tRN A ribosyltransferase-isomerase OS=Hymenobacter mucosus OX=1411120 GN=queA PE=3 SV=1
MSVPAIPDPRQLSIHDFTYELPAERIAPEPLPDRDQSRLLYYQGGTIHDQQFQDLPSLLPPSTLLVFNDTKVVRARLFAQKPTGGIVELFCLEPVAPHRAIEPAMQQTGSCVWKCLVGNGKRWKSGPVQLEFAVQGQSATLTAERVEHGEGYALIRFSWEPATLPFAEVLRAAGHLPLPPYLNRADTDVDAVRYQTVYAAHEGAVAAPTAGLHFSEAVLAELRARHISSARVTLHVGAGTFQPVKAAQMAEHPMHGEPISVTAATLRQLLAHLPAPIIPVGTTSLRTLESLYWLGAYLAQHPNTPVWHVRQWQPYEAATEVSAAEALTALLHHLEANGVEELHATTQLLIAPGYQFRLVRGLVTNFHQPESTLLLLVAALVGPTWRQLYEHALTHNYRFLSYGDSSLLLP

SEQ ID NO: 67445 - protein, 420 aa, Hymenobacter nivis
  misc_feature (1)..(420): tr|A0A2Z3GNG3|A0A2Z3GNG3_9BACT S-adenosylmethionine:tRN A ribosyltransferase-isomerase OS=Hymenobacter nivis OX =1850093 GN=queA PE=3 SV=1
MNPLTDQPTDPRQLAIQDFVYDLPPGRIAPEPLPDRAASRLLVNRGGVIEDRIFRDLPGELPAGALLVFNDTKVVRARLLAHRPTGGAVELFCLEPVAPHRALEPALAQMGACTWRCLVGNGRRWKEGPVAVEFIAPDGQPATLWATRQARESGGTALINFRWAPGALTFAEVLQGAGRLPLPPYLGRPDTDADAVRYQTVYAAHEGAVAAPTAGLHFTPELLAELQAQGFETAHVTLHVGAGTFQPVKATRMAEHPMHTEPLLVTAALLRQLLAHRPRPVIAVGTTSLRTLESLYWLGAALATGEAAGPALAVGQWQPYENAADVSVEAALGALLRHLEASGTNTLQASTRLLIGPGYRFRLVQGLITNFHQPESTLLLLVAALLGPGWRAVYDHALAHGYRFLSYGDSSLLLPGQDRI

SEQ ID NO: 67446 - protein, 418 aa, Hymenobacter nivis
  misc_feature (1)..(418): tr|A0A502H2S9|A0A502H2S9_9BACT S-adenosylmethionine:tRN A ribosyltransferase-isomerase OS=Hymenobacter nivis OX =1850093 GN=queA PE=3 SV=1
MNQLPAPPTDPRQLAILDFVYDLPPGRIAPEPLPDRAASRLLVSRGGVIQDRTFRDLPTELPAGALLVFNDTKVVRARLLAHRLTGGAVELFCLEPVAPHRALEPALAQAEACTWRCLVGNGRRWKEGPVAVEFTAPGGQPATLWATRQAREAGGTALVDFHWAPGALTFAEVLQAAGHLPLPPYLGRPNTAADAVRYQTVYAAHEGAVAAPTAGLHFTPELLAELRTQGFETAHVTLHVGAGTFQPVKAARMAEHPMHTEPLLVTAALLRQLLAHRPRPVIAVGTTSLRTLESLYWLGAALAAGAPAGPALAVGQWQPYEEAPDVSAEEALGALLRHLEATGTDTLEASTRLLIGPGYRFRLVQGLVTNFHQPESTLLLLVAALLGPGWRAVYDHALAHDYRFLSYGDSSLLLPEQE

SEQ ID NO: 67447 - protein, 410 aa, Hymenobacter perfusus
  misc_feature (1)..(410): tr|A0A428KH62|A0A428KH62_9BACT S-adenosylmethionine:tRN A ribosyltransferase-isomerase OS=Hymenobacter perfusus OX=1236770 GN=queA PE=3 SV=1
MSVLPPDPRQLSIHDFTYQLPPERIAPEPLPNRDQSKLLLYQQGSIADRQFQELPALLPAGSLLVFNDTKVVRARLFARRPTGGMVELFCLEPVAPYQAIEPAMQQTSSCVWKCLVGNGRRWKEGPVTLEFEALGQPALLTAERVEQHDGYALIRFSWEPAVLPFAEVLHGAGHLPLPPYLNRADTDVDAVRYQTVYAAHEGAVAAPTAGLHFSEAVLAELTERQISAARVTLHVGAGTFQPVKAEHMAAHAMHGEPISVTAATLRQLLAHLPQPIIPVGTTSLRTLESLYWLGARLVQHPDAEPIWHVSQWQPYEEQREIPVEDALTALLRQLETTGSDTLHATTQLLIAPGYQFRLVRGLITNFHQPESTLLLLVAALLGPGWRQVYQHALENNYRFLSYGDSSLLLS

SEQ ID NO: 67448 - protein, 342 aa, Hymenobacter perfusus
  misc_feature (1)..(342): tr|A0A428JXP5|A0A428JXP5_9BACT S-adenosylmethionine:tRN A ribosyltransferase-isomerase OS=Hymenobacter perfusus OX=1236770 GN=EI293_20570 PE=3 SV=1
MNIEEFRYTLAPENLEGTPREIRLGRRDLSRLLVVDRTSGALTHSTVFDLPKWLAPGDVLVLNNSKRIPGVLKGFTAVGGQVELRFVDLDSDNTGLCRIFPMHDVRPGERIELRRGGSVEVLATELTKYKLARVRPENDSLRELLKSQGIPILGFFYEGIWTAEHLNPYFATEEGSVESPLAGLHFTPELVESLKQHGVHVCFVTLHSVGSWLPFLESKVEEHEMWAESFCVPKETVNVVLNARKHGNKVVACGSTSLRALESAVGDDGQLTATSGRSKLYITPGYKFHVVDAYFTNFHQYQNSLIVLDAAFAGMENAMHTYREASSLHYSFYEFGDAVLYL

SEQ ID NO: 67449 - protein, 349 aa, Hymenobacter psychrophilus
  misc_feature (1)..(349): tr|A0A1H3HWG1|A0A1H3HWG1_9BACT S-adenosylmethionine:tRN A ribosyltransferase-isomerase OS=Hymenobacter psychrop hilus OX=651662 GN=queA PE=3 SV=1
MKLSEFKFELPENLVAQHPAKNRDESRLMVLHRDSGKIEHRSFKDILEYFDEGDVFVVNDTKVFPARMYGNKEKTGAQIEVFLLRELNTEIHLWDVLVDPARKIRVGNKLYFGESDMVAEVIDNTTSRGRTIKFLYDGPQEDFYKALYSLGETPIPKEFITRDTEAADKERYQTIYASNIGAVAAPSAGLHFTKEVMKRLEIKGIEVAPVTLHIGLGTFRTVDVEDLTKHKMDSENFVVPGTTAVVVNKALDTKKRVCAIGTTAMRAMESSVSAHVRLKANEGWTDRFIFPPYDFKIANALLTNFHTPESTLMMMASAFAGHDLLIEAYKLAIKEKYRFFSYGDAMLII

SEQ ID NO: 67450 - protein, 408 aa, Hymenobacter psychrophilus
  misc_feature (1)..(408): tr|A0A1H3FQF9|A0A1H3FQF9_9BACT S-adenosylmethionine:tRN A ribosyltransferase-isomerase OS=Hymenobacter psychrop hilus OX=651662 GN=queA PE=3 SV=1
MSDPRRLSIHDFTYQLPPERIAPEPLANRDQSKLLVYQQGLLADRTFRDLPALLPPDSLLVFNDTKVVRARLFAQRPTGGMVELFCLEPVAPHRAIEPAMQQTGACVWKCLVGNGRRWKDGPVTLEFEAHGQSATLRAERTEQHDGYALIAFNWEPAELPFAEVLRAAGHLPLPPYLNRPDTDVDAVRYQTVYAAHEGAVAAPTAGLHFSEAVLAELAERRTAAARVTLHVGAGTFQPVKAGQMADHPMHGEPFSVTADTLRRLYEHLAADRPIIPVGTTSLRTLESLYWLGARMVQQPAKLPAWHVSQWQPYEPGVEVSIQQSLEALLAQLALTGSDTLHATTQLLIAPGYRFRLVRGLITNFHQPESTLLLLVAALLGPDWRRVYEHALAHDYRFLSYGDSSLLLP

SEQ ID NO: 67451 - protein, 350 aa, Hymenobacter psychrotolerans
  misc_feature (1)..(350): tr|A0A1M6PP20|A0A1M6PP20_9BACT S-adenosylmethionine:tRN A ribosyltransferase-isomerase OS=Hymenobacter psychrot olerans DSM 18569 OX=1121959 GN=queA PE=3 SV=1
MKLSEFKFELPEALLAQHPAKNRDESRLMVLHRDSGKIEHRVFKDIIEYFGEGDVFVVNDTKVFPARLYGNKEKTGAKIEVFLLRELNKEIHLWDVLVDPARKIRVGNKLYFDDEGIVVAEVIDNTTSRGRTIKFLFDGSDEEFYKALHNLGETPLPRESITRDAEPADKERYQTIYAKNTGAVAAPSAGLHFTREVMKRLEIKGVEIAPVTLHVGLGTFRTVDVEDLTKHKMDSENFIVPGSSAVIVNRALDAKKRVCAVGTTSMRAMESSVSANSRLKANEGWTDRFIFPPYDFKIANSLITNFHTPESTLMMMASAFAGHEFLIEAYQTAIKEKYKFFSYGDAMLIL

SEQ ID NO: 67452 - protein, 412 aa, Hymenobacter psychrotolerans
  misc_feature (1)..(412): tr|A0A1M6TZ33|A0A1M6TZ33_9BACT S-adenosylmethionine:tRN A ribosyltransferase-isomerase OS=Hymenobacter psychrot olerans DSM 18569 OX=1121959 GN=queA PE=3 SV=1
MSTSLPADPRQLSIHDYTYQLPPERIAPEPLAQRDQSRLLVSRHGALHDLTFQELPAQLPPDALLVFNDTKVVRARLFCHKPTGGIIELFCLEPVAPHRAIEPAMQQTGACVWKCLVGNGKRWKSGPVTLEFENNGQPALLTAERQEAADGYSLIHFSWKPAELPFAEVLRGAGHLPLPPYLNREDTAVDAVRYQTVYAAHEGAVAAPTAGLHFSEQVLAELAQRGIQSARVTLHVGAGTFQPVKAERMEGHAMHGEPISVSRATLEQLLGHLPRPVVAVGTTSLRTLESLYWLGVQATQGQLSADVVPHVSQWQPYEPGSELPATEALQALLHFLAAQQLDTLHATTQLLIAPGYRFRVIGGLVTNFHQPESTLLLLVAALLGPGWRQVYEHALANGYRFLSYGDSSLLLP

SEQ ID NO: 67453 - protein, 409 aa, Hymenobacter rigui
  misc_feature (1)..(409): tr|A0A428KMN4|A0A428KMN4_9BACT S-adenosylmethionine:tRN A ribosyltransferase-isomerase OS=Hymenobacter rigui OX =334424 GN=queA PE=3 SV=1
MSASASNPRQLSIHDFTYQLPPERIAPEPLPARDQSKLLLYQQGAISDRSFQELPGLLPSDSLLVFNDTKVVRARLFARRPTGGIVELFCLEPVAPHTAIEPAMQQTGNCVWKCLVGNGKRWKEGQITLEFEAQGQPALLTAERVEQREGYALIQFNWQPAQLSFAEVLRGAGHLPLPPYLNRADTDVDAIRYQTVYAAHEGAVAAPTAGLHFSDAVLADLEARRIASTRVTLHVGAGTFQPVKAESMDGHDMHGEAISVTADTLRHLLTHLPAPIIPVGTTSLRTLESLYWLGARLVQQPQAANWHVSQWQPYEEQPEVSAADAIRALLHHLETTGTEALQATTQLLIAPGYQFRLVRGLVTNFHQPESTLLLLVAALIGPDWRRVYEHALAHDYRFLSYGDSSLLLP

SEQ ID NO: 67454 - protein, 349 aa, Hymenobacter rigui
  misc_feature (1)..(349): tr|A0A428KSP8|A0A428KSP8_9BACT S-adenosylmethionine:tRN A ribosyltransferase-isomerase OS=Hymenobacter rigui OX =334424 GN=queA PE=3 SV=1
MKLSEFKFDLPENLLAQHPAKNRDESRLMVLHRDSGKIEHRTFKDILEYFGEGDVFVVNDTKVFPARLYGNKEKTGAQIEVFLLRELNKEIHLWDVLVDPARKIRVGNKLYFGESDMVAEVIDNTTSRGRTIKFLFDGSDEEFYKALHDLGETPIPKDFITRETEAADKERYQTIYAKHTGAVAAPSAGLHFTREVMKRLEIKGVEVVPVTLHVGLGTFRTVDVEDLTKHKMDSENFIVPAESAVVVNKALDTKKRVCAIGTTSMRAMESSVSANSRLKPTEGWTDKFIFPPYDFKIANSLLTNFHTPESTLMMMASAFAGHELLIEAYQTAIKEKYKFFSYGDAMLIL

SEQ ID NO: 67455 - protein, 416 aa, Hymenobacter roseosalivarius
  misc_feature (1)..(416): tr|A0A1W1VVV0|A0A1W1VVV0_9BACT S-adenosylmethionine:tRN A ribosyltransferase-isomerase OS=Hymenobacter roseosal ivarius DSM 11622 OX=645990 GN=queA PE=3 SV=1
MSAFPDPRQLSIQDFTYELPPHRIAPEPLPHRDQSRLLVYRGGQISDQRFRNLSSELPPSALLVFNDTKVVRARLFCQKPTGGAVELFCLEPVAPHRAVEPAMQQTGSCVWKCLVGNGKRWKTGPVQLAFAVDDEPALLTAERREVADGYSLIQFSWEPAALPFAEVLRYAGHLPLPPYLNRADTDVDAVRYQTVYAAHEGAVAAPTAGLHFSDAVLADLSKHGFQTARVTLHVGAGTFQPVKAEHMAGHAMHDEPFVVEASVLRQLLEQAPQPIIAVGTTSLRTLESLYWLGARLTQQPDRMSVTGLHVTQWQPYEEGPLVTVAEALQALLRYVEGSGNTFLRATTQLLIAPGYEFRVVQGLVTNFHQPESTLLLLVAALIGPAWRRVYNHALAHEYRFLSYGDSSLLLPTEHKL

SEQ ID NO: 67456 - protein, 349 aa, Hymenobacter roseosalivarius
  misc_feature (1)..(349): tr|A0A1W1VK16|A0A1W1VK16_9BACT S-adenosylmethionine:tRN A ribosyltransferase-isomerase OS=Hymenobacter roseosal ivarius DSM 11622 OX=645990 GN=queA PE=3 SV=1
MKLSEFKFDLPENLLAQHPAKNRDESRLMVLHRDTGKIEHRIFKDIIEYFSDGDVFVMNDTKVFPARLYGNKEKTGAKIEVFLLRELNKESHLWDVLVDPARKIRVGNKLYFGESDMVAEVIDNTTSRGRTIKFLFDGPDDEFYKALHDLGETPLPREAITRDAEPADKERYQTIYAKHIGAVAAPSAGLHFTREVLKRLEIKGVETTAVTLHVGLGTFRPVDVEDLTKHKMDSENFIVPAEAATVVNKALDAKNRVCSVGTTTMRALESSVSAHNRLKANQGWTDRFIFPPYEFKIANTLLTNFHTPESTLMMMTAAFAGYDLLAEAYKVAIKEKYRFFSYGDAMLIL

SEQ ID NO: 67457 - protein, 408 aa, Hymenobacter rubripertinctus
  misc_feature (1)..(408): tr|A0A418R431|A0A418R431_9BACT S-adenosylmethionine:tRN A ribosyltransferase-isomerase OS=Hymenobacter rubriper tinctus OX=2029981 GN=queA PE=3 SV=1
MSDPRQLSIHDFTYELPADRIAPEPLPSRDQSRLLVCERGIIEDRTFLELPGLLPADSLLVFNDTKVVRARLFARRPTGGLVELFCLEPVSPHRAIEPAMQQTQACVWKCLVGNGRRWKDGPVTVEFEAQGQPAVLRAKRVEQHEGYALIAFSWAPDGLPFAEVLRGAGHLPLPPYLNRADTDVDAIRYQTVYASQEGAVAAPTAGLHFSEAVLAELAERRTAAARVTLHVGAGTFQPVKARQMSDHPMHGEPISVTAETLSRLLAHLREGGPIIPVGTTSLRTLESLYWLGAGLVQRPALAPAWHVGQWQPYEPQTEVPAAAALAALLAQLELTGSDTLHATTQLLIAPGYRFRLVQGLITNFHQPESTLLLLVAALIGADWRRVYDHALAHHYRFLSYGDSSLLLP

SEQ ID NO: 67458 - protein, 349 aa, Hymenobacter rubripertinctus
  misc_feature (1)..(349): tr|A0A418QRS9|A0A418QRS9_9BACT S-adenosylmethionine:tRN A ribosyltransferase-isomerase OS=Hymenobacter rubriper tinctus OX=2029981 GN=queA PE=3 SV=1
MKLSEFKFELPENLLAQHPAKNRDESRLMVLHRDSGKIEHRMFKDILEYFDEGDVFVVNDTKVFPARLFGNKEKTGAQIEVFLLRELNKEIHLWDVLVDPARKIRVGNKLYFGESDMVAEVIDNTTSRGRTIKFLYDGPDEDFYKALYNLGETPIPKDFISRDTEAADKERYQTIYAKNIGAVAAPSAGLHFTKEVMKRLEIKGIDVASVTLHVGLGTFRTVDVEDLTKHKMDSENFMVPAETATMVNKALDAKKRVCAIGTTSMRAMESSVSAHVRLKGNEGWTDRFIFPPYDFKIANALLTNFHTPESTLMMMASAFAGHELLIEAYKLAIKEKYKFFSYGDAMLII

SEQ ID NO: 67459 - protein, 349 aa, Hymenobacter sedentarius
  misc_feature (1)..(349): tr|A0A0U4C1H8|A0A0U4C1H8_9BACT S-adenosylmethionine:tRN A ribosyltransferase-isomerase OS=Hymenobacter sedentar ius OX=1411621 GN=queA PE=3 SV=1
MKLHEFKFELPEELVALHPARNRDESRLMVVHRATGQIEHRTFKDILDYFVEGDVMVLNDTKVFPARLYGNKEKTGAKIEVFLLRELNKELRLWDVLVDPARKIRVGNKLYFGESDMVAEVIDNTTSRGRTIKFLFDGTDEEFRKALYELGETPIPKEVINRETEPADKERYQTIYAEHIGAVAAPSAGLHFTREVMKRMEIKGVEPAYVTLHVGLGTFRTVDVEDLTKHKMDSENFIVTAPACEIVNKALDAKKKVCAVGTTTIRAMEASVSANARMKPTQGWIDRFIFPPHDFKIANCLLTNFHMPESTLIMLAAAFAGYPLLMEAYKEAIKEKYKFFSYGDAMLIL

SEQ ID NO: 67460 - protein, 420 aa, Hymenobacter sedentarius
  misc_feature (1)..(420): tr|A0A0U4BPY2|A0A0U4BPY2_9BACT S-adenosylmethionine:tRN A ribosyltransferase-isomerase OS=Hymenobacter sedentar ius OX=1411621 GN=queA PE=3 SV=1
MTSPHPRDLSIHDFTYPLPADRIAPEPLPDRAASRLLVSRHGQLSDKQFRDLSQELPAGSLLIFNDTRVVRARLLARRPTGGQVELFCLEPVAPHRSLELALQQTGQCTWRCLVGNGRRWKEGPVTLEFETADGQTATLWAERQAQEAGTALIDFRWEPASLPFAEVLRAGGHLPLPPYLGRTDTPADAIRYQTVYAAAEGAVAAPTAGLHFTPELLAELRAKGFDIGHVTLHVGAGTFQPVKADHMAGHPMHTEPILVTAALLRQLLAHRPLPVLAVGTTSLRTLESLYWLGVGLLHAHQADDTELAVTQWQPYDMAAAAASISPGMALEALLHHLQATGADTLQASTRLLIAPGYQFRLVDGLITNFHQPESTLLLLVAALLGPGWRDVYEHALSHGYRFLSYGDSSLLLPGTVMEGQ

SEQ ID NO: 67461 - protein, 408 aa, Hymenobacter sp.
  misc_feature (1)..(408): tr|A0A495VEW7|A0A495VEW7_9BACT S-adenosylmethionine:tRN A ribosyltransferase-isomerase OS=Hymenobacter sp. YR20 4 OX=2135668 GN=queA PE=3 SV=1
MNANPRQLSIHDFTYQLPPERIAPEPLPQRDQSRLLVYRQGQLTDRRFYELPAELPAGSLLVFNDTKVVRARLFAHKPTGGIIELFCLEPVAPHRAIEPAMQQTGSCVWKCLVGNGKRWKSGPVLLEFMAHGKPATLTAERQEVADGYSLIQFSWEPAELPFAEVLRGAGHLPLPPYLNRPDTDVDAVRYQTVYAAQEGAVAAPTAGLHFSEEVLQELQAKGIETAHVTLHVGAGTFQPVKADRMAEHPMHAEPISVTPTLLRQLLTHNQGPVLAVGTTSLRTLESLYWLGVQLLQNPASADEALHVGQWQPYEPGSDILAAEALQALLQYLEKTGADVLNATTQLLIAPGYRFRIVQGLITNFHQPESTLLLLVAALVGPQWRQLYEHALSHDYRFLSYGDSSLLLP

SEQ ID NO: 67462 - protein, 349 aa, Hymenobacter sp.
  misc_feature (1)..(349): tr|A0A495VMC0|A0A495VMC0_9BACT S-adenosylmethionine:tRN A ribosyltransferase-isomerase OS=Hymenobacter sp. YR20 4 OX=2135668 GN=queA PE=3 SV=1
MKLSEFKFDLPENLVAQHPAKTRDESRLMVLHRDSGKIEHRVFKDIIEYFDEGDVFVVNDTKVFPARLYGNKEKTGAKIEVFLLRELNKEIHLWDVLVDPARKIRVGNKLYFGESDMVAEVIDNTTSRGRTIKFLFDGTDEEFYKALHDLGETPLPRESITREAEPADKERYQTIYAKHTGAVAAPSAGLHFTREVMKRLEIKGVEVAAVTLHVGLGTFRAVDVEDLTKHKMDSENFVVPSETATIVNRALDRKKRVCAVGTTSMRAMESSVSANARLKATEGWTDKFIFPPYDFKIANCLLTNFHTPESTLMMLAAAFAGYDLLIEAYQTAIKEKYKFFSYGDAMLIL

SEQ ID NO: 67463 - protein, 349 aa, Hymenobacter swuensis
  misc_feature (1)..(349): tr|W8EZF5|W8EZF5_9BACT S-adenosylmethionine:tRNA ribosy ltransferase-isomerase OS=Hymenobacter swuensis DY53 OX =1227739 GN=queA PE=3 SV=1
MKLSEFKFDLPENLLAQHPAKNRDESRLMVLHRDSGKIEHRVFKDILEYFADGDVFVVNDTKVFPARLYGNKEKTGAQIEVFLLRELNKEIHLWDVLVDPARKIRVGNKLYFGESDMVAEVIDNTTSRGRTIKFLFDGSDEEFYKALHDLGETPIPKEFITRETEAADKERYQTIYAKNTGAVAAPSAGLHFTREVMKRLEIKGIEVTPVTLHVGLGTFRTVDVEDLTKHKMDSENFVVPAATATIVNKALDTKKRVCAIGTTSMRAMESSVSAHARLKANEGWTDRFIFPPYEFKIANALLTNFHTPESTLMMMASAFAGHELLIEAYQTAIKEKYKFFSYGDAMLIL

SEQ ID NO: 67464 - protein, 410 aa, Hymenobacter swuensis
  misc_feature (1)..(410): tr|W8FAJ2|W8FAJ2_9BACT S-adenosylmethionine:tRNA ribosy ltransferase-isomerase OS=Hymenobacter swuensis DY53 OX =1227739 GN=queA PE=3 SV=1
MSVLPPDPRQLSIHDFTYQLPPERIAPEPLPNRDQSKLLLYKQGSITDQQFQELPALLPTGSLLVFNDTKVVRARLFVRRPTGGMVELFCLEPVAPHQAIEPAMQQTGSCVWKCLVGNGRRWKKGPVTLEFEALGQPAVLTAERIEQHDGYALIRFSWEPATLPFAEVLHGAGHLPLPPYLNRADTDVDAVRYQTVYAAHEGAVAAPTAGLHFSEAVLAELKERQISAARVTLHVGAGTFQPVKAEHMAAHAMHGEPISVTAATLRQLQAHLPQPIIPVGTTSLRTLESLYWLGARLVQHPEAVPIWHVSQWQPYEEQREVTLEDALAALLRQLEITGSDTLHATTQLLIAPGYRFRMVRGLITNFHQPESTLLLLVAALLGPAWRQVYQHALANNYRFLSYGDSSLLLP

SEQ ID NO: 67465 - protein, 411 aa, Hymenobacter wooponensis
  misc_feature (1)..(411): tr|A0A4Z0MHB8|A0A4Z0MHB8_9BACT S-adenosylmethionine:tRN A ribosyltransferase-isomerase OS=Hymenobacter wooponen sis OX=1525360 GN=queA PE=3 SV=1
MFASAAPDPRQLSIHDFTYQLPPDRIAPEPLANRDQSRLLVYQAGQLEDRRFQELPTLLPPDSLLVFNDTKVVRARLFAHKPTGGLVELFCLEPVAPHTAIEPAMQQTGSCVWKCLVGNGKRWKTGPVLLDFTVDGQPATLTAERLEQGEGFAFIQFSWEPAHLPFAEVLRAAGHLPLPPYLNRPDTDVDAVRYQTVYAAHEGAVAAPTAGLHFSDSVLAELEARGVASAHVTLHVGAGTFQPVKADQMLGHPMHGEPISVTATTLRQLLEHWPRPILAVGTTSLRTLESLYWLGARLVQEPHAETKWHVGQWQPYEQTTEVPTEAALQALLAHLQATGTEEIHATTQLLIAPGYRFRLIKGLITNFHQSESTLLLLVAALVGPEWRHLYEHALENNYRFLSYGDSSLLLP

SEQ ID NO: 67466 - protein, 349 aa, Hymenobacter wooponensis
  misc_feature (1)..(349): tr|A0A4Z0MG55|A0A4Z0MG55_9BACT S-adenosylmethionine:tRN A ribosyltransferase-isomerase OS=Hymenobacter wooponen sis OX=1525360 GN=queA PE=3 SV=1
MKLSEFKFDLPENLLAQHPAKNRDESRLMVLHRDSGKIEHRVFKDIIEYFGEGDVFVVNDTKVFPARLYGNKEKTGAKIEVFLLRELNKEIHLWDVLVDPARKIRVGNKLYFGESDMVAEVIDNTTSRGRTIKFLFDGSDEEFYKALHDLGETPIPKEFIPRETEAADKERYQTIYAKHTGAVAAPSAGLHFTREVMKRLEIKGVDVVPVTLHVGLGTFRPVDVEDLTKHKMDSENFIVPADSAAVVNRALDAKKRVCAIGTTSMRAMESSVSAHSRLKPTEGWTDKFIFPPYDFKISNALLTNFHTPESTLMMMASAFAGHELLIEAYQLAIKEKYKFFSYGDAMLIL

SEQ ID NO: 67467 - protein, 357 aa, Hyphomicrobiaceae bacterium; identical to SEQ ID NO: 66548
  misc_feature (1)..(357): tr|A0A3R7TCH6|A0A3R7TCH6_9RHIZ S-adenosylmethionine:tRN A ribosyltransferase-isomerase OS=Hyphomicrobiaceae bac terium TMED74 OX=1986774 GN=queA PE=3 SV=1
  misc_feature (43)..(43): Xaa can be any naturally occurring amino acid
  misc_feature (50)..(50): Xaa can be any naturally occurring amino acid
  misc_feature (81)..(81): Xaa can be any naturally occurring amino acid
  misc_feature (93)..(93): Xaa can be any naturally occurring amino acid
  misc_feature (240)..(240): Xaa can be any naturally occurring amino acid
  misc_feature (334)..(334): Xaa can be any naturally occurring amino acid
  misc_feature (357)..(357): Xaa can be any naturally occurring amino acid

SEQ ID NO: 67468 - protein, 370 aa, Hyphomicrobium denitrificans
  misc_feature (1)..(370): tr|D8JQL4|D8JQL4_HYPDA S-adenosylmethionine:tRNA ribosy ltransferase-isomerase OS=Hyphomicrobium denitrificans (strain ATCC 51888 / DSM 1869 / NCIB 11706 / TK 0415) O X=582899 GN=queA PE=3 SV=1
MRTDLFDFELPDSAIALRPAEPRDSARLLVVHPVKGGCARDDAELSDKTVRDLPGLLNPGDALVFNDTRVIPAALSGVRTRGDVQAKVDFNLTKQVGDSSWRAFARPAKRLEVGDRVHFGHSGESCFLGALDATVSAKGEAGEVELAFDYSGSILDDAIRAVGVMPLPPYIALKRGADDRDRQSYQTVYAKNDGAVAAPTAGLHFTPELFAALDARGISRHFVTLHVGPGTFLPVKADDTSEHKMHSEWGEISAETAAALNETRARGGRIVAVGTTSLRVLESAAGDDGSIPAWSGDTSIFITPGYRFKAIDALMTNFHLPRSTLFMLVAAFSGLGTMRAAYGHAIHSGYRFYSYGDASLLFPADAEPST

SEQ ID NO: 67469 - protein, 369 aa, Hyphomicrobium denitrificans
  misc_feature (1)..(369): tr|N0B861|N0B861_9RHIZ S-adenosylmethionine:tRNA ribosy ltransferase-isomerase OS=Hyphomicrobium denitrificans 1NES1 OX=670307 GN=queA PE=3 SV=1
MRTDLFDFELPDNAIALRPAEPRDSARLLVVHPVKGGCAHDDADLADKSVRDLPSLLNPGDALVFNDTRVIPAALAGMRIRGETQAKVDFNLTKQVNESSWRAFARPAKRLEVGDRVHFGHSGESCYLGALDATVSAKGEAGEVELAFDFSGDVLDDAIRTVGMMPLPPYIALKRGADDRDRQSYQTVYAKKDGAVAAPTAGLHFTPELLAALDARGISRHFVTLHVGPGTFLPVKTDDTDGHAMHSEWGEVSAATAAALNETRARGGRIVAVGTTSLRLLESAASENGTIAPWSGETSIFITPGYRFKAVDVLMTNFHLPRSTLFMLVAAFSGLGTMRAAYAHAIHSGYRFYSYGDASLLFPAKVPSS

SEQ ID NO: 67470 - protein, 366 aa, Hyphomicrobium facile
  misc_feature (1)..(366): tr|A0A1I7N2U8|A0A1I7N2U8_9RHIZ S-adenosylmethionine:tRN A ribosyltransferase-isomerase OS=Hyphomicrobium facile OX=51670 GN=queA PE=3 SV=1
MRTDLFDFELPDSAIALYPAEPRDTARLLVVHPVQGSCARDDADLADRSVRDLPSLLRPGDALVFNDTKVIPAALTGVRIRGETRAKVDFNLTKRTGENSWRAFARPAKRLESGDRVHFGHSQDSCMLGALDATVSAKGEAGEVELAFDLTGAALDEAVKAVGLMPLPPYIALKRESDVRDRESYQTVYASKEGAVAAPTAGLHFTPELLAALDARGISRHFVTLHVGPGTFLPVKADDTDAHVMHSEWGEVSPETASALNDVKARGGRIVAVGTTSLRLLESAAKDDGAIAPWSGETAIFITPGYRFKAIDILMTNFHLPRSTLFMLVSAFAGLGTMRAAYGHAIRSGYRFYSYGDASLLFRTPG

SEQ ID NO: 67471 - protein, 373 aa, Hyphomicrobium nitrativorans
  misc_feature (1)..(373): tr|V5SFB2|V5SFB2_9RHIZ S-adenosylmethionine:tRNA ribosy ltransferase-isomerase OS=Hyphomicrobium nitrativorans NL23 OX=1029756 GN=queA PE=3 SV=1
MRTDLFDFDLPEDLIALRPAEPRDGARMLVVDASGSPALADHAVRDLPDFLRPGDALVLNDTRVIPAALEGVRIRGEMRARVAFNLLQRVDGNRWRALARPAKRLQPGDRVRFGKDGEGMACLLDVLDATVAERRDGGEVELAFDLSGPDLDQAIHAQGEMPLPPYIAGRRAPDASDRTRYQTVYAAREGAVAAPTAGLHFTPELFAALEARGVSRHFVTLHVGAGTFLPVKVEDTATHKMHAEAGEVSAETAVALNAVRAAGGRIVAVGTTSLRLLESAAAEDGTIRPYAGETDIFITPGYRFRAVDLLMTNFHLPRSTLFMLVSAFAGLETMKAAYAHAVGSGYRFYSYGDASLLYPAPPASAVPYKDSHD

SEQ ID NO: 67472 - protein, 361 aa, Hyphomicrobium sp.
  misc_feature (1)..(361): tr|A0A258L1L9|A0A258L1L9_9RHIZ S-adenosylmethionine:tRN A ribosyltransferase-isomerase OS=Hyphomicrobium sp. 32 -62-53 OX=1970390 GN=queA PE=3 SV=1
MRTDLFDFELPEERIALYPLEPRDAARLLVVDPRAGGLRDLGVRDLPDLLEPGDALVFNDTRVIPAALDGVRVREGVTAKVAFNLIKRVDGTRWRAFARPAKRLEVGDRVRFGHANTSCLLGALDATVASRLDAGEVELAFDLTGDELDRAIAAVGEMPLPPYIALKRPPGEADRQSYQTMFAAKDGAVAAPTAGLHFTERLIAAIDARGIERHTVTLHVGAGTFLPVKAEDTAGHQMHSELGSIDATTAAALNAVRARGNRVVAVGTTSLRTLESAAADDGRLGAWAGETSIFITPGYRFRVTGALMTNFHLPRSTLFMLVSALSGLETMQAAYAHAIQHGYRFYSYGDACLLFPAAETG

SEQ ID NO: 67473 - protein, 367 aa, Hyphomicrobium sp.
  misc_feature (1)..(367): tr|F8J5W4|F8J5W4_HYPSM S-adenosylmethionine:tRNA ribosy ltransferase-isomerase OS=Hyphomicrobium sp. (strain MC 1) OX=717785 GN=queA PE=3 SV=1
MRTDLFDFVLPDASIALYPAEPRDSARLLVVHPVKGSCARDDADLEDKAIRDLPSLLQPGDALVFNDTKVIPAALSGVRARGDVRAKVDFNLTKRVSDNTWRAFARPAKRLEAGDRVRFGHGEDTCMLGALDATVAAKGEAGEVELAFDLSGAVLDEAIAAIGAMPLPPYIALKREPDARDRDTYQTIYADKDGAVAAPTAGLHFTPELFAALDARGISRHFVTLHVGAGTFLPVKADDTDGHKMHSEWGEVSPETAAALNEVRARGGRIVAVGTTSLRLLESAAREDGTIMPWSGETAIFITPGYRFKAIDVLMTNFHLPRSTLFMLVSAFSGLGTMRAAYGHAIHSGYRFYSYGDASLLFRDTGG

SEQ ID NO: 67474 - protein, 359 aa, Hyphomicrobium sulfonivorans
  misc_feature (1)..(359): tr|A0A109BJ25|A0A109BJ25_HYPSL S-adenosylmethionine:tRN A ribosyltransferase-isomerase OS=Hyphomicrobium sulfon ivorans OX=121290 GN=queA PE=3 SV=1
MRTDLFDFELPEDRIALRPATPRDSARLLSVPAGDVAFADLSVGDLPQLLQPGDALVFNDTRVIPASLSGVRQRGEYRSNVSLLLIERLAPDRWRTFARPAKRLQTGDRLQFGHGGEMCMLGALEGTVLSRGEGGEVDVAFDLSGPDLDAAIAAVGEMPLPPYIAGKRGVESTDRADYQTIYAARDGAVAAPTAGLHFTPELLAALEQRGVSSHFVTLHVGAGTFLPVKVEDTAEHKMHSEWGEVSAQTVQALNNVRANGGRIVAVGTTSLRLLESAAASGELQPFSDHTDIFITPGYRFRVVDVLMTNFHLPRSTLFMLVSAFAGRERMQAAYAHAIANDYRFYSYGDASLLMRAQHN

SEQ ID NO: 67475 - protein, 106 aa, Hyphomonadaceae bacterium
  misc_feature (1)..(106): tr|A0A0F2QRA0|A0A0F2QRA0_9RHOB S-adenosylmethionine:tRN A ribosyltransferase-isomerase (Fragment) OS=Hyphomonad aceae bacterium BRH_c29 OX=1629720 GN=VR75_02875 PE=3 S V=1
ARLNAARAAGYRAVPVGTTAMRTLESCVDTDGMIHAATGPTDIFLKPGDAVRATDALMTNFHLPGSSLFMLVCTLMGTDVMRAAYAHAIANDYRFYSYGDACLLLP

SEQ ID NO: 67476 - protein, 352 aa, Hyphomonadaceae bacterium
  misc_feature (1)..(352): tr|A0A354TY25|A0A354TY25_9RHOB S-adenosylmethionine:tRN A ribosyltransferase-isomerase OS=Hyphomonadaceae bacte rium OX=2026748 GN=queA PE=3 SV=1
MDLSAFDFELPDECIATRPAEPRDSCRLLCVHGDQITDRVFRDIGTELREGDLLIANDTRVVPALLFGVRPARDELSSDVDVQINLVAQKDDGVWECLGRPGRRLRPNDVIEFPAGLRGRILDKRPTGELVLEFSPKGEDFWSAVDAVGKMPIPPYIAKMRPADSKDHEDYQTVFADRAGSVAAPTAGLHFTDALVKQLGERGIGFERVTLHVGAGTFAGLSEESFKSGKLHEEWCEISEDVARKIAECKGRGGRVIAVGTTSLRTLESLADGQGSVLAASGDTDIFIQPGYKFQVVDGLITNFHLPKSSLFMLVSALMGTDVMQSAYAHAIKSGYKFYSYGDASLLMPRHD

SEQ ID NO: 67477 - protein, 351 aa, Hyphomonas adhaerens
  misc_feature (1)..(351): tr|A0A3B9GZV4|A0A3B9GZV4_9RHOB S-adenosylmethionine:tRN A ribosyltransferase-isomerase OS=Hyphomonas adhaerens OX=81029 GN=queA PE=3 SV=1
MDLSQFQFDLPERLIALRPVEPQDSARLLVVHRDGRLEDASVRDLPRYLNAGDVLVFNDTRVLPAALKGVRPARDEIGQDVACDVNLTERIDAANWRALARPGRRLKDGDTIVFAEGFTAEITGHHDGGEIGLRFSLSGEDLTAALDRHGAMPLPPYIARRRPADAKDRETYQTEFAGEDAASVAAPTAGLHFTPRLLSECDAAGLVRETVRLHVGLGTFKPLEEKQLEENRLHQEWRRLTPETAARLNAARAGGSRVVPVGTTAMRTLESCVDTEGLLHPATGPTDIFLKPGDAVRGTDALVTNFHLPGSSLFMLVSALMGTEIMRAAYAHAIANEYRFYSYGDACLLLP

SEQ ID NO: 67478 - protein, 351 aa, Hyphomonas adhaerens
  misc_feature (1)..(351): tr|A0A069E168|A0A069E168_9RHOB S-adenosylmethionine:tRN A ribosyltransferase-isomerase OS=Hyphomonas adhaerens MHS-3 OX=1280949 GN=queA PE=3 SV=1
MDLSQFQFDLPERLIALRPVEPQDSARLLVVHGDGRLEGASVRDLPRYLNAGDVLVFNDTRVLPAALKGVRPARDEIGQDVACDVNLTERIDAANWRALARPGRRLKDGDTIVFAEGFTAEITGHHDGGEIGLRFSLSGEDLTAALDRHGAMPLPPYIARRRPADAKDRETYQTEFAGEDAASVAAPTAGLHFTPRLLSECDAAGLVRETVRLHVGLGTFKPLEEKQLEENRLHQEWRRLTPETAARLNAARAGGGRIVPVGTTAMRTLESCVDTDGMLHPATGPTDIFLKPGDAVRGTDALVTNFHLPGSSLFMLVSALMGTEIMRAAYAHAIANEYRFYSYGDACLLLP

SEQ ID NO: 67479 - protein, 351 aa, Hyphomonas atlantica
  misc_feature (1)..(351): tr|A0A059DZD2|A0A059DZD2_9RHOB S-adenosylmethionine:tRN A ribosyltransferase-isomerase OS=Hyphomonas atlantica OX=1280948 GN=queA PE=3 SV=1
MDLSQFQFDLPEERIALRPVEPQDSARLLVVHGDGRLEDAHIRDLPRFLSPGDVMVFNDTRVLPAALKGVRPARDETGQDVACDVNLTERIDARSWRALARPGRRLKEGDRIVFAEGFSAEITGRHEGGEIGLLFSLSGDELTAALDAHGAMPLPPYIARRRPADAKDRQTYQTEFAGDDAASVAAPTAGLHFTPRLLEEIDTAGIARETVRLHVGLGTFKPLEAAQLEANRLHEEWRRLTPEVAERLNAARSGGRRVVPVGTTAMRTLESCANADGMLRAATGPTDIFLKPGDAVRATDALVTNFHLPGSSLFMLVCALMGTDVMQAAYAHAIETEYRFYSYGDACLLLP

SEQ ID NO: 67480 - protein, 351 aa, Hyphomonas beringensis
  misc_feature (1)..(351): tr|A0A062UBF8|A0A062UBF8_9RHOB S-adenosylmethionine:tRN A ribosyltransferase-isomerase OS=Hyphomonas beringensi s OX=1280946 GN=queA PE=3 SV=1
MDISAFQFDLPERLIALRPVEPQDSARLLVVHGNGRLEDACVRDLPKYLSSGDVLVFNDTRVLPAALKGIRPARDETGQDVVCDVNLTERIDAETWRALARPGRRLKEGDVIQFADGFSAAIVNRMEGGEIELRFSLSGDALTAALDAYGAMPLPPYIARRRPADAKDRETYQTKFAGEDAASVAAPTAGLHFTPRLLAEIDAAGLSRQTVRLHVGLGTFKPLEEKHLQENRLHEEWRRLTHETASLLNQTRRDGHRVVPVGTTAMRTLESCVDTEGVLHAATGPTDIFLKPGDAVRATDALMTNFHLPGSSLFMLVCALMGTDIMQAAYAHAIENEYRFYSYGDACLLLP

SEQ ID NO: 67481 - protein, 351 aa, Hyphomonas chukchiensis
  misc_feature (1)..(351): tr|A0A062UMF6|A0A062UMF6_9RHOB S-adenosylmethionine:tRN A ribosyltransferase-isomerase OS=Hyphomonas chukchiens is OX=1280947 GN=queA PE=3 SV=1
MNLADFHFDLPERLIALRPADPQDSARLLVVHGDGRLEDASVRDLPRYLTAGDVLVFNDTRVLPAALKGVRPARDEIGADVACDVNLVERIDDHTWRALARPGKRLKPGDPIHFAEGFRATITQRLDGGEIELAFDQSGPALEQALDAHGAMPLPPYIARRRPADASDRETYQTSFAGEDAASVAAPTAGLHFTPRLLAEIDAAGLARETVRLHVGLGTFKPLEEAQLAANRLHSEWRRLTPETATRLNAARAAGHRCVPVGTTAMRTLESCTTPDGTLAPATGPTDIFLKPGDAVRATDALVTNFHLPGSSLFMLVCALMGTDVMQAAYAHAIASDYRFYSYGDACLLLP

SEQ ID NO: 67482 - protein, 351 aa, Hyphomonas hirschiana
  misc_feature (1)..(351): tr|A0A059F909|A0A059F909_9RHOB S-adenosylmethionine:tRN A ribosyltransferase-isomerase OS=Hyphomonas hirschiana VP5 OX=1280951 GN=queA PE=3 SV=1
MDLSVFQFDLPEDLIALRPAQPQDAARLLVVHGDGRLIDATVRDLPKYLNTGDVLVFNDTRVLPAALKGVRPARDGASRDVEVDVNLVERQGDCLWLALARPGRRLKDGDEIFFAEGFSARIASRREGGEILLDFNCEGEAMIAALDAHGAMPLPPYIARRRPADAEDRETYQTRFAGEDAASVAAPTAGLHFTPRLLAEVEAAGLKRETVRLHVGLGTFKPLEDRHLSENRLHEEWRRITPEVADRLNAARAAGARLVPVGTTAMRTLESCAGEDGQIHAATGPTDIFLKPGDPVRATDALMTNFHLPGSSLFMLVSALMGTSLMRAAYAHAIEEKYRFYSYGDACLLLP

SEQ ID NO: 67483 - protein, 351 aa, Hyphomonas jannaschiana
  misc_feature (1)..(351): tr|A0A059FC17|A0A059FC17_9RHOB S-adenosylmethionine:tRN A ribosyltransferase-isomerase OS=Hyphomonas jannaschia na VP2 OX=1280952 GN=queA PE=3 SV=1
MDLSQFQFDLPERLIALRPAEPQDSARLLVVHGDGRLEDAGVRDLPRYLNKGDVLVFNDTRVLPAALKGIRPARDEAGQDVACDVNLTERVDGRNWRALARPGRRLKDGDTIVFAEGFTAEITGHHEGGEIGLRFSLEGEALTAALDKHGAMPLPPYIARRRPADAKDRETYQTEFAGEDAASVAAPTAGLHFTPRLLAECDAAGLVRETVRLHVGLGTFKPLEEKQLEENRLHQEWRRLTPETATRLNAARASGRRVVPVGTTAMRTLESCVDTEGVLHPATGPTDIFLKPGDAVRGTDALVTNFHLPGSSLFMLVSALMGTEVMRAAYAHAIANEYRFYSYGDACLLLP

SEQ ID NO: 67484 - protein, 96 aa, Hyphomonas johnsonii
  misc_feature (1)..(96): tr|A0A059FFV3|A0A059FFV3_9RHOB S-adenosylmethionine:tRN A ribosyltransferase-isomerase (Fragment) OS=Hyphomonas johnsonii MHS-2 OX=1280950 GN=HJO_14307 PE=3 SV=1
HRCVPVGTTAMRTLESCSRPDGTLAPATGPTDIFLKPGDAVRATDALVTNFHLPGSSLFMLVCALIGTDVMQAAYSHAIASDYRFYSYGDACLLLP

SEQ ID NO: 67485 - protein, 239 aa, Hyphomonas johnsonii
  misc_feature (1)..(239): tr|A0A059F9C7|A0A059F9C7_9RHOB S-adenosylmethionine:tRN A ribosyltransferase-isomerase (Fragment) OS=Hyphomonas johnsonii MHS-2 OX=1280950 GN=HJO_17344 PE=3 SV=1
MNLDAFQFDLPERLIALRPADPQDSARLLVVHGDGRLEDAHVRDLPRYLAPGDVLVFNDTRVLPAALKGVRPARDAVGADVACDVNLVERVDDHTWQALARPGKRLKPGDTIRFAEGFHAVITQRFEGGEIELAFSQSGAALERALDAHGAMPLPPYIARRRPADAADRDTYQTAFAGEDAASVAAPTAGLHFTPRLLSELDAAGLRRETVRLHVGLGTFKPLEEAQIEANRLHAEWRR

SEQ ID NO: 67486 - protein, 351 aa, Hyphomonas neptunium; identical to SEQ ID NO: 67482
  misc_feature (1)..(351): sp|Q0BYK7|QUEA_HYPNA S-adenosylmethionine:tRNA ribosylt ransferase-isomerase OS=Hyphomonas neptunium (strain AT CC 15444) OX=228405 GN=queA PE=3 SV=1

SEQ ID NO: 67487 - protein, 354 aa, Hyphomonas oceanitis
  misc_feature (1)..(354): tr|A0A059GAK1|A0A059GAK1_9RHOB S-adenosylmethionine:tRN A ribosyltransferase-isomerase OS=Hyphomonas oceanitis SCH89 OX=1280953 GN=queA PE=3 SV=1
MTPMNLADFHFDLPERLIALRPADPQDSARLLVVHGDGRLEDATVRDLPRYLTAGDVLVFNDTRVLPAALKGVRPARDEIGADVSCDVNLVERIDDHTWRALARPGKRLKAGDPIHFAEGFRATITQRLDGGEIELAFDQSGPALEQALDAHGGMPLPPYIARRRPADARDRETYQTSFAGDDAASVAAPTAGLHFTPRLLAEIDAAGLARETVRLHVGLGTFKPLEEAQLAANRLHAEWRRLTPETATHLNAARAAGHRCVPVGTTAMRTLESCTTPEGTLAPATGPTDIFLKPGDAVRATDALVTNFHLPGSSLFMLVCALMGTDVMQAAYAHAIASDYRFYSYGDACLLLP

SEQ ID NO: 67488 - protein, 351 aa, Hyphomonas polymorpha
  misc_feature (1)..(351): tr|A0A062VJT9|A0A062VJT9_9RHOB S-adenosylmethionine:tRN A ribosyltransferase-isomerase OS=Hyphomonas polymorpha PS728 OX=1280954 GN=queA PE=3 SV=1
MDLSVFQFDLPEDLIALRPAEPQDSARLLVVHGDGRLEDATVRDLPKYLNAGDVLVFNDTRVLPAALKGIRPARDGASRDVEVDVNLVERQGDCVWLALARPGRRLKEGDEIHFAEGFTAMIGARREGGEILLNFNCEGEAMIAALDAHGAMPLPPYIARRRPADAKDRETYQTRFAGEEAASVAAPTAGLHFTPRLLGEVEAAGLKRETVRLHVGLGTFKPLEERHLAENRLHEEWRRVTPEVADRLNAARAAGARLVPVGTTAMRTLESCAGEDGHIHAASGPTDIFLKPGDPVRATDALMTNFHLPGSSLFMLVCALMGTDIMRAAYAHAIAEKYRFYSYGDACLLLP

SEQ ID NO: 67489 - protein, 351 aa, Hyphomonas sp.
  misc_feature (1)..(351): tr|A0A259LYK1|A0A259LYK1_9RHOB S-adenosylmethionine:tRN A ribosyltransferase-isomerase OS=Hyphomonas sp. 34-62- 18 OX=1970392 GN=queA PE=3 SV=1
MDLSVFQFELPEELIALRPVEPQDAARLLVVHGDGRLEDATVRDLPKYLKSGDLLVFNDTRVLPAALKGIRPARDGASRDVEVDVNLVERQGDCVWLALARPGRRLKEGDEIHFAEGFTATIGARREGGEILLNFNCEGEAMIAALEAHGAMPLPPYIARRRSADAKDRETYQTRFAGEEAASVAAPTAGLHFTPRLLAEVEAAGLMRETVRLHVGLGTFKPLEEKHLAENRLHEEWRRVTPEVADRLNAARAAGARIVPVGTTAMRTLESCAGEDGLIHAATGPTDIFLKPGDAIRATDALMTNFHLPGSSLFMLVCALMGTDIMRAAYAHAISEKYRFYSYGDACLLLP

SEQ ID NO: 67490 - protein, 157 aa, Hyphomonas sp.
  misc_feature (1)..(157): tr|A0A0F2RAF7|A0A0F2RAF7_9RHOB S-adenosylmethionine:tRN A ribosyltransferase-isomerase (Fragment) OS=Hyphomonas sp. BRH_c22 OX=1629710 GN=VR74_03055 PE=3 SV=1
PRLLSELDAAGLQRETVRLHVGLGTFKPLEAAQLEANRLHAEWRRLTPETAGRLNAARAAGHRCVPVGTTAMRTLESCATPSGTLVPATGPTDIFLKPGDAVSATDAIVTNFHLPGSSLFMLVCALMGTDVMQAAYAHAIASDYRFYSYGDACLLLP

SEQ ID NO: 67491 - protein, 341 aa, Hypnocyclicus thermotrophus
  misc_feature (1)..(341): tr|A0A4R7KZF0|A0A4R7KZF0_9FUSO S-adenosylmethionine:tRN A ribosyltransferase-isomerase OS=Hypnocyclicus thermot rophus OX=1627895 GN=queA PE=3 SV=1
MNIKDFDYHLPEELIAQKPINPRDNSKLMIVDKRNKLIEHKIFKDIIDYLNPGDVLVRNSTKVIPARLIGKKETGGVLELFLLKRIDLNKWEVLLKPAKKLKLGQKLYIGKLNELVATLLEIKEDGNRIVEFKYNGIFEEILDKLGEMPLPPYIKEKLEEQDRYQTVYAQKGESVAAPTAGLHFTEELLKKIEDKGIEVVDIYLEVGLGTFRPVQTDNILEHKMHSEFFEIPEKSANIINKAKSEGRRIIAVGTTSVRTLESSVDENGKIISQKNNTEIFIYPGYKFKIVDALITNFHLPKSTLLMLVSAFSNKDFMMRTYKNAVENKYRFFSFGDAMFIK

SEQ ID NO: 67492 - protein, 349 aa, Hyunsoonleella jejuensis
  misc_feature (1)..(349): tr|A0A1H9CNR8|A0A1H9CNR8_9FLAO S-adenosylmethionine:tRN A ribosyltransferase-isomerase OS=Hyunsoonleella jejuen sis OX=419940 GN=queA PE=3 SV=1
MKLSHFGFDLPPELLAEYPSENRDESRLMVLNRKDQTIEHKQFKDLINYFDEDDVMILNNTKVFPARLYGNKEKTGARIEVFLLRELNEEQRLWDVLVDPARKIRIGNKLYFGEDESLVAEVIDNTTSRGRTLRFLYDGSYKEFRIKLNELGQTPLPKYIKRDVEPEDEERYQTIFAKNEGAVAAPTAGLHFSKHLLKRLEIKGINFAEVTLHVGLGTFNPVEVEDLSKHKMDSEEIKIGPEAVEIINRGIKERRRVCAVGTTAMRTIESAVSSSGLLNEMDGWTNKFIFPPYDFSIANCMVTNFHTPKSTLLMMISAFAGHDFVMEAYQEAIKEKYKFYSYGDAMLIL

SEQ ID NO: 67493 - protein, 349 aa, Hyunsoonleella pacifica
  misc_feature (1)..(349): tr|A0A4Q9FM79|A0A4Q9FM79_9FLAO S-adenosylmethionine:tRN A ribosyltransferase-isomerase OS=Hyunsoonleella pacifi ca OX=1080224 GN=queA PE=3 SV=1
MKLSNFGFDLPAELLAEYPSENRDESRLMVLNRKEQTIEHKQFKDLINYFDEDDVMILNNTKVFPARLYGNKEKTGARIEVFLLRELNEEQRLWDVLVDPARKIRIGNKLYFGDDESLVAEVIDNTTSRGRTLRFLYDGSYKEFRIKLRELGQTPLPKYIKRDVEPEDEERYQTIFAKNEGAVAAPTAGLHFSKHLLKRLEIKGINFAEVTLHVGLGTFNPVEVEDLSKHKMDSEEIKIGPQAVDIINTGITNKKRVCAVGTTAMRTIESAVSSSGMLNEMDGWTNKFIFPPYDFSIANCMVTNFHTPKSTLLMMISAFAGHDFVMEAYQEAIKEKYKFYSYGDAMLII

SEQ ID NO: 67494 - protein, 349 aa, Hyunsoonleella sp.
  misc_feature (1)..(349): tr|A0A4Q9FBU9|A0A4Q9FBU9_9FLAO S-adenosylmethionine:tRN A ribosyltransferase-isomerase OS=Hyunsoonleella sp. T5 8 OX=2527939 GN=queA PE=3 SV=1
MKLSNFGFDLPAELLAEYPSENRDESRLMVLNRKDETIEHKQFKDLIDYFDEDDVMILNNTKVFPARLYGNKEKTGARIEVFLLRELNEEQRLWDVLVDPARKIRIGNKLYFGDDESLVAEVIDNTTSRGRTLRFLYDGSYKEFRIKLNELGQTPLPKYIKREVEPEDEERYQTIFAKNEGAVAAPTAGLHFSKHLLKRLEIKGINFAEVTLHVGLGTFNPVEVEDLSKHKMDSEEIKIGPEAVDIINTGIKNRKRVCAVGTTAMRTIESAVSSSGMLNEMEGWTNKFIFPPYDFSIANCMVTNFHTPKSTLLMMISAFAGHDFVMHAYQEAIKEKYKFYSYGDAMLII

SEQ ID NO: 67495 - protein, 349 aa, Ichthyenterobacterium magnum
  misc_feature (1)..(349): tr|A0A420DFZ0|A0A420DFZ0_9FLAO S-adenosylmethionine:tRN A ribosyltransferase-isomerase OS=Ichthyenterobacterium magnum OX=1230530 GN=queA PE=3 SV=1
MKLSHFQFDLPEELLAERPSDLRDEARLMVLDRKNQTIEHKLFKDLIDYFEEDDVMILNNTKVFPARLYGNKEKTGARIEVFLLRELNEDQRLWDVLVDPARKIRIGNKLYFGEDDTLVAEVIDNTTSRGRTLRFLYDGSYTEFRRKLTELGETPLPKYIKRDVEPEDEERYQTIFAKNEGAVAAPTAGLHFSKHLLKRLEIKGVHLPEVTLHVGLGTFNPVEVEDLSKHKMDSEEAFIEQHAADIINNGINNKKRVCAVGTTAMRAIESSVSSNGRLNEYSGWTNKFIFPPYEFSIANCMITNFHTPKSTLLMMVSAFAGHDFMKKAYEEAVKEKYRFYTYGDAMLII

SEQ ID NO: 67496 - protein, 347 aa, Ichthyobacterium seriolicida
  misc_feature (1)..(347): tr|A0A1J1E1T9|A0A1J1E1T9_9FLAO S-adenosylmethionine:tRN A ribosyltransferase-isomerase OS=Ichthyobacterium seri olicida OX=242600 GN=queA PE=3 SV=1
MKLSKFNYSLPKDLIAKWPSKERDECKLMVVHRDKGTIEHRLFKDIIEYFDEDDVMILNNTKVFPAKTHAVKEKTGAKIEVFLLRELNKQYKLWETLVDPARKIRIGNKLFFESGLVAEVVDNTTSGGRTLRFLHKGTYEEFRKELRDLGDTPIPKYMEREPDESDIERYQTVYSKHEGSIIAPAAGLHFSKNLLKRLEIKGINLAEITLHLGLPTFSVIEVEALPKHRMGSERVIIDVEACNIINKALDNERKVCAVGTTCIRSIESSVSTYRRLNPFDGWTNKFIYPPYDFSIANCMLTNFHMPKTALLTMVSAFAGDYPILDAYKEAIKHKYNFYSYGDCMLIL

SEQ ID NO: 67497 - protein, 356 aa, Ideonella sakaiensis
  misc_feature (1)..(356): tr|A0A0K8P1P9|A0A0K8P1P9_IDESA S-adenosylmethionine:tRN A ribosyltransferase-isomerase OS=Ideonella sakaiensis (strain NBRC 110686 / TISTR 2288 / 201-F6) OX=1547922 G N=queA PE=3 SV=1
MATPTLTLSDFDFALPPELIAQQPSPERSGSRLLDGRGWPPGDHRFDALPDLLAPGDLLVFNDTRVIKARLLGHKDSGGAVEALVERVLPGHEVLAHLRASKSPKPGARLRFAAARDGGGPTFEAEVIGRAGPDDALFHLRFPDEPHALLERVGHVPLPPYITHADDADDERRYQTVFARRPGAVAAPTAALHFDEPLLAALAARGIGRATLTLHVGAGTFQPVRSEDLSAHRMHSEWFELPPATVDAIAATRAAGGRIVAVGTTSLRALESAARGGRLQAGAGETDIFIRPGFGFRVVDLLVTNFHLPKSTLMMLVSALAGHAHVMALYREAIARRYRFFSYGDAMLLARTGAAG

SEQ ID NO: 67498 - protein, 361 aa, Ideonella sp.
  misc_feature (1)..(361): tr|A0A437RRU7|A0A437RRU7_9BURK S-adenosylmethionine:tRN A ribosyltransferase-isomerase OS=Ideonella sp. KYPY4 O X=1862385 GN=queA PE=3 SV=1
MKPSSSASTPAPAYTLHDFDFVLPPELIAQHPAAERSASRLLDGREAGAPPVDRVFRELPGLLRAGDLLVFNDTRVIKARLLGEKPTGGAAEALVERILPGEDVHEVWAHLRASKSPKAGSVVRFADAFDAEVLGRAGPEGALFHLRFPAPVLDLLARHGHVPLPPYITHDDNAEDEARYQTVFAAHPGAVAAPTAALHFDDAVLAALTAQGVGRAAVTLHVGAGTFQPVRVENIAEHRMHSEWFEVSEATVAAIEATRAAGGRVLAVGTTTLRALESAARAGGGALRPYRGDTDIFITPGFDFRVVDLLLTNFHLPKSTLMMLVSAFAGHAHIQALYRHAVESRYRFFSYGDAMLLQLAR

SEQ ID NO: 67499 - protein, 123 aa, Ideonella sp.
  misc_feature (1)..(123): tr|A0A523Q6F0|A0A523Q6F0_9BURK S-adenosylmethionine:tRN A ribosyltransferase-isomerase OS=Ideonella sp. MAG2 OX =2083017 GN=C4K60_00430 PE=3 SV=1
MPEATVQAIHAARARGGRVVSVGTTALRALESAAAMTDPQGQARHIARACSGETEIFITPGFNFRVVDTLVTNFHLPKSTLMMLVSAFAGYEQVMALYRHAIEARYRFFSYGDAMVLNRSTHD

SEQ ID NO: 67500 - protein, 351 aa, Idiomarina abyssalis
  misc_feature (1)..(351): tr|A0A370Q9J6|A0A370Q9J6_9GAMM S-adenosylmethionine:tRN A ribosyltransferase-isomerase OS=Idiomarina abyssalis OX=86102 GN=queA PE=3 SV=1
MSDTNHSTLKVSDFSFELPDELIARYPQEQRSASRLLSVKANENSIEHKHFKNIVDEINAGDLLVFNDTRVIPARLLGEKVSGGKVEVLVERLLDDHRVLAHVRANRAPKAGAELLLEGHVKITMLARHDALFELKFEHDETVLELLEQYGHMPLPPYIDRPDESSDKERYQTVYNREPGAVAAPTAGLHFDDEILQQLRDKGVNFAYVTLHVGAGTFQPVRVEDINDHVMHSEYAKVSAETCNAIKQTKASGGRVIAVGTTSVRSLESAAQASTNESIEPFFDDTDIFIYPGYEFKVVDSMITNFHLPESTLIMLVSAFVGRDLIMKAYNEAIKERYRFFSYGDAMLLQR

SEQ ID NO: 67501 - protein, 350 aa, Idiomarina aquatica
  misc_feature (1)..(350): tr|A0A4R6P682|A0A4R6P682_9GAMM S-adenosylmethionine:tRN A ribosyltransferase-isomerase OS=Idiomarina aquatica O X=1327752 GN=queA PE=3 SV=1
MSRPETSLKVSDFNFDLPDELIARYPQQQRSASRLLRVDAATQHIGHNQFTDIIDLLEPGDLLIFNDTRVIPARLLGEKVSGGKVEVLVERILDDHRVLAHVRANRAPKADQQLRLEGEITATMIGRHDALFELRFEHQQTVLDLLEQYGHMPLPPYIDRPDEDSDKERYQTVYNKEPGAVAAPTAGLHFDNDILQQLQDKGVEFAYVTLHVGAGTFQPVRVDDIQQHVMHSEYAKVPEQTCEKIIATKAAGKRVIAVGTTSVRSVESAAAASQAKLIEPFFDDTDIFIYPGYEFRVIDGLITNFHLPESTLIMLVSAFAGRDLIMSAYQQAIDEKYRFFSYGDAMFLTC

SEQ ID NO: 67502 - protein, 348 aa, Idiomarina aquimaris
  misc_feature (1)..(348): tr|A0A432XEQ9|A0A432XEQ9_9GAMM S-adenosylmethionine:tRN A ribosyltransferase-isomerase OS=Idiomarina aquimaris OX=641841 GN=queA PE=3 SV=1
MDVKDFTFVLPDELIARYPQPDRSASRMLRLDGATGAVEHSQFKAIVDELNEGDLLVFNDTRVIPARMLGEKVSGGKIEVLVERLLDDSRVLAHVRSNRAPKVGAKFLLEGAVEVEMLGREGALFELKFLTEAPVLEVLESYGHMPLPPYIDRPDEASDRERYQTVYNKKPGAVAAPTAGLHFDDAILAALAAKGVQFAYVTLHVGAGTFQPVRVDNIEEHHMHSEYAEVPQETVDAILATKAAGKRVVAVGTTSVRSLESAAQAALQQGELIAPFFSDTDIFIYPGYEFRIIDAMVTNFHLPESTLIMLISAFAGREQVLAAYAAAIEERYRFFSYGDAMFVTRKPS

SEQ ID NO: 67503 - protein, 348 aa, Idiomarina atlantica
  misc_feature (1)..(348): tr|A0A094IRK3|A0A094IRK3_9GAMM S-adenosylmethionine:tRN A ribosyltransferase-isomerase OS=Idiomarina atlantica OX=1517416 GN=queA PE=3 SV=1
MNLKDFSFELPDELIARYPQADRSASRMLRLDGATGAVTHSQFKAIVDELNAGDLLVFNDTRVIPARLLGEKLSGGKVEVLVERLLDDQRVLAHVRSNRTPKAGARFLLEDAVEVEMLGRQDALFELKFLTEAPVLEVLESYGHMPLPPYIDRPDEASDRERYQTVYNKKPGAVAAPTAGLHFDDAILSALKAKGVQFAYVTLHVGAGTFQPVRVDNIEEHHMHSEYAEVPEETVAAILATQAAGHRVVAVGTTSVRSLESAAQAAKQKGEALAPFFSDTDIFIYPGYEFQVIDAMITNFHLPESTLIMLISAFAGRENVLNAYQQAIDEGYRFFSYGDAMFVTRQPS

SEQ ID NO: 67504 - protein, 266 aa, Idiomarina baltica
  misc_feature (1)..(266): tr|A0A348WQM8|A0A348WQM8_9GAMM S-adenosylmethionine:tRN A ribosyltransferase-isomerase (Fragment) OS=Idiomarina baltica OX=190892 GN=queA PE=3 SV=1
KVEVLVERMLDDSRVLAHVRANRAPKPGAEFLLEGAVKATMLARHDALFELEFNHQETVLELLEAHGHMPLPPYIDRPDEESDKERYQTVYNREPGAVAAPTAGLHFDDAILQQLKDKGVEFGYVTLHVGAGTFQPVRVDSIEEHVMHSEYAKVDTKVCEQIRKVKQAGKRVIAVGTTSVRSLESAAQATDELIAPFFDDTDIFIYPGYEFKVIDGLVTNFHLPESTLIMLVSAFAGKELIMNAYQQAIDEKYRFFSYGDSMLILR

SEQ ID NO: 67505 - protein, 348 aa, Idiomarina donghaiensis
  misc_feature (1)..(348): tr|A0A432XFA9|A0A432XFA9_9GAMM S-adenosylmethionine:tRN A ribosyltransferase-isomerase OS=Idiomarina donghaiens is OX=519452 GN=queA PE=3 SV=1
MNVKDFSFDLPDELIARYPQAERSASRLLCLNGTTGELAHEQFKDIIAHINSGDLLVFNDTRVIPARLLGEKVSGGKVEVLVERIINEQRVLAHLRSNRSPKPGAKMILEGAVEVEMVGRQDALFELQFNTAEPVLQVLEQYGHMPLPPYIDRPDEDSDRERYQTVYNKKPGAVAAPTAGLHFDDAILSELQAKGVEFAYVTLHVGAGTFQPVRVDNIEEHHMHSEYAEVPQETVDAIAAAHARGNRVIAVGTTSVRSLESAAQAAKQQGLSLQPFFADTDIFIYPGYEFQLVDAMITNFHLPESTLIMLVSAFAGRDHVLNAYQQAVQERYRFFSYGDAMFVTRTAR

SEQ ID NO: 67506 - protein, 349 aa, Idiomarina fontislapidosi
  misc_feature (1)..(349): tr|A0A432Y8G3|A0A432Y8G3_9GAMM S-adenosylmethionine:tRN A ribosyltransferase-isomerase OS=Idiomarina fontislapi dosi OX=263723 GN=queA PE=3 SV=1
MSYASDGLKVSDFSFDLPDELIARYPQQQRTASRMLRIFAEHNRIEHGQFVDIVEQLEPGDLLVFNDTRVIPARLLGEKTSGGKVEVLVERMLDDHRVLAHVRANRAPKPGAEFLLEGAVKATMLERHDALFELEFNHDETVLELLEAYGHMPLPPYIDRPDEDSDKERYQTVYNREPGAVAAPTAGLHFDDAILQQLKDKGVEFGYVTLHVGAGTFQPVRVDSIEEHVMHSEYAKVDAKVCEQIKQAKQAGKRVIAVGTTSVRSLESAAQATDELIAPFFDDTDIFIYPGYEFKVIDGLVTNFHLPESTLIMLVSAFAGKELIMNAYQQAIEQKYRFFSYGDSMLILR

SEQ ID NO: 67507 - protein, 348 aa, Idiomarina halophila
  misc_feature (1)..(348): tr|A0A432XS25|A0A432XS25_9GAMM S-adenosylmethionine:tRN A ribosyltransferase-isomerase OS=Idiomarina halophila OX=1449799 GN=queA PE=3 SV=1
MDVKDFSFDLPDELIARYPQPERSASRLLVLDGATGSVNHDQFKAIVDHLQAGDLLVFNDTRVIPARMLGEKLSGGKVEILVERMLDDHRVLAHVRSNRAPKPGQRMRMEDAVEVEMLGREGALFELKFITEDKVLDVLEQHGHMPLPPYIDRPDEASDRERYQTVYNKKPGAVAAPTAGLHFDDAILAALQEKGVNFAYVTLHVGAGTFQPVRVDKIEEHHMHSEYAEVPAETVAAIKQTQANGGRVVAVGTTSVRSLESAAQAAVKEQRELVPFFADTDIFIYPGYKFQLIDAMITNFHLPESTLIMLISAFAGRDNVLGAYQQAIDNRYRFFSYGDAMFVTRQPS

SEQ ID NO: 67508 - protein, 348 aa, Idiomarina homiensis
  misc_feature (1)..(348): tr|A0A432XUG8|A0A432XUG8_9GAMM S-adenosylmethionine:tRN A ribosyltransferase-isomerase OS=Idiomarina homiensis OX=364198 GN=queA PE=3 SV=1
MDVKDFTFALPDELIARYPQPDRSASRMLRLDGETGAVEHSQFKAIVDELEAGDLLVFNDTRVIPARMLGEKVSGGKIEVLVERLLDDQRVLAHVRSNRAPKPGAKFILEGKVDVEMVGREGALFELKFLTAAPVLEVLESYGHMPLPPYIDRPDEASDRERYQTVYNKKPGAVAAPTAGLHFDDAILTALKAKGVQFAYVTLHVGAGTFQPVRVDNIEEHHMHSEYAEVPQETVDAILATKAAGKRVVAVGTTSVRSLESAAQAALKSGQQLAPFFSDTDIFIYPGYEFQIIDAMVTNFHLPESTLIMLISAFAGREQVLNAYDQAIQERYRFFSYGDAMFVTRKPS

SEQ ID NO: 67509 - protein, 348 aa, Idiomarina indica
  misc_feature (1)..(348): tr|A0A1G6DI84|A0A1G6DI84_9GAMM S-adenosylmethionine:tRN A ribosyltransferase-isomerase OS=Idiomarina indica OX= 1159017 GN=queA PE=3 SV=1
MKVTDFQFELPDELIARYPQPERTASRLLHLDGTTGAIEHQQFKQILVHLKAGDLLVFNDTRVIPARLLGEKLSGGKVEVLVERILGEHRVLAHVRSNRAPKPGAKLLLEQAIEAEMIARHDTLFELEFNGPDTVLNLLERYGHMPLPPYIDRPDEASDRERYQTVYNRKPGAVAAPTAGLHFDDQLLQEIAAQGVEFAYVTLHVGAGTFQPVRVATLEEHQMHSEYVEVPAETVAAIAATRARGGRVIAVGTTSVRSLESAAQAALAQQQSLQPFFGDTDIFIYPGYQFQVVDAMVTNFHLPESTLIMLVSAFAGREHVLNAYNQAVQAGYRFFSYGDAMFVTRAGS

SEQ ID NO: 67510 - protein, 348 aa, Idiomarina insulisalsae
  misc_feature (1)..(348): tr|A0A432YCH3|A0A432YCH3_9GAMM S-adenosylmethionine:tRN A ribosyltransferase-isomerase OS=Idiomarina insulisals ae OX=575789 GN=queA PE=3 SV=1
MDLKDFTFELPDELIARYPQPDRSASRMLRLDGATGAVEHSQFKAIVDELEAGDLLVFNDTRVIPARLLGEKVSGGKVEVLVERLLDEQRVLAHVRSNRAPKAGQKMLLEGAVEVEMIARQGALFELRFLTDAPVLEVLEQYGHMPLPPYIDRPDEASDRERYQTVYNKKPGAVAAPTAGLHFDAQILAALEAKGVKFAYVTLHVGAGTFQPVRVDKIEEHHMHSEYAEVPEETIAAIAATRAAGKRVVAVGTTSVRSLESAAQAAREKGETLAPFFSDTDIFIYPGYEFQIVDAMVTNFHLPESTLIMLISAFAGRENVLHAYEQAIAERYRFFSYGDAMFVTRKPS

SEQ ID NO: 67511 - protein, 351 aa, Idiomarina loihiensis
  misc_feature (1)..(351): sp|Q5QVL1|QUEA_IDILO S-adenosylmethionine:tRNA ribosylt ransferase-isomerase OS=Idiomarina loihiensis (strain A TCC BAA-735 / DSM 15497 / L2-TR) OX=283942 GN=queA PE=3 SV=1
MSDTNHSTLKVSDFSFELPDELIARYPQEQRSASRLLSVKANENSIEHKHFKNIVDEINAGDLLVFNDTRVIPARLLGEKVSGGKVEVLVERLLDDHRVLAHVRANRAPKAGAELLLEGHVKITMLARHDALFELKFEHDETVLELLEQYGHMPLPPYIDRPDESSDKERYQTVYNREPGAVAAPTAGLHFDDEILQQLRDKGVNSAYVTLHVGAGTFQPVRVEDINDHVMHSEYAKVSAETCNAIKQTKASGGRVIAVGTTSVRSLESAAQASTNESIEPFFDDTNIFIYPGYEFKVVDSMITNFHLPESTLIMLVSAFVGRDLIMKAYNEAIKERYRFFSYGDAMLLQR

SEQ ID NO: 67512 - protein, 351 aa, Idiomarina loihiensis
  misc_feature (1)..(351): tr|A0A349C5V9|A0A349C5V9_9GAMM S-adenosylmethionine:tRN A ribosyltransferase-isomerase OS=Idiomarina loihiensis OX=135577 GN=queA PE=3 SV=1
MSDTNHSTLKVSDFSFELPDELIARYPQEQRSASRLLSVKASENSIEHKHFKNIVDEINAGDLLVFNDTRVIPARLLGEKVSGGKVEVLVERLLDDHRVLAHVRANRAPKAGAELLLEGHVKITMLARHDALFELKFEHDETVLELLEQYGHMPLPPYIDRPDESSDKERYQTVYNREPGAVAAPTAGLHFDDEILQQLRDKGVNFAYVTLHVGAGTFQPVRVEDINDHVMHSEYAKVSAETCNAIKQTKASGGRVIAVGTTSVRSLESAAQASTNESIEPFFDDTDIFIYPGYEFKVVDSMITNFHLPESTLIMLVSAFVGRDLIMKAYNEAIKERYRFFSYGDAMLLQR

SEQ ID NO: 67513 - protein, 348 aa, Idiomarina marina
  misc_feature (1)..(348): tr|A0A432YDG9|A0A432YDG9_9GAMM S-adenosylmethionine:tRN A ribosyltransferase-isomerase OS=Idiomarina marina OX= 502366 GN=queA PE=3 SV=1
MNVKDFSFELPDELIARYPQPERSASRLLCLNGTTGAVTHQTFKNIVDHIQAGDLLIFNDTRVIPARMLGEKVSGGKVEVLVERIIDEHRVLAHLRSNRSPKPGAKMILEGAVEVEMVGRQDALFELQFNTQEPVLNVLEQYGHMPLPPYIDRPDEDSDRERYQTVYNKKPGAVAAPTAGLHFDDAILAQLREKGAEFAYVTLHVGAGTFQPVRVDNIEEHHMHSEYAEVPEETVAAIAATRRRGGRVIAVGTTSVRSLESAAQAAKQNGEALQPFFSDTDIFIYPGYEFQVVDAMITNFHLPESTLIMLVSAFAGREHVLNAYSEAVHERYRFFSYGDAMFVTRTER

SEQ ID NO: 67514 - protein, 348 aa, Idiomarina maritima
  misc_feature (1)..(348): tr|A0A1I6HX20|A0A1I6HX20_9GAMM S-adenosylmethionine:tRN A ribosyltransferase-isomerase OS=Idiomarina maritima O X=519453 GN=queA PE=3 SV=1
MNVKDFSFELPDELIARYPQPERSASRLLCLNGTTGTVAHETFKNIVAHIRPGDLLIFNDTRVIPARMLGEKVSGGKVEVLVERIIDEHRVLAHLRSNRSPKPGAKMILEGAVEVEMIGRQDALFELQFNTKEPVLNVLEQYGHMPLPPYIDRPDEDSDRERYQTVYNKKPGAVAAPTAGLHFDESILNQLREKGAEFAYVTLHVGAGTFQPVRVDNIEEHHMHSEYAEVPEVTIAAIEATRARGGRVIAVGTTSVRSLESAAQAAKQKGEPLQPFFSDTDIFIYPGYEFQVVDAMITNFHLPESTLIMLVSAFAGREHVLAAYAAAVQERYRFFSYGDAMFVTRTER

SEQ ID NO: 67515 - protein, 348 aa, Idiomarina maritima
  misc_feature (1)..(348): tr|A0A317Q9X5|A0A317Q9X5_9GAMM S-adenosylmethionine:tRN A ribosyltransferase-isomerase OS=Idiomarina maritima O X=519453 GN=queA PE=3 SV=1
MNVKDFAFELPDELIARYPQPERSASRLLCLDGPTGQVQHQQFKQIVEQLQAGDLLVFNDTRVIPARLLGEKVSGGKVEVLVERIIDEHRAWVHLRSNRSPKAGARMILEGAVEVEMLGRNDALFELYFHTEQPLLEVLEQFGHMPLPPYIDRPDEASDKERYQTVYNKKPGAVAAPTAGLHFDETILQQLRAKGVEFAYVTLHVGAGTFQPVRVDNITEHHMHSEYAEVPEQTVAAIAATRARGGRVIAVGTTSVRSLESAAQAAKQAGTELAPFFADTDIFIYPGYEFQLVDAMITNFHLPESTLIMLVSAFAGQAQVMAAYAAAVAEKYRFFSYGDAMFVTRRTS

SEQ ID NO: 67516 - protein, 351 aa, Idiomarina piscisalsi
  misc_feature (1)..(351): tr|A0A432YRL5|A0A432YRL5_9GAMM S-adenosylmethionine:tRN A ribosyltransferase-isomerase OS=Idiomarina piscisalsi OX=1096243 GN=queA PE=3 SV=1
MSENNPSSLKVSDFSFELPDELIARYPQEQRSASRLLQVNAESKSIGHKQFTDIVDALDSGDLLVFNDTRVIPARLLGEKVSGGKVEVLIERLLDEHRVLAHVRSNRSPKAGAELLLEGAVKVTMLARHDALFELKFEHEESVLDILEEYGHMPLPPYIDRPDESSDKERYQTVYNREPGAVAAPTAGLHFDDDILQKLRNKGVNFAYVTLHVGAGTFQPVRVENINDHVMHSEYAKVSEETCNAIKQTKANGGRVVAVGTTSVRSLESAANASENGDIQPFFDDTDIFIYPGYEFKVVDSLITNFHLPESTLIMLVSAFAGRDLIMDAYQQAINEKYRFFSYGDAMLLQR

SEQ ID NO: 67517 - protein, 347 aa, Idiomarina planktonica
  misc_feature (1)..(347): tr|A0A1Y6FY40|A0A1Y6FY40_9GAMM S-adenosylmethionine:tRN A ribosyltransferase-isomerase OS=Idiomarina planktonic a OX=1323738 GN=queA PE=3 SV=1
MKLSDFDFQLPDALIARYPQQQRSASRLLCLTGTSGELRDKHFTDIVGELNQGDLLVFNDTRVIPARLLGEKASGGKVEVLVERVLDEHRVLAHVRSSRSPKTGQLLKLEQALDVEMLGRHDALFELKFLHDQPVLELLEQYGHMPLPPYIDRPDESSDKERYQTVYNKNPGAVAAPTAGLHFDEGVLSQLQQKGVEFAYVTLHVGAGTFQPVRVDRIEEHVMHSEYAVVPAETVAAIEQTRARGGRVVAVGTTSVRSLESAAQAARKANTELTAYTAETDIFIYPGYEFQVVDAMITNFHLPESTLIMLVSAFAGKQHVMAAYDHAVQQEYRFFSYGDAMFITKAV

SEQ ID NO: 67518 - protein, 351 aa, Idiomarina ramblicola
  misc_feature (1)..(351): tr|A0A432YY59|A0A432YY59_9GAMM S-adenosylmethionine:tRN A ribosyltransferase-isomerase OS=Idiomarina ramblicola OX=263724 GN=queA PE=3 SV=1
MSDTNHSSLKVSDFSFELPDELIARYPQEQRSASRLLSVKSSENSVEHKHFKNIVDELNAGDLLVFNDTRVIPARLLGEKVSGGKVEVLVERLLDDHRVLAHVRANRAPKAGAELLLEGHVKITMLARHDALFELKFEHDETVLELLEQYGHMPLPPYIDRPDESSDKERYQTVYNREPGAVAAPTAGLHFDDDILQQLRDKGVNFAYVTLHVGAGTFQPVRVEDINDHVMHSEYAKVSAETCHAIKQTKASGGRVIAVGTTSVRSLESAAQASATEDIEPFFEDTDIFIFPGYEFKVVDSLITNFHLPESTLIMLVSAFAGRDLIMKAYNEAIKERYRFFSYGDAMLLQR

SEQ ID NO: 67519 - protein, 349 aa, Idiomarina salinarum
  misc_feature (1)..(349): tr|A0A094L6P6|A0A094L6P6_9GAMM S-adenosylmethionine:tRN A ribosyltransferase-isomerase OS=Idiomarina salinarum OX=435908 GN=queA PE=3 SV=1
MNLKDFSFELPDELIAHYPQPERSASRMLCLDGPSGTVTHRQFRDITEQLQAGDLLVFNDTRVIPARMLGEKASGGGKVEVLVERILDDHRVLAHVRSNRSPKPGQRLLMEQAVEVEMLGRQDALFELRFHTDEPVLAVLEQYGHMPLPPYIDRPDEASDRERYQTVYNKKPGAVAAPTAGLHFDEQILQQLKDKGVEFAYVTLHVGAGTFQPVRVDNIEEHHMHSEYAEVPQETVAAIAATRARGGRVVAVGTTSVRSLESAAQAAKLAGTDLVPFFADTDIFIYPGYEFQVIDAMITNFHLPESTLIMLISAFAGREAVLRAYGEAVAHKYRFFSYGDAMFVTRKPS

SEQ ID NO: 67520 - protein, 346 aa, Idiomarina sediminum
  misc_feature (1)..(346): tr|A0A432Z0V3|A0A432Z0V3_9GAMM S-adenosylmethionine:tRN A ribosyltransferase-isomerase OS=Idiomarina sediminum OX=431675 GN=queA PE=3 SV=1
MDVKDFSFELPDELIARYPQQDRSASRLLCLDGPTGAVTHSQFTAIVDALQPGDLLVFNDTRVIPARMLGEKVSGGKVEVLVERIIDEHRVLAHVRSNRAPKPGQRLLLEQAVEVEMLGRQDALFELRFLTDAPVLDVLEQYGHMPLPPYIDRPDEASDRERYQTVYNKKPGAVAAPTAGLHFDDTILAALAAKGVNFAYVTLHVGAGTFQPVRVDSIEDHHMHSEYAEVPQEAVDAIHATKAAGGRVVAVGTTSVRSLESAAQAALKQGLPLAPFFADTDIFIYPGYQFQVIDAMITNFHLPESTLIMLVSAFAGREAVLGAYQQAIDNSYRFFSYGDAMFVTRR

SEQ ID NO: 67521 - protein, 349 aa, Idiomarina seosinensis
  misc_feature (1)..(349): tr|A0A432ZBE2|A0A432ZBE2_9GAMM S-adenosylmethionine:tRN A ribosyltransferase-isomerase OS=Idiomarina seosinensi s OX=281739 GN=queA PE=3 SV=1
MSQPESSFKVSDFNFDLPDELIARYPQQQRSASRLLAVDSRHQTIEHKQFVDIVDCLDAGDLLVFNDTRVIPARLLGEKLSGGKVEVLVERIIDEHRVLAHVRANRAPKTGQQLRLENAITATMIARHDALFELEFEHQQGVLELLESYGHMPLPPYIDRPDEDSDKERYQTVYNKEPGAVAAPTAGLHFDEQILQQLQDKGVNFAYVTLHVGAGTFQPVRVDSIEEHVMHSEYAKVPEATCAAVKATKAAGKRVVAVGTTSVRSLESAARDSDSLIEPFFDDTDIFIYPGYQFQVVDSLITNFHLPESTLIMLVSAFSGRELIMDAYQQAIEQKYRFFSYGDAMLLSR

SEQ ID NO: 67522 - protein, 351 aa, Idiomarina sp.
  misc_feature (1)..(351): tr|A0A2D8HWT9|A0A2D8HWT9_9GAMM S-adenosylmethionine:tRN A ribosyltransferase-isomerase OS=Idiomarina sp. OX=187 4361 GN=queA PE=3 SV=1
MSNTNHSSLKVSDFSFELPDELIARYPQEQRSASRLLSVNANENSIAHKQFRSIVDELNAGDLLVFNDTRVIPARLLGEKVSGGKVEVLVERLLDDHRVLAHVRANRAPKAGAELLLEGHVKVTMLARHDALFELKFEHEETVLELLEQYGHMPLPPYIDRPDESSDKERYQTVYNREPGAVAAPTAGLHFDDEILQQLRDKGVNFAYVTLHVGAGTFQPVRVEDINDHVMHSEYAKVSAETCHAIKQTKAAGGRVVAVGTTSVRSLESAAQASPSEDIEPFFDDTDIFIFPGYEFKVVDSLITNFHLPESTLIMLVSAFAGRDLIMKAYNEAIKERYRFFSYGDAMLLQR

SEQ ID NO: 67523 - protein, 349 aa, Idiomarina sp.
  misc_feature (1)..(349): tr|A0A1S2SWR4|A0A1S2SWR4_9GAMM S-adenosylmethionine:tRN A ribosyltransferase-isomerase OS=Idiomarina sp. MD25a OX=1889913 GN=queA PE=3 SV=1
MSYASDGLKVSDFSFDLPDELIARYPQQQRTASRMLRISAEDDRIEHGQFTDIVDQLEAGDLLVFNDTRVIPARLLGEKTSGGKVEVLVERMLDDSRVLAHVRANRAPKPGAEFLLEGSVKATMLARHDALFELEFNHQETVLELLEAHGHMPLPPYIDRPDEESDKERYQTVYNREPGAVAAPTAGLHFDDAILQQLKDKGVEFGYVTLHVGAGTFQPVRVDSIEEHVMHSEYAKVDAKVCDQIKKVKQAGKRVIAVGTTSVRSLESAAQATDELIAPFFDDTDIFIYPGYEFKVIDGLVTNFHLPESTLIMLVSAFAGKELIMNAYQQAIEEKYRFFSYGDSMLILR

SEQ ID NO: 67524 - protein, 348 aa, Idiomarina tainanensis; identical to SEQ ID NO: 67515
  misc_feature (1)..(348): tr|A0A368UYV2|A0A368UYV2_9GAMM S-adenosylmethionine:tRN A ribosyltransferase-isomerase OS=Idiomarina tainanensi s OX=502365 GN=queA PE=3 SV=1

SEQ ID NO: 67525 - protein, 348 aa, Idiomarina taiwanensis
  misc_feature (1)..(348): tr|A0A432ZCJ0|A0A432ZCJ0_9GAMM S-adenosylmethionine:tRN A ribosyltransferase-isomerase OS=Idiomarina taiwanensi s OX=337250 GN=queA PE=3 SV=1
MKLSDFNFDLPDELIARYPQAERSASRLLCLDGATGAVAHRQFTDILALLEPGDLMIFNDTRVIPARLLGEKVSGGKVEVLIERITGEGRVLAHVRSNRSPKEGQRLILEGQVEVEMKGRQDGLFELEFLTAEPVLEVLEKYGHMPLPPYIDRPDEESDRERYQTVYGKKPGAVAAPTAGLHFDDQLLAAIAAKGINTAYVTLHVGAGTFQPVRVDDVTTHQMHSEYAEVPAETIAAINAARAAGKRIIAVGTTSVRSLESAAQQAKADGTELKPYFAETDIFIYPGYEFQLVDAMITNFHLPESTLIMLVSAFAGREETLAAYAQAVAERYRFFSYGDAMFVTRKPS

SEQ ID NO: 67526 - protein, 352 aa, Idiomarina tyrosinivorans
  misc_feature (1)..(352): tr|A0A432ZS47|A0A432ZS47_9GAMM S-adenosylmethionine:tRN A ribosyltransferase-isomerase OS=Idiomarina tyrosinivo rans OX=1445662 GN=queA PE=3 SV=1
MSDNDSGLTVKDFSFDLPDELIARHPQAQRSASRLLHVDAQQQQIHHGQFTDIVDHLQAGDLLVFNDTRVIPARLLGEKTSGGKVEVLVERILDEHRVLAHIGSNRSPKPGQQLLLEGAVKVEMVERHDALFELRFLHDEPVLELLERYGHMPLPPYIDRPDEDSDKERYQTVYASKPGAVAAPTAGLHFDQDILQRLQDKGVEFAYVTLHVGAGTFQPVRVENIKDHHMHSEYAQVPEQTVEAVLRTRANGGRVVAVGTTSVRSLESAAQAAQQQNEVIAPFFADTDIFIYPGYEFKVVDALVTNFHLPESTLIMLVSAFSGKPLIMNAYQQAIAQRYRFFSYGDAMLLTR

SEQ ID NO: 67527 - protein, 348 aa, Idiomarina woesei
  misc_feature (1)..(348): tr|A0A0K6HAT8|A0A0K6HAT8_9GAMM S-adenosylmethionine:tRN A ribosyltransferase-isomerase OS=Idiomarina woesei OX= 1381080 GN=queA PE=3 SV=1
MNVKDFSFDLPDELIARYPQAERSASRLLCLNGTTGEVAHEQFKDIIAHINSGDLLVFNDTRVIPARLLGEKVSGGKVEVLVERIIDEHRVLAHLRSNRSPKPGAKMILEGAVEVEMVGRQDALFELQFNTAEPVLQVLEQYGHMPLPPYIDRPDEDSDRERYQTVYNKKPGAVAAPTAGLHFDDVILSELQAKGVEFAYVTLHVGAGTFQPVRVDNIEEHHMHSEYAEVSQETVDAIAAAQARGNRVIAVGTTSVRSLESAAQAAKQQGLSLQPFFADTDIFIYPGYEFQVVDAMITNFHLPESTLIMLVSAFAGRDHVLNAYQQAVNERYRFFSYGDAMFVTRTAR

SEQ ID NO: 67528 - protein, 344 aa, Idiomarina xiamenensis
  misc_feature (1)..(344): tr|K2LCB5|K2LCB5_9GAMM S-adenosylmethionine:tRNA ribosy ltransferase-isomerase OS=Idiomarina xiamenensis 10-D-4 OX=740709 GN=queA PE=3 SV=1
MQVSDFNFELPDELIARYPQAERSASRLLHLQRADGQVNHRHFKDIIDCLNAGDLLVFNDTRVIPARLLGQKRSGGKVEVLVERLLDEHRVLAHVRSNRAPKEGQLLWLEDAVEVEMLARHETLFELRFNHPKPVLEVLEQYGHMPLPPYIDRPDEHSDRERYQTVYNRKPGAVAAPTAGLHFDDNILQQLRQKGVNFAYVTLHVGAGTFQPVRVDSIEQHQMHSEYAEVPAETVAAINATRANGGRVVAVGTTSVRSLESAAKDAAAKGQALQPYFADTDIFIYPGYEFAVVDAMITNFHLPESTLIMLVSAFAGYDAVMAAYAEAVRERYRFFSYGDAMFIG

SEQ ID NO: 67529 - protein, 351 aa, Idiomarina zobellii
  misc_feature (1)..(351): tr|A0A1G7Q7Z4|A0A1G7Q7Z4_9GAMM S-adenosylmethionine:tRN A ribosyltransferase-isomerase OS=Idiomarina zobellii O X=86103 GN=queA PE=3 SV=1
MSENNPSSLKVSDFSFELPDELIARYPQEQRSASRLLQVNAESKSIEHKQFTDIVDTLSSGDLLVFNDTRVIPARLLGEKVSGGKVEVLIERLLDEYRVLAHVRSNRSPKAGAELLLEGAVKVTMLARHDALFELKFEHEEPVLDILEEYGHMPLPPYIDRPDESSDKERYQTVYNREPGAVAAPTAGLHFDDDILEKLRNKGVNFAYVTLHVGAGTFQPVRVENINDHVMHSEYAKVSEETCNAIKETKANGGRVVAVGTTSVRSLESAANASNSDNIEPFFDDTDIFIYPGYEFKVVDSLITNFHLPESTLIMLVSAFAGRDLIMDAYQQAINEKYRFFSYGDAMLLQR

SEQ ID NO: 67530 - protein, 349 aa, Idiomarinaceae bacterium
  misc_feature (1)..(349): tr|A0A2D6I8L7|A0A2D6I8L7_9GAMM S-adenosylmethionine:tRN A ribosyltransferase-isomerase OS=Idiomarinaceae bacter ium OX=1898113 GN=queA PE=3 SV=1
MSYASEGLKVSDFSFDLPDELIARYPQQQRTASRMLRVFAQQSRIEHGQFTDIVDQLEAGDLLVFNDTRVIPARLLGEKTSGGKVEVLVERMLDDSRVLAHVRANRAPKPGAEFLLEGAVKATMLARHDALFELEFNHQETVLELLEAHGHMPLPPYIDRPDEESDKERYQTVYNREPGAVAAPTAGLHFDDAILQQLKDKGVEFGYVTLHVGAGTFQPVRVDSIEEHVMHSEYAKVDTKVCEQIRKVKQAGKRVIAVGTTSVRSLESAAQATDELIAPFFDDTDIFIYPGYEFKVIDGLVTNFHLPESTLIMLVSAFAGKELIMNAYQQAIDEKYRFFSYGDSMLILR

SEQ ID NO: 67531 - protein, 350 aa, Idiomarinaceae bacterium
  misc_feature (1)..(350): tr|A0A0P7WS27|A0A0P7WS27_9GAMM S-adenosylmethionine:tRN A ribosyltransferase-isomerase OS=Idiomarinaceae bacter ium HL-53 OX=1298881 GN=queA PE=3 SV=1
MKRQDFTFELPDELIARYPQPDRTSSRLLHLDGPTGAVSHYQFKNLLDLVAPGDLMVFNDTRVIPARLMGEKVSGGKVEILIERVLDEHRALAHVRSNRSPKPGARLLMENAIDVEVVGRDDALFELKFDPSKTLLEWLEAYGHMPLPPYIDRPDEATDKERYQTVYGTKPGAVAAPTAGLHFDDALLAALRDKGVEIAHVTLHVGAGTFQPVRVDNIHEHKMHSEYAEVPDSVVIAVKAAKARGGRVIAVGTTSVRSLESAAWKSPTGEIEPLSGETDIFIFPGYEFKVVDAMITNFHLPESTLIMLVSAFAGQKAVLSAYREAVQAQYRFFSYGDAMFVTRKLNALNV

SEQ ID NO: 67532 - protein, 346 aa, Ignatzschineria cameli
  misc_feature (1)..(346): tr|A0A2U2ARF4|A0A2U2ARF4_9GAMM S-adenosylmethionine:tRN A ribosyltransferase-isomerase OS=Ignatzschineria camel i OX=2182793 GN=queA PE=3 SV=1
MLKLSDYDYHLPEELIAQFPPKVRGTSRLLVPYEGEIRDHRFDALVEYLRPGDRIVINNTRVLPARLFGQKETGGKVEIMVERLLTESEILAQIKASKALKPGQKVLIEGAPRLEMVARDENFFQLRTTDGTPIAQLLETYGHLPLPPYITRSDEELDQSRYQTVFNKEEGAVAAPTAGLHFTEELLDQLRAKGVDITEITLHVGAGTFQPIRSENLDEHQMHKEWISVPASAVEEIKATKAAGKRVIAIGTTAVRALESAALSGELRPFVGDTDIFIKPGFEFKVIDGLLTNFHLPKSTLLVLVSTLMGKARIEEIYQHAVKERYRFFSYGDSMLLVPELDRVKE

SEQ ID NO: 67533 - protein, 346 aa, Ignatzschineria indica
  misc_feature (1)..(346): tr|A0A2U2AI43|A0A2U2AI43_9GAMM S-adenosylmethionine:tRN A ribosyltransferase-isomerase OS=Ignatzschineria indic a OX=472583 GN=queA PE=3 SV=1
MLKLSDYDYHLPEELIAQFPPKVRGTSRLLVPYQGEIRDHSFDALVEYLRPGDRIVINNTRVLPARLFGQKETGGKVEIMVERLLTETDVLAQIKASKALKVGQKVLIEGVPRLEMVERDENFFQLRTIDGSAIAQLLESYGHLPLPPYITRSDEELDQSRYQTVFNKEEGAVAAPTAGLHFTEELLDQLRQKGVDITEITLHVGAGTFQPIRSENLDEHQMHKEWISVPESAVAEIKATKASGKRVIAIGTTAVRALESAALSGELRPFVGDTDIFIKPGFEFRVIDGLLTNFHLPKSTLLVLVSTLMGKKRIEEIYQHAVKSQYRFFSYGDSMLLVPELDRAKE

SEQ ID NO: 67534 - protein, 346 aa, Ignatzschineria sp.
  misc_feature (1)..(346): tr|A0A256CRL1|A0A256CRL1_9GAMM S-adenosylmethionine:tRN A ribosyltransferase-isomerase OS=Ignatzschineria sp. F 8392 OX=1980117 GN=queA PE=3 SV=1
MLKLSDYDYHLPEELIAQFPPKVRGTSRLLIPYHGEIRDHSFDALVEYLHPGDRIVINNTRVLPARLFGQKETGGKVEIMVERLLTETDILAQIKASKALKVGKKVLIEGEPRLEMVARDDHFFQLRTIDGSAIAQLLETYGHLPLPPYITRSDEELDQSRYQTVFNKEEGAVAAPTAGLHFTEELLDQLRQKGVDITEITLHVGAGTFQPIRSENLDEHQMHKEWISVPESAVEEIKATKAAGKRVIAIGTTAVRALESAALSGELRPFVGDTDIFIKPGFKFRVIDGLLTNFHLPKSTLLVLVSTLMGKKRIEEIYQHAVKSQYRFFSYGDSMLLVPELDRAKE

SEQ ID NO: 67535 - protein, 344 aa, Ignatzschineria ureiclastica
  misc_feature (1)..(344): tr|A0A2U2ACC1|A0A2U2ACC1_9GAMM S-adenosylmethionine:tRN A ribosyltransferase-isomerase OS=Ignatzschineria ureic lastica OX=472582 GN=queA PE=3 SV=1
MLKLSDYDYHLPEELIAQFPPKVRGTSRLLVPKAGEIYDHTFEDLIDYLEPGDRIVINNTRVLPARVFAEKETGGKVEIMVERLVSETEVLAQIKASKALKPGQKVIIDGKPLLEMVDRDEAFFLLKTINGSPIATILETYGHLPLPPYITRSDEELDQSRYQTVFNKEEGAVAAPTAGLHFTAEFLERIKAKGIDVTEITLHVGAGTFQPIRTEDLNEHQMHKEWINVPQSAVDDIVATKAAGKRVIAIGTTAVRALESAALTGELKPFVGDTNIFIKPGFEFRVIDGLLTNFHLPKSTLLVLVSTLMGKSRIEEIYQHAVNARYRFFSYGDSMLLIPSLDQK

SEQ ID NO: 67536 - protein, 343 aa, Ignavibacteria bacterium
  misc_feature (1)..(343): tr|A0A2M7ML76|A0A2M7ML76_9BACT S-adenosylmethionine:tRN A ribosyltransferase-isomerase OS=Ignavibacteria bacter ium CG_4_10_14_3_um_filter_37_18 OX=1974037 GN=queA PE= 3 SV=1
MKLSEFSYNLPKTHIAKYPMHPRDKSKMMVLNRETQTIENKTFSHIVDYMEEGDVLVLNDTRVIQARLYGKKEKTNAKIEVFLLRELNTREWIWDVIVDPARKVRIGNKIYFDDDLFCEVIDNTTSRGRTVRFNRPDVFTSIEKIGHTPLPPYIKREPEKADKENYQTVYAKTDGSVAAPTAGLHFTTKLLEKINKKGVEIVPVLLHIGLGTFQPVEVEDLTKHRMHSEYFDVPASTAEIINKAKKNGKNVFVVGTSAVRALESSVTADGYVRGNKGWTDKFIYPPYEFQIGTKLITNFHYPESTLMMLVAAFGEIEFVLKAYKKALKEQYRFLSYGDAMLII

SEQ ID NO: 67537 - protein, 345 aa, Ignavibacteria bacterium
  misc_feature (1)..(345): tr|A0A1G0VG57|A0A1G0VG57_9BACT S-adenosylmethionine:tRN A ribosyltransferase-isomerase OS=Ignavibacteria bacter ium RIFOXYB2_FULL_37_11 OX=1798448 GN=queA PE=3 SV=1
MKLSDFKYNLPKTAIAKHPANPRDKAKMMVMNRADQSIESYKFSDITDFVQKGDVVVVNKSKVMQARLFGKKERTNAKIEVFVLRELNKEENIWDVIVDPARKVRIGNRIYFNDKLWCEVIDNTTSRGRTVRFNEDAGDIFKAIEKIGHTPLPPYIKRDAVAKDREDYQTIFAEIDGSVAAPTAGLHFTPTLVKKLEKMGVKTVPVILHIGLGTFRPVEVEDLTKHRMDSEYFEVPSETAEVINTALKNKKNVFVVGTSTCRALESSVTADGLAKPNFGWTDKFIFPPYDFKVTKKLITNFHAPESTLLMLAGAFSGYDFLMKAYKKAQKDGYRFLSYGDAMLIL

SEQ ID NO: 67538 - protein, 345 aa, Ignavibacteriae bacterium
  misc_feature (1)..(345): tr|A0A2E0W7N6|A0A2E0W7N6_9BACT S-adenosylmethionine:tRN A ribosyltransferase-isomerase OS=Ignavibacteriae bacte rium OX=2026749 GN=queA PE=3 SV=1
MKLSDFKYNMPKTVIAKHPAEPRDIAKLMVMDKKTGDIEHKIFKDIVDYFSKGDVLVVNETKVMQARLYGKKERTNAKIEVFVLRELNRDENIWDVIVDPARKVRIGNRIYFNDKLWCEVIDNTTSRGRTVRFNEDAGDIYKAIEKLGQTPLPPYIKRDVVDKDREDYQTIFAKYDGSVAAPTAGLHFTPDLIKEIKAKGVKVVTVLLHIGLGTFRPVEVEDLTKHKMDSEYFEIPDESAKAINKALETKKNVFVVGTSATRALESSVTAEGFVKPNFGWTDKFIFPPYEFKITKKLITNFHQPESTLLMLAAAFGGYDNIMKNYKKAMKEGYRFLSYGDAMLII

SEQ ID NO: 67539 - protein, 394 aa, Ignavibacteriae bacterium
  misc_feature (1)..(394): tr|A0A2N1V4H1|A0A2N1V4H1_9BACT S-adenosylmethionine:tRN A ribosyltransferase-isomerase OS=Ignavibacteriae bacte rium HGW-Ignavibacteriae-4 OX=2013811 GN=queA PE=3 SV=1
MLPNININDFNYELPENRIAKYPLENRSKSKLLVANSVANTIVHHTFEDVVDILPENTSLYINKTKVISGRFYMVKETGGRAELLLVEPIVPSNDPQIALQASKTAVWKAIIGGKRIKVGAILEDINGQLTAEVLEKEANEVKVRLTWEYGTFSELLLNSGVLPLPPYLNRESEEADKESYQTVFAKDDGSIAAPTAGLHFTDEILSKLKDKGIKIRELTLHVGPGTFLPVSTDNVNEHKMHSEMFSINKSLLEDLKQDLEEKRIIVCVGTTSIRTLESLFWAGNYITEFTETSLVNQWSPYGSDKVISPIESLNNLINSTKDGVLQGKTELIIVPGYEFRFVNGLFTNYHVPKSTLLLLVSAFVGDMWTDIYKSALDNNYRFLSYGDSSLLWR

SEQ ID NO: 67540 - protein, 344 aa, Ignavibacteriales bacterium
  misc_feature (1)..(344): tr|A0A2M7I2D8|A0A2M7I2D8_9BACT S-adenosylmethionine:tRN A ribosyltransferase-isomerase OS=Ignavibacteriales bac terium CG12_big_fil_rev_8_21_14_0_65_30_8 OX=1974046 GN =queA PE=3 SV=1
MKLSDFKFNFPKTLIAKYPVSPRDKSKLLVLDKETEEMEDKKFSDVINYMSKGDVMVVNETRVFQARLYGKKEKTNAKIEVFLLRELNEEDCIWDVIVDPARKVRIGNKIYFNDKLWCEVIDNTTSRGRTVRFNQPGNVFAAIEKIGLTPLPPYIKREAEPADKDNYQTVFAKVDGAVAAPTAGLHFTHKLLNKIKKKGIKIVPIILHIGLGTFRPVEVEDLTKHKMDSEFYEITPKVAETINKAKISKNKIIVVGTSTARALESSITAAGMVKPSRGWTDLFLYPPYKFKIADILITNFHAPESTLVMLASAFAGYDFLIKSYKKAMKDKYRFLSYGDAMLIK

SEQ ID NO: 67541 - protein, 344 aa, Ignavibacteriales bacterium
  misc_feature (1)..(344): tr|A0A2M7ZH21|A0A2M7ZH21_9BACT S-adenosylmethionine:tRN A ribosyltransferase-isomerase OS=Ignavibacteriales bac terium CG_4_9_14_3_um_filter_30_11 OX=1974043 GN=queA P E=3 SV=1
MKLSDFKFNFPKSYIAKYPVSPRDKSNLLVLDRETEVMEDKKFTDVINYMSKGDVMVVNETRVFQARLYGKKEKTNAKIEVFLLRELNEEDSIWDVIVDPARKVRIGNKIYFNDKLWCEVIDNTTSRGRTVRFNQPGNVFAAVEKIGLTPLPPYIKREAEPADKENYQTVFARVDGAVAAPTAGLHFTPKLLNKIKEKGIKIVPIILHIGLGTFRPVEVEDLTKHKMDSEFYEISPKTSDTINKAKASKNKIIVVGTSATRALESSITASGVVKPSRGWTDMFIYPPYKFRIADIIITNFHAPESTLIMLASAFAGYDFLIKAYKKAMKDKYRFLSYGDAMLIK

SEQ ID NO: 67542 - protein, 344 aa, Ignavibacterium album
  misc_feature (1)..(344): tr|I0AGE5|I0AGE5_IGNAJ S-adenosylmethionine:tRNA ribosy ltransferase-isomerase OS=Ignavibacterium album (strain DSM 19864 / JCM 16511 / NBRC 101810 / Mat9-16) OX=9457 13 GN=queA PE=3 SV=1
MKLSDFSYNLPKNQIAKYPVSPRDKAKLLVLDRKTGEMQDKHFYDVVDYMEKGDVLVVNETKVFQARLYGKKEKTNAKIEVFLLRELNKEDCIWDVIVDPARKVRIGNKIYFDDNLWCEIIDNTTSRGRTVRFNQPGKVFQMIEKIGLTPLPPYIKRDPEPSDKQNYQTVYAKVDGSVAAPTAGLHFTEKLLQKIEKKGIHIVPVILHIGLGTFRPVEVEDLTKHRMDSEYYEIPERSAEIINKAIRDKNNVFVVGTSTCRALETSTTAEGFVKPARGWTDKFIYPPYTFKVTQKLITNFHASESTLLLLVAAFAGTDLIMKAYKYAVKNKYRFLSYGDAMLIL

SEQ ID NO: 67543 - protein, 344 aa, Ignavigranum ruoffiae
  misc_feature (1)..(344): tr|A0A1H8ZNI2|A0A1H8ZNI2_9LACT S-adenosylmethionine:tRN A ribosyltransferase-isomerase OS=Ignavigranum ruoffiae OX=89093 GN=queA PE=3 SV=1
MYTTKDFDYDLPESLIAQTPLKNRAASRLLVLNRKNHQLTDGHFPDIKNYLKAGDALVVNQTRVIPARIFGTKPDTGGHLEVLLLHNIEGNRWETLVKPARRAKVGTEIVFGYQETLRAEIVEELDHGGRIIEFDYQGVFLEILEELGQMPLPPYIKEKLNDPERYQTVYAKENGSAAAPTAGLHFTDQLLAEIKAMGVEIIPLVLHVGLGTFRPVSVDNIADHKMHSEFYQLSHESAERINQVRQAGGDIYAVGTTTVRTLETIASDHQGEIVPSSGWTDIFITPGYEFKAVDHLITNFHLPQSTLMMLVSAFYDREHILSAYQHAVAEEYRFFSFGDAMLIY

SEQ ID NO: 67544 - protein, 340 aa, Ilumatobacter fluminis
  misc_feature (1)..(340): tr|A0A4R7I150|A0A4R7I150_9ACTN S-adenosylmethionine:tRN A ribosyltransferase-isomerase OS=Ilumatobacter flumini s OX=467091 GN=queA PE=3 SV=1
MLLSDFDYDLPDERIAQTPIEPRDAARLLVDRGSDAPDHRRVRDLPEILRPGDLLVVNETKVIPARLSVQRATGGKAEVLMLEPLDGERRVWEAMVRPARKLKPGEQLLAPDGTPVVEMGERTEAGDTFTVTVLGSIDSLDVLADHGEMPLPPYITERLGDPDRYQTVYAREPGSAAAPTAGLHFTSELLDRLAERGVETAKVELVVGLDTFRPVMEDDPTEHRMHTERYRVPPQTMDRCLATRAAGGRVVCVGTTSVRALESAATRGELEGRTDIFIHGDYDWQLVDVLMTNFHLPKTTLLMMIHAFVGDRWRSLYDEALEHDYRFLSFGDAMLLDRHA

SEQ ID NO: 67545 - protein, 341 aa, Ilumatobacter sp.
  misc_feature (1)..(341): tr|A0A2E3TVL5|A0A2E3TVL5_9ACTN S-adenosylmethionine:tRN A ribosyltransferase-isomerase OS=Ilumatobacter sp. OX= 1967498 GN=queA PE=3 SV=1
MQLSDFDYVLPDERIAQVPITPRDAARLLVAGNPVQHRHVSDLPDLLQPGDLLVVNETRVIPARLKLSRSTGGAAEVLLLETIDPDRRVWEALIRPGKKLKVRECLFADGVPLIKIGERTAAGDTFFVNLLGDADPLQLLEQHGQMPLPPYITAVLDDPDRYQTVFAATPGSAAAPTAGLHFTPELFSRLAARGIDRVAVELIVGLDTFQPISTENPLDHPMHTERYRVPPETMEACLRTRKQGGRLVAVGTTAVRALESAAKTGELAGRTKLFIHEGFDWQLIDVLMTNFHLPKTTLLMMIDAFFGPGWRSLYAEALREEYRFLSFGDAMLIERSRSQHP

SEQ ID NO: 67546 - protein, 343 aa, Ilyobacter polytropus
  misc_feature (1)..(343): tr|E3HAN4|E3HAN4_ILYPC S-adenosylmethionine:tRNA ribosy ltransferase-isomerase OS=Ilyobacter polytropus (strain DSM 2926 / CuHBu1) OX=572544 GN=queA PE=3 SV=1
MSTRLSDYDYNLPEELIGQTPAEPRDHSRLMLVNKKTGDIEHKRFYNIIDSLKEGDVLVRNSTRVIPARLMGRKDTGAILEVFLLKRKDINTWECLIGNAKRLKIGQKVFIGENNELVAELKEIKEDGNRILTFDYEGVFEEILDKLGQMPLPPYISEKLSEKERYQTVYAIKGESVAAPTAGLHFTEDLLEKIREKGVEIADLFLEVGLGTFRPVQTEDVLDHKMHEETYEVPEKSVEIINRAKEEGRRIIAVGTTSIRTLESSVDENGKLVAGKGTTDIFIYPGYKFKIVDALITNFHLPKSTLLMLVSAFSSRELIMDVYEKAVIKKYQFFSFGDAMFIY

SEQ ID NO: 67547 - protein, 340 aa, Imhoffiella purpurea
  misc_feature (1)..(340): tr|W9VHJ9|W9VHJ9_9GAMM S-adenosylmethionine:tRNA ribosy ltransferase-isomerase OS=Imhoffiella purpurea OX=12496 27 GN=queA PE=3 SV=1
MRRSDFHYDLPPELIAQRPAAERAGARLMTLDGPNGAPRDLMFRDLPLLLRPDDLLVFNNTRVMRARLYGHKESGGRVEVLLERLLGPREALAHIRSSKSPRSGTCIRLAEGSPLEVMGREGALYRLRACEKDFDALMSAYGHLPLPPYIQRSDDEADESRYQTLFARREGAIAAPTAGLHFDEAMLNRLADMGIERAEVTLHVGAGTFQPVRTEDLDRHEMHSEWLEVSEEVCGQIARTRSRGGRVVAVGTTCVRSLETAAADGSLRPFRGESRLFIRPGYAFRVVDAMITNFHLPESTLLMLVAAFSGYDPIMNAYRHAISRRYRFFSYGDAMFLTGT

SEQ ID NO: 67548 - protein, 348 aa, Immundisolibacter cernigliae
  misc_feature (1)..(348): tr|A0A1B1YTV9|A0A1B1YTV9_9GAMM S-adenosylmethionine:tRN A ribosyltransferase-isomerase OS=Immundisolibacter cer nigliae OX=1810504 GN=queA PE=3 SV=1
MRRQDFTYALPEALIAQQPLAQRSASRLLHLPAGSAVRDRAFTDLPSLLRAGDLLLLNDTRVIRARLRGRRASGGRIEALIERLAGDREALVQLRGGKSLAAGARLEFAGGGQRVMASVGDREGEFFRLHFDLPLREWLDEVGELPLPPYIGRAAEALDEHRYQTIYGRHPGAVAAPTAGLHFDNDLLAQIQAAGVEVGYLTLHVGAGTFKPVRVDDLAEHRMHAERVVVPAQVCAQVEATRARGGRVIAVGTTVVRALESAAAGGALAPFDGETALFITPGYRFAVVDALLTNFHLPESTLLMLVCAFGGYAPVMAAYRHAVQQEYRFFSYGDAMFVERPVEPTACP

SEQ ID NO: 67549 - protein, 348 aa, Imperialibacter sp.
  misc_feature (1)..(348): tr|A0A5E7XS20|A0A5E7XS20_9BACT S-adenosylmethionine:tRN A ribosyltransferase-isomerase OS=Imperialibacter sp. E C-SDR9 OX=2038371 GN=queA PE=3 SV=1
MKLSEFKFDLPAGLVALYPSENRDESRLMVLHRDSGKIEHKTFKDIVDYFDEGDNFIINDTKVFPARLYGNKEKTGAKIEVFLLRELNKELHLWDVLVDPARKIRVGNKLYFGDGDLVAEVIDNTTSRGRTIRFLYDGEGVDFYKMIDTLGETPLPKYIKRKAEPDDRERFQTIYAENVGAVAAPTAGLHFTKQLMKRLEIKGVEINPITLHIGLGTFRPVDVEDLTKHKMDSENFFVRQPTVDMVNKAIDEKKRVVAVGTTVMRSLESSVSASNRLKPNEGWTDKFIFPPYEFKICNALISNFHMPESTLLMMASAFGGYDLVMEAYRVAIKEKYRFFSYGDAMLIL

SEQ ID NO: 67550 - protein, 400 aa, Imperialibacter sp.
  misc_feature (1)..(400): tr|A0A5E7XX51|A0A5E7XX51_9BACT S-adenosylmethionine:tRN A ribosyltransferase-isomerase OS=Imperialibacter sp. E C-SDR9 OX=2038371 GN=queA PE=3 SV=1
MPPQINVSEYTYDLPDERIAKFPLEDRSASKLLFYNRGSIEHLRFKSIPSLLPENTSLYFNNTKVIPARLAFQKPTGAVIEIFLLQPTLPSPVISVAMEAKSPVVWKCMIGNAKRWKEGILERNIKLEGATVKVEVKRLGTDEVQLSWNKSAARFVDVVDAIGKTPLPPYLHREAIENDKKTYQTVYSEKDGAVAAPTAGLHFTDEVIQQLRGKGIITNFLTLHVSAGTFQPIKTTTAEEHVMHSEQVIIRRENLEQLLVPERFNVAVGTTSMRTLESTYWYGVMLGRNPDADFLIPKLLPYVQQASLLSSKESIMNILNRMDALGVDELTGSTEIFIFPGYKFKLVNGLITNFHQPNSTLILLVAAFVGPDWRKIYNEALGTGYRFLSYGDSSLLIPGN

SEQ ID NO: 67551 - protein, 349 aa, Imtechella halotolerans
  misc_feature (1)..(349): tr|I0WKK1|I0WKK1_9FLAO S-adenosylmethionine:tRNA ribosy ltransferase-isomerase OS=Imtechella halotolerans K1 OX =946077 GN=queA PE=3 SV=1
MKLSHFNFDLPKELLAEYPSENRDEARLMVVDRKTKTIEHRLFKDIIEYFDEGDVMVLNDTKVFPARLYGNKEKTGARIEVFLLRELNAEQRLWDVLVDPARKIRIGNKLYFGDDESLVAEVIDNTTSRGRTLRFLYDGSYEEFRNKLTELGETPLPKYISRNVEPEDEERYQTIYAKHEGAVAAPTAGLHFSKHLLKRLEIKGIDFAEITLHVGLGTFNPVEVEDLSKHKMDSEELVITPRACDVVNKAKKGKGKVCAIGTTVMRGLESSVSSEKTLNPYEGWTNKFIFPPYDFSIADCMVTNFHTPKSTLLMMVSAFAGHDLIKKAYAEAVKEGYKFYSYGDAMLIL

SEQ ID NO: 67552 - protein, 418 aa, Indibacter alkaliphilus
  misc_feature (1)..(418): tr|S2DHI6|S2DHI6_9BACT S-adenosylmethionine:tRNA ribosy ltransferase-isomerase OS=Indibacter alkaliphilus LW1 O X=1189612 GN=queA PE=3 SV=1
MQAKLNTQNKKRMSLLKSIENIRLTEYEYTLPESRIAKFPLEKRDESKLLQYGPKGISHHSFKELDQLIPSGSLMVFNNTKVIPARLIFQRETGAKIEIFLLKPILPSTVINEIMISTTSVTWECMIGNLKKWKEGETLKGFVEIQGREVVIQAELENRESRSVKFLWSDQNMPFVSIVEASGEVPLPPYLNRKATEEDKPRYQTVYSKKEGAVAAPTAGLHFTNEVLEKLKAKGVKEEFLTLHVSAGTFQPIKAEVITEHNMHSEQMVVSFESIENIKTQSEKIIAVGTTSMRTLESLYWFGVKLFNNLGNTFFIDKLFAYQEFDSLPSRKESFQAISEYMKKNNLSEITGSTEIFIMPGYDFKVCEGLVTNFHQPSSTLILLIAAFTNGSWRDIYTEALEKDYRFLSYGDSNLYWK

SEQ ID NO: 67553 - protein, 321 aa, Indibacter alkaliphilus
  misc_feature (1)..(321): tr|S2E6I9|S2E6I9_9BACT S-adenosylmethionine:tRNA ribosy ltransferase-isomerase OS=Indibacter alkaliphilus LW1 O X=1189612 GN=A33Q_0108 PE=3 SV=1
MVVHRKTGEIEHRVFKDIVDYFGDGDVFVMNDTKVFPARLYGNKEKTGAKIEVFLLRELNQDLRLWDVLVDPARKIRVGNKLYFGDSDLVAEVIDNTTSRGRTIRFLFDGTDEEFYKTIDTLGETPILKEWIDRKVEAEDRERYQTIFAQNVGAVAAPTAGLHFTPHLLKRLELKGVEVTPITLHVGLGTFRQVDVEDLTKHKMDSENYSIPEKTVELVNEAIDNKKRVVSVGTTSLKTIESSVTANNRLKASSGWTDKFIIPPYEFKIANSLITNFHLPESTLLMTASAFGGYDLVMKAYQEAIKEKYRFFSYGDAMLIL

SEQ ID NO: 67554 - protein, 344 aa, Inhella sp.
  misc_feature (1)..(344): tr|A0A437LHI8|A0A437LHI8_9BURK S-adenosylmethionine:tRN A ribosyltransferase-isomerase OS=Inhella sp. CCP-18 OX =2499851 GN=queA PE=3 SV=1
MPAQTYTLSDFDYELPPELIAQHPAAERSASRLLDARGPALVDRVFRELPHLLEARDLLVFNDTQVIKARLHGVKATGGSVEALIERLLPGAHEVWAHVRASKSPKPGSTVRFAEAFDAEVLGRCGPENGLFHLRFPADPLTLLDAHGHVPLPPYIEHEDSADDVRRYQTVFAQNPGAVAAPTAALHFDEALLAALPCPRANVTLHVGAGTFQPVRVENIAEHQMHSEWFKVPQATVDAIEACRARGGRVVAVGTTTLRALESAARGGRLQAGAAETDIFITPGFHFQVVDALITNFHLPKSTLMMLVSALAGYEHIRAVYGHAVAERYRFFSYGDAMLLARLG

SEQ ID NO: 67555 - protein, 342 aa, Inmirania thermothiophila
  misc_feature (1)..(342): tr|A0A3N1Y1W3|A0A3N1Y1W3_9GAMM S-adenosylmethionine:tRN A ribosyltransferase-isomerase OS=Inmirania thermothiop hila OX=1750597 GN=queA PE=3 SV=1
MRVADFDYELPEALIAQHPLPERSAARLLHVSAAGLADRRVADLPALLRPGDLLVLNDTRVLKARLLGRKESGGRVEVLVERIEAPRRALAHVRASRAPRPGTGIEVEGGGRLTVRGRAGGLFEVESDEPLEALLERCGRVPLPPYIRRAAEAEDLARYQTVWARRPGAVAAPTAGLHFDEALLAAVRARGVETAQVTLHVGAGTFQPVRVEEVERHAMHAERVVVDEAAVAAVARTRARGGRVVAVGTTVVRALESAAAAGALRPLRGETRLFIYPGHRFRVVDALLTNFHLPRSTLLMLVCAFAGRERVLAAYRHAVAQRYRFFSYGDAMFLDETARHAL

SEQ ID NO: 67556 - protein, 349 aa, Inquilinus limosus
  misc_feature (1)..(349): tr|A0A211ZS71|A0A211ZS71_9PROT S-adenosylmethionine:tRN A ribosyltransferase-isomerase OS=Inquilinus limosus OX =171674 GN=BWR60_06470 PE=3 SV=1
MIAADRPDHPAARLCAVDADGRIRHLPRAALATVLTRGDLVVANDAATLPASLHGLHAATGRPVEVRLAGWVAPGDPTRFAALVFGAGDHRLRTEDRPAPPDLAAGDHLSLGPLNAVVERGLGHPRLVRLRFLGRRNRVLAGLARHGRPVQYAHVPEPLALWDVWTRIAADPVAFEPPSAGFALDWALLAAWRRHGIGFATLTHAAGISSTGDAALDRRLPFDEPYRIPEATATAVAQAKAAGRRVVAIGTTVVRALEAAAGEDGSVRAGDGVAANRIGPGTRLRVADALLTGMHQPGESHFELLRAFAPGGVLDGLPAALTAAGYRGHEFGDVMLIERQAREAGSVAA

SEQ ID NO: 67557 - protein, 346 aa, Inquilinus limosus
  misc_feature (1)..(346): tr|A0A211ZRM6|A0A211ZRM6_9PROT S-adenosylmethionine:tRN A ribosyltransferase-isomerase OS=Inquilinus limosus OX =171674 GN=queA PE=3 SV=1
MRVDEFDFDLPRQLIADRPAEPREAARLLEVAADGLVDRHIADLPGRLRSGDLLVVNDTRVIPARLHGKRGLAGIEIMLHQPAEAGRWRAFARPAKKLKPGDVVRFADDFAATIVAKGEAGEVEVAFDDPAGLAAQLQRHGEIPLPPYIDRPDGPDERDRTDYQTVFAKYDGAVAAPTAGLHFTPPLLDALAARGIDTVRLTLHVGAGTFLPVKSDTVEGHVMHAERGVLTAEVADRINAVRAAGGRIVSVGTTSLRLLESAAAEDGTMRPFDGSTAIFITPGYRFRAVDLLVTNFHLPRSTLFMLVCAFAGTERMKQAYSHAISAGYRFYSYGDACLLHRSDKDD

SEQ ID NO: 67558 - protein, 349 aa, Inquilinus sp.
  misc_feature (1)..(349): tr|A0A554SIK7|A0A554SIK7_9PROT S-adenosylmethionine:tRN A ribosyltransferase-isomerase OS=Inquilinus sp. KBS070 5 OX=2578108 GN=queA PE=3 SV=1
MKLSQFKFNLPESLIAHSPSDIRDESRLMVLHRDSGKIEHKIFKDILDYFDDKDVMILNNTKVFPARMYGNKEKTGATIEVFLLRELNKELRLWDVLVDPARKIRVGNKLYFGDDDLLIAEVVDNTTSRGRTIRFLFDGTDEEFRRNVEILGETPLPKYIKRKATAEDKERYQTIFAKHEGAVAAPTAGLHFSRELMKRLELKGVEFAEVTLHVGLGTFRPVEVEDLTKHKMDSEQFIIEERQANIVNKAIERKSRICAVGTTSMRAVESAVSAGKTLKAANDWTSKFIFPPYDFSIANSMVTNFHTPESTLLMMVSAFGGYEHVMNAYEVAVKEKYRFYSYGDAMLII

SEQ ID NO: 67559 - protein, 362 aa, Insolitispirillum peregrinum
  misc_feature (1)..(362): tr|A0A1N7JYT7|A0A1N7JYT7_9PROT S-adenosylmethionine:tRN A ribosyltransferase-isomerase OS=Insolitispirillum per egrinum OX=80876 GN=queA PE=3 SV=1
MRVDAFDFDLPRALIADRPARPRDSARLLDVTGAAFADRGVLDLPALLQPGDVMVFNDTRVIPARLFGTRRLSDAPAASDGPGSDGVARIEATLHQALGLDSWAAFVKGSKKLRPGQTVVFSDDDGFAAEVTSKGEAGEVTFRFNRSGADLVLALEKHGHLPLPPYMGREDDPQDRTDYQTVYARHDGAVAAPTAGLHFTDRLLEALDQRGIQRVHVTLHVGAGTFLPVKVDDTDDHRMHSEFGIISPEAAETIAHARTNGGRLVCVGTTSLRLIESAALPDGSVPAWSGSTDIFITPGYRFKAVDLLMTNFHLPRSTLFMLVSAFAGHARMQAAYAHAIAEGYRFYSYGDSSLLAREDLIR

SEQ ID NO: 67560 - protein, 341 aa, Intestinibacter bartlettii
  misc_feature (1)..(341): tr|W1UJE2|W1UJE2_9FIRM S-adenosylmethionine:tRNA ribosy ltransferase-isomerase OS=Intestinibacter bartlettii DO RA_8_9 OX=1403940 GN=queA PE=3 SV=1
MKTSDFNFDLPEELIAQVPIKDRTSSKLMVLDKETGEIEHRIFRDIIDYLNPGDCLVLNDTRVIPARLIGSKVETGGKIEFLLLKRTEDDTWETLVKPGKRAKIGARFSFGDGKLIAEVVGMGEDGARIVKFEYNGIFEEILDELGNMPLPPYITEKLDERERYQTVYSKHNGSAAAPTAGLHFTEELLTKIKEKGVDLAFVTLHVGLGTFRPVKVDDVDNHQMHSEFYMVTQEAADKINKAKANGNRVISVGTTSTRTIESVADENGIVKATSGWTNIFIYPGYKWKVIDNLITNFHLPESTLIMLVSSLAGKEHVLNAYNEAVKERYRFFSFGDAMFIK

SEQ ID NO: 67561 - protein, 341 aa, Intestinibacter bartlettii
  misc_feature (1)..(341): tr|B0A9R6|B0A9R6_9FIRM S-adenosylmethionine:tRNA ribosy ltransferase-isomerase OS=Intestinibacter bartlettii DS M 16795 OX=445973 GN=queA PE=3 SV=1
MKTSDFNFDLPEELIAQVPIKDRTSSKLMVLDKETGEIEHRIFRDIIDYLNPGDCLVLNDTRVIPARLIGSKVETGGKIEFLLLKRTEDDTWETLVKPGKRAKIGARFSFGDGKLIAEVVGMGEDGARIVKFEYNGIFEEILDELGNMPLPPYITEKLDERERYQTVYSKHNGSAAAPTAGLHFTEELLAKIKEKGVDLAFVTLHVGLGTFRPVKVDDVDNHQMHSEFYMVTQEAADKINKAKANGNRVISVGTTSTRTIESVADENGIVKATSGWTNIFIYPGYKWKVIDNLITNFHLPESTLIMLVSSLAGKEHVLNAYNEAVKERYRFFSFGDAMFIK

SEQ ID NO: 67562 - protein, 351 aa, Intestinimonas butyriciproducens
  misc_feature (1)..(351): tr|A0A0S2W3Y3|A0A0S2W3Y3_9FIRM S-adenosylmethionine:tRN A ribosyltransferase-isomerase OS=Intestinimonas butyri ciproducens OX=1297617 GN=queA PE=3 SV=1
MRTRRKLEQYLKTSDFYYDLPQELIAQTPLERRDGSRLMVLDKKTGATAHRHFYDIPTLLRPGDCLVLNDSRVLPARLLGHREPTGGAVEVLLLTDRGDKVWECLVRPGKKVRPGARLSFGDGLLTAEVVETLEGGNRLIRFDYDGIFLEILERLGKMPLPPYIKEELSDPERYQTVYSKEVGSAAAPTAGLHFTRELLEQIQTMGVNLAYVTLHVGLGTFRPVKEEEITDHEMHAEYCAISRETADLINRTKKNGGRIICVGTTSCRTIESWAAEDGTLREAAGWTSIYIYPGYRFKVLDGLITNFHLPESTLVMLVSALAGREHILAAYEEAVREKYRFFSFGDAMFIG

SEQ ID NO: 67563 - protein, 341 aa, Intestinimonas butyriciproducens
  misc_feature (1)..(341): tr|A0A2U1CDV8|A0A2U1CDV8_9FIRM S-adenosylmethionine:tRN A ribosyltransferase-isomerase OS=Intestinimonas butyri ciproducens OX=1297617 GN=queA PE=3 SV=1
MKTSDFYYDLPQELVAQTPLERRDGSRLMVLDKKTGATAHRHFYDIPTLLRPGDCLVLNDSRVLPARLLGHREPTGGAVEVLLLTDRGDKVWECLVRPGKKVRPGARLSFGDGLLTAEVVETLEGGNRLIRFDYDGIFLEILERLGKMPLPPYIKEELSDPERYQTVYSKEVGSAAAPTAGLHFTRELLEQIQTMGVNLAYVTLHVGLGTFRPVKEEEITDHEMHAEYCAISRETADLINRTKKNGGRIICVGTTSCRTIESWAAEDGTLREAAGWTSIYIYPGYRFKVLDGLITNFHLPESTLVMLVSALAGREHILAAYEEAVREKYRFFSFGDAMFIG

SEQ ID NO: 67564 - protein, 370 aa, Intrasporangium oryzae
  misc_feature (1)..(370): tr|W9G6Y9|W9G6Y9_9MICO S-adenosylmethionine:tRNA ribosy ltransferase-isomerase OS=Intrasporangium oryzae NRRL B -24470 OX=1386089 GN=N865_14545 PE=3 SV=1
MTTTALAHAPHTVFRRTEDLTADAPPEARGIRRDGVRLLVAAASQDGGPSVEHTSFDRIGEHLRPGDLLLVNDSATVVGEVDGLLVGRGTVVVHVATELNDGSWVLELRVAPDAARPVLDAVEGDVVEFTGRSRRGRSGPRLRLEAPYPEPGSSPTGRGNRLWRARELGGPALTPWLVRHGRPIAYGYLRGRYPIGDYQTVFGHLPGSAEMASAGRPFTTGLVTRLVSSGVLVAPVTLHTGLSSQEAGEAPQPERFAVSATTAALVNHVRAHHGRVVAVGTTATRAIESAASADGVVRAAAGWTDLVISPSRPAHVVDGLVTGWHDPEASHLLLVESVAGPALTQRAYDEAVAHRYAWHEFGDAGLFLRG

SEQ ID NO: 67565 - protein, 342 aa, Iodobacter fluviatilis
  misc_feature (1)..(342): tr|A0A377Q464|A0A377Q464_9NEIS S-adenosylmethionine:tRN A ribosyltransferase-isomerase OS=Iodobacter fluviatili s OX=537 GN=queA PE=3 SV=1
MQVADFDYHLPESLIAQFPPDARGESRLLHVDGLTRQDSHFRELPQFLRAGDVLIFNDTKVIKARVFGKKESGGAIEALIERVLDEHSALAHIRSSKAPKPGARLIFADRWTATMTERKDDLFKLQFDGEESVLDILEQAGQLPLPPYITHIPDDEDAKRYQTIYARDPGAVAAPTAGLHFTEDLLAQLQAMGVKTGYLTLHVGAGTFQPVRVDNIAEHTMHHERYSIPAATVALIQDAKAQGGRVIAVGTTSLRALEAASQQGLLAEPEGDTNIFITPGYQFRVVDRLITNFHLPKSTLLMLVAAFAGYDTMRAAYQHAVEQEYRFFSYGDAMLLEPATLK

SEQ ID NO: 67566 - protein, 341 aa, Iodobacter sp.
  misc_feature (1)..(341): tr|A0A3S8ZNP8|A0A3S8ZNP8_9NEIS S-adenosylmethionine:tRN A ribosyltransferase-isomerase OS=Iodobacter sp. H11R3 OX=2496266 GN=queA PE=3 SV=1
MQVADFDYHLPESLIAQFPPQVRGESRLLHINGLVRQDSHFCELPQFLRAGDVLIFNDTKVIKARVFGKKDSGGAIEALIERVLDERSALAHIRSSRAPKPGARLIFADRWTATMIERKDDLFKLQFDGEESVLDILEQAGQLPLPPYITHIPDDEDARRYQTVYARDPGAVAAPTAGLHFTEDLLAKLQAMGVKTGYLTLHVGAGTFQPVRVDDIAEHIMHHERYSIPAATIALIEKAKAQGGRVIAVGTTSLRALEAASQQGFLAQPEGDTNIFITPGYQFRVVDRLITNFHLPKSTLLMLVAAFAGYDTMLAAYQYAVEQKYRFFSYGDAMLLEPDTL

SEQ ID NO: 67567 - protein, 342 aa, Iodobacter sp.
  misc_feature (1)..(342): tr|A0A2G3JAR9|A0A2G3JAR9_9NEIS S-adenosylmethionine:tRN A ribosyltransferase-isomerase OS=Iodobacter sp. BJB302 OX=1506510 GN=queA PE=3 SV=1
MQVADFDYHLPESLIAQFPPEVRGESRLLHINGLTRQDSHFRELPQFLRAGDVLIFNDTKVIKARVFGKKESGGAIEALIERVLDEHSALAHIRSSKAPKPGARLIFADRWTATMTERKDDLFKLQFDGEESVLDILEQAGQLPLPPYITHIPDDEDAKRYQTIYARDPGAVAAPTAGLHFTEDLLAQLQAMGVKTGYLTLHVGAGTFQPVRVDNIAEHTMHHERYSIPAATVALIQDAKAQGGRVIAVGTTSLRALEAASQHGLLAEPEGDTNIFITPGYQFRVVDRLITNFHLPKSTLLMLVAAFAGYDTMRAAYQHAVEQEYRFFSYGDAMLLEPATLK

SEQ ID NO: 67568 - protein, 351 aa, Isobaculum melis
  misc_feature (1)..(351): tr|A0A1H9RL26|A0A1H9RL26_9LACT S-adenosylmethionine:tRN A ribosyltransferase-isomerase OS=Isobaculum melis OX=1 42588 GN=queA PE=3 SV=1
MRRKEGTSVLTTEDFDFELPEELIAQTPLEDRASSKLLVLNSKTGAYEDKVFSNIVDELNPGDALVLNDTRVLPARLYGEKPDTGGHLEVLLLKNTKNDEWETLVKPAKRAKVGTKVSFGDGRLTGVVTEELEHGGRIVDFKYEGIFLEVLESLGEMPLPPYIKERLDDQERYQTVYSKESGSAAAPTAGLHFTEELLTQIKAKGIKLVFLTLHVGLGTFRPVSVENLADHHMHSEFYRLTEEAAAILREVKAAGGRVVAVGTTSIRTLETIGTKFEGNIQADSGWTSIFIAPGYTFKIVDAFSTNFHLPKSTLVMLVSAFAGRENVLAAYHHAVEARYRFFSFGDAMFVK

SEQ ID NO: 67569 - protein, 375 aa, Isosphaera pallida
  misc_feature (1)..(375): tr|E8R5Y4|E8R5Y4_ISOPI S-adenosylmethionine:tRNA ribosy ltransferase-isomerase OS=Isosphaera pallida (strain AT CC 43644 / DSM 9630 / IS1B) OX=575540 GN=queA PE=3 SV=1
MHISEFDFELPPDRIAQYPAERRDHARLMVVDRRAGTMTHHRFYELPDLLTSGDLLVRNTSKVVPARLLGRREATGGRWEGLFVRAEVDASGLVWELLAQTRGHPRPGEWIVINRRSDLELPTGSTDHEHEGLRLQLVGRGPGGTWKARLHLPDGPATDPDSVWTLLERFGEVPLPPYIRHGREGTGDRDRYQTTYAQTPGSVAAPTAGLHFTPELFETLERRGVGVADLTLHVGIGTFRPLNVETIEAHHMHAETAHLPLATARRLNECRARGGRIVAVGTTSARTLEHVAHQVVTKTGTVGFESFEGDVDLYIKPGHEFLGLDALITNFHLPRSSLIVLVSALAGVELIRDAYRVAIAEGYRFYSYGDAMFIR

SEQ ID NO: 67570 - protein, 369 aa, Isosphaeraceae bacterium
  misc_feature (1)..(369): tr|A0A432MI84|A0A432MI84_9BACT S-adenosylmethionine:tRN A ribosyltransferase-isomerase OS=Isosphaeraceae bacter ium GM2012 OX=2080755 GN=queA PE=3 SV=1
MRTDDFDFHLPDELIAQHPADRRDRSRLMVVRRDAGEIEHRCFADLPDLLRSGDVLVRNDSKVVPARLLGRRSATGGRWEGLFLSELPDGSWELMAQTRGRPQAGEIILIAGNGNSDSGGDGGGDGGGGGGDSGGGGLRLELLDRLDSGHWRARPLDPRPAFELLDAFGRVPLPPYIRRVGDADDPEDRERYQTIYASRPGSVAAPTAGLHFTAEVFDRLAALGVATLDVTLHVGPGTFRPIKAERVEDHRMHAEWAAISPAVADRLNAARSSGGRVVAVGTTATRVLETGVTPSGTFLPFTGQTDIYLRPGVPVLGTDALVTNFHLPRSSLLVLVSALAGIDLIRAAYAEAVSHRYRFYSFGDAMLIL

SEQ ID NO: 67571 - protein, 356 aa, Izhakiella australiensis
  misc_feature (1)..(356): tr|A0A1S8YH78|A0A1S8YH78_9ENTR S-adenosylmethionine:tRN A ribosyltransferase-isomerase OS=Izhakiella australien sis OX=1926881 GN=queA PE=3 SV=1
MRVADFSFDLPDSLIAHYPQAQRSGCRLLSLDGETGNLSHGVFTDLLDKLHPGDLLVFNNTRVIPARVYGRKASGGKIEVLVERMLDDNRVLAHVRASKAPKPGSALLLGDDESVNATMVARHDALFEIVFADPRPVLEILNAVGHMPLPPYIDRPDEEADRELYQTVYSQKPGAVAAPTAGLHFDQPLLQALRARGIETAFVTLHVGAGTFQPVRVDSIEDHIMHAEYAEVPQEVVDAVLACKARGNRVIAVGTTSVRSLESAAQAAQNALIAPFFDDTSIFIYPGYHYQIIDALVTNFHLPESTLIMLVSAFAGYRHTMHAYQQAVAQQYRFFSYGDAMFISRNPAAPDERVGE

SEQ ID NO: 67572 - protein, 356 aa, Izhakiella capsodis
  misc_feature (1)..(356): tr|A0A1I4YIF7|A0A1I4YIF7_9ENTR S-adenosylmethionine:tRN A ribosyltransferase-isomerase OS=Izhakiella capsodis O X=1367852 GN=queA PE=3 SV=1
MRVSDFSFDLPDSLIAHYPQAERSGCRLLSLDGETGNLSHGIFTDLLDKLQPGDLLVFNNTRVIPARLYGRKASGGKIEVLVERMLDDKRALAHVRASKAPKPGSALLLGDDESVTATMVARRDALFEIVFDDPRPLLEILNAVGHMPLPPYIDRPDEEADRELYQTVYSQKPGAVAAPTAGLHFDQPLLQALSAKGVEIAFVTLHVGAGTFQPVRVDSIENHVMHAEYAEVPQEVVDAVLACKSRGNRVIAVGTTSVRSLESAAHAAQNALIAPFFDDTSIFIYPGYHYQIIDALVTNFHLPESTLIMLVSAFAGYRHTMDAYQQAVAEQYRFFSYGDAMYISRNPDAPDESVVK

SEQ ID NO: 67573 - protein, 365 aa, Izhakiella sp.
  misc_feature (1)..(365): tr|A0A4P8YJI0|A0A4P8YJI0_9ENTR S-adenosylmethionine:tRN A ribosyltransferase-isomerase OS=Izhakiella sp. KSNA2 OX=2579935 GN=queA PE=3 SV=1
MRLADFSFELPESLIAHYPQPNRSACRLLSLDGPTGQLTHGTFTDLLDKLNPGDLLVFNNTRVIPARLFGRKASGGRIEVLVERMLDEHRVLAHIRASKAPKPGAELLLGEDESIQATMVARHDALFEVQFNDPCPVLEILNAIGHMPLPPYIDRPDEEADRELYQTVYSEKPGAVAAPTAGLHFDEPLLEALRRKGVEMAFVTLHVGAGTFQPVRVESIEDHVMHSEYAEVPQEVVDAVLACKARGNRVIAVGTTSVRSLESAAQAAQQDIIEPFFDDTQIFIYPGYQYRIIDALVTNFHLPESTLIMLVSAFAGYQHTMHAYQEAVKAEYRFFSYGDAMFITYNPQAINDPLTLTLSPQGRGD

SEQ ID NO: 67574 - protein, 350 aa, Jannaschia donghaensis
  misc_feature (1)..(350): tr|A0A0M6YN35|A0A0M6YN35_9RHOB S-adenosylmethionine:tRN A ribosyltransferase-isomerase OS=Jannaschia donghaensi s OX=420998 GN=queA PE=3 SV=1
MRLSDFDFDLPEDLIATRPVTPRSASRLLVGRGDGIADAVFSDLPEWLRPGDRLVLNDTRVIPARLNGTRVRATTDGSGRAKVEFTLTTAQPDGSWRALARPLRKLRAGDAIELDAGHRATILDRAEGDVVLRFDCEAEDVHALLDAAGQMPLPPYIAAKRAPDAQDRDDYQTVWARHTGAVAAPTASLHFDAPLLDRLRAMGVDFTEVTLHVGAGTFLPVKVEDVTTHRMHSEWGEVTPAAAAAIAATKAAGGRVIPVGTTALRLIESAAATGTIAPFRGDTDIFIYPGYEFRVADGLITNFHLPQSTLLMLVSALMGRDRMRAIYAHAIAERYRFFSYGDGSLLLPDG

SEQ ID NO: 67575 - protein, 349 aa, Jannaschia faecimaris
  misc_feature (1)..(349): tr|A0A1H3RRG3|A0A1H3RRG3_9RHOB S-adenosylmethionine:tRN A ribosyltransferase-isomerase OS=Jannaschia faecimaris OX=1244108 GN=queA PE=3 SV=1
MKLSDFDFDLPDDLIATRPASPRSSSRLMVGQGDAITDAVFTDLPRWLRPGDRLILNDTKVIPARLNGTRVRDTTDGSGRAKVEFTLTAAQPDGSWRALVKPLRKLKIGDTIELDAGHRAIIVDRTATDVALRFDCAPEDVHALLDAAGQMPLPPYIAAKRAPDAQDRDDYQTVWARHSGAVAAPTASLHFDAPLLEELRAQGVDFTEVTLHVGAGTFLPVKVEDVTTHKMHAEWGEVTPEAAAAIAQTQANGGRVIPVGTTALRLIESAAVAGQIAPFRGNTEIFIYPGYEFRVADGLITNFHLPQSTLLMLVSAMMGRDRMLRMYAHAIAGKYRFFSYGDASLLLPE

SEQ ID NO: 67576 - protein, 352 aa, Jannaschia helgolandensis
  misc_feature (1)..(352): tr|A0A1H7MQH5|A0A1H7MQH5_9RHOB S-adenosylmethionine:tRN A ribosyltransferase-isomerase OS=Jannaschia helgolande nsis OX=188906 GN=queA PE=3 SV=1
MKLSDFDFDLPDDLIATRPATPRSSSRLMVMEGDRISDAVFTDLTRWLRPGDRLVLNDTKVIPARLNGTRVRQTADGSGRAKVELTLTAPQPDGSWKALAKPLRKLRAGDLIELAAGHTAQVIARGETDLTLRFDCDSSALHAVLEAAGEMPLPPYIAAKRAPDARDKDDYQTVWARHSGAVAAPTASLHFDTPLLEALRNQGVEFTEVTLHVGAGTFLPVKVEDVTTHRMHAEWGEVTPDAAAAIAATKAAGGRIIPVGTTALRLIESAAANGEINPFQGDTDIFIYPGYDFRVADGLITNFHLPQSTLLMLVSALMGRDRMLAAYAHAISRSYRFFSYGDASLLLPTPRH

SEQ ID NO: 67577 - protein, 352 aa, Jannaschia pohangensis
  misc_feature (1)..(352): tr|A0A1I3I4G3|A0A1I3I4G3_9RHOB S-adenosylmethionine:tRN A ribosyltransferase-isomerase OS=Jannaschia pohangensi s OX=390807 GN=queA PE=3 SV=1
MKLSDFDFDLPEDLIATRPARPRSSARMLVAEGDRLTDAVVRDLTRWLRPGDRLVLNNTKVIPARLAGVRHRVTPEGPVAAQVELTLTAPQAAGTWRTLAKPLRKLKAGDRLALPEGLGAEVVARDETDAVIRFDRDGAALQAALDAVGHMPLPPYIAAKRKPDAQDRDDYQTIWARHAGAVAAPTASLHFDAPLLAALRDQGVDFTEVTLHVGAGTFLPVKVEDVTTHRMHAEWGEVTPEAAAAIAATKAAGGRVIPVGTTALRLIESAAAGPEGMIAPFRDETDIFIYPGFEFRVADGLITNFHLPQSTLLMLVSALMGRDRMLAAYAHAVAERYRFFSYGDASLLLPAP

SEQ ID NO: 67578 - protein, 356 aa, Jannaschia rubra
  misc_feature (1)..(356): tr|A0A0M6XUR2|A0A0M6XUR2_9RHOB S-adenosylmethionine:tRN A ribosyltransferase-isomerase OS=Jannaschia rubra OX=2 82197 GN=queA PE=3 SV=1
MQLSDFDFDLPDDLIATRPARPRSSSRLLVAEGGRTTDAVFTDLIRWLRPGDRLVLNDTRVIPARLPAIRVRDSSDGTGRARVELTLTAPRADGTWRALARPLRKLRADDRLELAAGHTARVTDRTEADAGIAFNCEPKDLHDVLQAAGQMPLPPYIAAKRPPDAQDMDDYQTVWARHSGAVAAPTASLHFDAPMLEKLRAMGVEFTEVTLHVGAGTFLPVKVEDVTTHRMHAEWGEVTPAAAEAIAATKRAGGRVIPVGTTALRLIESAAAGGRIAPFRGDTDIFIYPGYDFRVTDGLITNFHLPQSTLLMLVSALMGRDRMLALYRHAIAERYRFFSYGDASLLLPDRSALDRP

SEQ ID NO: 67579 - protein, 351 aa, Jannaschia seohaensis
  misc_feature (1)..(351): tr|A0A2Y9B4A5|A0A2Y9B4A5_9RHOB S-adenosylmethionine:tRN A ribosyltransferase-isomerase OS=Jannaschia seohaensis OX=475081 GN=queA PE=3 SV=1
MKLTDFDFDLPDDLIATRPAAPRSSARMMVVQPDRTTDARVTDLTRWLRPGDRLILNDTKVIPARLDGERVRETRDGSGRARCEFTLLEARPDGAWRALGKPLRKLREGDRIEFSHGLTARVAGKDETEVVLAFDGEGEALQAALDAAGQMPLPPYIAAKRPPDARDREDYQSIWARHSGAVAAPTASLHFDAPLLEALRARGVAFSEVTLHVGAGTFLPVKVEDVTTHRMHAEWGNIDPEVAEAIARTKAEGGRVIPVGTTALRLIETAARGGAIAPFRGETDIFIYPGFTFRAADGLITNFHLPQSTLLMLVSAMMGRDRMLAAYAHAVRERYRFFSYGDASLLLPNGA

SEQ ID NO: 67580 - protein, 350 aa, Jannaschia seosinensis
  misc_feature (1)..(350): tr|A0A0M7BFD6|A0A0M7BFD6_9RHOB S-adenosylmethionine:tRN A ribosyltransferase-isomerase OS=Jannaschia seosinensi s OX=313367 GN=queA PE=3 SV=1
MKLSDFDFDLPEELIATRPARPRSSARLLVSDGDAITDARVTDLTRWLRPGDRLVLNDTRVIPARLEGERVRETRDGSGRARVEMTLTAPQADGTWRALGRPLRKMRTGDRIEFAAGLTARVTEKGGTDVALAFDSGGKDLQEVLQVAGQMPLPPYIAAKRAPDAADRDDYQTIWARHAGAVAAPTASLHFDAPLLEELRTHGVDFTEVTLHVGAGTFLPVKVEDVTTHRMHAEWGEVTLEAAEAIARTRAAGGRVIPVGTTALRLIETAARGGAIAPFRGETDIFIYPGFDFRVTDGLMTNFHLPQSTLLMLVSALMGQDHILKIYDHAVRAGYRFFSYGDASLLLPRG

SEQ ID NO: 67581 - protein, 350 aa, Jannaschia sp.
  misc_feature (1)..(350): tr|A0A1B6YYW7|A0A1B6YYW7_9RHOB S-adenosylmethionine:tRN A ribosyltransferase-isomerase OS=Jannaschia sp. EhC01 OX=1849359 GN=queA PE=3 SV=1
MKLDDFDFDLPDGLIATRPARPRSSAKLLVAEGAQTRDLTVADLPSTLRPGDRLVLNDTRVIPARLSGTRTRMSAQGEVTAKIEVTLMEPQADGTWSALGKPMRKLKVGEKVIFSNDLQAEVKAMDEGLRLAFNVTGDDFDAALNAAGAMPLPPYIAGKRAPDARDLEDYQTIWARRAGAVAAPTASLHFDENLMAALSARGVDVTFVTLHVGAGTFLPVTVDDVTSHKMHAEWGEVSEAAAAEINATKAAGGRIIPVGTTALRLIESAAREGEIHPFEGTTEIFIYPGYTWQITDALMTNFHLPKSTLLMLVSALMGKDRMDAVYAHAIAQGYRFFSYGDASLLIPSQT

SEQ ID NO: 67582 - protein, 355 aa, Jannaschia sp.
  misc_feature (1)..(355): sp|Q28RM8|QUEA_JANSC S-adenosylmethionine:tRNA ribosylt ransferase-isomerase OS=Jannaschia sp. (strain CCS1) OX =290400 GN=queA PE=3 SV=1
MKLDDFDFDLPDGLIATRPARPRSSARLLVADGPETHDLTVADLPSMLRRGDRLVLNDTRVIPARLTGTRTRMSAQGEVTARIEVTLMEPQADGTWSALAKPMRKLKAGEKIIFSNALQADVHAMDEGLRLAFNVEGDDFDAALNAAGAMPLPPYIAGKRAPDARDYHDYQTIWAKRAGAVAAPTASLHFDEHLMDALTSRGVDVTFVTLHVGAGTFLPVTVDDVTTHKMHAEWGEVRATAAAEINATKAAGGRIIPVGTTALRLIESAAQDGTIHPFEGTTDIFIYPGYRWQITDALMTNFHLPKSTLLMLVSALMGKDRMDAVYAHAIANQYRFFSYGDASLLFPSQKGQTSR

SEQ ID NO: 67583 - protein, 351 aa, Janthinobacterium agaricidamnosum
  misc_feature (1)..(351): tr|A0A3G2EFE3|A0A3G2EFE3_9BURK S-adenosylmethionine:tRN A ribosyltransferase-isomerase OS=Janthinobacterium aga ricidamnosum OX=55508 GN=queA PE=3 SV=1
MYSLSDFDFNLPQENIAQTPLAERSASRLLHLDGETVVDRQFADIVGQLAAGDLLVMNDTRVLKARFFGVKESGGKIEALVERVLDDRTVLAQVRASKSPPPGCRIRLADAFDVTVGQRAGEFFTLHFEADVFELIEAHGRLPLPPYIEHDADEFDETRYQTVFNKVPGAVAAPTAGLHFDQALLDQLKAKGVNFAYVTLHVGAGTFQPVRTEVLAEHKMHTEWYTMPQETVDAVRAAQQAGRDVVAVGTTSLRALESASQSGQLVAGSADTALFITPGYAFKTVTRLITNFHLPKSTLLMLVSAFAGYEPIRNAYAHAIAQNYRFFSYGDAMLLTTQSRAALNLDTPVKD

SEQ ID NO: 67584 - protein, 349 aa, Janthinobacterium agaricidamnosum
  misc_feature (1)..(349): tr|W0V028|W0V028_9BURK S-adenosylmethionine:tRNA ribosy ltransferase-isomerase OS=Janthinobacterium agaricidamn osum NBRC 102515 = DSM 9628 OX=1349767 GN=queA PE=3 SV= 1
MYSLSDFDFNLPQENIAQIPLPQRSASRLLHLDGDTLADRSFADIVGLLQAGDLLVMNDTRVLKARFFGVKESGGKIEALVERVLDNRTVLAQVRASKSPPPGCRIRLADAFDVTVGQRAGEFFTLHFDADVFDLIEAHGRLPLPPYIEHDADEFDETRYQTVFNKVPGAVAAPTAGLHFDQALLDQLKAKGVNFAYVTLHVGAGTFQPVRTEVLAEHKMHTEWYTMPQETVDAVRTAKAAGRDVVAVGTTSLRALESASQSGELLAGSADTALFITPGYQFKTVTRLITNFHLPKSTLLMLVSAFAGYQPIRDAYAHAIARNYRFFSYGDAMLLTTQSRAAPLGNPES

SEQ ID NO: 67585 - protein, 351 aa, Janthinobacterium lividum
  misc_feature (1)..(351): tr|A0A377RQ34|A0A377RQ34_9BURK S-adenosylmethionine:tRN A ribosyltransferase-isomerase OS=Janthinobacterium liv idum OX=29581 GN=queA PE=3 SV=1
MYSLSDFDFNLPQENIAQTPLAERSASRLLHLDGETLVDRQFADIVGLLQAGDLLVMNDTRVLKARFFGVKESGGKIEALVERVLDDRTVLAQVRASKSPPPGCRIRLADAFDVTVGQRAGEFFTLHFEADVFELIEAHGRLPLPPYIEHDADEFDETRYQTVFNKVPGAVAAPTAGLHFDQALLDQLKAKGVNFAYVTLHVGAGTFQPVRTEVLSEHKMHTEWYTMPQETVDAVRAAQLAGRDVVAVGTTSLRALESASQSGQLVAGSADTALFITPGYAFKTVTRLITNFHLPKSTLLMLVSAFAGYAPIRSAYAHAIAQNYRFFSYGDAMLLTTQSRAALNLDTPVKD

SEQ ID NO: 67586 - protein, 351 aa, Janthinobacterium lividum
  misc_feature (1)..(351): tr|A0A377QYU9|A0A377QYU9_9BURK S-adenosylmethionine:tRN A ribosyltransferase-isomerase OS=Janthinobacterium liv idum OX=29581 GN=queA PE=3 SV=1
MYSLSDFDFNLPQENIAQTPLAERSASRLLHLDGDTLADRQFADIVGLLQAGDLLVMNDTRVLKARFFGVKESGGKIEALVERVLDDRTVLAQVRASKSPPPGCRIRLADAFDVTVGQRAGEFFTLHFEADVFELIEAHGRLPLPPYIEHDADEFDETRYQTVFNKVPGAVAAPTAGLHFDQALLDQLKAKGVNFAYVTLHVGAGTFQPVRTEVLAEHKMHTEWYTMPQETVDAVRAAQLAGRDVVAVGTTSLRALESASQSGQLVAGSADTALFITPGYAFKTVTRLITNFHLPKSTLLMLVSAFAGYEPIRSAYAHAIAQNYRFFSYGDAMLLTTQSRAALNLDTPVKD

SEQ ID NO: 67587 - protein, 341 aa, Janthinobacterium sp.
  misc_feature (1)..(341): sp|A6SUU3|QUEA_JANMA S-adenosylmethionine:tRNA ribosylt ransferase-isomerase OS=Janthinobacterium sp. (strain M arseille) OX=375286 GN=queA PE=3 SV=1
MYSLSDFDFELPQELIAQTPLAERSASRLLQVLPEQMTDRNFAYIVDLLSPGDLLVFNDTRVLKARFFGIKETGGKVEVLVERVIDQRNVHAQIRASKSPAVGMRIRLADAFDVIVGERAGEFYELQFPDDVFELIEAHGRLPLPPYIEHAADAYDETRYQTVYAKTPGAVAAPTAGLHFDQALLDALTAKGVKLAYITLHVGAGTFQPVRNENLAEHNMHSEWYTISQQTVDLVKATQVAGGNIVAVGTTSMRALESASQSGSLQAGSADTRLFITPGYTFKTVTRLITNFHLPKSTLLMLVSAFAGYDTIRAAYQHAISQRYRFFSYGDAMFLTRMPPC

SEQ ID NO: 67588 - protein, 346 aa, Janthinobacterium sp.
  misc_feature (1)..(346): tr|A0A349KYT3|A0A349KYT3_9BURK S-adenosylmethionine:tRN A ribosyltransferase-isomerase OS=Janthinobacterium sp. OX=1871054 GN=queA PE=3 SV=1
MYSLSDFDFDLPPENIAQIPLPERSASRLLHLDGDALIDRRFADIVEQLQAGDLLVMNDTRVLKARFFGVKESGGKIEVLVERVLDSRTVLAQVRASKSPPPGCKLRLADAFDVTVGVRAGEFFTLHFDADVFELIEAHGRLPLPPYIEHTADAFDETRYQTVFNKVPGAVAAPTAGLHFDQALLDQLQAKGVRFAYVTLHVGAGTFQPVRTEVLAEHKMHTEWYTLPQATVDAVEATRAAGRDVVAVGTTSLRALESASQTGRLLAGSADTALFITPGYQFKTVTRLITNFHLPKSTLLMLVSAFAGYARIRAAYAHAIAQNYRFFSYGDAMLLTTQSRAPRLPE

SEQ ID NO: 67589 - protein, 351 aa, Janthinobacterium svalbardensis
  misc_feature (1)..(351): tr|A0A290X2Y3|A0A290X2Y3_9BURK S-adenosylmethionine:tRN A ribosyltransferase-isomerase OS=Janthinobacterium sva lbardensis OX=368607 GN=queA PE=3 SV=1
MYSLSDFDFNLPQENIAQTPLAQRSASRLLHLDGDALVDRSFADIVGLLQAGDLLVMNDTRVLKARFFGVKESGGKIEALVERVLDDRTVLAQVRASKSPPPGCRIRLADAFDVTVGQRAGEFFTLHFEADVFELIEAHGRLPLPPYIEHDADEFDETRYQTVFNKVPGAVAAPTAGLHFDQALLDQLKAKGVNFAYVTLHVGAGTFQPVRTEVLAEHKMHTEWYTMPQDTVDAVRATQLAGRDVVAVGTTSLRALESASQSGQLVAGSADTALFITPGYAFKTVTRLITNFHLPKSTLLMLVSAFAGYAPIRNAYAHAIAQNYRFFSYGDAMLLTTQSRAALNLDTPVKD

SEQ ID NO: 67590 - protein, 340 aa, Jatrophihabitans endophyticus
  misc_feature (1)..(340): tr|A0A1M5EBQ1|A0A1M5EBQ1_9ACTN S-adenosylmethionine:tRN A ribosyltransferase-isomerase OS=Jatrophihabitans endo phyticus OX=1206085 GN=SAMN05443575_0846 PE=3 SV=1
MSGPRVPSGVAGGVAATEPPSARDGVRLLVAHRGGVEHARFPALVDYLSAGDLLVVNTSRTLPAAVDGVRAYGRAVTVHFATALDDGTWVVEIRPREDAAGPVPDARAGETITLPDRVPMRLLAAHPAGQRRLWRASVAVEGGVAALLDRHGRPIRYSYVARPHPLPDYQTVFAREPGSAEMPSAGRPFTVELVTELVTRGIAVAPIVLHTGVSSQEPGEQPQPERFRVPGATARYVNTTRAAGGRVVAVGTSVTRALESATDDVGVVRERRGWTDLVLGPAREARVVSGLLTGWHESGASHLDLLRAVAGRELVERAYAAASARGYRWHEFGDSCLLLP

SEQ ID NO: 67591 - protein, 360 aa, Jatrophihabitans sp.
  misc_feature (1)..(360): tr|A0A286EV28|A0A286EV28_9ACTN S-adenosylmethionine:tRN A ribosyltransferase-isomerase OS=Jatrophihabitans sp. GAS493 OX=1907575 GN=SAMN05892883_3994 PE=3 SV=1
MTALLPTPTTIFRLTDDLTAAEPPEQRGLSRDGVRLLVAQHRPDQLEHISHHRFRELPDFLGAGDLLVVNNSETLAGEIEGSWRHSEPVIVHFATGLDDGTWVVELRSAPDGAAPVLTATAGEVVRLPQQLTLRLIEAYGGIAASPTGEGNRLWRAEVDSAVAVAVYLARYGRPISYGYLRRHWPLRDYQTVFSREPGSAEMPSAGRPFTTELVTELVSRGVGLAPITLHTGVSSQDAGEPPQPERFEVGASTARLVNQTRRAGGRVVAVGTTVTRALESAADDAGEVQPCSGWTEHIVGGENPARVVTGLITGLHNPEASHLLLVESVAGARLTQLAYDAAVAHRYLWHEFGDSCLLLP

SEQ ID NO: 67592 - protein, 151 aa, Jejuia pallidilutea
  misc_feature (1)..(151): tr|A0A090VS91|A0A090VS91_9FLAO S-adenosylmethionine:tRN A ribosyltransferase-isomerase OS=Jejuia pallidilutea O X=504487 GN=JCM19301_749 PE=3 SV=1
MLKRLEIKGVNFAEVTLHVGLGTFNPVEVEDLSKHKMDSEEIKIGPEAVDIINTGIKNRKRVCAVGTTAMRTIESAVSSSGLLNEMDGWTNKFIFPPYDFSIANCMVTNFHTPKSTLLMMISAFAGHDFVMEAYQEAIKEKYKFYSYGDAC

SEQ ID NO: 67593 - protein, 182 aa, Jejuia pallidilutea
  misc_feature (1)..(182): tr|A0A090VQ94|A0A090VQ94_9FLAO S-adenosylmethionine:tRN A ribosyltransferase-isomerase OS=Jejuia pallidilutea O X=504487 GN=JCM19301_748 PE=3 SV=1
MKLSNFGFDLPAELLAEYPSENRDESRLMVLNRKDQTIEHKQFKDLINYFNEDDVMILNNTKVFPARLYGNKEKTGARIEVFLLRELNEEQRLWDVLVDPARKIRIGNKLYFGEDESLVAEVIDNTTSRGRTLRFLYDGSYQEFRIKLRELGETPLPKYIKREVEPEDEDRYQTIFAKNEVL

SEQ ID NO: 67594 - protein, 348 aa, Jeongeupia sp.
  misc_feature (1)..(348): tr|A0A1D9BHH6|A0A1D9BHH6_9NEIS S-adenosylmethionine:tRN A ribosyltransferase-isomerase OS=Jeongeupia sp. USM3 O X=1906741 GN=queA PE=3 SV=1
MQLSDFDYFLPEHLIAQFPPEERGASRLLHVDGRTLHDGRFRDLPTLLRAGDLLVFNDTKVIKARLFGKKDSGGAVEALVERVLDTHRALAHVRASKAPKPGSRLVFGDRWHATMVERRGDLFLLEFDRTGADGNASVLDILEQAGALPLPPYITHTPDDDDARRYQTVYARDPGAVAAPTAGLHFTDALLERLRAQGVGTAFLTLHVGAGTFMPVRVDDIAEHTMHHERYSIPQATQDAIRATKAAGGRVIAVGTTSLRALEASSQQGLLAEPEGDTDIFITPGYAFRVVDRLITNFHLPKSTLLMLVAAFAGLETMKAAYAHAVASEYRFFSYGDAMLLERQHSGQ

SEQ ID NO: 67595 - protein, 348 aa, Jeotgalibaca dankookensis
  misc_feature (1)..(348): tr|A0A1S6INC4|A0A1S6INC4_9LACT S-adenosylmethionine:tRN A ribosyltransferase-isomerase OS=Jeotgalibaca dankooke nsis OX=708126 GN=queA PE=3 SV=1
MKTSDFDFDLPEELIAQVPLKDRTSSRLLLLDSDTGQIEDSHFPSILDELKAGDALVLNNTRVLPARLHGVKPDTGAHMEVLLLNNTEGDRWETLVKPAKRAKVGTVLSFGKGQLIAVVKEVLDHGGRIIEFQYEGIFLEILEALGEMPLPPYIKEKLDDAERYQTVYAKENGSAAAPTAGLHFTKELIAQAEAKGVQIVYLTLHVGLGTFRPVSVEDLDSHEMHSEFYELSEESAQKLKEVKQTGGRIIAVGTTSIRTLETIGTKFNGEIKADSGWTDIFISPGYTFKLVDGFITNFHLPKSTLIMLVSAFAGRERVLEAYEHAVREKYRFFSFGDAMFVKPKSESI

SEQ ID NO: 67596 - protein, 342 aa, Jeotgalibaca sp.
  misc_feature (1)..(342): tr|A0A3Q9BN47|A0A3Q9BN47_9LACT S-adenosylmethionine:tRN A ribosyltransferase-isomerase OS=Jeotgalibaca sp. H21T 32 OX=2496265 GN=queA PE=3 SV=1
MKTSDFDFYLPEELIAQTPLENRADSRLLIVDSSSGDVSDNRFPAIINELQAGDALVLNNTRVLPARLHGVKPDTGGHLEVLLLNNQEGDTWETLVKPAKKAKKGTRVSFGGDTLTAVVTEELEHGGRIIEFEYEGIFLEVLESLGEMPLPPYIKERLDDPDRYQTVYAKENGSAAAPTAGLHFTKDLLEQIEEKGIHIAYLTLHVGLGTFRPVSADELDDHEMHSEFYYLPAETAEILNRVKKNGGRIIAVGTTSIRTLETVGTKYAGEIKADSDWTSIFISPGYKFKVVDAFITNFHLPKSTLVMLVSAFAGRETILNAYAHAVKERYRFFSFGDAMFIK

SEQ ID NO: 67597 - protein, 343 aa, Jeotgalibaca sp.
  misc_feature (1)..(343): tr|A0A1U7EB36|A0A1U7EB36_9LACT S-adenosylmethionine:tRN A ribosyltransferase-isomerase OS=Jeotgalibaca sp. PTS2 502 OX=1903686 GN=queA PE=3 SV=1
MLKTSDFDFYLPEELIAQTPLENRTASRLLKLDSSANQLEDKHFYDVIDEFEAGDVLVLNNTRVLPARLHGVKPDTGGHLEVLLLNNEEGDRWETLVKPAKKAKIGTKISFGDGMLTAEVVGEKDHGGRIIEFSYEGIFLEVLESLGEMPLPPYIKERLDDPDRYQTVYAKENGSAAAPTAGLHFTQELLAKIEAKGVKVAYLTLHVGLGTFRPVSADDLSEHEMHSEFYSLPQETADLLNEAKAKGGRIIAVGTTSIRTLETVGTKFNGEIKADSDWTSIFIAPGYQFKVVDAFITNFHLPKSTLVMLVSAFAGRETVLNAYAHAVKERYRFFSFGDAMFVK

SEQ ID NO: 67598 - protein, 341 aa, Jeotgalibacillus alimentarius
  misc_feature (1)..(341): tr|A0A0C2W9U4|A0A0C2W9U4_9BACL S-adenosylmethionine:tRN A ribosyltransferase-isomerase OS=Jeotgalibacillus alim entarius OX=135826 GN=queA PE=3 SV=1
MNINDFDFDLPEELIAQVPLEDRTSSRLMVLDKETGQVEHQSFTHILDYLHEGDCLVLNDTKVLPARLIGEKTETGAAIEVLLLKQIEGDTWETLVKPAKRIKPGTVITFGDGLLTAECIETGDQGARILEYKYDGIFYELLDQLGDMPLPPYIKEKLDDKDRYQTVFAKERGSAAAPTAGLHFTEEILDEIRSRGVNIAFITLHVGLGTFRPVSVDSIEEHDMHSEYYQLSEENAELLNRTRENGGRIITVGTTSTRTLETIADEKGIFKPQSGWTDIFIYPGYTFKASDVLLTNFHLPKSTLIMLVSAMAGRENTLAAYRAAVEEKYRFFSFGDAMLIK

SEQ ID NO: 67599 - protein, 341 aa, Jeotgalibacillus campisalis
  misc_feature (1)..(341): tr|A0A0C2VNU3|A0A0C2VNU3_9BACL S-adenosylmethionine:tRN A ribosyltransferase-isomerase OS=Jeotgalibacillus camp isalis OX=220754 GN=queA PE=3 SV=1
MNINDFDFYLPEELIAQVPLQDRTSSRLMVLDKQTGGISHESFRSIESYLQKGDCLVLNDTKVLPARLIGEKENTGAAIELLLLKQVNGDQWETLAKPAKRIKVGTTVVFGDGELKAVCTSIGEQGSRIMEFSYEGIFYELLDHLGDMPLPPYIKEKLDDRDRYQTVFAKERGSAAAPTAGLHFTDELLETLKQKGVNIAFITLHVGLGTFRPVSVDSIEEHDMHSEYYQLNEETAQLLNQVRKSGGKIITVGTTSTRTLETIADSDGLFRASSGWTNIFIYPGYTFKAVDALLTNFHLPKSTLIMLVSALAGQDETLLAYQEAVKEKYRFFSFGDAMLIK

SEQ ID NO: 67600 - protein, 341 aa, Jeotgalibacillus malaysiensis
  misc_feature (1)..(341): tr|A0A0B5AMW4|A0A0B5AMW4_9BACL S-adenosylmethionine:tRN A ribosyltransferase-isomerase OS=Jeotgalibacillus mala ysiensis OX=1508404 GN=queA PE=3 SV=1
MNINDFDFELPEELIAQVPLEDRTSSRLMVLDKKTGKVEHQSFKHILNYLHEGDCLVLNDTKVLPARLIGEKTETGAAIEVLLLKQLEGDTWETLVKPAKRVKPGTVITFGDGLLTAECVETGDQGARILEFSYDGIFYELLDQLGDMPLPPYIKEKLDDKDRYQTVFAKERGSAAAPTAGLHFTEEILEEIKAKGVKVAFITLHVGLGTFRPVSVDSIEEHDMHSEYYQLSEENASVLNETRAGGGRIITVGTTSTRTLETIADDAGHFKAQSGWTDIFIYPGYEFKASDVLLTNFHLPKSTLIMLVSAMAGREHTLAAYEAAVKERYRFFSFGDAMLIK

SEQ ID NO: 67601 - protein, 342 aa, Jeotgalibacillus marinus
  misc_feature (1)..(342): tr|A0A0M0KWH8|A0A0M0KWH8_9BACL S-adenosylmethionine:tRN A ribosyltransferase-isomerase OS=Jeotgalibacillus mari nus OX=86667 GN=queA PE=3 SV=1
MKVDLFDFELPERLIAQVPLEQRDASRLMVLDKHTGELTDSSFKHIISFFKEGDCLVLNNTRVLPARLFGTKEDTGAKVELLLLKQEAGDRWETLAKPAKRVKKGTVVTFGDGRLKAVCTEELEHGGRKMEFQYDGIFYEVLESLGEMPLPPYIKEQLDDRERYQTVYSKEIGSAAAPTAGLHFTEEILQQLKDKGVQIEFITLHVGLGTFRPVSADDVEEHNMHAEFYQMSEETAAALNKVREKGGRIISVGTTSTRTLETIAGEHDGQFKASSGWTSIFIYPGYEFKAIDGMITNFHLPKSSLIMLVSALAGRENVLRAYNHAVEEEYRFFSFGDAMLIL

SEQ ID NO: 67602 - protein, 338 aa, Jeotgalibacillus proteolyticus
  misc_feature (1)..(338): tr|A0A2S5GCS8|A0A2S5GCS8_9BACL S-adenosylmethionine:tRN A ribosyltransferase-isomerase OS=Jeotgalibacillus prot eolyticus OX=2082395 GN=C4B60_08415 PE=3 SV=1
MLKGAEKFTIPPHLHASVPLEMLGQTRDSARLLVLNRFTGETDHSRFAQLGDFLSEGDVLVLNNSRTIPAVLKGRQGGNEVEVRLSRKIKEGEWDGLVLNRQLATEVIHFNGDLQAVVVGSGSENPLVRFRFNKKGTDFYNFLYKEAEPVRYEYVKASWPLESYQNVYSSVPGSVEMASAGRAFTWRLLRSLESQGVKLAFIQLHAGLSYYGDDQWPSPKNHPEEFCLPKETVQLIKEAKRNGNRVIAAGTTVVRALETAVTQGGDSQAMRGLTHLHVSKETPLQVADGLLTGFHEPEASHLDMLGAFIDEEVLLRTYKEALEKEYLWHEFGDINLIL

SEQ ID NO: 67603 - protein, 341 aa, Jeotgalibacillus proteolyticus
  misc_feature (1)..(341): tr|A0A2S5GF36|A0A2S5GF36_9BACL S-adenosylmethionine:tRN A ribosyltransferase-isomerase OS=Jeotgalibacillus prot eolyticus OX=2082395 GN=queA PE=3 SV=1
MDIKDFDFHLPEELIAQVPLEDRTSSRLMVMNKKTGDITHEGFKKIVSYLSPGDCLVLNDTKVLPARLIGEKEGTGAAVELLLLKQLEGDRWETLAKPAKRLKPGTVLVFGNGALKATCIDSGDQGSRIMEFSYDGIFYELLDQLGDMPLPPYIKEKLEDRDRYQTVFARERGSAAAPTAGLHFTEELLNELRKKGVKIAFLTLHVGLGTFRPVSVDSIEDHDMHSEFYQLTAKTADLLNEVRQNGGKIITVGTTSTRTLETIADEKGLFKEASGWTSIFIYPGYTFRAVDALITNFHLPKSTLIMLVSAMAGREATLAAYEEAVKEKYRFFSFGDAMLIK

SEQ ID NO: 67604 - protein, 341 aa, Jeotgalibacillus salarius
  misc_feature (1)..(341): tr|A0A4Y8LEF0|A0A4Y8LEF0_9BACL S-adenosylmethionine:tRN A ribosyltransferase-isomerase OS=Jeotgalibacillus sala rius OX=546023 GN=queA PE=3 SV=1
MNIHDFDFELPEELIAQVPLEDRTSSRLMVLDKVTGKVEHQSFKNILDYLHEGDCLVLNDTKVLPARLIGEKKETGAAIEVLLLKQLEGERWETLVKPAKRIKPGTVITFGEGLLTAECIDTGDQGGRILEFSYDGIFYELLDQLGDMPLPPYIKEKLDDKDRYQTVFAKERGSAAAPTAGLHFTEDILDEIRSKGVSIAFITLHVGLGTFRPVSVDSIEEHDMHSEYYQLSAENADILNQARANGGKIITVGTTSTRTLETIADEQGHFEAQSGWTDIFIYPGYTFKASDVLLTNFHLPKSTLIMLVSAMAGREQTLTAYQAAVEKKYRFFSFGDAMLIK

SEQ ID NO: 67605 - protein, 341 aa, Jeotgalibacillus soli
  misc_feature (1)..(341): tr|A0A0C2VKP1|A0A0C2VKP1_9BACL S-adenosylmethionine:tRN A ribosyltransferase-isomerase OS=Jeotgalibacillus soli OX=889306 GN=queA PE=3 SV=1
MKIEDFDFYLPDELIAQVPLEDRTSSRLMIVDKHTGAVSHQSFIEIIDYLNDGDCLVLNDTKVLPARLIGQKEDTGATIELLLLKQREGDQWETLVKPAKRLKVGTVISFGDGRLKATCKSIGEQGARVVEFSYEGIFYELLDQLGDMPLPPYIKEKLDDRDRYQTVFAKERGSAAAPTAGLHFTEELLERIHAKGVRIAFVTLHVGLGTFRPVSVNSIEDHDMHSEYYQMSKETAELLNNTKAQGGRIITVGTTSTRTLETIATENGHFAEANGWTSIFIYPGYTFKAVDALITNFHLPKSTLIMLVSALAGREATLSAYREAVEKNYRFFSFGDAMLIK

SEQ ID NO: 67606 - protein, 340 aa, Jeotgalibacillus sp.
  misc_feature (1)..(340): tr|A0A4R5XJA0|A0A4R5XJA0_9BACL S-adenosylmethionine:tRN A ribosyltransferase-isomerase OS=Jeotgalibacillus sp. S-D1 OX=2552189 GN=E2R51_13130 PE=3 SV=1
MHKVSGEFQIPPHLHASVPLEMKGLSRDSARMMVVNRTTGKAVHTLFTRLGDYLYAGDVVVLNNSRTIPAVLKGKQGKKQLEIRLSRKVKANQWDVLVIGEYCHKGGPISFIKGIQGEIVGSGSENPLMRMQFSVHGAEFYDFLYKAGEPVRYEYIETSWALDMYQTVYGSVPGSVEMASAGRAFSWKLLQSLKEMGIRIAFVQLHAGLSYYGDDRWPAPINHPEEFFVPEETAAMIQQAKKKGNRVVAVGTTVVRALESAVTAKGELQAKSGITDLYITKESSLKVVDCLLTGLHEPEASHMDLLTAFISENLLLDSYQQALMENYHWHEFGDVNLILN

SEQ ID NO: 67607 - protein, 341 aa, Jeotgalibacillus sp.
  misc_feature (1)..(341): tr|A0A4R5XS26|A0A4R5XS26_9BACL S-adenosylmethionine:tRN A ribosyltransferase-isomerase OS=Jeotgalibacillus sp. S-D1 OX=2552189 GN=queA PE=3 SV=1
MNINDFDFHLPEELIAQVPLEDRTASRLMVLDKQTGDVSHRSFKDIVSFLNKGDCLVLNDTKVLPARLIGEKEGTGAAIELLLLKQIEGDRWETLVKPAKRLKIGTTVIFGDGRLRAVCAGIGDQGSRIMEFSYEGIFYELLDQLGDMPLPPYIKEKLDDRDRYQTVFAKERGSAAAPTAGLHFTEELLDRLRDGGVTIAFITLHVGLGTFRPVSVDSIEEHDMHSEYYQISNETACTLNEVREAGGRIITVGTTSTRTLETIADDQGRFSESSGWTNIFIYPGYTFKAVDALITNFHLPKSTLIMLVSALAGRNETLAAYQEAVKERYRFFSFGDAMFIK

SEQ ID NO: 67608 - protein, 340 aa, Jeotgalicoccus halophilus
  misc_feature (1)..(340): tr|A0A1G9E2X7|A0A1G9E2X7_9STAP S-adenosylmethionine:tRN A ribosyltransferase-isomerase OS=Jeotgalicoccus haloph ilus OX=586411 GN=queA PE=3 SV=1
MKLDEFDFHLPENLIAQTPLKERTNSRLLAVNKKTGELSDKHFYNVADYFEAGDVLVLNDTKVLPARLFGIKEDTGAKIEMLLLKPIDTGYEVLIRPSKKVSPGTKVVFGEGKLQAVCIEKFDEGIHHMELIYDGILENVLDELGEMPLPPYIKEKLDDKDRYQTVFARESGSAAAPTAGLHFTETLLAEIKNKGVDIVYITLHVGLGTFRPVAAETIEDHKMHSEFYTMTAEAADMLNQAKADGKKIISVGTTSTRTLETIIHDHGEFKAASGFTDIFIYPGFEYKAVDVLITNFHLPKSSLVMLVSAFSSRENILNAYAHAVESKYRFFSFGDAMILY

SEQ ID NO: 67609 - protein, 340 aa, Jeotgalicoccus halotolerans
  misc_feature (1)..(340): tr|A0A3E0B1E2|A0A3E0B1E2_9STAP S-adenosylmethionine:tRN A ribosyltransferase-isomerase OS=Jeotgalicoccus haloto lerans OX=157227 GN=queA PE=3 SV=1
MKLEEFDFHLPENLIAQTPLKERTNSRLLAVNKTTGELTDKHFYDVADYFNPGDVLVLNDTKVLPARLFGIKEETGAKIEMLLLKPLDGGYEVLIRPAKKISIGTRINFGEGKLVAECTAKFEEGIHHMKLIYDGILEQVLDELGEMPLPPYIKEKLDDKDRYQTVFARESGSAAAPTAGLHFTETLLKEIQDKGVEIVYITLHVGLGTFRPVAAETIEDHKMHSEFYTMTADAAEKLNRAKDAGGKIISVGTTSTRTLETIMHEHGEFKEASGFTDIFIYPGFIYKAVDVLITNFHLPKSSLVMLVSAFSSREHILNAYAHAVDSEYRFFSFGDAMILY

SEQ ID NO: 67610 - protein, 340 aa, Jeotgalicoccus nanhaiensis
  misc_feature (1)..(340): tr|A0A4Y9HM05|A0A4Y9HM05_9STAP S-adenosylmethionine:tRN A ribosyltransferase-isomerase OS=Jeotgalicoccus nanhai ensis OX=568603 GN=queA PE=3 SV=1
MKLEEFDFHLPENLIAQTPLKERTNSRLLAVNKTTGDLTDKHFYDVADYFTPGDVLVLNDTKVLPARLFGIKEETGAKIEMLLLKPLDGGYEVLIRPAKKISIGTRITFGEGKLVAECTAKFEEGIHHMKLIYDGILEQVLDELGEMPLPPYIKEKLDDKDRYQTVFARESGSAAAPTAGLHFTETLLKEIQDKGVEIVYITLHVGLGTFRPVAAETIEDHKMHSEFYMMTADAAEKLNRAKDAGGKIISVGTTSTRTLETIMHEHGEFKEASGFTDIFIYPGFIYKAVDVLITNFHLPKSSLVMLVSAFSSREHILNAYAHAVDSEYRFFSFGDAMILY

SEQ ID NO: 67611 - protein, 340 aa, Jeotgalicoccus saudimassiliensis
  misc_feature (1)..(340): tr|A0A078M3J8|A0A078M3J8_9STAP S-adenosylmethionine:tRN A ribosyltransferase-isomerase OS=Jeotgalicoccus saudim assiliensis OX=1461582 GN=queA PE=3 SV=1
MKLEEFDFHLPENLIAQTPLKDRTSSRLLAVNKAAGELSDKHFYDVADYFNPGDVLVLNDTKVLPARLFGVKEDTGAKIEMLLLKPIDEGYEVLIRPSKKVNIGTRVVFGEGKLTAECTAKFEEGIHHMKLIYDGILENVLDELGEMPLPPYIKEKLDDKDRYQTVFARESGSAAAPTAGLHFTEELMQEIKNKGVEIVYITLHVGLGTFRPVAADTIEDHKMHSEFYTMTADAAKTLNDKKAAGGKIISVGTTSTRTLETIIHDHGEFKEASGFTDIFIYPGFEYKAVDVLITNFHLPKSSLVMLVSAFSSREHILNAYAHAVDSEYRFFSFGDAMILH

SEQ ID NO: 67612 - protein, 340 aa, Jeotgalicoccus sp.
  misc_feature (1)..(340): tr|A0A358JSJ7|A0A358JSJ7_9STAP S-adenosylmethionine:tRN A ribosyltransferase-isomerase OS=Jeotgalicoccus sp. OX =1871619 GN=queA PE=3 SV=1
MKLDEFDFHLPEHLIGQTPLKERTNSRLLAVNKTTGELNDKHFYDVADYFKAGDVLVLNDTKVLPARLFGVKEETGAKIEMLLLKPLDDGYEVLIRPSKKISIGTRITFGEGKLVAECTAKFEEGIHHMKLIYDGILENVLDDLGEMPLPPYIKEKLEDQDRYQTVFARESGSAAAPTAGLHFTEELLKEIEDKGVDIVYITLHVGLGTFRPVAAETIEEHKMHSEFYTMTSSAAETLNNAKANGGKIISVGTTSTRTLETIIHDHGEFKEVSGFTDIFIYPGFEYKAVDVLITNFHLPKSSLVMLVSAFSSREHILNAYAHAVDSEYRFFSFGDAMILY

SEQ ID NO: 67613 - protein, 348 aa, Jhaorihella thermophila
  misc_feature (1)..(348): tr|A0A1H5WI60|A0A1H5WI60_9RHOB S-adenosylmethionine:tRN A ribosyltransferase-isomerase OS=Jhaorihella thermophi la OX=488547 GN=queA PE=3 SV=1
MKLSDFDFDLPEDLIATRPVTPRSSARLLVAEGDAITDAIVRDLGNWLRPGDRLVLNDTRVIPARLSGRRHRATPQGEVSARIEVTLLEPRAGGGWAALLKPLKKVKPGEEIAFEGGLSARLGSVEGGQGILRFNLEGDDFDAALARAGQMPLPPYIAARRPADERDREDYQTVFARHSGSVAAPTASLHFDEPLLARLRGMGVQFTHVTLHVGAGTFLPVKVEDVTTHKMHAEWGRVTEQAAAEITATRASGGRIIPVGTTALRLIESAARDGVIRPWEGKTDIFIYPGFRFQVTDALMTNFHLPKSTLMMLVSALMGQERIRRIYDHAIRERYRFFSYGDASLLIP

SEQ ID NO: 67614 - protein, 364 aa, Jiella sp.
  misc_feature (1)..(364): tr|A0A4Y8RU64|A0A4Y8RU64_9RHIZ S-adenosylmethionine:tRN A ribosyltransferase-isomerase OS=Jiella sp. CBS5Q-3 OX =2558362 GN=queA PE=3 SV=1
MRVDLFDFDLPEERIALRPAVPREAARCLHVGSGGRLADHTIGDLPDLLAPGDVLVFNDTRVIPARLSGTRRREGVTTGEGIARVEATLHMRLAQDCWKAFLRPAKRVKAGDRIVFGSESDAACLMAGLVASVEERGEGGEATLRFELSGPALDEAIAAIGHIPLPPYIASKRAEDEADRRDYQTIFAKESGAVAAPTAGLHFTPELMERFAARGVATEFLTLHVGAGTFLPVKADDTADHRMHAEIGHVDEATATRLNAAREAGGRLVAVGTTSLRLLESAAGEDGIVRPFAGPTEIFITPGYRFRAVDRLVTNFHLPRSTLFMLVSAFSGLETMRAAYAHAIEAGYRFYSYGDACLLDPQDF

SEQ ID NO: 67615 - protein, 402 aa, Jiulongibacter sediminis
  misc_feature (1)..(402): tr|A0A0N8H9X9|A0A0N8H9X9_9BACT S-adenosylmethionine:tRN A ribosyltransferase-isomerase OS=Jiulongibacter sedimi nis OX=1605367 GN=queA PE=3 SV=1
MLSPIHIEDYNYELPDEKIAKYPVEPRDSSKLLLLKNGEISSESFSNLVNELPPKAHLVFNNTKVIPARLYFRKETGALIEIFLLNPVSFGGEISQNMETFGPVVWQCMIGNKKKWKTGALRREFEIEGQSLEVSAEITDTEKNLIRFKWSGNEITFASLVKAFGEIPLPPYLNRNTEEKDLETYQTVYSEKEGAVAAPTAGLHFTKNTFAELSKAKIPTSYITLHVGAGTFQPVKAGNALEHDMHSEQMVFNKEFIKKLIENHETVIPVGTTSMRSLESLYWFGVKLIKEQENSVFQIPKLYPYQWGNQTLPEPKEALQAIDKFLEEKQVKQLTGSTEIFIFPGYQFRICKGIITNFHQPKSTLLLLISALIGEKWKEVYDFALQNKFRFLSYGDSSLLLP

SEQ ID NO: 67616 - protein, 350 aa, Jiulongibacter sediminis
  misc_feature (1)..(350): tr|A0A0P7CB11|A0A0P7CB11_9BACT S-adenosylmethionine:tRN A ribosyltransferase-isomerase OS=Jiulongibacter sedimi nis OX=1605367 GN=queA PE=3 SV=1
MKLSQFKFDLPHSLIAMQPKEQRDGARMMVVDRATGKIEHKMFTDIVDYFDEGDIMVTNNTKVFPARLYGSKEKTGAKIEVFLLRELNREMRLWDVLVDPARKIRVGNKLYFGESDLVAEVIDNTTSRGRTIRFLFDGDHEEMMQTIHELGETPLPKDIIQREVNDLDRERFQTIFATEEGAVSAPTAGMHFTKNIMRKMQIKGVDFSPITLHIGIGTFRGVEVEDLTKHKTDSENFSIPQATCDVVNTALDSGKRVCAVGTTALKTLESSVSASDRLKAIENSWTDKFLFPPYEFKIGNSLLTNFHLPQSIVLMSACAFGGYDLIMEAYQVAIKEKYEFFTYGDVMLIL

SEQ ID NO: 67617 - protein, 343 aa, Johnsonella ignava
  misc_feature (1)..(343): tr|G5GJK0|G5GJK0_9FIRM S-adenosylmethionine:tRNA ribosy ltransferase-isomerase OS=Johnsonella ignava ATCC 51276 OX=679200 GN=queA PE=3 SV=1
MKKSDFYYELPQELIAQDPLEVRSLSRLLVLHRTGAGIGIEHRQFTDILEYLKPGDCLVLNETRVIPARLFALKETTGAKIELLLLRRLSEGSWECIVKPGKRCRENTVLIFGDGLLKGVITGIGTGGNRIIKFEYNGIFEEILDKLGHMPLPPYIKHELKDKNRYQTVYAKNDGSAAAPTAGLHFTKELLEKVKDMGVNLAKITLHVGLGTFRPVKEDDILKHHMHSEYYIIDEEAANSINFAKQNGYRVICVGTTACRTVESASDNNGAVHAKSDMTDIFIYPGYKFKVMDGLITNFHLPESTLIMLVSAFAGHGRTLDAYREAVEHNYRFFSFGDAMLII

SEQ ID NO: 67618 - protein, 361 aa, Jonquetella anthropi
  misc_feature (1)..(361): tr|C9M7E6|C9M7E6_9BACT S-adenosylmethionine:tRNA ribosy ltransferase-isomerase OS=Jonquetella anthropi E3_33 E1 OX=645512 GN=queA PE=3 SV=1
MSAEKAGLECRPAEETPHEPDFFSVQTYQYDLPQEQIAQVPVSPRDSCRLMTLDRRTGRVGHKVFRDLLDLLRPDDLLVRNDTRVLAGRLTGRKISGTAEVEVLLLRQEKENTWQALVRPGRRLPPGTEVDLQGAIAVVGPSISDDGVRLVTFSEGLDVKVWCDLHGQMPLPPYITSRESKNDDYQTVYAKDANSAAAPTAGLHFTEGLLAAIREKGVQILDVTLEVGLGTFRPVSEPDIRRHVMHSERCRVPAATLEAIRAAKSTGRRVIAVGTTVVRTLEGLWSTGKVDDRWFETQLFIYPGFHYQVVDGLITNFHLPGSTLMMLVSAFGGYEPVMAAYREAVAKGYRFFSFGDAMFIV

SEQ ID NO: 67619 - protein, 361 aa, Jonquetella anthropi
  misc_feature (1)..(361): tr|H0UK83|H0UK83_9BACT S-adenosylmethionine:tRNA ribosy ltransferase-isomerase OS=Jonquetella anthropi DSM 2281 5 OX=885272 GN=queA PE=3 SV=1
MSAEKAGLECRPAEETPHEPDFFSVQTYQYDLPQEQIAQVPVSPRDSCRLMTLDRRTGRVGHKVFRDLLDLLRPDDLLVRNDTRVLAGRLTGRKISGTAEVEVLLLRQEKENTWQALVRPGRRLPPGTEVDLQGAIAVVGPSISDDGVRLVTFSEGLDVKAWCDLHGQMPLPPYITSRESKNDDYQTVYAKDANSAAAPTAGLHFTEGLLAAIREKGVQILDVTLEVGLGTFRPVSEPDIRRHVMHSERCRVPAATLEAIRAAKSTGRRVIAVGTTVVRTLEGLWSTGKVDDRWFETQLFIYPGFHYQVVDGLITNFHLPGSTLMMLVSAFGGYEPVMAAYREAVAKGYRFFSFGDAMFIV

SEQ ID NO: 67620 - protein, 349 aa, Joostella marina
  misc_feature (1)..(349): tr|I3C5W3|I3C5W3_9FLAO S-adenosylmethionine:tRNA ribosy ltransferase-isomerase OS=Joostella marina DSM 19592 OX =926559 GN=queA PE=3 SV=1
MKLSHFNFELPKELLAEYPSEHRDESRLMVLHRKEQKIEHKMFKDLIDYFDEGDVMVLNNTKVFPARLFGNKEKTGARIEVFLLRELNEEQRLWDVLVDPARKIRIGNKLYFGDDESLVAEVIDNTTSRGRTLRFLYDGSYEEFRKKLNDLGETPLPKYIKREVEETDEERYQTIYAKTEGAVAAPTAGLHFSKHLLKRLEIKGIDFAELTLHVGLGTFNPVEVEDLSKHKMDSEELFINDKAVEIVNSAKKNKRKVCAIGTTAMRGLESSVSSDLKLNPYEGWTNKFIFPPYDFSIANCMVTNFHTPKSTLLMMISAFAGHDFVMKAYKEAIKEGYKFYSYGDAMLIL

SEQ ID NO: 67621 - protein, 360 aa, Kaistia algarum
  misc_feature (1)..(360): tr|A0A2S5TXX4|A0A2S5TXX4_9RHIZ S-adenosylmethionine:tRN A ribosyltransferase-isomerase OS=Kaistia algarum OX=20 83279 GN=queA PE=3 SV=1
MRVDLFDFELPEENIALRPARPRDAARLMVVRPGEAPEDRIVRDLPDLLRPGDALVFNDTRVIPAQLFGERVRDGVAARIGVTLHMRESGSRWRAFVRPAKKIAEGERILFGECADRACLLAGLAATVTEKGEAGEVVLDFDLSGPALDEAIASVGHIPLPPYIASKRPEDGEDKRDYQTIYAREDGAVAAPTAGLHFTPELFDRLDAMGVARHFVTLHVGAGTFLPVKADDTAEHKMHAERGEVSAAVADALNAVRARGGRVVAVGTTSLRLLESATGEDRIIRPFHGPTSIFITPGYRFRAVDLLMTNFHLPRSTLFMLVSAFSGLETMRAAYAHAIANGYRFYSYGDASLLHPKADE

SEQ ID NO: 67622 - protein, 360 aa, Kaistia soli
  misc_feature (1)..(360): tr|A0A1M5GJA3|A0A1M5GJA3_9RHIZ S-adenosylmethionine:tRN A ribosyltransferase-isomerase OS=Kaistia soli DSM 1943 6 OX=1122133 GN=queA PE=3 SV=1
MRVDLFDFELPDERIALRPAQPRDAARMLVVRPGAALEDRIARELPDLLQPGDALVFNDTRVIPAQLFGERVRDGVAAGIGVTLHMREAGDRWRAFVRPAKKILAGDRILFGETADRACLIAGLAATVAEKGEAGEVVLAFDLAGPALDEAIARVGHIPLPPYIASKRGEDERDRTDYQTIYAREEGAVAAPTAGLHFTPELFERLDARGIARHFVTLHVGAGTFLPVKADDTSDHRMHAERGEVSAETANALNEVRARGGRVVAVGTTSLRLLESAAGEDRIIRPFNAPTSIFITPGYRFRAVDLLMTNFHLPRSTLFMLVSAFSGLETMRAAYEHAIATGYRFYSYGDASLLFPAEIA

SEQ ID NO: 67623 - protein, 356 aa, Kalamiella piersonii
  misc_feature (1)..(356): tr|A0A3A9INZ5|A0A3A9INZ5_9GAMM S-adenosylmethionine:tRN A ribosyltransferase-isomerase OS=Kalamiella piersonii OX=2364647 GN=queA PE=3 SV=1
MRVADFAFELPESLIAHYPQAQRSGCRLLSLDGPSGQLTHGVFTDVLEKLNPGDLLVFNNTRVIPARVYGRKASGGKIEMLVERMLDEKRVLAHVRASKAPKPGAQLLLGDDESVKATMVARHDTLFEIAFEDDRAVLDILNSVGHMPLPPYIDRPDEEADRELYQTVYSARPGAVAAPTAGLHFDEPLLAALREKGVEMAFVTLHVGAGTFQPVRVDSIEEHVMHSEYAEVPQEVVDAVLACKARGNKVVAVGTTSVRSLESAAQASKEALIAPFFDDTQIFIYPGYEYQVIDALITNFHLPESTLIMLVSAFAGYQHTMTAYQAAVAEAYRFFSYGDAMFITKNPQAPHEKVGA

SEQ ID NO: 67624 - protein, 349 aa, Kandleria vitulina
  misc_feature (1)..(349): tr|A0A0R2HDK5|A0A0R2HDK5_9FIRM S-adenosylmethionine:tRN A ribosyltransferase-isomerase OS=Kandleria vitulina DS M 20405 OX=1410657 GN=queA PE=3 SV=1
METLDINLFDYELPEELIAQTPLQKRDTSHLMVLNKETGDITHKHFYDIIDYLKPGDVLVRNNTKVIPARLFGTKEETNAHVEVLLLKNTHDDVWECLCGNAKKIKVDTVISFGDGRLKAKCLEVRDEGIRILEMIYDGIFYEILDQLGIMPLPPYIKEKLNDPDRYQTVYAKVEGSAAAPTAGLHFTPELLEKVREKGVEILDVTLHVGLGTFRPVKVENVLEHHMHSEYYEISEDVANELNKAKKEGRRIIAVGTTSCRTLESNIKKYGQFTAAHENTSIFIYPGYKFEAIDCLITNFHLPKSTLVMLVSALASREKILHAYKVAVEKKYRFFSFGDSMFITNETEL

SEQ ID NO: 67625 - protein, 363 aa, Kandleria vitulina
  misc_feature (1)..(363): tr|A0A1H2QHB2|A0A1H2QHB2_9FIRM S-adenosylmethionine:tRN A ribosyltransferase-isomerase OS=Kandleria vitulina OX =1630 GN=queA PE=3 SV=1
MIAMVEMYTKGLFNMETLDINLFDYELPEELIAQTPLQKRDTSHLMVLNKETGDITHKHFYDIIDYLKPGDVLVRNNTKVIPARLFGTKEETNAHVEVLLLKNTHDDVWECLCGNAKKIKVDTVISFGDGRLKAKCLEVREEGIRILEMIYDGIFYEILDQLGIMPLPPYIKEKLNDPDRYQTVYAKVEGSAAAPTAGLHFTPELLEKIREKGVEILDVTLHVGLGTFRPVKVENVLEHHMHSEYYEISEDVANELNKAKKEGRRIIAVGTTSCRTLESNIKKYGQFTAAHENTSIFIYPGYKFEAIDCLITNFHLPKSTLVMLVSALASREKILHAYKVAVEKKYRFFSFGDSMFITNETEL

SEQ ID NO: 67626 - protein, 350 aa, Kangiella geojedonensis
  misc_feature (1)..(350): tr|A0A0F6RCN7|A0A0F6RCN7_9GAMM S-adenosylmethionine:tRN A ribosyltransferase-isomerase OS=Kangiella geojedonens is OX=914150 GN=queA PE=3 SV=1
MQLQDFHFDLPDELIARYPTEQRSASRLLRLNGESGEVAHSKFFQLVDFLEPNDLLVFNNTRVLAARLFGKKSSGGQVEILIERIESDTEALAHVRANRSPKPGAILVLEEGTELEVLSKDGALFELRLLSGDWHSVMQAVGHMPLPPYIDREDELSDKERYQTVYSKVEGAVAAPTAGLHFDDELLDKIANKGVDTAFVTLHVGAGTFSPVRVDNILEHKMHSEWYELSEEVAEKVKRTREKGGRVIAVGTTSVRCLESASTEGGIKAGSGETDIFIYPGYVFRSVDALITNFHLPESTLMMLVSAFASRKHILDAYNEAVKEQYRFFSYGDSMFITAPFTGQDPDINR

SEQ ID NO: 67627 - protein, 365 aa, Kangiella koreensis
  misc_feature (1)..(365): tr|C7RB44|C7RB44_KANKD S-adenosylmethionine:tRNA ribosy ltransferase-isomerase OS=Kangiella koreensis (strain D SM 16069 / KCTC 12182 / SW-125) OX=523791 GN=queA PE=3 SV=1
MRLEDFHFDLPDELIARYPTEQRSASRLLCLDGQSGAVEHKHFYELVDLLNPNDLLVFNDTRVIPARLFGQKVTGGKLEILIERLDSDVEAIAHVRSNRTPKPGSEFVLENGFKVLITGRKEALFALQLQEGDWQTVMTAVGHMPLPPYIDRADELSDKERYQTVYSKVDGAVAAPTAGLHFDDALLEKIGNKGIDSTFVTLHVGAGTFSPVRVENITEHKMHSEWFEVSQEVCDKVNAARAKGGRVIAVGTTSVRCLESASANGYIQPHMGETDIFIYPGYQFRSVDALITNFHLPESTLMMLVSAFAGKDHIMNAYNEAVKEAYRFFSYGDSMFIHQINTESRLVETSGTAGSDSLRETHDAI

SEQ ID NO: 67628 - protein, 370 aa, Kangiella profundi
  misc_feature (1)..(370): tr|A0A2K9AE36|A0A2K9AE36_9GAMM S-adenosylmethionine:tRN A ribosyltransferase-isomerase OS=Kangiella profundi OX =1561924 GN=queA PE=3 SV=1
MRLEDFHFDLPDELIARYPTEKRSASRLLCLDGQNGAVEHKHFYQLVDLLSPNDLLVFNNTRVIPARLFGQKITGGKLEILIERLDSDVEALAHIRSNRTPKPGSEFVLENGFKVLITGRKEALFTLQLQEGDWQTAMTSVGHMPLPPYIDREDELSDKERYQTVYSKVDGAVAAPTAGLHFDDELLQKIADKGVSTAFVTLHVGAGTFSPVRVDNITEHKMHSEWFEVSQEVCDKVIETRQKGGRVIAVGTTSVRCLESASMAGFIAPHVGETDIFIYPGYQFRSVDALITNFHLPESTLMMLVSAFAGKDHILNAYAQAVKEQYRFFSYGDSMFIHQIHLESRLEESKRNESKKTVSSDSSRESTDAI

SEQ ID NO: 67629 - protein, 351 aa, Kangiella sediminilitoris
  misc_feature (1)..(351): tr|A0A1B3BB27|A0A1B3BB27_9GAMM S-adenosylmethionine:tRN A ribosyltransferase-isomerase OS=Kangiella sediminilit oris OX=1144748 GN=queA PE=3 SV=1
MRLQDFFFNLPDELIARYPTEQRTASRLLCLDGEQGDIQHNKFFQLIDFLEPNDLLVFNNTRVLPARLFGRKASGGQVEILIERVESDREAIAHVRANRSPKPGATLVLEDGTELEVLNKDNALYQLKLLTNDWNSVMQAVGHMPLPPYIDREDELSDKERYQTVYSEVEGAVAAPTAGLHFDDELLKRITDKGVETAFVTLHVGAGTFSPVRVDNILEHKMHSEWYEVSQNVCDKVIKARENGGRVIAVGTTSVRCLESASSDNGIQPGSGETDIFIYPGYDFKSVDALITNFHLPESTLMMLVSAFASKQHIFNAYDEAVKEQYRFFSYGDSMFITRPFKGEHPEIKAG

SEQ ID NO: 67630 - protein, 367 aa, Kangiella sp.
  misc_feature (1)..(367): tr|A0A2G2KQD3|A0A2G2KQD3_9GAMM S-adenosylmethionine:tRN A ribosyltransferase-isomerase OS=Kangiella sp. OX=1920 245 GN=queA PE=3 SV=1
MLKQEFQFDLPEHLIAYTPCEKRTDSRLLVINPDKQSINHHHFYELTDFVQPNDCLIFNNTKVIPARLFGMRESGGKVEVLIERVIGLARESANKTQKQTCLAQVRASNSPKAGVKIKIADDFWLEVTGRQDSFYVLENKSEDDLMMLIEKYGDMPLPPYIQRKAEDIDKERYQTVYAKERGAVAAPTAGLHFDEALLKKIKDKGIQHDFVTLHVGAGTFLPLRVDNINDHKMHSEWFSVSESVVELVNRTKKNGGRVIAVGTTSVRCLESASKDGTINVAQGETDIFIYPGYQFQSVDGLITNFHLSESTLMMLVSAFAGKEFIKTAYQEAIQNEYRFFSYGDSMFMENCLSKTVYKKPNLMESRT

SEQ ID NO: 67631 - protein, 350 aa, Kangiella sp.
  misc_feature (1)..(350): tr|A0A3D8URD1|A0A3D8URD1_9GAMM S-adenosylmethionine:tRN A ribosyltransferase-isomerase OS=Kangiella sp. HD9-110 m-PIT-SAG07 OX=2283595 GN=queA PE=3 SV=1
MQLQDFHFDLPDELIARYPTEQRSASRLLQLNGTTGEVNHSNFFQLVDFLEPNDLLIFNNTRVLPARLFGKKSSGGQVEILIERVESDVEAIAHVRANRSPKPGSILVLEDGSELEVLSKDGALFELKLLSSDWHSVMQAVGHMPLPPYIDREDELSDKERYQTVYSKVEGAVAAPTAGLHFDDELLAKISEKGVDTAFVTLHVGAGTFSPVRVENILEHKMHSEWYELSDEVAEKVKQTRLQGGRVIAVGTTSVRCLESASTSGEIKAGSGETDIFIYPGYQFQSVDALITNFHLPESTLMMLVSAFASRKHILNAYNEAVKEQYRFFSYGDSMFITVPFMGQHPDINS

SEQ ID NO: 67632 - protein, 351 aa, Kangiella spongicola
  misc_feature (1)..(351): tr|A0A318D8H3|A0A318D8H3_9GAMM S-adenosylmethionine:tRN A ribosyltransferase-isomerase OS=Kangiella spongicola OX=796379 GN=queA PE=3 SV=1
MQLKDFHFDLPDELIARYPTEQRSASRLLRLDGETGDIQHSHFYQLTDFVEPNDLLVFNNTRVLPARLFGKKSSGGQVEILIERVESEHDALAHVRANRSPKPGARLVLEEGTEVEVISKDGAMYQLKLLSSDWHSVMQAVGHMPLPPYIDREDELSDKERYQTVYSEVEGAVAAPTAGLHFDDELLAKLSDKGVDTAFVTLHVGAGTFSPVRVDNILEHKMHSEWYELSQEVVDKVKQTRAKGGRVIAVGTTSVRCLESAAINGELEAGSGETDIFIYPGYVFRAVDALITNFHLPESTLMMLVSAFASKKHIMQAYDEAVSEQYRFFSYGDSMFITRPFSGAHPEALNQ

SEQ ID NO: 67633 - protein, 341 aa, Keratinibaculum paraultunense
  misc_feature (1)..(341): tr|A0A4R3KZH7|A0A4R3KZH7_9CLOT S-adenosylmethionine:tRN A ribosyltransferase-isomerase OS=Keratinibaculum parau ltunense OX=1278232 GN=queA PE=3 SV=1
MKTEDFYYDLPEELIAQHPIADREASRMLVLDKKAGKIEHRYFRDIIDYLNRGDCLVLNDTRVIPARLFGRREGKEEKIEFLLLRRLEGDQWETLVKPGKKVRPFNKIVFGDGLLVADVLDIEEDGTRIVEFSYDGIFEEILDKLGQMPLPPYIKEKLKDKERYQTVYSKHEGSAAAPTAGLHFTKRLLNDIKDKGVDIAFLTLHVGLGTFRPVKVENIEEHHMHAEYYNISKETAQKINIAKEKGRNVIAVGTTTVRTLETVATEDGIVVPGKGWTDIFIYPGYTFKVVDKLITNFHLPESTLLMLVSALAGRDNIFHAYNEAIKKRYRFYSFGDAMFIK

SEQ ID NO: 67634 - protein, 350 aa, Kerstersia gyiorum
  misc_feature (1)..(350): tr|A0A4Q7MX26|A0A4Q7MX26_9BURK S-adenosylmethionine:tRN A ribosyltransferase-isomerase OS=Kerstersia gyiorum OX =206506 GN=queA PE=3 SV=1
MSTPLLLSDYDYTLPPELIAQTPAARRDASRLLRLDPQAQLHDMHFSQLPALLRPADLLVFNDTRVIKARLFGIKHSGGKIEVLVERILSGTEVLAHIRSSKSPKPGSGIRLADAFDAEVLGRDGALFHLRFPADALSLLDQHGSTPLPPYIEHSPDAEDDSRYQTVYAREPGAVAAPTAGLHFDEAMLDRLAAQGVARAFVTLHVGAGTFQPVRAERLEDHVMHAERYTVPAATLEAIAQARAAGGRVIAVGTTSVRALESAAAQLAGKAPPPGQAMTGDTRLFITPGYRFHYIDALITNFHLPQSTLLMLVSALAGVEPIKRAYAHAVAERYRFFSYGDAMFIESPAA

SEQ ID NO: 67635 - protein, 350 aa, Kerstersia gyiorum
  misc_feature (1)..(350): tr|A0A171KW48|A0A171KW48_9BURK S-adenosylmethionine:tRN A ribosyltransferase-isomerase OS=Kerstersia gyiorum OX =206506 GN=queA PE=3 SV=1
MSTPLLLSDYDYTLPPELIAQTPAARRDASRLLRLDPQAQLHDMHFSQLPALLRPADLLVFNDTRVIKARLFGIKHSGGKIEVLVERILSGTEVLAHIRSSKSPKPGSGIRLADAFDAEVLGRDGALFHLRFPADALSLLDQHGSTPLPPYIEHSPDAEDDSRYQTVYAREPGAVAAPTAGLHFDEAMLDRLAAQGVARAFVTLHVGAGTFQPVRAERLEDHVMHAERYTVPAATLEAIAQARAAGGRVIAVGTTSVRALESAAAQLAGKAPPPGQAITGDTRLFITPGYRFHYIDALITNFHLPQSTLLMLVSALAGVEPIKRAYAHAVAERYRFFSYGDAMFIESPAA

SEQ ID NO: 67636 - protein, 339 aa, Ketobacter alkanivorans
  misc_feature (1)..(339): tr|A0A2K9LI54|A0A2K9LI54_9GAMM S-adenosylmethionine:tRN A ribosyltransferase-isomerase OS=Ketobacter alkanivora ns OX=1917421 GN=queA PE=3 SV=1
MKRTDFHYELPERLIARYPMPQRSGSRLLCMDRQAGTLQDRRFTDLVSWLKPGDLLVFNNTRVIPARVFGQKETGGRVEVLVERITGPDSCLAHVRASKSPKPGSRILVEGAGSLLMEGRQGDLFQLRSQQGELLDWLQKVGHMPLPPYIDRADESLDQERYQTVYASNPGAVAAPTAGLHFDEALLETLKRQGVATTFVTLHVGAGTFQPVRADDIRDHNMHSEWLQVDADTVAKVRQTKAEGGRVIAVGTTSVRCLETAARETGQIAPFTGETDIFIYPGYTFNVIDGLVTNFHLPESTLIMLVSALAGREPVLSAYQHAVEQEYRFFSYGDAMLIL

SEQ ID NO: 67637 - protein, 340 aa, Ketobacter sp.
  misc_feature (1)..(340): tr|A0A3L8C7C2|A0A3L8C7C2_9GAMM S-adenosylmethionine:tRN A ribosyltransferase-isomerase OS=Ketobacter sp. OX=208 3498 GN=queA PE=3 SV=1
MKRTDFHYDLPDQLIARYPMPERSGSRLLCLGRTTGTLTDQRFTDLAEWLRPGDLLVFNNTKVIPARVYGQKETGGKVEVLVERITGPDSCLAHVRASKSPKPGSRILVEGAGNLLMEGRQGDLFMLRSEQGNLLDWLQQVGHMPLPPYIDRADESLDQDRYQTVYAQNPGAVAAPTAGLHFDEPLLQQLQEKGVDTAYVTLHVGAGTFQPVRTDDVRDHVMHSEWLQVGEAAVEKIRETKANGGRVIAVGTTSVRSLETAARANGGEVAPFEGETDIFIYPGYSFAVIDGLITNFHLPESTLVMLVSAFAGRDPVLNAYRHAVAQEYRFFSYGDAMLII

SEQ ID NO: 67638 - protein, 348 aa, Ketobacter sp.
  misc_feature (1)..(348): tr|A0A3L8BH66|A0A3L8BH66_9GAMM S-adenosylmethionine:tRN A ribosyltransferase-isomerase OS=Ketobacter sp. OX=208 3498 GN=queA PE=3 SV=1
MKRADFHYELPDHLIARYPMAERSGSRLLCLDRSSGTLQDQRFTDLPQYLQAGDLLVFNNTRVIPARVFGKKETGGKVEVLVERITGPNQCLAHVRASKSPKPGSRILVEGQVDGLEQSVGSLVMEGRQGDLFRLRSEQGNLLDWLQQVGHMPLPPYIDRADESLDQDRYQTVYAQAPGAVAAPTAGLHFDEPLLRQLQEKGVDTAYVTLHVGAGTFQPVRADDIRDHVMHSEWLQVDQGTVDKIQATRARGGRVIAVGTTSVRSLETAAAANHGQIAAFAGETDIFIYPGYDFAVVDGLVTNFHLPESTLIMLVSAFAGREPVLKAYQHAVQQEYRFFSYGDAMLIL

SEQ ID NO: 67639 - protein, 347 aa, Ketogulonicigenium robustum
  misc_feature (1)..(347): tr|A0A1W6P0I5|A0A1W6P0I5_9RHOB S-adenosylmethionine:tRN A ribosyltransferase-isomerase OS=Ketogulonicigenium ro bustum OX=92947 GN=queA PE=3 SV=1
MKLSDFDFTLPEELIALRPAVPRTAAKLLVARGDTIADMTVADLAAQFNPGDRLVLNDTKVIPARLSGHRHRGEASAHIEVTLLQPTADGCWMALIKPLRKVQEGEDIVFSPRLSATLVGRQGDQAKLQFNLTGDDFDAALAEAGQMPLPPYIAARRAADAQDRKDYQTLWADRPGAVAAPTASLHFDADVMAALAARGVTLTRVTLHVGAGTFLPVKVDDISQHKMHAEWGEVTPAAAAEIAQTKAAGGRVIPVGTTALRLLETAARDTGAISPWVGETDIFITPGFQFRVADGLVTNFHLPKSTLMMLVSGLMGADRIRAIYDHAIAAQYRFFSYGDASLLLPKG

SEQ ID NO: 67640 - protein, 255 aa, Ketogulonicigenium vulgare
  misc_feature (1)..(255): tr|E3EZL4|E3EZL4_KETVY S-adenosylmethionine:tRNA ribosy ltransferase-isomerase OS=Ketogulonicigenium vulgare (s train Y25) OX=880591 GN=EIO_0412 PE=3 SV=1
MALIKPLRKLHEGEDIVFTSRLSATLIGRDGDQAKLRFNLTGDDFDAALAEAGQMPLPPYIAARRAADAQDLQDYQTIWADRPGAVAAPTASLHFDAAVMAALAARGVTLTRVTLHVGAGTFLPVKVDDIAQHKMHAEWGEVTATAAAEIAATKAAGGRVIPVGTTALRLLETAARDTGAIAPWVGETDIFITPGFNFRVADGLVTNFHLPKSTLMMLVSGLMGADRIRAIYDHAIAQRYRFFSYGDASLLLPKG

SEQ ID NO: 67641 - protein, 347 aa, Ketogulonicigenium vulgare
  misc_feature (1)..(347): tr|F9Y977|F9Y977_KETVW S-adenosylmethionine:tRNA ribosy ltransferase-isomerase OS=Ketogulonicigenium vulgare (s train WSH-001) OX=759362 GN=queA PE=3 SV=1
MKLSDFDFTLPEDLIALRPAVPRTAAKLLVARGDTISDLTVAELAAQFNPGDRLVLNDTKVIPARLSGLRHRGEATARIEVTLLQPTADGAWMALIKPLRKLHEGEDIVFTSRLSATLIGRDGDQAKLRFNLTGDDFDAALAEAGQMPLPPYIAARRAADAQDLQDYQTIWADRPGAVAAPTASLHFDAAVMAALAARGVTLTRVTLHVGAGTFLPVKVDDIAQHKMHAEWGEVTATAAAEIAATKAAGGRVIPVGTTALRLLETAARDTGAIAPWVGETDIFITPGFNFRVADGLVTNFHLPKSTLMMLVSGLMGADRIRAIYDHAIAQRYRFFSYGDASLLLPKG

SEQ ID NO: 67642 - protein, 311 aa, Kibdelosporangium aridum
  misc_feature (1)..(311): tr|A0A1Y5XEV3|A0A1Y5XEV3_KIBAR S-adenosylmethionine:tRN A ribosyltransferase-isomerase OS=Kibdelosporangium ari dum OX=2030 GN=SAMN05661093_02062 PE=3 SV=1
MMISAVEPPEAHGVPRDGVRMLVASPSGVKHAHFNDLAQFLRPGDLVVVNTSGTMPAAVDGELTVHFSTWLDDGSWVVELRPEGTEGHVGQRVSLPEGYLELVEPYVPGRLWRARVSVDVPSLLARFGRPIKYSYVPQQWPLADYQTVFARESGSAEMPSAGRPFSPELVTSLVSAGVLIAPITLHTGVSSIEEGKPPLPERFHVPALTARLVSMTRAAGGRVIAVGTTVTRALESAPHGGQGWTDLVLGPSRPATVVNGLITGWHAPGASHLQLLQAVAGRELVDAAYEAAAREGYLWHEFGDSCLLLPA

SEQ ID NO: 67643 - protein, 311 aa, Kibdelosporangium aridum
  misc_feature (1)..(311): tr|A0A428YXX7|A0A428YXX7_KIBAR S-adenosylmethionine:tRN A ribosyltransferase-isomerase OS=Kibdelosporangium ari dum OX=2030 GN=DMH04_39010 PE=3 SV=1
MMISAVEPPEAHGVRRDEVRMLVASPSGVKHAHFNDLAQFLRPGDLVVVNNSGTMPAAVDGSLTVHFSTWLDDGSWVVELRPEGTEGHVGQRVSLPEGHLELIEPYEPGRLWRARVSVDVPSLLARFGRPIKYSYVPQQWPLADYQTVFARDSGSAEMPSAGRPFSPELVTSLVSAGVLFAPITLHTGVSSIEEGKPPLPERFHVPALTARLVSMTRAAGGRVIAVGTTVTRALESAPDGGEGWTDLVLGPSRPAKIVNGLITGWHAPGASHLQLLQAVAGRDLVDVAYEAAAREGYLWHEFGDSCLLLPA

SEQ ID NO: 67644 - protein, 350 aa, Kiloniella litopenaei
  misc_feature (1)..(350): tr|A0A0M2RFT0|A0A0M2RFT0_9PROT S-adenosylmethionine:tRN A ribosyltransferase-isomerase OS=Kiloniella litopenaei OX=1549748 GN=queA PE=3 SV=1
MKTDLFDFELPRDVIAQRPENPRDMAKLLSVGNNLTDHRMIDLPDLIQAGDLLVFNDTKVIPARLKGKRGEAGVEVTLHKQEPPSAEGGARWWTFAKPAKKLKPDDIIRFANGFTAKVENKLDGGEVLLNFDLTPEKLYPHLEEHGKMPLPPYIQREVGSDKQDAEDYQTRFAKHRGAVAAPTASLHYTDRLMSALDAKGIEHITLTLHVGAGTFLPVKVDDLRDHKMHSEIGFLDQETADRINQVRKNGGRIIAVGTTALRLLESAAAQDGTLHPFDGETDIFITPGYKFKIVDLLLTNFHLPRSTLFMLVSAFAGLDRMRNAYKHAIDNGYRFYSYGDCSLLQREDHL

SEQ ID NO: 67645 - protein, 350 aa, Kiloniella spongiae
  misc_feature (1)..(350): tr|A0A0H2MU44|A0A0H2MU44_9PROT S-adenosylmethionine:tRN A ribosyltransferase-isomerase OS=Kiloniella spongiae O X=1489064 GN=queA PE=3 SV=1
MKTDLFDFELPRNVIAQRPENPRDMAKLLSVGNNLTDHRMLDLPDLIQPGDLLVFNDTKVIPARLKGKRGEAGIEVTLHKQEPPSTDGGARWWTFAKPAKKLKPDDVVRFADGFTAKVENKLDGGEVLLCFDLTPEELYPHLEEHGKMPLPPYIQREKGSDKQDAEDYQTRFAKYRGAVAAPTASLHYTDRLMSALDAKGIEHITLTLHVGAGTFLPVKVDDLRDHKMHSEIGYLNQKTTDHINKIRENGGRIIAVGTTALRLLESAADQNGILHPFDGETDIFITPGYKFKIVDLLLTNFHLPRSTLFMLVSAFAGLDRMRNAYQYAIDNGYRFYSYGDCSLLQREDHL

SEQ ID NO: 67646 - protein, 355 aa, Kineothrix alysoides
  misc_feature (1)..(355): tr|A0A4R1R3N5|A0A4R1R3N5_9FIRM S-adenosylmethionine:tRN A ribosyltransferase-isomerase OS=Kineothrix alysoides OX=1469948 GN=queA PE=3 SV=1
MEEFKKSDFYFELPEELIAQDPLEDRSGSRLLMLNKDTGEMMHRIFRDIIDYLEPGDCLVLNDTKVIPARLLGTKADTGAATEVLLLKRRENDIWEALVKPGKKARPGSVISFGDGILTGEVLDVVDEGNRLIRFRYEGIFEEVLDRLGEMPLPPYITHKLQDKNRYQTVYAKYEGSAAAPTAGLHFTKELLGKIEEKGVKIAYVTLHVGLGTFRPVKADNILEHHMHSEYYQVTKEAADTINDTKRGGKRVICIGTTSCRTVESAADENGVLHEGCGNTEIFIYPGYRFKILDGLITNFHLPESTLVMLVSALAGKEHVLAAYEEAIREKYRFFSFGDAMFITDVTVHSVLSNV

SEQ ID NO: 67647 - protein, 340 aa, Kingella denitrificans
  misc_feature (1)..(340): tr|F0EX75|F0EX75_9NEIS S-adenosylmethionine:tRNA ribosy ltransferase-isomerase OS=Kingella denitrificans ATCC 3 3394 OX=888741 GN=queA PE=3 SV=1
MHISEFDFHLPEHLIAQNPPAVRGSSRLLVAQHNQPIEDRHFPDLPNYIATGDVLVFNNTKVMKARLFGQKATGGKIEALIERVLDEHTALAHIRSSKSPKAGTELIFEGSLHATMTERVGELFKLQFHHRHNVYTLLEEYGALPLPPYIVRPADDNDDARYQTVYAKYQGAVAAPTAGLHFTHEILSALQQKGVEFAEVTLHVGAGTFQPVRVDNIAEHKMHSEWFDVPEATVAKIQAAKARGNRVWSVGTTSLRAIESAARSGSLHAGQGDTDIFITPGYTFRVIDGLITNFHLPKSTLLMLVSAFAGSERIREIYRHAIEQEYRFFSYGDAMLLHRA

SEQ ID NO: 67648 - protein, 341 aa, Kingella kingae
  misc_feature (1)..(341): tr|F5S5V7|F5S5V7_9NEIS S-adenosylmethionine:tRNA ribosy ltransferase-isomerase OS=Kingella kingae ATCC 23330 OX =887327 GN=queA PE=3 SV=1
MHISDFDFDLPEHLIAQNPPAVRGSSRLLVALPNQPFADQHFADLLNYVRAGDIFVFNNTKVMKARLFGQKTSGGKIEALIERVLDTHTALAHIRSSKSPKAGAELIFTGDIHATMTERVGELFKLHFSGEQTVYELLEQHGVLPLPPYIVRSADDNDDNRYQTVYAKHQGAVAAPTAGLHFTDDLLSSLQQKGIEFAEVTLHVGAGTFQPVRVENIAEHKMHSEWFDVPADTVAKIAAAKARGNHIWSVGTTSLRAIESAARSGTLQAGQGDTDIFITPPYPFQVIDRLITNFHLPKSTLLMLVSAFTGSERIRQLYQHAIGKEYRFFSYGDAMILGREP

SEQ ID NO: 67649 - protein, 340 aa, Kingella negevensis
  misc_feature (1)..(340): tr|A0A238TF02|A0A238TF02_9NEIS S-adenosylmethionine:tRN A ribosyltransferase-isomerase OS=Kingella negevensis O X=1522312 GN=queA PE=3 SV=1
MNISDFDFHLPEHLIAQNPPAVRGSSRLLVALPESPLQDKHFTDLPDYVAAGDLMIFNNTKVMKARLFGQKASGGKIEALIERVLDAHTALAHIRSSKSPKAGAELIFEGDIRATMVERKEELFKLHFSGSETVYELLEHNGHMPLPPYIVRDANDNDDSRYQTVYAKHQGAVAAPTAGLHFTDELLGSLKNKGVDFAEVTLHVGAGTFQPVRVDNIAEHKMHSEWYSVSEEAVAKIAKTKARGGKVWAVGTTSMRAIESAARLGSLKAGQGDTDIFITPGYQFQVIDRMVTNFHLPKSTLLMLVSAFSGSEHIREVYRHAIEQEYRFFSYGDAMILERI

SEQ ID NO: 67650 - protein, 340 aa, Kingella oralis
  misc_feature (1)..(340): tr|C4GEZ6|C4GEZ6_9NEIS S-adenosylmethionine:tRNA ribosy ltransferase-isomerase OS=Kingella oralis ATCC 51147 OX =629741 GN=queA PE=3 SV=1
MQLSDFDFTLPEHLIAQNPPATRGNSRLLVALPDAPFTDKQFADLPSYINAGDVLVFNNTKVMRARLFGQKASGGKIEALIERVLDAHTALAHIRSSKSPKAGAALIFDGDIHATMLERADELFKIQFAGEETVYELLERHGKLPLPPYIVRAADADDDERYQTVYAKFQGAVAAPTAGLHFTDALLGSLKAKGVEFAEVTLHVGAGTFQPVRVDNIAEHKMHSEWFDVPADTVAKIAAAKQRGSKVWSVGTTSLRAIESAARSGSLKAGQGDTDIFITPGFSFQVIDRLITNFHLPKSTLLMLVSAFSGCDKIRAVYRHAVEQEYRFFSYGDAMILGRE

SEQ ID NO: 67651 - protein, 342 aa, Kingella potus
  misc_feature (1)..(342): tr|A0A377R4A3|A0A377R4A3_9NEIS S-adenosylmethionine:tRN A ribosyltransferase-isomerase OS=Kingella potus OX=265 175 GN=queA PE=3 SV=1
MLLSDFDFHLPEHLIAQHPPAERGTSRLLAALPGEPLRDETFAFLPQLAQAGDLFVFNNTKVIKARLFGQKESGGRIEALIERVLDECTALAHIRASKSPKPGTMLLFDGGIRAEMAERAGALFVLRFEGGENVYRILERCGHLPLPPYIARAVGSDDEARYQTVYAKHQGAVAAPTAGLHFTDALLSELRAKGVRTAEITLHVGAGTFQPVRSENIAEHKMHSEWYEIPEDTAAAVADTKARGGRVWAVGTTSVRALESAARSTGRLQAGSGDTDIFLTPGCRFCVADRLVTNFHLPKSTLLMLVSAFAGTEEIRRIYRHAVERQYRFFSYGDAMVLGRKE

SEQ ID NO: 67652 - protein, 379 aa, Kinneretia asaccharophila
  misc_feature (1)..(379): tr|A0A4R6NCW9|A0A4R6NCW9_9BURK S-adenosylmethionine:tRN A ribosyltransferase-isomerase OS=Kinneretia asaccharop hila OX=582607 GN=queA PE=3 SV=1
MQACLERVRPALNTTMSDTALSSAAALQRDYSVADFDFELPPELIAQTPAAERSASRLLDGRSSPPVDRIFRELPQLLNPGDLLVFNNTKVIKARLYGQKASGGAVEALVERVLPAAAGGQSDEVWAHMRASKSPKPGARVSFADGAFEAEVLGRCGPDNGLFHLRLSGDAFELLERHGHVPLPPYIEHADSEDDVRRYQTVFAKEPGAVAAPTAALHFDEGVLAALAARGVATAHVTLHVGAGTFQPVRVDKLSEHKMHSEWFEVSPATVDAIAACKARGGQVVAVGTTTLRALESAALGGSLQAGARETDIFITPGFQFRVVDRLVTNFHLPKSTLMMLVSAFAGYEPIMALYRHAIAQGYRFFSYGDAMLLERRTG

SEQ ID NO: 67653 - protein, 363 aa, Kiritimatiella glycovorans
  misc_feature (1)..(363): tr|A0A0G3EG15|A0A0G3EG15_9BACT S-adenosylmethionine:tRN A ribosyltransferase-isomerase OS=Kiritimatiella glycov orans OX=1307763 GN=queA PE=3 SV=1
MKSHDSTPDPGRLEAYDYDLPRERIAQHPSPVRHESRMMEVRRDRDEFRHRRVSDLPDLLEAGDLLVFNDTRVIPARIFGHKKTGGQVELLLLEEQPSGEWEALLKCSRRPAAGEDVECCGGELRAAVLEHGERGRVRLRLRHRRPLMEILEEYGLPPLPPYIDRSDASSEQVRQDRARYQTVYAAEPGAVAAPTAGLHFSPELLDRLEARGVQRAMVTLHVGLGTFRPVTESRIERHRMDEERYRIPAQTRAMIAAARNAQRRVIAVGSTVVRTLESEADRLDPGPEGSAGGDLEGRSGLFIYPPYPFRSIDAILTNFHLPRSTLLMMMAAFAGRERILSAYREAVREQYRFYSYGDCMLIL

SEQ ID NO: 67654 - protein, 341 aa, Kiritimatiellaceae bacterium
  misc_feature (1)..(341): tr|A0A2E1U2W0|A0A2E1U2W0_9BACT S-adenosylmethionine:tRN A ribosyltransferase-isomerase OS=Kiritimatiellaceae ba cterium OX=2026752 GN=queA PE=3 SV=1
METAFFNYELPEHLIAQQPAEQRDNARMLVLHRQTGKIEHRTVREIGDYLTPKDCLVLNNTQVIPARLFGQKQTGGKIELLLLNEEKPHHWRVLLKSSRRPAPGSHLTLCNGEAQAEMITDGEKGEALLRIESAKPFIELLTKHGLPPLPPYIHRATPDEYATDRERYQTVYASQPGAAAAPTAGLHFTPELLTNLKQKGITTCELTLHVGLGTFRPVTAEIITDHTMHAERYEVSPQTAEKLRHAREQSGRIIAVGSTSVRTLESLPTLQPASGSTDIFIYPPHTFQHTDAILTNFHLPQSTLLMMMAAFTDRKTLLNAYHEAISHRYRFFSYGDCMLIL

SEQ ID NO: 67655 - protein, 341 aa, Kiritimatiellaceae bacterium
  misc_feature (1)..(341): tr|A0A2D7D8J1|A0A2D7D8J1_9BACT S-adenosylmethionine:tRN A ribosyltransferase-isomerase OS=Kiritimatiellaceae ba cterium OX=2026752 GN=queA PE=3 SV=1
MKTELFDYHLPETLIAQHPAQQRDQSRMLVLHRASGMLEHRTIRDLPEYLAAPDCLVLNNTQVIPARLFGQKETGGKIELLLLHEEKPQHWRALLKASRRPAPGSHFTLCNGEANATLLQDGEKGEALLHIESNRPLLELLDQYGLPPLPPYIRRKSPEDYTTDRTRYQTIYASQPGAAAAPTAGLHFTPQLLDHLKQKGIHPCQLTLHVGLGTFRPVTAENITDHTMHAEQYHVTSEAAQQLQETRQNGGRILAVGSTSVRTLESLPSLQPASGATDIFIYPPYTFRHTDAILTNFHLPQSTLLMMMSAFSSREQLLNAYQEAVAHQYRFFSYGDCMLIL

SEQ ID NO: 67656 - protein, 353 aa, Kitasatospora albolonga
  misc_feature (1)..(353): tr|A0A1V0V375|A0A1V0V375_9ACTN S-adenosylmethionine:tRN A ribosyltransferase-isomerase OS=Kitasatospora albolon ga OX=68173 GN=B7C62_05850 PE=3 SV=1
MPPELSARVPAEQRGAGRDDVRLLVTRGTAVSHHAFRELAGQLRAGDVLVVNTSATLAAAVNGRLGGERVVVHFSTRGDDGRWAVELRAPGASGATVPRPGGPAGGLVRLPGGRELVLEEPLGPVVGARLWWARVGRDVPELLRRYGRPIRYGYTERDQPLSAYQTVFAVQAPDGGGSAEMPSAARPFTAALVAELVSRGVQFAPLSLDTGVASAEAHEPPYPERFAVPATTAWLVNAARAAGGRVVAVGTTAVRALESAVDADGAVRPVAGWTDLVVTPRRGVRVVDGLLTGLHEPAASHLLMLEAVAGREALRRGYEAAVERRYLWHEFGDVHLILPDEERNTPDCSSNER

SEQ ID NO: 67657 - protein, 353 aa, Kitasatospora atroaurantiaca
  misc_feature (1)..(353): tr|A0A561EZQ0|A0A561EZQ0_9ACTN S-adenosylmethionine:tRN A ribosyltransferase-isomerase OS=Kitasatospora atroaur antiaca OX=285545 GN=FB465_6261 PE=3 SV=1
MTTALETGFDFTVPPELSAHAPAEARGLARDRIRMLVGRREGLITEHRSFAELPEVLRPGDLLVVNNSATLPAALPGRLPDGTAVALHLSSARPDPRGHHLVELRRPAAGASEYFPPDRSPARPGLHVTLPGGASAELTAPYTPRLWHARLSLPGELTAYLARHGRAIRYGYVDRDWPIEAYQTVFASEPGSSEMPSAARPFTAELVARLVAGGVLVAPITLHTGVASPEAHEAPYPERFRVPGTTARLAEHVRSQGGRVIAVGTTAVRALESAVGPDGRLRAAEGWTELVITPERGVRAVDGLLTGWHEPRASHLLMLQAVAGRPLLDRCYAEAVEGRYLWHEFGDVNLLLP

SEQ ID NO: 67658 - protein, 355 aa, Kitasatospora aureofaciens
  misc_feature (1)..(355): tr|A0A1E7MX78|A0A1E7MX78_KITAU S-adenosylmethionine:tRN A ribosyltransferase-isomerase OS=Kitasatospora aureofa ciens OX=1894 GN=B6264_23230 PE=3 SV=1
MTTLTELDLHVTVPPELSARAPAEARGGARDGVRMLVGRRATGAVEHRRFTELPEALRPGDLLVVNNSGTLPAALPGRLPDGTPVALHLSSAQPDQRGSHLVELRRPVPGSAASYYPPQESPARPGLHVALPAGGAAELVQPFTDRLWYAELSLPATLLPYLRLHGRAIRYGYVDRDWPIEAYQTVFASVPGSSEMPSAARPFTPTVVARLAGRGVLVAPVTLHTGVASPEAHEAPYAERFRVPATTARLVGHVRAGGGRVIAVGTTVVRALESAVGPDGTLQEADGWTELVITPERGVRGVDGLLTGWHEPRASHLLMLAAVAGRPLLTACYREAVRQRYLWHEFGDVNLLLPD

SEQ ID NO: 67659 - protein, 371 aa, Kitasatospora aureofaciens
  misc_feature (1)..(371): tr|A0A0L8PQW9|A0A0L8PQW9_KITAU S-adenosylmethionine:tRN A ribosyltransferase-isomerase OS=Kitasatospora aureofa ciens OX=1894 GN=ADK78_08860 PE=3 SV=1
MTAEVLRVPPELSAREPAEQRAPGQGRDAVRLLVSRGTAEPSHHAFKELPRLLSAGDVLVVNTSRTLPAALDGRLGDGRGRGEPVVVHFSTRADRQHPRPEAAAGDWTVELRTPDGCGSTRQRAGGPAGTVVRLPGGARLELRAPVERGGVRLWWARVSGAPVAELLRRYGRPIRYGYTDRDQPLDAYQTVFAVGSPDGGGSAEMPSAARPFTASLVARLVSRGVQIAPVTLHTGVASAEAYEPPYPERFAVPPSTAWQINAARAGGGRVVAVGTTAVRALETAADADGRIRAASGWTELVVTPERGVRAVDGLLTGLHEPQASHLLMLAAVGQVAAGADFGDALCRAYAEAVRRRYLWHEFGDLHLILPS

SEQ ID NO: 67660 - protein, 372 aa, Kitasatospora cheerisanensis
  misc_feature (1)..(372): tr|A0A066Z4G6|A0A066Z4G6_9ACTN S-adenosylmethionine:tRN A ribosyltransferase-isomerase OS=Kitasatospora cheeris anensis KCTC 2395 OX=1348663 GN=KCH_12190 PE=3 SV=1
MENTHDPGDYEFDLPDTLVAQEPPEARGGRRTDARLAVLRRGTEQVDHRGFHEIAELFEPDDVLVLNNARVVPTLLHGEDQDGRVVAVSIHSPNEDGTWHCLVAPEAVCRPGARFVLGPGRQVTGRLLAEADPGVWRIELDPADGDTLYRLAEPIYPGYLKQAPADPEYYQNTFASRPGAVLFPSAGRHFTPAVLDELRARGVAVAEVTLLLAARSHHFVRQVFRQQVAAGGAGDVEAEDRVERATRTKGFDFPQAERYEVTAETAGTINERRARGGRIMVCGTSALRTLESVTGEDGRVPAATGFTRLHIVPGHRFRACDGFLTNLHRPKSSELLLTSAFTGRQPLLEVYRRELIPRKYRFHEFGDSMLIV

SEQ ID NO: 67661 - protein, 375 aa, Kitasatospora griseola
  misc_feature (1)..(375): tr|A0A0D0P589|A0A0D0P589_KITGR S-adenosylmethionine:tRN A ribosyltransferase-isomerase OS=Kitasatospora griseol a OX=2064 GN=TR51_04420 PE=3 SV=1
MEPAGTADDPDDYTFDLPDDLVAQEPPEARGGERCDARLAVLRRGTAQVEHRSFRDIDAYFGPEDVLVLNNARVVPTLLYGEDGEGRVVAVSIHSPRPDGGWYCLVAPAAVCRPGAEFRLGPERQVAGRLVAEVEPGVWEIRLTPGDGETLYGLAEPIYPGYLKQVPADPEYYQNVYGTRPGAVLFPSAGRHFTPAVLDRLQDMGVAVAEVTLLIAARSHHFVRELFRKRVAEGGAGDVAAEDRVDRAARTEGFDFPRAERYEVAAPVAEAINERRARGGRVVVCGTSALRTLETVTGPDGVVSEGSGSTQLRITPGHRFRACDAFITNLHRPRSSELLLTSAFTGREPLLDVYRRELVPGAYRFHEFGDSMLIV

SEQ ID NO: 67662 - protein, 375 aa, Kitasatospora sp.
  misc_feature (1)..(375): tr|A0A2M9L9D9|A0A2M9L9D9_9ACTN S-adenosylmethionine:tRN A ribosyltransferase-isomerase OS=Kitasatospora sp. CB0 2891 OX=2020329 GN=CG736_07245 PE=3 SV=1
MEPAGTVDDPDDYTFDLPDDLVAQEPPEARGGERCDARLAVLRRGTAQVEHRSFRDIDAYFGPEDVLVLNNARVVPTLLHGEDAEGRVVAVSIHSPRPDGGWYCLVAPAAVCRPGAEFRLGPERQVAGRLVAEVEPGVWEIRLTPGDGETLYRLAEPIYPGYLKQVPADPEYYQNVYGTRPGAVLFPSAGRHFTPAVLDRLQDTGVAVAEVTLLIAARSHHFVRELFRKRVAEGGAGDVAAEDRVDRAARTEGFDFPRAERYEVAAPVAEAINERRARGGRVVVCGTSALRTLETVTGPDGVVSEGSGFTQLRITPGHRFRACDAFITNLHRPRSSELLLTSAFTGREPLLDVYRRELVPGAYRFHEFGDSMLIV

SEQ ID NO: 67663 - protein, 354 aa, Kitasatospora sp.
  misc_feature (1)..(354): tr|A0A1Q5F661|A0A1Q5F661_9ACTN S-adenosylmethionine:tRN A ribosyltransferase-isomerase OS=Kitasatospora sp. CB0 1950 OX=1703930 GN=AMK19_06190 PE=3 SV=1
MKTREFEFKQTAEDMPTDPVELRGKRRGNERMVVLDRSAGTIEHTAFPSILGHLRAGDLLVLNDSYILSNTLAFRYGDETMDVTVYGHEPDGANIVKIDAARPPEPGTTLTSVDDDRLSCTVVEPQPDRLWKVSFEPAELLMPTLDRHGRRLDETIRLDPKSWKSKPEAYRSVYARKPGSLEIPSAGLHFSRELLDRISEKGVELAYLTLHVGATEVLAVRHISAEDVENHKVRSEYFEVGAETAAQINRALAEGRRIVAVGTTVMRTLESLMIDREPGSPVQARAGWTDLYIYPGFRFKIVDALVTNLHRPRSSHIVLTAAFAGKDLVMKSYGEILDRGGYEFDMFGDCMFIV

SEQ ID NO: 67664 - protein, 364 aa, Kitasatospora viridis
  misc_feature (1)..(364): tr|A0A561UND1|A0A561UND1_9ACTN S-adenosylmethionine:tRN A ribosyltransferase-isomerase OS=Kitasatospora viridis OX=281105 GN=FHX73_114724 PE=3 SV=1
MVEHAEYTVPPEQVAKEPVEARGAQRSDSRLVVVRRADGAVRHRRFHEIDEELRPGDVLVLNNSRVLPSVLRGLDGAGRPVVVQVYSPMADGSWHAQVVATEPDRRAGEEFAFDGGRMTGRLLHSEEPGVWRMLLSPPEPEALEKVATLFYPHYLGSAPRPEHYQNVYASRPGGIMLPSAGRHFTLALLRRLAERGVAVAELTLDIGVKWGVVRLAGWLRETAGVTEPVLPADTARTAADERGNFPGCEHYEVPIETADLINARRRAGGRVVVCGTTVMRTLETVTDEDGRVWPGDGWTRLIISPEHRFRSCDAFLTNLHMPRSSELQLTSSLVGGARLPEVYRTEIVPNGYRFYEFGDSMLIV

SEQ ID NO: 67665 - protein, 354 aa, Klebsiella aerogenes
  misc_feature (1)..(354): tr|A0A0F0U878|A0A0F0U878_KLEAE S-adenosylmethionine:tRN A ribosyltransferase-isomerase OS=Klebsiella aerogenes OX=548 GN=queA PE=3 SV=1
MRVTDFSFELPESLIAHYPQPERSSCRLLSLDGPTGALTHGTFTDLLDKLNPGDLLVFNNTRVIPARLFGRKASGGKIEVLVERMLDDKRILAHIRASKAPKPGAELLLGDDESINATMLARHGALFEVEFNDERPVLDILNSIGHMPLPPYIDRPDEDADRELYQTVYGTKPGAVAAPTAGLHFDDPLLEKLRAKGIEMAFVTLHVGAGTFQPVRVDSIEEHIMHSEYAEVPQDVVDAVLAAKARGNRVIAVGTTSVRSLESAAQAAKNGLIEPFFADTQIFIYPGYQYKVIDALVTNFHLPESTLIMLVSAFAGYQHTMNAYKAAVEQKYRFFSYGDAMFITYNPQAISERP

SEQ ID NO: 67666 - protein, 354 aa, Klebsiella aerogenes
  misc_feature (1)..(354): tr|A0A447KSI0|A0A447KSI0_KLEAE S-adenosylmethionine:tRN A ribosyltransferase-isomerase OS=Klebsiella aerogenes OX=548 GN=queA PE=3 SV=1
MRVTDFSFELPESLIAHYPQPERSSCRLLSLDGPTGALTHGTFTDLLDKLNPGDLLVFNNTRVIPARLFGRKASGGKIEVLVERMLDDKRILAHIRASKAPKPGAELLLGDDESINATMLARHGALFEVEFNDERPVLDILNSIGHMPLPPYIDRPDEHADRELYQTVYGTKPGAVAAPTAGLHFDDPLLEKLRAKGIEMAFVTLHVGAGTFQPVRVDSIEEHIMHSEYAEVPQDVVDAVLAAKARGNRVIAVGTTSVRSLESAAQAAKNGLIEPFFADTQIFIYPGYQYKVIDALVTNFHLPESTLIMLVSAFAGYQHTMNAYKAAVEQKYRFFSYGDAMFITYNPQAISERP

SEQ ID NO: 67667 - protein, 356 aa, Klebsiella grimontii
  misc_feature (1)..(356): tr|A0A5D1WN05|A0A5D1WN05_9ENTR S-adenosylmethionine:tRN A ribosyltransferase-isomerase OS=Klebsiella grimontii OX=2058152 GN=queA PE=3 SV=1
MRVADFSFELPESLIAHYPMPERSSCRLLSLDGPTGALTHGTFTDLLDKLNPGDLLVFNNTRVIPARLFGRKASGGKIEVLVERMLDDKRILAHIRASKAPKPGAELLLGDDESIKATMVARHDALFEVAFDDARSVLDILNAIGHMPLPPYIERPDEEADRELYQTVYSEKPGAVAAPTAGLHFDEPLLAKLREKGIEMAFVTLHVGAGTFQPVRVDSIEDHIMHSEYAEVPQEVVDAVLAAKARGSRVIAVGTTSVRSLESAAQAAKNDLIEPFFGDTQIFIYPGYQYKVIDALVTNFHLPESTLIMLVSAFAGYQHTMNAYKAAVEQKYRFFSYGDAMFITYNPQAIFERVGE

SEQ ID NO: 67668 - protein, 356 aa, Klebsiella grimontii
  misc_feature (1)..(356): tr|A0A285AZI6|A0A285AZI6_9ENTR S-adenosylmethionine:tRN A ribosyltransferase-isomerase OS=Klebsiella grimontii OX=2058152 GN=queA PE=3 SV=1
MRVADFSFELPESLIAHYPMPERSSCRLLSLDGPTGALTHGTFTDLLDKLNPGDLLVFNNTRVIPARLFGRKASGGKIEVLVERMLDDKRILAHIRASKAPKPGAELLLGDDESIKATMVARHDALFEVAFDDARSVLDILNAIGHMPLPPYIERPDEEADRELYQTVYSEKPGAVAAPTAGLHFDEPLLAKLREKGVEMAFVTLHVGAGTFQPVRVDSIEDHIMHSEYAEVPQEVVDAVLAAKARGSRVIAVGTTSVRSLESAAQAAKNDLIEPFFGDTQIFIYPGYQYKVIDALVTNFHLPESTLIMLVSAFAGYQHTMNAYKAAVEQKYRFFSYGDAMFITYNPQAIFERVGE

SEQ ID NO: 67669 - protein, 354 aa, Klebsiella michiganensis
  misc_feature (1)..(354): tr|A0A1Q8YZ68|A0A1Q8YZ68_9ENTR S-adenosylmethionine:tRN A ribosyltransferase-isomerase OS=Klebsiella michiganen sis OX=1134687 GN=queA PE=3 SV=1
MRVADFSFELPESLIAHYPMPERSSCRLLSLDGPTGALTHGTFTDLLDKLNPGDLLVFNNTRVIPARLFGRKASGGKIEVLVERMLDDKRILAHIRASKAPKPGAALLLGDDESIKATMVARHDALFEVEFDDARSVLDILNAIGHMPLPPYIDRPDEDADRELYQTVYSEKPGAVAAPTAGLHFDEPMLAKLREKGVEMAFVTLHVGAGTFQPVRVDSIEEHIMHSEYAEVPQEVVDAVLAAKARGSRVIAVGTTSVRSLESAAQAAKNDLIEPFFGDTQIFIYPGYQYKVIDALVTNFHLPESTLIMLVSAFAGYQHTMNAYKAAVEQKYRFFSYGDAMFITYNPQAIFERP

SEQ ID NO: 67670 - protein, 356 aa, Klebsiella michiganensis
  misc_feature (1)..(356): tr|A0A2J4R4S6|A0A2J4R4S6_9ENTR S-adenosylmethionine:tRN A ribosyltransferase-isomerase OS=Klebsiella michiganen sis OX=1134687 GN=queA PE=3 SV=1
MRVADFSFELPESLIAHYPMPERSSCRLLSLDGPTGALTHGTFTDLLDKLNPGDLLVFNNTRVIPARLFGRKASGGKIEVLVERMLDDKRILAHIRASKAPKPGAELLLGDDESIKATMVARHDALFEVAFDDARSVLDILNAIGHMPLPPYIERPDEEADRELYQTVYSEKPGAVAAPTAGLHFDEPLLAKLREKGVEMAFVTLHVGAGTFQPVRVDSIEEHIMHSEYAEVPQEVVDSVLAAKARGSRVIAVGTTSVRSLESAAQAAKNDLIEPFFGDTQIFIYPGYQYKVIDALVTNFHLPESTLIMLVSAFAGYQHTMNAYKAAVEQKYRFFSYGDAMFITYNPQAIFERVGE

SEQ ID NO: 67671 - protein, 354 aa, Klebsiella oxytoca
  misc_feature (1)..(354): tr|A0A168KR12|A0A168KR12_KLEOX S-adenosylmethionine:tRN A ribosyltransferase-isomerase OS=Klebsiella oxytoca OX =571 GN=queA PE=3 SV=1
MRVADFSFELPESLIAHYPMPERSSCRLLSLDGPTGALTHGTFTDLLDKLNPGDLLVFNNTRVIPARLFGRKASGGKIEVLVERMLDDKRILAHIRASKAPKPGAELLLGDDESIKATMVARHDALFEVEFDDARSVLDILNAIGHMPLPPYIDRPDEDADRELYQTVYSEKPGAVAAPTAGLHFDEPLLAKLREKGVEMAFVTLHVGAGTFQPVRVDSIEDHIMHSEYAEVPQEVVDAVLAAKARGNRVIAVGTTSVRSLESAAQAAKNDLIEPFFNDTQIFIYPGYQYKVIDALVTNFHLPESTLIMLVSAFAGYQHTMNAYKAAVEQKYRFFSYGDAMFITYNPQAIFERP

SEQ ID NO: 67672 - protein, 354 aa, Klebsiella oxytoca; identical to SEQ ID NO: 67669
  misc_feature (1)..(354): tr|A0A0G3SES4|A0A0G3SES4_KLEOX S-adenosylmethionine:tRN A ribosyltransferase-isomerase OS=Klebsiella oxytoca OX =571 GN=queA PE=3 SV=1

SEQ ID NO: 67673 - protein, 354 aa, Klebsiella pneumoniae
  misc_feature (1)..(354): tr|C8T4R2|C8T4R2_KLEPR S-adenosylmethionine:tRNA ribosy ltransferase-isomerase OS=Klebsiella pneumoniae subsp. rhinoscleromatis ATCC 13884 OX=667127 GN=queA PE=3 SV=1
MRVTDFAFELPESLIAHYPMPERSSCRLLSLDGPTGALTHGTFTDILDKLNPGDLLVFNNTRVIPARLFGRKASGGKIEVLVERMLDDKRILAHIRASKAPKPGAELLLGDDESIKATMLARHGALFEVEFNDERPVLEILNGIGHMPLPPYIDRPDEDADRELYQTVYGTRPGAVAAPTAGLHFDEPLLDKLRAKGVEMAFVTLHVGAGTFQPVRVDSIEEHTMHSEYAEVPQEVVDAVLAAKARGNRVIAVGTTSVRSLESAAQAAKDALIAPFFDDTQIFIYPGYQYQVIDVLVTNFHLPESTLIMLVSAFAGYQHTMNAYKVAVEQKYRFFSYGDAMFITYNPQAISERP

SEQ ID NO: 67674 - protein, 354 aa, Klebsiella pneumoniae
  misc_feature (1)..(354): sp|B5Y0Y7|QUEA_KLEP3 S-adenosylmethionine:tRNA ribosylt ransferase-isomerase OS=Klebsiella pneumoniae (strain 3 42) OX=507522 GN=queA PE=3 SV=1
MRVTDFAFELPESLIAHYPMPERSSCRLLSLDGPTGALTHGTFTDILDKLNPGDLLVFNNTRVIPARLFGRKASGGKIEVLVERMLDDKRILAHIRASKAPKPGAELLLGDDESIKATMLARHGALFEVEFNDERPVLEILNGIGHMPLPPYIDRPDEDADRELYQTVYGTRPGAVAAPTAGLHFDEPLLDKLRAKGVEMAFVTLHVGAGTFQPVRVDSIEEHTMHSEYAEVPQEVVDAVLAAKARGNRVIAVGTTSVRSLESAAQAAKDALIAPFFDDTQIFIYPGYQYQVIDALVTNFHLPESTLIMLVSAFAGYQHTMNAYKVAVEQKYRFFSYGDAMFITYNPQAISERP

SEQ ID NO: 67675 - protein, 354 aa, Klebsiella quasipneumoniae
  misc_feature (1)..(354): tr|A0A5A4S7S5|A0A5A4S7S5_9ENTR S-adenosylmethionine:tRN A ribosyltransferase-isomerase OS=Klebsiella quasipneum oniae OX=1463165 GN=queA PE=3 SV=1
MRVTDFAFELPESLIAHYPMPERSSCRLLSLDGPTGALTHGTFTDILDKLNPGDLLVFNNTRVIPARLFGRKASGGKIEVLVERMLDHKRILAHIRASKAPKPGAELLLGDDESIQATMLARHGAMFEVEFNDERPVLEILNGIGHMPLPPYIDRPDEDADRELYQTVYGTRPGAVAAPTAGLHFDEPLLDKLRAKGVEMAFVTLHVGAGTFQPVRVDSIEEHTMHSEYAEVPQEVVDAVLAAKARGNRVIAVGTTSVRSLESAAQAAKDALIAPFFDDTQIFIYPGYQYQVIDALVTNFHLPESTLIMLVSAFAGYQHTMNAYKVAVEQKYRFFSYGDAMFITYNPQAISERP

SEQ ID NO: 67676 - protein, 354 aa, Klebsiella quasipneumoniae
  misc_feature (1)..(354): tr|A0A5C6IM67|A0A5C6IM67_9ENTR S-adenosylmethionine:tRN A ribosyltransferase-isomerase OS=Klebsiella quasipneum oniae subsp. similipneumoniae OX=1463164 GN=queA PE=3 S V=1
MRVTDFAFELPESLIAHYPMPERSSCRLLSLDGPTGALTHGTFTDILDKLNPGDLLVFNNTRVIPARLFGRKASGGKIEVLVERMLDDKRILAHIRASKAPKPGAELLLGDDESIQATMLARHGALFEVEFNDERPVLEILNGIGHMPLPPYIDRPDEDADRELYQTVYGTRPGAVAAPTAGLHFDEPLLDKLRAKGVEMAFVTLHVGAGTFQPVRVDSIEEHTMHSEYAEVPQEVVDAVLAAKARGNRVIAVGTTSVRSLESAAQAAKDALIAPFFDDTQIFIYPGYQYQVIDALVTNFHLPESTLIMLVSAFAGYQHTMNAYKVAVEQKYRFFSYGDAMFITYNPQAISERP

SEQ ID NO: 67677 - protein, 354 aa, Klebsiella quasivariicola; identical to SEQ ID NO: 67674
  misc_feature (1)..(354): tr|A0A223UFD8|A0A223UFD8_9ENTR S-adenosylmethionine:tRN A ribosyltransferase-isomerase OS=Klebsiella quasivarii cola OX=2026240 GN=queA PE=3 SV=1

SEQ ID NO: 67678 - protein, 354 aa, Klebsiella sp.; identical to SEQ ID NO: 67674
  misc_feature (1)..(354): tr|A0A3G5D8A2|A0A3G5D8A2_9ENTR S-adenosylmethionine:tRN A ribosyltransferase-isomerase OS=Klebsiella sp. P1CD1 OX=2267618 GN=queA PE=3 SV=1

SEQ ID NO: 67679 - protein, 356 aa, Klebsiella sp.
  misc_feature (1)..(356): tr|A0A4S5DR68|A0A4S5DR68_9ENTR S-adenosylmethionine:tRN A ribosyltransferase-isomerase OS=Klebsiella sp. Z2 OX= 2561928 GN=queA PE=3 SV=1
MRVADFSFELPESLIAHYPMPERSSCRLLSLDGPTGALTHGTFTDLLDKLNPGDLLVFNNTRVIPARLFGRKASGGKIEVLVERMLDDKRILAHIRASKAPKPGAELLLGDDESIKATMTARHDALFEVEFNDERTVLDILNAIGHMPLPPYIERPDEEADRELYQTVYSQKPGAVAAPTAGLHFDEPLLEKLRAKGVEMAFVTLHVGAGTFQPVRVDSIEDHIMHSEYAEVPQEVVDAVLAAKARGSRVVAVGTTSVRSLESAAQAAKSELIEPFFGDTQIFIYPGYQYKVIDALVTNFHLPESTLIMLVSAFAGYQHTMNAYKSAVEQKYRFFSYGDAMFITYNPQALNERVGE

SEQ ID NO: 67680 - protein, 226 aa, Klebsiella variicola
  misc_feature (1)..(226): tr|A0A2N4YUZ6|A0A2N4YUZ6_KLEVA S-adenosylmethionine:tRN A ribosyltransferase-isomerase (Fragment) OS=Klebsiella variicola OX=244366 GN=queA PE=3 SV=1
MRVTDFAFELPESLIAHYPMPERSSCRLLSLDGPTGALTHGTFTDILDKLNPGDLLVFNNTRVIPARLFGRKASGGKIEVLVERMLDDKRILAHIRASKAPKPGAELLLGDDESIKATMLARHGALFEVEFNDERPVLEILNGIGHMPLPPYIDRPDEDADRELYQTVYGTRPGAVAAPTAGLHFDEPLLDKLRAKGVEMAFVTLHVGAGTFQPVRVDSIEEHTMH

SEQ ID NO: 67681 - protein, 354 aa, Klebsiella variicola; identical to SEQ ID NO: 67674
  misc_feature (1)..(354): tr|A0A087FTA1|A0A087FTA1_KLEVA S-adenosylmethionine:tRN A ribosyltransferase-isomerase OS=Klebsiella variicola OX=244366 GN=queA PE=3 SV=1

SEQ ID NO: 67682 - protein, 356 aa, Kluyvera ascorbata
  misc_feature (1)..(356): tr|A0A2T2Y0G2|A0A2T2Y0G2_9ENTR S-adenosylmethionine:tRN A ribosyltransferase-isomerase OS=Kluyvera ascorbata OX =51288 GN=queA PE=3 SV=1
MRVTDFSFELPESLIAHYPQAERSSCRLLSLDGPTGALTHGTFTDLLDKLNPGDLLVFNNTRVIPARLFGRKASGGKIEVLVERMLDDKRILAHIRASKAPKPGAELLLGDDESIKATMVARHDALFEVEFDDARSVLDILNAIGHMPLPPYIDRPDEDADRELYQTVYSEKPGAVAAPTAGLHFDEPLLARLREKGIEMAFVTLHVGAGTFQPVRVDSIEDHIMHSEYAEVPQDVVDAVLAAKARGNRVVAVGTTSVRSLESAAQAAKDELIAPFFGDTQIFIFPGYQYQVIDALVTNFHLPESTLIMLVSAFAGYKNTMNAYHEAVKAEYRFFSYGDAMFITYNPQAISERVGD

SEQ ID NO: 67683 - protein, 356 aa, Kluyvera ascorbata
  misc_feature (1)..(356): tr|A0A378GNA1|A0A378GNA1_9ENTR S-adenosylmethionine:tRN A ribosyltransferase-isomerase OS=Kluyvera ascorbata OX =51288 GN=queA PE=3 SV=1
MRVADFSFELPESLIAHYPQAERSSCRLLSLDGPTGALTHGTFTDLLDKLNPGDLLVFNNTRVIPARLFGRKASGGKIEVLVERMLDDKRILAHIRASKAPKPGAELLLGDDESIKATMVARHDALFEVEFDDERSVLDILNAIGHMPLPPYIDRPDEDADRELYQTVYSEKPGAVAAPTAGLHFDEPLLAKLREKGVEMAFVTLHVGAGTFQPVRVDSIEDHIMHSEYAEVPQEVVDAVLAAKARGNRVIAVGTTSVRSLESAAQAAKDELIAPFFGDTQIFIFPGYQYQVIDALVTNFHLPESTLIMLVSAFAGYQHTMNAYKAAVEQKYRFFSYGDAMFITYNPQAISERVGE

SEQ ID NO: 67684 - protein, 356 aa, Kluyvera cryocrescens
  misc_feature (1)..(356): tr|A0A2X3DUY1|A0A2X3DUY1_KLUCR S-adenosylmethionine:tRN A ribosyltransferase-isomerase OS=Kluyvera cryocrescens OX=580 GN=queA PE=3 SV=1
MRVTDFSFELPESLIAHYPQAERSSCRLLSLDGPTGALTHGTFTDLLDKLNPGDLLVFNNTRVIPARLFGRKASGGKIEVLVERMLDDKRILAHIRASKAPKPGAELLLGDDESIKATMVARHDALFEVEFDDERSVLDILNAIGHMPLPPYIDRPDEDADRELYQTVYSEKPGAVAAPTAGLHFDEPLLAKLREKGIEMAFVTLHVGAGTFQPVRVDSIEDHIMHSEYAEVPQDVVDAVLAAKARGNRVIAVGTTSVRSLESAAQAAKDELIAPFFGDTQIFIFPGYQYQVIDALVTNFHLPESTLIMLVSAFAGYKNTMNAYHEAVKAEYRFFSYGDAMFITYNPQAISERVGE

SEQ ID NO: 67685 - protein, 356 aa, Kluyvera georgiana
  misc_feature (1)..(356): tr|A0A248KKT2|A0A248KKT2_9ENTR S-adenosylmethionine:tRN A ribosyltransferase-isomerase OS=Kluyvera georgiana OX =73098 GN=queA PE=3 SV=1
MRVADFSFELPESLIAHYPQAERSSCRLLSLDGPTGALTHGTFTDLLDKLNPGDLLVFNNTRVIPARLFGRKASGGKIEVLVERMLDDKRILAHIRASKAPKPGAELLLGDDESIKATMVARHDALFEVEFDDERSVLDILNAIGHMPLPPYIDRPDEDADRELYQTVYSEKPGAVAAPTAGLHFDEPLLAKLREKGIEMAFVTLHVGAGTFQPVRVDSIEDHIMHSEYAEVPQEVVDAVLAAKARGNRVIAVGTTSVRSLESAAQAAKDELIAPFFGDTQIFIFPGYQYQVIDALVTNFHLPESTLIMLVSAFAGYQHTMNAYKAAVEQKYRFFSYGDAMFITYNPQAISERVGE

SEQ ID NO: 67686 - protein, 356 aa, Kluyvera georgiana
  misc_feature (1)..(356): tr|A0A1B7JHY6|A0A1B7JHY6_9ENTR S-adenosylmethionine:tRN A ribosyltransferase-isomerase OS=Kluyvera georgiana AT CC 51603 OX=1354264 GN=queA PE=3 SV=1
MRVADFSFELPESLIAHYPQAERSSCRLLSLDGPTGALTHGTFTDLLDKLNPGDLLVFNNTRVIPARLFGRKASGGKIEVLVERMLDDKRILAHIRASKAPKPGAELLLGDDESIKATMVARHDALFEVEFDDERSVLDILNAIGHMPLPPYIDRPDEDADRELYQTVYSEKPGAVAAPTAGLHFDEPLLAKLREKGIEMAFVTLHVGAGTFQPVRVDSIEDHIMHSEYAEVPQEVVDAVLAAKARGNRVVAVGTTSVRSLESAAQAAKDELIAPFFGDTQIFIFPGYQYQVIDALVTNFHLPESTLIMLVSAFAGYQHTMNAYKAAVEQKYRFFSYGDAMFITYNPQAISERVGE

SEQ ID NO: 67687 - protein, 119 aa, Kluyvera intermedia
  misc_feature (1)..(119): tr|A0A3S4IE27|A0A3S4IE27_KLUIN S-adenosylmethionine:tRN A ribosyltransferase-isomerase OS=Kluyvera intermedia O X=61648 GN=queA_1 PE=3 SV=1
MRCWRPKARGNRVIAVGTTSVRSLESAAQAAKDELIAPFFGDTQIFIFPGYQYQVIDALVTNFHLPESTLIMLVSAFAGYKNTMNAYHEAVKAEYRFFSYGDAMFITYNPQAISERVGE

SEQ ID NO: 67688 - protein, 356 aa, Kluyvera intermedia
  misc_feature (1)..(356): tr|A0A1X0X5E3|A0A1X0X5E3_KLUIN S-adenosylmethionine:tRN A ribosyltransferase-isomerase OS=Kluyvera intermedia O X=61648 GN=queA PE=3 SV=1
MRVADFSFELPESLIAHYPQPERSSCRLLSLDGPTGALAHGTFTDLLDKLNPGDLLVFNNTRVIPARLFGRKASGGKIEVLVERMLDDKRILAHIRASKAPKPGAELLLGDDESIHATMVARHDALFEVEFNDERPVLDILNAIGHMPLPPYIDRPDEEADRELYQTVYSQKPGAVAAPTAGLHFDEPLLARLREKGIEMAFVTLHVGAGTFQPVRVDSIEDHIMHSEYAEVPQEVVDAVLAAKARGNRVIAVGTTSVRSLESAAQAAKEALIEPFFGDTQIFIFPGYQYQVIDALVTNFHLPESTLIMLVSAFAGYKHTMHAYQEAVAHKYRFFSYGDAMFITYNPQAINERPGE

SEQ ID NO: 67689 - protein, 356 aa, Kluyvera sp.
  misc_feature (1)..(356): tr|A0A2T3XBM7|A0A2T3XBM7_9ENTR S-adenosylmethionine:tRN A ribosyltransferase-isomerase OS=Kluyvera sp. Nf5 OX=2 116543 GN=queA PE=3 SV=1
MRVADFSFELPESLIAHYPQPERSSCRLLSLDGPTGALAHGTFTDLLDKLNPGDLLVFNNTRVIPARLFGRKASGGKIEVLVERMLDDKRILAHIRASKAPKPGAELLLGDDESIHATMVARHDALFEVEFNDERPVLDILNAIGHMPLPPYIDRPDEDADRELYQTVYSQKPGAVAAPTAGLHFDEPLLARLREKGIEMAFVTLHVGAGTFQPVRVDSIEDHIMHSEYAEVPQEVVDAVLAAKARGNRVIAVGTTSVRSLESAAQAAKNALIEPFFGDTQIFIFPGYQYQVIDALVTNFHLPESTLIMLVSAFAGYKHTMHAYQEAVAHKYRFFSYGDAMFITYNPQAINERPGE

SEQ ID NO: 67690 - protein, 355 aa, Knoellia sinensis
  misc_feature (1)..(355): tr|A0A0A0JDR1|A0A0A0JDR1_9MICO S-adenosylmethionine:tRN A ribosyltransferase-isomerase OS=Knoellia sinensis KCT C 19936 OX=1385520 GN=N802_12355 PE=3 SV=1
MPVLTSAPTTRFRAPDDTTAPAPAEARGVARDGVRLLVANGTDLVHAHFRDLPDHLEPGDLVVINNSATVAGQIDGHRRGHGAVVVHAATPLNDGTWVIELRTAPDASSPILDADVGERIQVGRVTLTLLGPYPRPDSSPTGVGDRLWRARADGDLSDALGRHGRAIAYGYLDRRYPLSDYQSVFSTVPGSAEMPSAGRPFTDSVITRLVAGGVGVAPITLHTGVSSQEAGEAPQAERFAVPEATARLVNATRATGARVIAVGTTVTRALESAVTPSGRVEAAHGWTERVISPEEPARVVDGLITGWHDPHASHLLLVESIAGADLTQAAYDAAVDHGYLWHEFGDSALLLPSKR

SEQ ID NO: 67691 - protein, 352 aa, Komagataeibacter cocois
  misc_feature (1)..(352): tr|A0A365YZR7|A0A365YZR7_9PROT S-adenosylmethionine:tRN A ribosyltransferase-isomerase OS=Komagataeibacter coco is OX=1747507 GN=queA PE=3 SV=1
MTDLVSDFDFDLPPDLIADHPARPRDSARMLEVLAHGAFIDRHVRDLPGCLRAGDILVANDTAVIPAQLSAMRGAARIGITLDRILPDGTWHALARNARRLRPGDTLTFAPSPVTAEVVVCEEAGGVVLRFDVEGEAFDQFLHDTGHLALPPYIARPDGPTEEDRRDYSTIFAQHRGAVAAPTAGLHFTPALLSGLEKAGVLRQTLTLHVGAGTFLPMRSEQISEHRMHAERGTISPHAAQRINDARAAGGRVVAVGTTSLRLLESATGEDGIVRPFHGETSIFIRPGYRFRAVDMLLTNFHLPRSTLFMLVSAFSGRARMRAAYEHAMATGYRFYSYGDACLLHRNDGGAA

SEQ ID NO: 67692 - protein, 352 aa, Komagataeibacter europaeus
  misc_feature (1)..(352): tr|A0A0M0EGA7|A0A0M0EGA7_KOMEU S-adenosylmethionine:tRN A ribosyltransferase-isomerase OS=Komagataeibacter euro paeus OX=33995 GN=queA PE=3 SV=1
MTDLVSDFDFTLPPQNIADHPARPRDSARLLDVPVDGPFRDRHVRDLPGRLRAGDILVANDTAVIPAQLSAMRGDAKIGITLDRILPDGTWHVLARNARRLHPGDTLTFGASHVTARVIARGEGGDVTLRFSADGAAFDQFLHDVGHLALPPYIARPDGPTDADRRDYSTIFAQHRGAVAAPTAGLHFTPGLLAGLDAAGVIRQTLTLHVGAGTFLPMRSDQISAHRMHAERGTISPHAAARINAARAAGGRIVAVGTTSLRLLESATDENGIVHPFHGETSIFIRPGYRFRAVDMLLTNFHLPRSTLFMLVCAFGGYHRMKAAYAHAIASGYRFYSYGDACLLHRTEGDLP

SEQ ID NO: 67693 - protein, 352 aa, Komagataeibacter europaeus
  misc_feature (1)..(352): tr|A0A0D6Q231|A0A0D6Q231_KOMEU S-adenosylmethionine:tRN A ribosyltransferase-isomerase OS=Komagataeibacter euro paeus NBRC 3261 OX=1234669 GN=queA PE=3 SV=1
MTDLVSDFDFTLPPQNIADHPARPRDSARLLDVPVDGPFRDRHVRDLPGRLRAGDILVANDTAVIPAQLSAMRGDAKIGITLDRILPDGTWHVLARNARRLHPGDTLTFGASHVTARVIARGEGGDVTLRFSADGAAFDQFLHDVGHLALPPYIARPDGPTDADRRDYSTIFAQHRGAVAAPTAGLHFTPALLAGLDAAGVIRQTLTLHVGAGTFLPMRSDQISAHRMHAERGTISPHAAARINAARAAGGRIVAVGTTSLRLLESATDENGIVHPFHGETSIFIRPGYRFRAVDMLLTNFHLPRSTLFMLVCAFGGYHRMKAAYAHAIASGYRFYSYGDACLLHRTEGDLP

SEQ ID NO: 67694 - protein, 352 aa, Komagataeibacter hansenii
  misc_feature (1)..(352): tr|A0A318PXY5|A0A318PXY5_KOMHA S-adenosylmethionine:tRN A ribosyltransferase-isomerase OS=Komagataeibacter hans enii OX=436 GN=queA PE=3 SV=1
MTDLVSDFDFDLPVALIADHPARPRDSARMLEVPPQGAFCDRHVRDLPGCLRAGDILVANDTAVIPAQLAAMRGAARIGITLDRILPDGTWHALARNSRRLKPGDILTFAPSAVTAEVVVCEDAGGVVMRFDVEGEAFDQFLHDTGHLALPPYIARPDGPTEEDRKDYSTIFAQHRGAVAAPTAGLHFTPALLSGLEAAGVLRQTLTLHVGAGTFLPMRSEQISEHRMHAERGTITAHAAHRINAARAAGGRVIAVGTTSLRLLESATDEDGVVHPFHGETAIFIRPGYRFRAVDMLLTNFHLPRSTLFMLVSAFAGQARMRAAYEHAMAAGYRFYSYGDACLLHRNDGGAA

SEQ ID NO: 67695 - protein, 352 aa, Komagataeibacter hansenii; identical to SEQ ID NO: 67694
  misc_feature (1)..(352): tr|D5QBB7|D5QBB7_KOMHA S-adenosylmethionine:tRNA ribosy ltransferase-isomerase OS=Komagataeibacter hansenii ATC C 23769 OX=714995 GN=queA PE=3 SV=1

SEQ ID NO: 67696 - protein, 352 aa, Komagataeibacter intermedius
  misc_feature (1)..(352): tr|A0A0N1FDJ2|A0A0N1FDJ2_9PROT S-adenosylmethionine:tRN A ribosyltransferase-isomerase OS=Komagataeibacter inte rmedius AF2 OX=1458464 GN=queA PE=3 SV=1
MTDLVSDFDFTLPPENIADHPARPRDSARLLDVPVDGPFRDRHVRDLPGCLRAGDILVANDTAVIPAQLSAMRGDAKIGITLDRILPDGTWHVLARNARRLRPGDTLTFGASPVTAQVVSRGEGGDVTLRFSAEGAAFDQFLHDVGHLALPPYIARPEGPTDEDRKDYSTIFAQHRGAVAAPTAGLHFTPGLLAGLDAAGVIRQTLTLHVGAGTFLPMRSEQISAHRMHAERGTISPHAAARINAARAAGGRIVAVGTTSLRLLESATDENGIVHPFHGETAIFIRPGYRFRAVDMLLTNFHLPRSTLFMLVCAFGGYHRMKAAYAHAIASGYRFYSYGDACLLHRTEGDLP

SEQ ID NO: 67697 - protein, 352 aa, Komagataeibacter maltaceti
  misc_feature (1)..(352): tr|A0A2S3W2I3|A0A2S3W2I3_9PROT S-adenosylmethionine:tRN A ribosyltransferase-isomerase OS=Komagataeibacter malt aceti OX=1203393 GN=queA PE=3 SV=1
MTDLVSDFDFDLPATLIADHPARPRDSARMLEVPVDGPFLDRHVRDLPGCLRAGDILVANDTAVIPAQLSAMRGAARIGITLDRILPDGTWHALARNSRRLKVGDTLTFAPSHVTAEVMVCEDAGGVVLRFDAQGEAFDQFLHDTGHLALPPYIARPDGPTEQDRKDYSTIFAQHRGAVAAPTAGLHFTPALLSALEAAGVLRQTLTLHVGAGTFLPMRSEQISEHRMHAERGTITPHAAQRINAARAAGGRVVAVGTTSLRLLESATDPDGVVHPFHGETSIFIRPGYRFRAVDMLLTNFHLPRSTLFMLVSAFAGQARMRAAYGHAMAAGYRFYSYGDACLLHRNDGGAA

SEQ ID NO: 67698 - protein, 352 aa, Komagataeibacter medellinensis
  misc_feature (1)..(352): tr|G2I0K4|G2I0K4_KOMMN S-adenosylmethionine:tRNA ribosy ltransferase-isomerase OS=Komagataeibacter medellinensi s (strain NBRC 3288 / BCRC 11682 / LMG 1693 / Kondo 51) OX=634177 GN=queA PE=3 SV=1
MTDLVSDFDFTLPPDRIADHPARPRDSARLLDVPVNGPVMDRHVRDLPGCLRAGDILVANDTAVIPAQLSAMRGVAKVGITLDRILPDGTWHVLARNARRLHPGDTLTFGASPVTAEVIARGDAGDVTLRFSVEGPAFDQFLHDAGQLALPPYIARPEGPTEQDRKDYATIFAQHRGAVAAPTAGLHFTPGLLAGLERAGVLRQTLTLHVGAGTFLPMRSEQISAHHMHAERGTITAHAAQRINAARAAGGRIVAVGTTSLRLLESATDEHGIVHPFHGETAIFIKPGYRFRAVDMLLTNFHLPRSTLFMLVCAFGGYHRMQAAYAHAMAQGYRFYSYGDACLLHRSEGDLP

SEQ ID NO: 67699 - protein, 352 aa, Komagataeibacter nataicola
  misc_feature (1)..(352): tr|A0A1U9RKR7|A0A1U9RKR7_9PROT S-adenosylmethionine:tRN A ribosyltransferase-isomerase OS=Komagataeibacter nata icola OX=265960 GN=queA PE=3 SV=1
MTDLVSDFDFTLPPTSIADHPARPRDSARLLDVPEAGPFIDRHVRDLPGCLRAGDILVANDTAVIPAQLAAMRGEAKIGITLDRILPDGSWHVLARNARRLRPGDTLTFGRSPVTAQVISRGDAGDVTLRFSAEGAAFDQFLHDAGKLALPPYIARPDGPTEEDRRDYSTIFAQHRGAVAAPTAGLHFTPDLLAALDRAGVIRQTLTLHVGAGTFLPMRSDQISAHRMHAERGTISPHAAQRINAARAAGGRIIAVGTTSLRLLESATDENGIVHPFHGETAIFIRPGYRFRAVDMLLTNFHLPRSTLFMLVCAFGGYHRMQAAYAHAIASGYRFYSYGDACLLHRTEGDLP

SEQ ID NO: 67700 - protein, 352 aa, Komagataeibacter oboediens
  misc_feature (1)..(352): tr|A0A318QY65|A0A318QY65_9PROT S-adenosylmethionine:tRN A ribosyltransferase-isomerase OS=Komagataeibacter oboe diens OX=65958 GN=queA PE=3 SV=1
MTDLVSDFDFTLPPGNIADHPARPRDSARLLDVPVDGPFRDRHVRDLPGCLRAGDILVANDTAVIPAQLSAMRGDAKIGITLDRILPDGTWHVLARNARRLRPGDTLTFGASPVTAQVVSRGEGGDVTLRFSAEGAAFDQFLYDVGHLALPPYIARPEGPTDEDRKDYSTIFAQHRGAVAAPTAGLHFTPGLLAGLDAAGVIRQTLTLHVGAGTFLPMRSEQISAHRMHAERGTISPHAAARINAARAAGGRIVAVGTTSLRLLESATDENGIVHPFHGETAIFIRPGYRFRAVDMLLTNFHLPRSTLFMLVCAFGGYHRMKAAYAHAIASGYRFYSYGDACLLHRTEGDLP

SEQ ID NO: 67701 - protein, 352 aa, Komagataeibacter pomaceti
  misc_feature (1)..(352): tr|A0A318QGK0|A0A318QGK0_9PROT S-adenosylmethionine:tRN A ribosyltransferase-isomerase OS=Komagataeibacter poma ceti OX=2021998 GN=queA PE=3 SV=1
MTDLVSDFDFDLPPDLIADHPARPRDSARMLEVLAHGAFIDRHVRDLPGCLRAGDILVANDTAVIPAQLSAMRGAARIGITLDRILPDGTWHALARNARRLRPGDTLTFAPSAVTAEVVVCEEAGGVVLRFDVEGEAFDQFLHDTGHLALPPYIARPDGPTEEDRRDYSTIFAQHRGAVAAPTAGLHFTPALLSGLENAGVLRQTLTLHVGAGTFLPMRSEQISEHRMHAERGTISPHAAQRINDARAAGGRVVAVGTTSLRLLESATGEDGIVRPFHGETSIFIRPGYRFRAVDMLLTNFHLPRSTLFMLVSAFSGRARMRAAYEHAMATGYRFYSYGDACLLHRNDGGAA

SEQ ID NO: 67702 - protein, 388 aa, Komagataeibacter rhaeticus
  misc_feature (1)..(388): tr|A0A181C6X7|A0A181C6X7_9PROT S-adenosylmethionine:tRN A ribosyltransferase-isomerase OS=Komagataeibacter rhae ticus OX=215221 GN=queA PE=3 SV=1
MSFWLPPPLLSNIGLHAAPAHSSDWQEPWGFRKGSRMTDLVSDFDFTLPPDRIADHPARPRDSARLLDVPVAGPIMDRHVRDLPGCLRAGDILVANDTAVIPAQLSATRGAARIGITLDRILPDGSWHVLARNARRLHPGDRLAFGASPVTADVLACGDAGDVTLRFSVEGAAFDQFLHDTGHLALPPYIARPEGPTEQDRKDYATIFAQHRGAVAAPTAGLHFTPDLLAALDHAGVLRQTLTLHVGAGTFLPMRSEQISAHRMHAERGTITPHAARRINAARAAGGRIIAVGTTSLRLLESATDEDGVVHPFHGETAIFIKPGYRFRAVDMLLTNFHLPRSTLFMLVCAFGGYHRMQAAYAHAIAKGYRFYSYGDACLLHRSEGDLP

SEQ ID NO: 67703 - protein, 352 aa, Komagataeibacter rhaeticus
  misc_feature (1)..(352): tr|A0A070A4T2|A0A070A4T2_9PROT S-adenosylmethionine:tRN A ribosyltransferase-isomerase OS=Komagataeibacter rhae ticus AF1 OX=1432055 GN=queA PE=3 SV=1
MTDLVSDFDFTLPPDRIADHPARPRDSARLLDVPVAGPIMDRHVRDLPGCLRAGDILVANDTAVIPAQLSATRGAARIGITLDRILPDGSWHVLARNARRLHPGDRLAFGASPVTADVLACGDAGDVTLRFSVEGAAFDQFLHDTGHLALPPYIARPEGPTEQDRKDYATIFAQHRGAVAAPTAGLHFTPDLLAALDHAGVLRQTLTLHVGAGTFLPMRSEQISAHRMHAERGTITPHAARRINAARAAGGRIIAVGTTSLRLLESATDEDGVVHPFHGETAIFIKPGYRFRAVDMLLTNFHLPRSTLFMLVCAFGGYHRMQAAYAHAIAKGYRFYSYGDACLLHRSEGDLP

SEQ ID NO: 67704 - protein, 352 aa, Komagataeibacter saccharivorans
  misc_feature (1)..(352): tr|A0A347W9W4|A0A347W9W4_9PROT S-adenosylmethionine:tRN A ribosyltransferase-isomerase OS=Komagataeibacter sacc harivorans OX=265959 GN=queA PE=3 SV=1
MTDLVSDFDFTLPPERIADHPARPRDSARLLDVPVEGPIMDRHMRDLPGCLRPGDILVANDTAVIPAQLSAMRGAAKIGITLDRILPDGTWHVLARNARRLHPGDTLTFGESPVTAQVVSRGDAGDVTLRFSAEGEAFDQFLHDAGRLALPPYIARPEGPTEEDRRDYATIFAQHRGAVAAPTAGLHFTPGLLAALDAAGVLRQTLTLHVGAGTFLPMRSEQISEHRMHAERGTISPHAAERINAARAAGGRIIAVGTTSLRLLESATDENGIVHPFHGETAIFIRPGYRFRAVDMLLTNFHLPRSTLFMLVCAFGGYRRMHAAYEHAIASGYRFYSYGDACLLHRAEGDLP

SEQ ID NO: 67705 - protein, 352 aa, Komagataeibacter sp.
  misc_feature (1)..(352): tr|A0A371YW93|A0A371YW93_9PROT S-adenosylmethionine:tRN A ribosyltransferase-isomerase OS=Komagataeibacter sp. AV 382 OX=2301223 GN=queA PE=3 SV=1
MTDLVSDFDFTLPPERIADHPARPRDSARLLDVPAEGPFMDRHVRDLPGCLRAGDILVANDTAVIPAQFTAMRGAAKIGITLDRILPDGTWHALARNARRLRVGDTLTFAHTPVTAEVTSRGDAGDVTLRFSAGGAAFDQFLHDAGRLALPPYIARPDGPTEQDRKDYSTIFAQHRGAVAAPTAGLHFTPDLLAALDHAGVIRQTLTLHVGAGTFLPMRSEQISAHQMHAERGTISPHAAERINAARAAGGRVVAVGTTSLRLLESATDEEGRVHPFHGETAIFIRPGYRFRAVDMLLTNFHLPRSTLFMLVCAFGGYHRMKAAYAHAIASGYRFYSYGDACLLHRAEGDLP

SEQ ID NO: 67706 - protein, 352 aa, Komagataeibacter sp.
  misc_feature (1)..(352): tr|A0A4P5P2I7|A0A4P5P2I7_9PROT S-adenosylmethionine:tRN A ribosyltransferase-isomerase OS=Komagataeibacter sp. MSKU9 OX=1932662 GN=queA PE=3 SV=1
MTDLVSDFDFTLPPENIADHPARPRDSARLLDVPVDGPFRDRHVRDLPGCLRAGDILVANDTAVIPAQLSAMRGDAKIGVTLDRILPDGTWHVLARNARRLRPGDTLTFGASHVTAQVIARGDAGDVTLRFSAEGEAFDQFLHDVGHLALPPYIARPDGPTDEDRRDYSTIFAQHRGAVAAPTAGLHFTPGLLAGLDAAGVIRQTLTLHVGAGTFLPMRSNQISAHRMHAERGTISPHAAARINAARAAGGRIVAVGTTSLRLLESATDESGIVHPFHGETAIFIRPGYRFRAVDMLLTNFHLPRSTLFMLVCAFGGYHRMKAAYAHAIASGYRFYSYGDACLLHRTEGDLP

SEQ ID NO: 67707 - protein, 352 aa, Komagataeibacter sucrofermentans
  misc_feature (1)..(352): tr|A0A318QHE0|A0A318QHE0_9PROT S-adenosylmethionine:tRN A ribosyltransferase-isomerase OS=Komagataeibacter sucr ofermentans OX=1053551 GN=queA PE=3 SV=1
MTDLVSDFDFTLPPTSIADHPARPRDSARLLDVPQAGPFIDRHVRDLPGCLRAGDILVANDTAVIPAQLAAMRGEAKIGITLDRILPDGSWHVLARNARRLRPGDTLTFGRSTVTAEVISRGDAGDVTLRFSAEGAAFDQFLHDAGKLALPPYIARPDGPTEEDRKDYSTIFAQHRGAVAAPTAGLHFTPDLLAALDKAGVIRQTLTLHVGAGTFLPMRSDQISAHRMHAERGTISPHAAQRINAARAAGGRIVAVGTTSLRLLESATDENGIVHPFHGETAIFIKPGYRFRAVDMLLTNFHLPRSTLFMLVCAFGGYHRMQAAYAHAIASGYRFYSYGDACLLHRTEGDVP

SEQ ID NO: 67708 - protein, 352 aa, Komagataeibacter swingsii
  misc_feature (1)..(352): tr|A0A2V4R1Y5|A0A2V4R1Y5_9PROT S-adenosylmethionine:tRN A ribosyltransferase-isomerase OS=Komagataeibacter swin gsii OX=215220 GN=queA PE=3 SV=1
MTDLVSDFDFTLPPQNIADHPARPRDSARLLDVPVDGPFLDRHVRDLPGCLRAGDILVANDTAVIPAQLQAMRGDAKIGITLDRILPDGTWHALARNARRLRPGDVLAFGASPVTAQVIARGEGGDVTLRFSAEGAAFDQFLHDVGHLALPPYIARPDGPTDEDRKDYSTIFAQHRGAVAAPTAGLHFTPGLLAGLDAAGVIRQTLTLHVGAGTFLPMRSDQISAHRMHAERGTISPHAAARINAARAAGGRIVAVGTTSLRLLESATDEDGIVHPFHGETSIFIRPGYRFRAVDMLLTNFHLPRSTLFMLVCAFGGYHRMKAAYAHAIASGYRFYSYGDACLLRRTEGDLP

SEQ ID NO: 67709 - protein, 352 aa, Komagataeibacter xylinus
  misc_feature (1)..(352): tr|A0A2D3HIW2|A0A2D3HIW2_KOMXY S-adenosylmethionine:tRN A ribosyltransferase-isomerase OS=Komagataeibacter xyli nus OX=28448 GN=queA PE=3 SV=1
MTDLVSDFDFTLPPDRIADHPARPRDSARLLDVPVAGPIMDRHVRDLPGCLRAGDILVANDTAVIPAQLSATRGAARIGITLDRILPDGSWHVLARNARRLHPGDTLAFGASPVTADVLACGDAGDVTLRFSVEGAAFDQFLHDTGHLALPPYIARPEGPTEQDRKDYATIFAQHRGAVAAPTAGLHFTPDLLAALDHAGVLRQTLTLHVGAGTFLPMRSEQISAHRMHAERGTITPHAARRINAARAAGGRIIAVGTTSLRLLESATDEDGVVHPFHGETAIFIKPGYRFRAVDMLLTNFHLPRSTLFMLVCAFGGYRRMQAAYAHAIAKGYRFYSYGDACLLHRSEGDLP

SEQ ID NO: 67710 - protein, 352 aa, Komagataeibacter xylinus; identical to SEQ ID NO: 67694
  misc_feature (1)..(352): tr|A0A143WF37|A0A143WF37_KOMXY S-adenosylmethionine:tRN A ribosyltransferase-isomerase OS=Komagataeibacter xyli nus OX=28448 GN=queA PE=3 SV=1

SEQ ID NO: 67711 - protein, 351 aa, Kordia algicida
  misc_feature (1)..(351): tr|A9DJA6|A9DJA6_9FLAO S-adenosylmethionine:tRNA ribosy ltransferase-isomerase OS=Kordia algicida OT-1 OX=39158 7 GN=queA PE=3 SV=1
MAKKLSHFNFDLPEDLLAEYPSEHRDEARLMVLNREKQTIEHKKFKDLVDYFDEGDVMVLNNTKVFPARLFGNKEKTGARIEVFLLRELNEDQRLWDVLVDPARKIRIGNKLYFGEDESLVAEVIDNTTSRGRTLRFLYDGSYEEFRTKLGELGQTPLPKYIKRDVEPEDEERYQTIYAKEEGAVAAPTAGLHFSKHLLKRLEIKGIDFAEVTLHVGLGTFNPVEVEDLSKHKMDSEELKIEAPAVATVNNAKTRKQRVCAVGTTVMRALESSVSSDLTLNEYEGWTNKFIFPPYEFSIANCMITNFHTPKSTLLMMVSAFAGHEFILKAYEEAIKEGYQFYSYGDAMLIL

SEQ ID NO: 67712 - protein, 351 aa, Kordia periserrulae
  misc_feature (1)..(351): tr|A0A2T6C5R6|A0A2T6C5R6_9FLAO S-adenosylmethionine:tRN A ribosyltransferase-isomerase OS=Kordia periserrulae O X=701523 GN=queA PE=3 SV=1
MAKKLSHFNFNLPSELLAEYPSEHRDEARLMVLNREKQTIEHRKFKDLVDYFDEGDVMVLNNTKVFPARLFGNKEKTGARIEVFLLRELNEEQRLWDVLVDPARKIRIGNKLYFGDDESLVAEVIDNTTSRGRTLRFLYDGSYQEFRAKLSELGQTPLPKYIKREVEPEDEERYQTIYAKEEGAVAAPTAGLHFSKHLLKRLEIKGIDFSEITLHVGLGTFNPVEVEDLSKHKMDSEELKIGPKAVEIVNNAKQNKRKVCAVGTTVMRALESSVSSERTLNEYEGWTNKFIFPPYDFSIANCMITNFHTPKSTLLMMVSAFAGHDFILKAYNEAIKEGYQFYSYGDAMLIL

SEQ ID NO: 67713 - protein, 351 aa, Kordia sp.
  misc_feature (1)..(351): tr|A0A501I209|A0A501I209_9FLAO S-adenosylmethionine:tRN A ribosyltransferase-isomerase OS=Kordia sp. TARA_039_S RF OX=2530203 GN=queA PE=3 SV=1
MAKKLSHFNFDLPSELLAEYPSEHRDEARLMVLNREKQTIEHRKFKDLVEYFDEGDVMVLNNTKVFPARLFGNKEKTGARIEVFLLRELNEEQRLWDVLVDPARKIRIGNKLYFGEDESLVAEVIDNTTSRGRTLRFLYDGSYQEFRQKLGELGQTPLPKYIKRDVEPEDEERYQTIYAKEEGAVAAPTAGLHFSKHLLKRLEIKGIDFSEITLHVGLGTFNPVEVEDLSKHKMDSEELKIEAPAVETVNNAKKNKKRVCAVGTTVMRALESSVSSERTLNEYEGWTNKFIFPPYEFSIANCMITNFHTPKSTLLMMVSAFAGHEFILKAYDEAIKEGYQFYSYGDAMLIL

SEQ ID NO: 67714 - protein, 349 aa, Kordia sp.
  misc_feature (1)..(349): tr|A0A2G2K9Z5|A0A2G2K9Z5_9FLAO S-adenosylmethionine:tRN A ribosyltransferase-isomerase OS=Kordia sp. OX=1965332 GN=queA PE=3 SV=1
MKLSQFEFELPEGLLSEHPAEHRDESRLMVLNRKEQTIEHKQFKDLIDYFDEDDVMVLNNTKVFPARLFGNKEKTGARIEVFLLRELSKEQRLWDVLVDPARKIRIGNKLYFGDDESLVAEVIDNTTSRGRTLRFLYDGGYDEFREKLNSLGVTPLPKYIKRDVEPEDKERYQTIYAKHEGAVAAPTAGLHFSRHLLKRLEIKGINFAEVTLHIGLGTFNPVEVEDLSKHKMDSEELLIDEKTIEIINGAKTRKRRVCAVGTTVMRALESAVSSDRTLNTFDGWTNKYIHPPHEFSIANCMITNFHTPKSTLLMMVAAFADYDFVMKAYEEAIKEKYNFYSYGDAMLII

SEQ ID NO: 67715 - protein, 346 aa, Kordiimonadales bacterium
  misc_feature (1)..(346): tr|A0A5A7NGH4|A0A5A7NGH4_9PROT S-adenosylmethionine:tRN A ribosyltransferase-isomerase OS=Kordiimonadales bacte rium JCM 17843 OX=1236965 GN=queA PE=3 SV=1
MDISLFDFELPRDRIALRPVSPRDQARLLRVDGGGGLDDRHVSDLPDLLRPGDLLVSNDTRVIPARLFGHRGEAKIEITLHKRLDAARWVAFARPAKKCRPGDLLEFDGLSAQVEQRDGAEVTVRFLADDVETALQQHGVMPLPPYIAAQRPADARDLDDYQTIFSEKKGAVAAPTAGLHFTDRLLAGLKARGVGQTTLTLHVGAGTFLPVKVDNTEDHRMHAEWGEITPEVARQLNEVRDRGGRIVAVGTTSLRLLESAADEQGRIQPFRGDTDIFITPGYKFRAVDVLMTNFHLPRSTLFMLVSAFCGLDRMQAAYAHAIANDYRFYSYGDACLLFPPSLTEAP

SEQ ID NO: 67716 - protein, 346 aa, Kordiimonadales bacterium
  misc_feature (1)..(346): tr|A0A5A7MNU7|A0A5A7MNU7_9PROT S-adenosylmethionine:tRN A ribosyltransferase-isomerase OS=Kordiimonadales bacte rium JCM 17844 OX=1236966 GN=queA PE=3 SV=1
MDISLFDFELPRDRIALRPVSPRDQARLLRVDGGGGLDDRHVSDLPDMLRPGDLLVSNDTRVIPARLFGHRGEAKIEITLHKRLDAARWVAFARPAKKCRPGDLLEFDGLSAQVEQRDGAEVTLRFLADDVETALQQHGVMPLPPYIAAQRPADARDLEDYQTIFSEKKGAVAAPTAGLHFTDRLLAGLKARGVAHTTLTLHVGAGTFLPVKVDNTEDHRMHAEWGEITPEVARQLNEVRDRGGRIVAVGTTSLRLLESAADEQGRIQPFRGDTDIFITPGYKFRAVDVLMTNFHLPKSTLFMLVSAFCGLDRMQAAYAHAIANDYRFYSYGDACLLFPPSLTEAP

SEQ ID NO: 67717 - protein, 344 aa, Kordiimonas lacus
  misc_feature (1)..(344): tr|A0A1G6WPY2|A0A1G6WPY2_9PROT S-adenosylmethionine:tRN A ribosyltransferase-isomerase OS=Kordiimonas lacus OX= 637679 GN=queA PE=3 SV=1
MDVDVFDFDLPKERIALRPVEPRDAARMLLVNNGTLVDAGVRDLIDQLTEKDVLVTNDTRVIPGRLTGKRGEAKVEVTLHKREDATTWRVFAKNAKKCRLGDTLDFTGLQAEVVHVGEDGERTLKFNVDPAAMTAALETHGVMPLPPYIASQRGVDERDKSDYQTVFAREDGAVAAPTAGLHFTPEMLAALDAKGIKRHTVTLHVGAGTFLPVKAERTEDHKMHSEWGEITPEVAAALNDARANGGRIVAVGTTSLRLLESAATDDGVIHPFSNDTDIFITPGYHFKGVDLLMTNFHLPKSTLFMLVSAFAGLETMKAAYQHAIAAEYRFYSYGDSSLLYPEKR

SEQ ID NO: 67718 - protein, 345 aa, Kordiimonas sp.
  misc_feature (1)..(345): tr|A0A2E1CXW5|A0A2E1CXW5_9PROT S-adenosylmethionine:tRN A ribosyltransferase-isomerase OS=Kordiimonas sp. OX=19 70157 GN=queA PE=3 SV=1
MKVDQFDFDLPKDLIALRPVAQRDRARLLIVQDQQLEDRIVTDLTSYLKPGDVLVFNNTRVIPARLTGRRGNAKVEITLHMCVSDDCWKAFARPAKKLRIGDTIVFADTLSAQVTGKGDAGEVTVTFDKKGHDLRDALEDVGVMPLPPYIAGQRPVDAQDLKDYQTVYGKKDGAVAAPTAGLHFTDQLLAATKNMGIKHVELTLHVGAGTFLPVKVEDTEDHKMHAEWGEISEEAAKILNEARREGGRIISVGTTSLRLLESAVDANGIIQPFTDTTSIFITPGYDFKAVDILMTNFHLPRSTLFMLVSAFAGFENMKAAYQHAIAEKYRFYSYGDSSLLFRHNS

SEQ ID NO: 67719 - protein, 366 aa, Koribacter versatilis
  misc_feature (1)..(366): tr|Q1II19|Q1II19_KORVE S-adenosylmethionine:tRNA ribosy ltransferase-isomerase OS=Koribacter versatilis (strain Ellin345) OX=204669 GN=queA PE=3 SV=1
MPVLVSDFDYLLPPELIAQHPLADRSATRMMHVRRYGGPEIDNLQFRSFPDLLSPDDLVVFNNTRVLPARLFGRRSGSRAQTLSPQNPASREFLTGRVEVLLTRQIQADPPVWQALVRPGRKLGVGEKIFFGEDAEHPELTAEILERGEFGERTLRFTGDFWGTVNRIGHIPLPPYIDRPDTAEDREQYQTIFARELGSVAAPTAGLHFTREILDRIAARGIETAELTLHVGLGTFQPLRHENVEENHLHLERYSISADAAEKLNRARREGRRIVAVGTTIVRTLEFAAQQSKEFGEQSGDANIFIYPGYEFRVVGGMLTNFHLPKSSLLMLVSAFAGTSRALRAYNHAVAERYRFFSYGDCMFIE

SEQ ID NO: 67720 - protein, 356 aa, Kosakonia arachidis
  misc_feature (1)..(356): tr|A0A1I6XT98|A0A1I6XT98_9ENTR S-adenosylmethionine:tRN A ribosyltransferase-isomerase OS=Kosakonia arachidis O X=551989 GN=queA PE=3 SV=1
MRVADFSFELPESLIAHYPQTERSSCRLLSLDGPTGALTHGTFTDLLDKLNPGDLLVFNNTRVIPARLFGRKASGGKIEVLVERMLDDKRILAHIRASKAPKPGAELLLGDADDVQATMVARHDALFEVEFHDQRPVLDILNAIGHMPLPPYIDRPDEDADRELYQTVYSQKPGAVAAPTAGLHFDEPLLERLRNKGIEMAFVTLHVGAGTFQPVRVDSIEDHIMHSEYAEVPQEVVDAVLAAKARGNRVVAVGTTSVRSLESAAQATNDALIAPFFGDTQIFIYPGYQYQVIDALVTNFHLPESTLIMLVSAFAGYQHTMNAYRAAVAQEYRFFSYGDAMFITYNPQAITERVGE

SEQ ID NO: 67721 - protein, 354 aa, Kosakonia cowanii
  misc_feature (1)..(354): tr|A0A410KGL7|A0A410KGL7_9ENTR S-adenosylmethionine:tRN A ribosyltransferase-isomerase OS=Kosakonia cowanii OX= 208223 GN=queA PE=3 SV=1
MRVTDFSFELPESLIAHYPQPERSSCRLLSLDGPTGALTHGTFTDLLDKLNPGDLLVFNNTRVIPARLFGRKASGGKIEVLVERMLDDKRILAHIRASKAPKPGAELLLGDAEDIQATMVARHDALFEVEFHDERPVLDILNAIGHMPLPPYIDRPDEDADRELYQTVYSQKPGAVAAPTAGLHFDEPLLERLRKKGIEMAFVTLHVGAGTFQPVRVDSIEDHIMHSEYAEVPQEVVDAVLAAKARGNRVVAVGTTSVRSLESAAQAAKADLIEPFFGDTQIFIYPGYQYKVIDALVTNFHLPESTLIMLVSAFAGYQHTMNAYRAAVAEKYRFFSYGDAMFITYNPQAILERP

SEQ ID NO: 67722 - protein, 354 aa, Kosakonia oryzae
  misc_feature (1)..(354): tr|A0A1T5FV64|A0A1T5FV64_9ENTR S-adenosylmethionine:tRN A ribosyltransferase-isomerase OS=Kosakonia oryzae OX=4 97725 GN=queA PE=3 SV=1
MRVADFSFELPESLIAHYPQPERSSCRLLSLDGPTGALTHGTFTDLLDKLNPGDLLVFNNTRVIPARLFGRKASGGKIEVLVERMLDDKRILAHIRASKAPKPGAELLLGDAEDVRATMVARHDALFEVEFHDERPVLDILNAIGHMPLPPYIDRPDEDADRELYQTVYSQKPGAVAAPTAGLHFDEPLLERLRNKGIEMAFVTLHVGAGTFQPVRVDSIEDHIMHSEYAEVPQEVVDAVLAAKARGNRVVAVGTTSVRSLESAAQAANDALIAPFFGDTQIFIYPGYQYQVIDALVTNFHLPESTLIMLVSAFAGYQHTMNAYRAAVAQEYRFFSYGDAMFITYNPQAITERP

SEQ ID NO: 67723 - protein, 354 aa, Kosakonia oryzendophytica
  misc_feature (1)..(354): tr|A0A1C4AQF6|A0A1C4AQF6_9ENTR S-adenosylmethionine:tRN A ribosyltransferase-isomerase OS=Kosakonia oryzendophy tica OX=1005665 GN=queA PE=3 SV=1
MRVADFSFELPESLIAHYPQPERSSCRLLSLDGPTGALTHGTFTDLLDKLNPGDLLVFNNTRVIPARLFGRKASGGKIEVLVERMLDDKRILAHIRASKAPKPGTELLLGDGEDIPATMVARHDALFEVAFHDERPVLDILNAIGHMPLPPYIDRPDEDADRELYQTVYSQKPGAVAAPTAGLHFDEPLLARLREKGIEMAFVTLHVGAGTFQPVRVDSIEDHIMHSEYAEVPQEVVDAVLAAKSRGNRVVAVGTTSVRSLESAAQAAKDALIAPFFGDTQIFIYPGYQYQVIDALVTNFHLPESTLIMLVSAFAGYQHTMNAYRAAVAEKYRFFSYGDAMFITYNPQALLERP

SEQ ID NO: 67724 - protein, 354 aa, Kosakonia oryziphila
  misc_feature (1)..(354): tr|A0A1C4DCZ6|A0A1C4DCZ6_9ENTR S-adenosylmethionine:tRN A ribosyltransferase-isomerase OS=Kosakonia oryziphila OX=1005667 GN=queA PE=3 SV=1
MRVADFSFELPESLIAHYPQTERSSCRLLSLDGPTGALTHGTFTDLLDKLNPGDLLVFNNTRVIPARLFGRKASGGKIEVLVERMLDDKRILAHIRASKAPKPGAELLLGDAEDVQATMVARHDTLFEVEFHGERPVLDILNAIGHMPLPPYIDRPDEDADRELYQTVYSQKPGAVAAPTAGLHFDEPLLERLRNKGIEMAFVTLHVGAGTFQPVRVDSIEDHIMHSEYAEVPQEVVDAVLAAKARGNRVVAVGTTSVRSLESAAQAANDALIAPFFGDTQIFIYPGYQYQVIDALVTNFHLPESTLIMLVSAFAGYQHTMNAYHAAVAQEYRFFSYGDAMFITYNPQAITERP

SEQ ID NO: 67725 - protein, 354 aa, Kosakonia radicincitans; identical to SEQ ID NO: 67722
  misc_feature (1)..(354): tr|A0A1V0LI16|A0A1V0LI16_9ENTR S-adenosylmethionine:tRN A ribosyltransferase-isomerase OS=Kosakonia radicincita ns DSM 16656 OX=1177180 GN=queA PE=3 SV=1

SEQ ID NO: 67726 - protein, 354 aa, Kosakonia radicincitans; identical to SEQ ID NO: 67722
  misc_feature (1)..(354): tr|A0A5C1PAY5|A0A5C1PAY5_9ENTR S-adenosylmethionine:tRN A ribosyltransferase-isomerase OS=Kosakonia radicincita ns OX=283686 GN=queA PE=3 SV=1

SEQ ID NO: 67727 - protein, 354 aa, Kosakonia sp.
  misc_feature (1)..(354): tr|A0A3G9BQ10|A0A3G9BQ10_9ENTR S-adenosylmethionine:tRN A ribosyltransferase-isomerase OS=Kosakonia sp. CCTCC M 2018092 OX=2492396 GN=queA PE=3 SV=1
MRVTDFSFELPESLIAHYPQPERSSCRLLSLDGPTGALTHGTFTDLLDKLNPGDLLVFNNTRVIPARLFGRKASGGKIEVLVERMLDDKRILAHIRASKAPKPGAELLLGDAEDIQATMVARHDALFEVEFHDERPVLDILNAIGHMPLPPYIDRPDEDADRELYQTVYSQKPGAVAAPTAGLHFDEPLLERLRNKGIEMAFVTLHVGAGTFQPVRVDSIEDHIMHSEYAEVPQEVVDAVLAAKARGNRVVAVGTTSVRSLESAAQAAKADLIEPFFGDTQIFIYPGYQYKVIDALVTNFHLPESTLIMLVSAFAGYQHTMNAYRAAVAEKYRFFSYGDAMFITYNPQAILERP

SEQ ID NO: 67728 - protein, 356 aa, Kosakonia sp.
  misc_feature (1)..(356): tr|A0A4R0HAI5|A0A4R0HAI5_9ENTR S-adenosylmethionine:tRN A ribosyltransferase-isomerase OS=Kosakonia sp. WCHEs12 0001 OX=2529380 GN=queA PE=3 SV=1
MRVADFSFELPESLIAHYPQPERSSCRLLSLDGPTGALTHGTFTDLLDKLNPGDLLVFNNTRVIPARLFGRKASGGKIEVLVERMLDDKRILAHIRASKAPKPGTELLLGDAEDIQATMMARHDALFEVAFHDERPVLDILNAIGHMPLPPYIDRPDEEADRELYQTVYSQKPGAVAAPTAGLHFDEPLLERLRNKGIEMAFVTLHVGAGTFQPVRVDSIEDHIMHSEYAEVPQEVVDAVLAAKARGNRVVAVGTTSVRSLESAAQAAKKDLIEPFFGDTQIFIYPGYQYRVIDALVTNFHLPESTLIMLVSAFAGYKHTMNAYHAAVAEKYRFFSYGDAMFITYNPQAIFERVGE

SEQ ID NO: 67729 - protein, 337 aa, Kosmotoga arenicorallina
  misc_feature (1)..(337): tr|A0A176K0R7|A0A176K0R7_9BACT S-adenosylmethionine:tRN A ribosyltransferase-isomerase OS=Kosmotoga arenicorall ina S304 OX=1453497 GN=queA PE=3 SV=1
MKTADFDFELPEELIAQEPILPRDHCRLLVIRRNSEEFEHKRFFEIKDFLRNNDLLVLNDSRVIPARLFGKKSTGAKVEVLLIEKLNDGIWKAIVKPGSKIKKGSTLIFNELSCKVIDHLPDSTRILEFCEPDAEERIRKIGKMPIPPYIRKYPENPELYQTVYSKIEGSVAAPTAGLHFTKELLTGLQDKGVNIAYITLHVGIGTFRPVKAEKIEEHKMHEEFFTISRETAKKIEETRAKGGRIIAVGTTVVRTLESVARSDGRVLPESGYTDIFIYPPYKFKAIDGLITNFHLPRSTLLMLVSAFAGKEKILKAYKEAVKEKYRFFSFGDACLIL

SEQ ID NO: 67730 - protein, 340 aa, Kosmotoga olearia
  misc_feature (1)..(340): tr|C5CD27|C5CD27_KOSOT S-adenosylmethionine:tRNA ribosy ltransferase-isomerase OS=Kosmotoga olearia (strain ATC C BAA-1733 / DSM 21960 / TBF 19.5.1) OX=521045 GN=queA PE=3 SV=1
MNMKVSDFDYELPKELIAQEPVQPRDHSRLMVIRRDRENFEHTHFYRIIDYLEPGDLLVMNDSKVIPARLLGKKSTGAKVEIVLIEKVGSKQWKAIVRPGSKIKRGNVLLFEDLQCEVVEHCDDSTRILEFTGSNPWEKIRRIGKLPIPPYISKYPDDPNLYQTVYAKKDGSVAAPTAGLHFTDSLLKKLKEKGIKMAFVTLHVGLGTFRPVKVENVEDHVMHSEYYTLPEETVELIKETKRNGNRVIAVGTTVVRTLEAVAQKHDGKLVAESGRTDIFIYPPYEFKVIDGLITNFHLPKSTLLMLVAAFTGREKILKAYNEAIKLRYRFFSFGDACFIY

SEQ ID NO: 67731 - protein, 338 aa, Kosmotoga pacifica
  misc_feature (1)..(338): tr|A0A0G2ZH06|A0A0G2ZH06_9BACT S-adenosylmethionine:tRN A ribosyltransferase-isomerase OS=Kosmotoga pacifica OX =1330330 GN=queA PE=3 SV=1
MKITDFDYELPEELIAQEPILPRDHCRLLVIRRDSENLEHRRFYDIKEYLEPGDLLVLNDSKVIPARLYGHKSTGAKIEVLLIEKIHSGIWKAIVKPGSKIKKGSQLLFEKLSCQVIEHLPDSTRILKFNEPDAEEIIKEIGRLPIPPYISKYPNDPELYQTVYAKTEGSVAAPTAGLHFTQQLLGELKDMGVNIAYITLHVGLGTFRPVKVENIEEHKMHSEFYTISEETVEKIGKTRKNGNRIIAVGTTVVRTLESVVAENKGRLIAKSGYTDIFIYPPFEFKIVDGIVTNFHLPRSTLLMLVSAFAGREKILKAYEKAVEKRYRFFSFGDACLIL

SEQ ID NO: 67732 - protein, 337 aa, Kosmotoga sp.
  misc_feature (1)..(337): tr|A0A5D0SFZ5|A0A5D0SFZ5_9BACT S-adenosylmethionine:tRN A ribosyltransferase-isomerase OS=Kosmotoga sp. OX=1955 248 GN=queA PE=3 SV=1
MKVSAFDYNLPDDLISQKPAIPRDSCRLMIIDKKNKKFIHDVFRNIGNYLKSGDLLVLNDSRVIPARLIGKKTTGASVEAVLLKKINNGEWKAIVRPGNKIKKGNTLLFSNIRCMVTKHYKDGTRLLSFLGNYSDEEIFKAGLLPVPPYIKEYPERPEYYQTIYAKKNGSIAAPTAGLHFTKRVLTELERKGVSTAYLTLHVGLGTFRPVKTHRVEDHKMHSEYYCIDEVCAQLVNKTLNNNGRIIAVGTTAVRALESSYRKHGRVLPDCDETDIFIYPPFDFYVISGLITNFHLPKSTLLMLVSAFAGKETTLKAYKEAIYMRYRFFSFGDACLYI

SEQ ID NO: 67733 - protein, 339 aa, Kosmotoga sp.
  misc_feature (1)..(339): tr|A0A5D0SD09|A0A5D0SD09_9BACT S-adenosylmethionine:tRN A ribosyltransferase-isomerase OS=Kosmotoga sp. OX=1955 248 GN=queA PE=3 SV=1
MKTSEFDFNLPDRLIAHKSAEKREKSRLLIYHNKSDKIEHKKFEEILNYFDEGDVLVLNNSRVIPARLFARKPTGAEIELLLLNEKENNKWEALARPRKRLKTNKKIIIEDIEVEVAEKTEWGGVIVKFPSGLNVYRFLEKNGYVPIPPYIKNEDQKYLKKRYQTVFAEKKGSIAAPTSGLHFSKDLLEKIKLKGVKIAYLTLHVGLGTFEPVKVKKVENFDIHSEYYELEKETVEKINNARGKIVCCGTTVTRTLEYVHTKFGKLKPSKGWCDLFIYPGYDFKVIDNLITNFHLPKSSLIMLVAALTGKEKILSIYKKAICREYRFYSFGDAMFIMDD

SEQ ID NO: 67734 - protein, 301 aa, Kouleothrix aurantiaca
  misc_feature (1)..(301): tr|A0A0P9CWS1|A0A0P9CWS1_9CHLR S-adenosylmethionine:tRN A ribosyltransferase-isomerase (Fragment) OS=Kouleothri x aurantiaca OX=186479 GN=SE17_25895 PE=3 SV=1
FLQAGDVLVINTSGTLNAALAATRADGTSLELHLSTHLPADLWVVELRQPTERASAPFRGGIAGETLQLPGGASAQLLAPYSLDRTIPIEAPRLWIAALRLGSCLNCYLEEYGFPIRYGYVRDAWPSSFYQTVYATEMGSAEMPSAGRAFTPELITRRVADGVQSAPLILQTGVASLEDHEPPYEEFVRGPPTTAQQLNAARAAGRRVIAVGTTAVRALETVSTDAGQVAPGEGWTRLVITPARGIHAVDGLLTGLHEPRATHLAMLEALAGRSHLQLTYAAALRERYLWHEFGDLHLILP

SEQ ID NO: 67735 - protein, 346 aa, Kozakia baliensis
  misc_feature (1)..(346): tr|A0A1D8UUZ1|A0A1D8UUZ1_9PROT S-adenosylmethionine:tRN A ribosyltransferase-isomerase OS=Kozakia baliensis OX= 153496 GN=queA PE=3 SV=1
MQISDFDFDLPRENIALEPARPRDSARLLHVTPGAPLAEAQVRDLPRLLRPGDLLIANDTAVIRAQLAAQRGEAKIGLTLDRILPGGDWHALARNARKLKPQDILTFGDDPVTATIIENEGDGAIRLRFSVESEEFDAFLKRVGALALPPYIDRPFGPTAQDDVDYRTIFSRQKGAVAAPTAGLHFTPELLAALDEAGIQRRTLTLHVGAGTFLPVRGDDIASHKMHAEWGEIDEETATIINQTRARGGRVVAVGTTSLRLLESAADESGFVRPWRGETAIFIKPGYQFRVVDVLMTNFHLPRSTLFMLVCALAGTETMRAAYAYAIAHHFRFYSYGDACLLERAR

SEQ ID NO: 67736 - protein, 343 aa, Kribbella albertanoniae
  misc_feature (1)..(343): tr|A0A4R4Q3F0|A0A4R4Q3F0_9ACTN S-adenosylmethionine:tRN A ribosyltransferase-isomerase OS=Kribbella albertanoni ae OX=1266829 GN=E1261_15335 PE=3 SV=1
MTVHPHTRFVLPDSLNATEPPEARGLSRDQVKLLVAEGSTVTHTRFDRIGDHLRPGDLLLVNTSGTLPAAVDGTWITNSCMAPVVVHFSTALDDGNWVVELRNGGEPTFGGTAGDQVELPRGILTLLAPHQPGANRLWRAKPPVTDMISYLQRHGRPITYSYVNKRWPIASYQTVFARDPGSAEMPSAARPFSFELVSRLAAQGVLIAPITLHCGVSSLESHEPPLPERYDVPEHTARLVNWVKGNGGRIVAVGTTAVRAIESAVAADGSVVAAHGWTDLVLGPDHPAAVVDGLVTGMHAPEASHLLLLEAVAGGGTVQQAYDAALHERYLWHEFGDSCLVLK

SEQ ID NO: 67737 - protein, 344 aa, Kribbella amoyensis
  misc_feature (1)..(344): tr|A0A561BP86|A0A561BP86_9ACTN S-adenosylmethionine:tRN A ribosyltransferase-isomerase OS=Kribbella amoyensis O X=996641 GN=FB561_1708 PE=3 SV=1
MRVRPHTRFTLPDELNAVEPPEAHGLARDQVKLLVAEGSTVTHTRFDRIGDHLRPGDLLLVNTSATLAAAVDGQWITGSGVAPVAVHFSTALDDGTWVVELRSGGSPMFDAAAGDRVELPEGVLTLLAPYQPGLTRLWTAQPPVPDVVGYLRRHGRPITYQYVDRQWPLALYQTVFANQPGSAEMPSAGRPFSFELVSHLPAAGVLIAPILLHCGVSSPESHEPPLPERYDVPAHTARLVNWVKGNGGRVIAVGTTAVRAIETAARPDGSVVAAQGWTDLVLGPDRPAAIVDGLVTGMHAPEASHLLLLESVVGGDVVQRAYDAALERRYLWHEFGDVSLLLRN

SEQ ID NO: 67738 - protein, 343 aa, Kribbella antibiotica
  misc_feature (1)..(343): tr|A0A4R4ZK27|A0A4R4ZK27_9ACTN S-adenosylmethionine:tRN A ribosyltransferase-isomerase OS=Kribbella antibiotica OX=190195 GN=E1263_16710 PE=3 SV=1
MTVHPHTRFVLPDSLNATEPPEARGLARDQVKLLVAEGSTITHTRFDRIGNHLRPGDLLLVNTSGTLAAAVDGTWITGAGVARVVVHFSTALDDGNWVVELRNGGAPMLGGTAGDQVELPRGILTLLAPYQSESNRLWRAKPPVTDMVGYLQRHGRPITYSYVNKQWPLASYQTVFARDPGSAEMPSAARPFSFELVSRLAAQGVLIAPITLHCGVSSLESHEPPLPERYDVPEHTAGLVNWVKGNGGRIVAVGTTAVRAIESAVAADGSVVAARGWTDLVLGPDHPAAVVDGLITGMHAPEASHLLLLESVAGGGTVQQAYDAALHERYLWHEFGDSCLILR

SEQ ID NO: 67739 - protein, 344 aa, Kribbella flavida
  misc_feature (1)..(344): tr|D2PQH2|D2PQH2_KRIFD S-adenosylmethionine:tRNA ribosy ltransferase-isomerase OS=Kribbella flavida (strain DSM 17836 / JCM 10339 / NBRC 14399) OX=479435 GN=Kfla_0029 PE=3 SV=1
MRLRPHTRFTLPDELNAVEPPEARGLSRDQVKLLVAEGSTVTHTRFDRLGEHLRAGDLLLVNTSGTLAAAVEGSWISSSGVTPVVVHFSTELDDGTWVVELRSNGLPMLAGSTGDQVELPEGVLKLLAPYQAGSTRLWRAQPPVAEVVDYLRRHGRPITYQYVDQQWPLALYQTVFANQPGSAEMPSAGRPFSFELVSQLAAAGVLIAPILLHCGVSSLESHEPPLAERYAVPEHTARLVNWVKSTGGRVIAVGTTAVRAIETAALPSGSVVASSGWTDLVLSPERPTAVVDGLITGMHAPEASHLLLLESVVGGEAVQHAYDAALDRGYLWHEFGDTCLLLRG

SEQ ID NO: 67740 - protein, 335 aa, Kribbella jejuensis
  misc_feature (1)..(335): tr|A0A542EUL0|A0A542EUL0_9ACTN S-adenosylmethionine:tRN A ribosyltransferase-isomerase OS=Kribbella jejuensis O X=236068 GN=FB475_3176 PE=3 SV=1
MRVHPQTRFELPEQLNAGEPPEARGVSRDHVKLLVAEGSTVTHTRFDRLGDHLRAGDLLLVNTSGTLAAAVDGTPYTVHFSTPLDDGTWVVELRDRNAPLFDGTPGLQVELPEGVLTLLAPYEASPNRLWIAQPPVVDVLSYLQRHGRPITYNYVGKRWPLASYQTVFAREPGSAEMPSAARPFSFELVSHLASQGVLIAPILLHCGVSSLESHEPPQPERYDVPAHTARLVNWVKANGGRVIAVGTTAVRAIETAASPDGTVSPSHGWTDLVLGLTREPRVVDGLITGWHAPEASHLLLLESVAGPDQVQNAYTEALDHGYLWHEFGDSCLLLR

SEQ ID NO: 67741 - protein, 343 aa, Kribbella pittospori
  misc_feature (1)..(343): tr|A0A4R0K9U5|A0A4R0K9U5_9ACTN S-adenosylmethionine:tRN A ribosyltransferase-isomerase OS=Kribbella pittospori OX=722689 GN=E0H73_33510 PE=3 SV=1
MTVHPQTHFVLPDSLNASEPPEARGLSRHQVKLLVAEGSTITHTRFDRIGEHLRPGDLLLVNTSGTLPAAVDGSWITGAGVAPVVVHFSTALDDGTWVVELRSNRAPMLGGTAGDQVEMPEGVLTLLAPYQSESNRLWRAKPPVADVLGYLTRHGRPISYSYVGKRWPLASYQTVFAREPGSAEMPSAARPFSFELVSHLAAQGVLIAPILLHCGVSSLESHEPPLPERYDVPEHTARLVNWVRANGGRVIAVGTTAVRAIESAVTQEGTVSPSNGWTDLVLGPDHPSRVVDGLITGMHAPEASHLLLLESVAGPDAVQRAYTAALNEHYLWHEFGDVCLLLR

SEQ ID NO: 67742 - protein, 334 aa, Kribbella sindirgiensis
  misc_feature (1)..(334): tr|A0A4R0JBX7|A0A4R0JBX7_9ACTN S-adenosylmethionine:tRN A ribosyltransferase-isomerase OS=Kribbella sindirgiens is OX=1124744 GN=E0H50_03470 PE=3 SV=1
MMVHPHTRFDLPEALNAGEPPEARGVSRDHVKLLVAEGSTVTHTRFDRIGDHLRPGDLLLVNTSTTLPAAVDSASYTVHFSTPLDDGTWVVELRDGGAPMFHGTAGVRVELPGGALTLLAPYQSSNRLWIAQPPVADVLGYLQQYGRPITYNYVGKRWPLASYQTVFARDPGSAEMPSAARPFSFELVSHLASQGVLIAPILLHCGVSSLESHEPPQPERYDVPAHTARLVNWVKANGGRVIAVGTTAVRAIESATTPDGTVAPAHGWTDLILGPDRPPYVVDGLITGWHAPEASHLLLLESVAGPAQVQRAYDAAVEHRYLWHEFGDSCLILR

SEQ ID NO: 67743 - protein, 334 aa, Kribbella soli
  misc_feature (1)..(334): tr|A0A4Q7XDD7|A0A4Q7XDD7_9ACTN S-adenosylmethionine:tRN A ribosyltransferase-isomerase OS=Kribbella soli OX=112 4743 GN=EV645_2872 PE=3 SV=1
MKVHPHTRFVLPDALNAGEPPEARGLRRDQVKLLVAEGSTVTHTRFDRIGEHLRPGDLLLVNTSGTLPAAVDGASVTVHFSTALDDGTWVVELRDGGSPRFDGKAGQQVELPEGVLTLLAPYQSESNRLWIARPPVPDVLGYLQRHGRPITYDYVGKRWPLAAYQTVFAREPGSAEMPSAARPFSFELVSRLASQGVLIAPILLHCGVSSLESHEPPQPERYDVPAHTARLVNWVKANGGRVIAVGTTAVRAIESAADASVNPSQGWTDLVLSPDRPPQVVDGLITGWHAPEASHLLLLESVVGTELVQRAYDAAVQQNYLWHEFGDSALLLRG

SEQ ID NO: 67744 - protein, 333 aa, Kribbella soli
  misc_feature (1)..(333): tr|A0A4R0HM03|A0A4R0HM03_9ACTN S-adenosylmethionine:tRN A ribosyltransferase-isomerase OS=Kribbella soli OX=112 4743 GN=E0H45_11320 PE=3 SV=1
MVHPHTRFDLPEALNAGEPPEARGLSRDHVKLLVAEGSTVTHTRFDRIGEHLRPGDLLLVNTSTTLPAAVDSSSYTVHFSTPLDDGTWVVELRNSGAPMFDGTAGDRVELPEGALTLLAPYQGSRRLWIAKPPVADVLGYLQRHGRPITYNYVDKRWPLASYQTVFARDPGSAEMPSAARPFSFELVSHLASQGVLIAPILLHCGVSSLESHEPPQPERYDVPAHTARLVNWVKANGGRVIAVGTTAVRAIESATTPDGTVTPAHSWTDLILGPERPPHVVDGLITGWHAPEASHLLLLESVAGPDQVQRAYDAAVQGRYLWHEFGDSCLMLR

SEQ ID NO: 67745 - protein, 334 aa, Kribbella sp.
  misc_feature (1)..(334): tr|A0A4R0J412|A0A4R0J412_9ACTN S-adenosylmethionine:tRN A ribosyltransferase-isomerase OS=Kribbella sp. YM55 OX =1572660 GN=E0H92_01745 PE=3 SV=1
MTVHPHTRFDLPEALNAGEPPEARGVSRDHVKLLVAEGSTVTHTRFDRIGDHLRPGDLLLVNTSTTLPAAVDSASYTVHFSTPLDDGTWVVELRDGGAPMFHGTAGDRVELPGGALTLLAPYQGSNRLWIAQPPVVDVLGYLQQYGRPITYNYVGKRWPLASYQTVFARDPGSAEMPSAARPFSFELVSHLASQGVLIAPILLHCGVSSLESHEPPQPERYDVPAHTARLVNWVKANGGRVIAVGTTAVRAIESATTHDGTVAPAHGWTDLILGPERPPYVVDGLITGWHAPEASHLLLLESVAGPDQVQRAYDAAVEHRYLWHEFGDSCLILR

SEQ ID NO: 67746 - protein, 344 aa, Kribbella sp.
  misc_feature (1)..(344): tr|A0A4R6KSV7|A0A4R6KSV7_9ACTN S-adenosylmethionine:tRN A ribosyltransferase-isomerase OS=Kribbella sp. VKM Ac- 2527 OX=2512215 GN=EV643_101706 PE=3 SV=1
MRVHPQTRFTLPDELNAAQPPEARGLVRDQVKLLVAAGSAITHTRFDRIGEHLRPGDLLLVNTSATLAAAVDGSWITGSGVAPVVVHFSTELDDGTWVVELRSGGTPMLGAADGDQVELPEGVLTLLSPYQLGLTRLWIAQPPVPDVVEYLRRHGRPISYKYVSREWPLAFYQTVFANQPGSAEMPSAGRPFSFELVSHLAAAGVLIAPILLHCGVSSLESHEPPLPERYAVPEHTARLVNWVKANGGRVIAVGTTAVRAIETAALPDGSVVAAEGWTDLVLGPDRSAVVVDGLVTGMHAPDASHLLLLESVVGADIVQHAYNAALEQHYLWHEFGDTSLLLRS

SEQ ID NO: 67747 - protein, 349 aa, Kriegella aquimaris
  misc_feature (1)..(349): tr|A0A1G9PRA4|A0A1G9PRA4_9FLAO S-adenosylmethionine:tRN A ribosyltransferase-isomerase OS=Kriegella aquimaris O X=192904 GN=queA PE=3 SV=1
MKLSHFSFELPDNLLAEYPAENRDESKLMVVHRDTGKIEHKMFKDLINYFDEGDVMVLNNTKVFPARLYGNKEKTGARIEVFLLRELNEEQRLWDVLVDPARKIRIGNKLYFGDDETLVAEVIDNTTSRGRTLRFLYDGSYTDFRRKLRDLGQTPLPKYIKRGVEPEDEERYQTIYAKHEGAVAAPTAGLHFSKHLLKRLEIKGIDFAEVTLHVGLGTFNPVEVEDLSKHKMDSEELIIDERATEIVNNAKTNKKKVCAVGTTAMRGLESAVSSGHTLNTFDGWTNKFVFPPYEFSIANCMVTNFHLPKSTLLMMVSAFMGHDLMKKAYKEAILEGYRFYSYGDAMLII

SEQ ID NO: 67748 - protein, 343 aa, Kroppenstedtia eburnea
  misc_feature (1)..(343): tr|A0A1N7M6U4|A0A1N7M6U4_9BACL S-adenosylmethionine:tRN A ribosyltransferase-isomerase OS=Kroppenstedtia eburne a OX=714067 GN=queA PE=3 SV=1
MDVSQFDFELPEELIAQEPAPKRSGSRLMVVNRENQTVEHRRFPDLLEYLHPGDVLVLNDTRVRPARLVGVKEGTGARIELLLLNPLGGDRWEALVKPAKRVKEGTVVRFGDGKLQAVAQEMTEAAGGRVFQLQYQEQDLEILLERLGEMPLPPYIHRRLDEPERYQTVYSRAVGSAAAPTAGLHFTEDLLNRAKEKGVKIVTITLHVGLGTFRPVTAESVEEHQMHAEFYEVSEEAAEQIRVAKAKGNRVVAVGTTSVRTLETVARDHGEIRAARGWTDIFIYPGFPFRVTDALLTNFHLPKSTLLMLVSAFSSRELMLQAYRTAVREKYRFFSFGDAMLIL

SEQ ID NO: 67749 - protein, 362 aa, Ktedonobacter racemifer
  misc_feature (1)..(362): tr|D6U0Z3|D6U0Z3_9CHLR S-adenosylmethionine:tRNA ribosy ltransferase-isomerase OS=Ktedonobacter racemifer DSM 4 4963 OX=485913 GN=Krac_3296 PE=3 SV=1
MTSLPIQTALDASLDFVLPAELEATRPPEARGLARDEVRLMVSYRANDHILHDRFREIEHFLEPGDLLVVNTSGTMNAALSATRADGTPLEVHLSTHLPANLWIVEVRLKQGERTFPFSEMQAGERVPLPGGASLHLLTPYSAGEGRLQPARQRLWIATIELASPLQEYLASYGFPIRYNYVPEAWPLEYYQTVYATEYGSAEMPSAGRAFTPELIARLVARGIQIVPLLLHTGVSSLEEHEPPYEEYYRVPVETAKSINTAHANHKRVVAVGTTVVRALETVTDVDGVTHPGEGWTRLVITPQRGLRAVNALLTGLHEPRASHLLMLEALAGREHLRKTYAAALQEQYLWHEFGDLHLLLP

SEQ ID NO: 67750 - protein, 379 aa, Ktedonobacter racemifer
  misc_feature (1)..(379): tr|D6THZ9|D6THZ9_9CHLR S-adenosylmethionine:tRNA ribosy ltransferase-isomerase OS=Ktedonobacter racemifer DSM 4 4963 OX=485913 GN=queA PE=3 SV=1
MDSNTVEQRTQQSLPDLKISDFDYHLPNELIAQTPIEPRDSSRLLVVKRQDETLAHQHFRDIEEYLQPGDLLIANQSRVIPARLLGKRAESGGAVEVLLLAERSDLGQDTWEALVRPGRRLREGARIFFGAETEEQARLIGEILERTEAGGRVVRFHVPGRSQERQNDPYALLDVRQVIDEIGKMPLPPYIHETLDDPERYQTVYARIRGSAAAPTAGLHFTPQLLERLRARGVRTGFVTLHVGLDTFRPVESEDVREHKMHSEEIELDETTAALINETRARGGRVVAVGTTSVRVLESVASLHEGRIVPYKGHTRLFITPGYRYQAVDALITNFHLPRSTLLLLVSAFMTKPLMERAYQEAITERYRFFSFGDAMLIL

SEQ ID NO: 67751 - protein, 356 aa, Ktedonobacter sp.
  misc_feature (1)..(356): tr|A0A1Q6YU43|A0A1Q6YU43_9CHLR S-adenosylmethionine:tRN A ribosyltransferase-isomerase OS=Ktedonobacter sp. 13_ 2_20CM_53_11 OX=1805233 GN=AUH05_08465 PE=3 SV=1
MSSTIPDNTVLDFDLPPELEASEPPEARGLARDEVRLMVSYRSRNRVVHTQFRQIGEFLNPGDLLVINTSGTMNAALNATRSDGMPLELHLSTHLPADLWVVEARTLNGKATKPFYNIKAGERLQLPGGAEATLHMPYLHSQGDGPHRLWIATLNLPRPLPAYLEQHGFPIRYSYVKEGWPLAYYQNVYSTEKGSAEMPSAGRAFTPELITQLVARGVQVAPLLLHTGVASLESHEPPYEEFYRVPLETARLVNAARANRKRVIAVGTTVVRSLETVTDEEGTAHPGEGWTKLVITPQRGLRAVNAMITGLHEPCATHLSMLEALAGLEHLKITYREALQERYLWHEFGDVHLILP

SEQ ID NO: 67752 - protein, 287 aa, Ktedonobacter sp.
  misc_feature (1)..(287): tr|A0A1Q7WLH1|A0A1Q7WLH1_9CHLR S-adenosylmethionine:tRN A ribosyltransferase-isomerase (Fragment) OS=Ktedonobac ter sp. 13_1_20CM_3_54_15 OX=1805224 GN=AUG45_12395 PE= 3 SV=1
LLGRRAETGGAVEVLLLAERIDIGPDCWETLVRPGRRLREGSRLEFSHEGLPNLALNAEVLQHTEAGGRVIRFSPAAEQSLTVGQLIERLGHMPLPPYIHKTLTDPERYQTVYARISGSAAAPTAGLHFTPGLLEHLRKQGVRVGFVTLHVGLDTFRPVEVEDVSDHKMHSEEIELDAPTAELIEETRKAGGRVVAVGTTSMRVLESVAGFYDGRVCPYRGSTRLFITPGYRFRVVDAMITNFHLPRSTLLLLVSAFAGKALIEKAYQEAIHEHYRFFSFGDAMLIL

SEQ ID NO: 67753 - protein, 368 aa, Ktedonobacterales bacterium
  misc_feature (1)..(368): tr|A0A4P6JY84|A0A4P6JY84_9CHLR S-adenosylmethionine:tRN A ribosyltransferase-isomerase OS=Ktedonobacterales bac terium SCAWS-G2 OX=2509675 GN=queA PE=3 SV=1
MDKQSLKISDFDYNLPTELIAQTPLEPRDASRLLVVQRTSGTMEHRHFRDIGDYLRPGDLLVANQSRVIPARLLGKRAETGGAVEVLLLAERPDLGQDCWEALVRPGRRLREGAMILFNDERDAPRLQGEVMERTEAGGRVLRFSTYGNSEPTNAADPYSLLNVRQLIDELGRMPLPPYIHEKLNDPERYQTVYARIRGSAAAPTAGLHFTPQLLEQLRQQGVRVGFVTLHVGLDTFRPVECEDVSEHKMHSEEIDLDAPTAELIRETRAAGGRVVAVGTTTMRVLESVAGFHNGQIEPFHGHTSLFITPGFHFQAVDALITNFHLPRSTLLLLVSAFMGKGLMEKAYQEAIEQRYRFFSFGDAMLLL

SEQ ID NO: 67754 - protein, 370 aa, Ktedonobacterales bacterium
  misc_feature (1)..(370): tr|A0A4P6JRY1|A0A4P6JRY1_9CHLR S-adenosylmethionine:tRN A ribosyltransferase-isomerase OS=Ktedonobacterales bac terium SCAWS-G2 OX=2509675 GN=EPA93_20545 PE=3 SV=1
MSKNIPQPPVHNVDDKSSVEASRMHFSLPAELEAGEPPEARGLERDEVRLMVSYVSNNQVAHTRFRQIEDFLNAGDVLVINTSGTLNAALPVQSKDGTRFGLHLSTHLPNNTWVIELRSYTDALKKTTRPYYGAKPGETYQLPAGGKLTIHKAYRSDQAVPRLWIASLDLPAPLHAYLNEYGFPIRYGYVREGWPISYYQTVYATEMGSAEMPSAGRAFTHQLITRLVAKGILIVPLLLHTGVASAEYNEPVYEEYYRVPQSTAYIINAAHEANRRVIAVGTTVVRALETVTDTNGITSAGEGWTDIFITPQRGIHAVNGLITGLHEPLSTHLAMLEAIAGRAHLEITYQQALQEGYLWHEFGDLHLILP

SEQ ID NO: 67755 - protein, 367 aa, Kuenenia stuttgartiensis
  misc_feature (1)..(367): tr|Q1Q6B9|Q1Q6B9_KUEST S-adenosylmethionine:tRNA ribosy ltransferase-isomerase OS=Kuenenia stuttgartiensis OX=1 74633 GN=queA PE=3 SV=1
MPLIFCFSLLNTGMPDVSVISHKLSDYDFDLPKELIAQKPTEKRDNARLLVLYRRSGRIEHRRFSEIAGYLRPEDLLVLNNTKVIPSRIAGKKPQGAYVDLLFIEELEDNHWKALLKSNGLLKKGEKIYLDNAAVSACLLVKHEDNSWILRIENGANIRELIHRTGEMPLPPYIKRPKKNNTLSTLDAERYQTVFAQKEGAIAAPTAGLHFSEDVLGKIRNSGTDIAFVTLHVRLGTFLPIKTEEIKNHRMHKEYYEYTKELLPKITITKNRGGRIIATGSTSCRTLETIALNNNIHQFSGYTDLFIYPPYPFQYVDALITNFHLPKTTLFLLVSAFAGREQIFNAYEIAKKEGYRFYSYGDCMLII

SEQ ID NO: 67756 - protein, 354 aa, Kuenenia stuttgartiensis
  misc_feature (1)..(354): tr|A0A2C9CJ82|A0A2C9CJ82_KUEST S-adenosylmethionine:tRN A ribosyltransferase-isomerase OS=Kuenenia stuttgartien sis OX=174633 GN=queA PE=3 SV=1
MPDVSVISHKLSDYDFDLPKELIAQKPTEKRDNARLLVLYRRSGRIEHRRFSEIAGYLRPEDLLVLNNTKVIPSRIAGKKPQGAYVDLLFIEELEGNHWKALLKSNGLLKKGEKIYLDNAAVSACLLVKHEDNSWILRIENGANIRELIHRTGEMPLPPYIKRPKKNNTLSTLDAERYQTVFAQKEGAIAAPTAGLHFSEDVLGKIRNSGTDIAFVTLHVGLGTFLPIKTEEIKNHRMHKEYYEYTKELLPKITITKNRGGRIIATGSTSCRTLETIALNNNIHQFSGYTDLFIYPPYPFQYVDALITNFHLPKTTLFLLVSAFAGREQIFNAYEIAKKEGYRFYSYGDCMLII

SEQ ID NO: 67757 - protein, 349 aa, Kurthia sibirica
  misc_feature (1)..(349): tr|A0A2U3AIF5|A0A2U3AIF5_9BACL S-adenosylmethionine:tRN A ribosyltransferase-isomerase OS=Kurthia sibirica OX=2 02750 GN=queA PE=3 SV=1
MKLEDFDYELPEELIAQIPLEDRTSSRLMVLDRETGEVSHNHFRDILGEFKAGDCLILNNTRVLPARLIGEKKATGGHAEVLLLKQTTTDEWETLVKPAKRVKVGTELTFGDGLLKAVCTGVLDHGGRIFKFDYEGIFIEILEQLGTMPLPPYIHEKLEDQERYQTVYSKELGSAAAPTAGLHFTEELLDAIRAKGVKVAFLTLHVGIGTFRPVNVENIEEHDMHAEFYHLSEETAQIIRDTQASGGNVISVGTTSTRTLETIAERHNGKIVADSGWTSIFIYPGFEYKAIDGMVTNFHLPKSTLVMMISALASRDMILNAYKIAVQEKYRFFSFGDAMFIRPKAQKGN

SEQ ID NO: 67758 - protein, 348 aa, Kurthia sp.
  misc_feature (1)..(348): tr|A0A433RRW9|A0A433RRW9_9BACL S-adenosylmethionine:tRN A ribosyltransferase-isomerase OS=Kurthia sp. 3B1D OX=1 562256 GN=queA PE=3 SV=1
MKLEDFDYYLPEELIAQVPLENRAASRLMVLNKETGEVEHHHFPHIVDELEKGDCLILNDTRVLPARLIGEKKDTGAHIEVLLIKQTENDEWETLVKPAKRIKEGTVVSFGNGLLTATCTSEMDHGGRKFKFDYEGIFIEILEKLGTMPLPPYIHEKLDDQERYQTVYSKELGSAAAPTAGLHFTEEILDAIRAKGVEVAFVTLHVGIGTFRPVSVDNIEEHDMHAEFYNLPEDTAKIINDTKANGGRVITVGTTSTRTLETVAQNNNGEIVAESGWSKIFIYPGFEYKAIDGMVTNFHLPKSSLVMMISALSSRENVLNAYKIAVENKYRFFSFGDAMFIRPQKKGN

SEQ ID NO: 67759 - protein, 348 aa, Kurthia sp.
  misc_feature (1)..(348): tr|A0A0X9VCL0|A0A0X9VCL0_9BACL S-adenosylmethionine:tRN A ribosyltransferase-isomerase OS=Kurthia sp. 11kri321 OX=1750719 GN=queA PE=3 SV=1
MKLEDFDYVLPEELIAQVPLENRAASRLMVLDKETGEVEHHHFPHIVEELEAGDCLILNDTRVLPARLIGEKKETGAHIEVLLIKQTADDEWETLVKPAKRIKVGTVVTFGDGLLTAECTGELEHGGRLFKFNYEGIFIEILEKLGTMPLPPYIHEKLDNQERYQTVYSKELGSAAAPTAGLHFTDEILDAIRAKGVQVAFVTLHVGIGTFRPVSVETIEEHDMHAEFYNLPAETAQIINDTKANGGRVIAVGTTSTRTLETVAQNNNGQIIAESGWSKIFIYPGFEYKAIDGMVTNFHLPKSSLVMMISALAGRENVLNAYKIAVENKYRFFSFGDAMFIRPQKKGN

SEQ ID NO: 67760 - protein, 348 aa, Kurthia zopfii
  misc_feature (1)..(348): tr|A0A2U3AHF6|A0A2U3AHF6_9BACL S-adenosylmethionine:tRN A ribosyltransferase-isomerase OS=Kurthia zopfii OX=165 0 GN=queA PE=3 SV=1
MKLEDFDYELPEELIAQVPLENRSASRLMVLDKETGEVEHHHFPHIVNELEAGDCLILNDTRVLPARLIGLKEETGAHIEVLLIKQTSGDEWETLVKPAKRIKKGTIVTFGEGLLKAVCTAELDHGGRQFKFEYEGIFIEILEKLGTMPLPPYIHEKLDNQERYQTVYSRELGSAAAPTAGLHFTEEILEAIRAKGVQVAFVTLHVGIGTFRPVSVDTIEEHDMHAEFYNLPESTAKIINETKANGGRVIAVGTTSTRTLETVAQNNDGQIIAESGWSKIFIYPGFEYKAIDGMVTNFHLPKSSLVMMISALASRENILNAYKTAVENKYRFFSFGDAMFIRPKKKGN

SEQ ID NO: 67761 - protein, 348 aa, Kurthia zopfii
  misc_feature (1)..(348): tr|A0A3S4V4I9|A0A3S4V4I9_9BACL S-adenosylmethionine:tRN A ribosyltransferase-isomerase OS=Kurthia zopfii OX=165 0 GN=queA PE=3 SV=1
MKLEDFDYELPEELIAQVPLENRSASRLMVLDKETGEVEHHHFPHIVNELEAGDCLILNDTRVLPARLIGLKEETGAHIEVLLIKQTSGDEWETLVKPAKRIKKGTIVTFGEGLLKAVCTAELDHGGRQFKFEYEGIFIEILEKLGTMPLPPYIHEKLDNQERYQTVYSRELGSAAAPTAGLHFTEEILEAIRAKGVQVAFVTLHVGIGTFRPVSVDTIEEHDMHAEFYNLPESTAKIINETKANGGRVIAVGTTSTRTLETVAQNNDGQVIAESGWSKIFIYPGFEYKAIDGMVTNFHLPKSSLVMMISALASRENILNAYKTAVENKYRFFSFGDAMFIRPKKKGN

SEQ ID NO: 67762 - protein, 346 aa, Kushneria avicenniae
  misc_feature (1)..(346): tr|A0A1I1LAG6|A0A1I1LAG6_9GAMM S-adenosylmethionine:tRN A ribosyltransferase-isomerase OS=Kushneria avicenniae OX=402385 GN=queA PE=3 SV=1
MQRADFHFDLPSELIARYPSDQRSDCRLLCVDGNSGHLEHTRFPALLDHLDPGDLVVFNDTRVIPARLFGQKESGGRVEMLLERPLDAHRGLAHLRASKAPKIGTRIVFEGEIHAVVEDRRDALFELRFEGDTPLVALLEAHGHMPLPPYIEREDEHTDRERYQTVYARHDGAVAAPTAGLHFDEAMLDAMAARGIEKAFVTLHVGAGTFQPVRVDNILEHHMHSEWIEVSEATAEQVRVAQDRGNRVIAVGTTSVRCLESACRHSSSGRIETFSGDTDIFIYPGYQWQCVDALVTNFHLPESTLLMLVASFAGHDHVMQAYQAAVDERYAFFSYGDAMYLTRQRG

SEQ ID NO: 67763 - protein, 346 aa, Kushneria indalinina
  misc_feature (1)..(346): tr|A0A3D9DRV4|A0A3D9DRV4_9GAMM S-adenosylmethionine:tRN A ribosyltransferase-isomerase OS=Kushneria indalinina DSM 14324 OX=1122140 GN=queA PE=3 SV=1
MQRADFHFDLPDELIARYPSDQRSDCRLLCVDGDSGHLEHTRFPALLEHLAPGDLVVFNDTRVIPARLFGQKESGGRVEMLLERPLDAHRGLAHLRASKAPRIGTRIEFEGDIHAVVEGRRDALFELHFEGDTPLVALLEAHGHMPLPPYIEREDEHTDRERYQTVYARHDGAVAAPTAGLHFDEALLEAMENRGIEKAFVTLHVGAGTFQPVRVDNILEHHMHSEWIEVSDATAQQVRAAQDRGNRVIAVGTTSVRCLESACQHSTSGRIEAFSGDTDIFIYPGYQWQCVDSLVTNFHLPESTLLMLVASFAGHDHVMQAYQAAVDERYAFFSYGDAMYLTRQRG

SEQ ID NO: 67764 - protein, 346 aa, Kushneria konosiri
  misc_feature (1)..(346): tr|A0A2Z2HCF5|A0A2Z2HCF5_9GAMM S-adenosylmethionine:tRN A ribosyltransferase-isomerase OS=Kushneria konosiri OX =698828 GN=queA PE=3 SV=1
MQRADFHFDLPNELIARYPSDQRSDCRLLCVDGDSGHLEHTRFPKLLEHLTPGDLVVFNDTRVIPARLFGHKESGGRVEMLLERPLDTHRGLAHLRASKAPKIGTRIVFEGDIHAVVEGRRDALFELKFEGDTPLVALLEAHGHMPLPPYIEREDEHTDRERYQTVYARRDGAVAAPTAGLHFDEALLEAMEQRGIEKAFVTLHVGAGTFQPVRVDNILEHHMHSEWIEVSEATAEQVRAAQDRGNRVIAVGTTSVRCLESACQHSGSDRIEAFSGDTDIFIYPGYQWQCVDALITNFHLPESTLLMLVASFAGYDHVMQAYRAAVDERYAFFSYGDAMYLTRQRD

SEQ ID NO: 67765 - protein, 346 aa, Kushneria marisflavi
  misc_feature (1)..(346): tr|A0A240ULT2|A0A240ULT2_9GAMM S-adenosylmethionine:tRN A ribosyltransferase-isomerase OS=Kushneria marisflavi OX=157779 GN=queA PE=3 SV=1
MQRADFHFDLPNELIARYPSDQRSDCRLLCVDGDSGHLEHTRFPQLLDHLAPGDLVVFNDTRVIPARLFGQKESGGRVEMLLERPLDAYRGLAHLRASKAPKIGTRLIFEGDVHAVVEGRRDALFELRFEGDTPLVALLEAHGHMPLPPYIEREDEHTDRERYQTVYARHDGAVAAPTAGLHFDDAMLEAMEARGIEKAFVTLHVGAGTFQPVRVDNILEHHMHSEWIEVSATTAEQVRAAQDRGNRVIAVGTTSVRCLESACQHSSHGRIEAFSGDTDIFIYPGYQWQCVDSLITNFHLPESTLLMLVSSFAGYDHVMQAYQAAVDERYAFFSYGDAMYLTRQRG

SEQ ID NO: 67766 - protein, 346 aa, Kushneria phyllosphaerae
  misc_feature (1)..(346): tr|A0A2R8CR86|A0A2R8CR86_9GAMM S-adenosylmethionine:tRN A ribosyltransferase-isomerase OS=Kushneria phyllosphae rae OX=2100822 GN=queA PE=3 SV=1
MQRADFHFDLPNELIARYPSDQRSDCRLLCVDGDSGHLEHTRFPELLEHLAPGDLVVFNDTRVIPARLFGHKDSGGRVEMLLERPLDAHRGLAHLRASKAPKIGTRIVFEGEVHAVVEGRRDALFELKFEGETPLVALLEAHGHMPLPPYIEREDEHTDRERYQTVYARHDGAVAAPTAGLHFDEPMLEAMEQRGIEKAFVTLHVGAGTFQPVRVDNILEHHMHSEWIEVSEATAEQVRAAQDRGNRVIAVGTTSVRCLESACRHSSNDRIEAFSGDTDIFIYPGYQWQCVDALITNFHLPESTLLMLVASFAGYDHVMQAYQAAVDERYAFFSYGDAMYLTRQRD

SEQ ID NO: 67767 - protein, 346 aa, Kushneria sinocarnis
  misc_feature (1)..(346): tr|A0A420WZW6|A0A420WZW6_9GAMM S-adenosylmethionine:tRN A ribosyltransferase-isomerase OS=Kushneria sinocarnis OX=595502 GN=queA PE=3 SV=1
MQRTDFHFDLPDELIARYPSEQRRDCRLLCVDGAAGTIEHQQFPDLLDHLDPGDLVVFNDTRVIPARLFGHKASGGRVEMLLERPLDAHRGLAHLRASRAPKPGTELIFEGDIRAVVEERRDTLFELRFLGDTPLVELLDTHGHMPLPPYIEREDELADRERYQTVYARREGAVAAPTAGLHFDEPLMAEMRERGIEHAFVTLHVGAGTFQPVRVDNIQEHHMHSEWVEVTPEVCDQVRVARARGNRVVAVGTTSVRCLESACQQSPDGDIAPLTGDTDIFIYPGYRWRCVDALVTNFHLPESTLLMLVTAFAGLEPVMRAYREAVEQRYRFFSYGDAMFLTRRPA

SEQ ID NO: 67768 - protein, 349 aa, Kushneria sp.
  misc_feature (1)..(349): tr|A0A1S1NTY0|A0A1S1NTY0_9GAMM S-adenosylmethionine:tRN A ribosyltransferase-isomerase OS=Kushneria sp. YCWA18 OX=657387 GN=queA PE=3 SV=1
MQRTDFHFDLPDELIARYPSEQRRDCRLLCVDGVKGSIEHQRFPDLLDRLSPGDLVVFNDTRVIPARLFGRKASGGQVEMLLERPLDAHRGLAHLRASRAPKPGTELIFEGDIHAVIEGRRDALFELRFLGDTPLIELLDAHGHMPLPPYIEREDELADRERYQTVYARREGAVAAPTAGLHFDEALMTEMGERGIEHAFVTLHVGAGTFQPVRVDNIHDHHMHSEWIEVTPEVCDQVRAARARGNRVIAVGTTSVRCLESACQQSPDGEIAPLTGDTDIFIYPGYQWLCVDALVTNFHLPESTLLMLVTAFAGFEPVMRAYREAVEQRYRFFSYGDAMFLTRASSDAT

SEQ ID NO: 67769 - protein, 334 aa, Kutzneria albida
  misc_feature (1)..(334): tr|W5W6Y9|W5W6Y9_9PSEU S-adenosylmethionine:tRNA ribosy ltransferase-isomerase OS=Kutzneria albida DSM 43870 OX =1449976 GN=KALB_2928 PE=3 SV=1
MTSTVEFTLPAELEAHEPPEARGLDRDGVRLLVSRCGSGEQSHHRFTELPDLLAPGDVLVVNNSGTMPAAVPVAGTEAAVHFSTEQSDGTWLVEVRRSIGRTGQRLPLVGGGSVRLLEPYSQGRLWVSDVDTAGLPTVSAYLMRHGQPIRYDYVPRPWALPYYQTVFATHPGSAEMPSAARPFTDHLVTRLVSAGVLVVPITLHTGVASAEAHERPYPERYQVGASTARVVNAAKESGNWVIGVGTTAVRALESAVGSCGLVHPARGWTDLVITPERGVRVVDGLLTGFHEPRASHLDLLAAVAGRESLAAGYAEAVRERYLWHEFGDVNLLLP

SEQ ID NO: 67770 - protein, 335 aa, Kutzneria buriramensis
  misc_feature (1)..(335): tr|A0A3E0H3M1|A0A3E0H3M1_9PSEU S-adenosylmethionine:tRN A ribosyltransferase-isomerase OS=Kutzneria buriramensi s OX=1045776 GN=BCF44_115132 PE=3 SV=1
MTATVEFTLPTELEAHEPPEARGLARDGVRLMVGRRASGEISHHRFDELPTLLTPGDVLVVNTSATLPAAVPVVNADLRLHVSTQQPDGSWLVELRTADGPYGNAVAGQRYELPGDASVTLLEPYSRGRLWTALFDVASVPQYLLNHGVPIRYGYVPRAWSLPYYQTVFATHPGSAEMPSAGRPFTDRIVTRLVSAGIQFAPILLHTGVASPEAHERPYPERFSVSATTARVVNQARAAGNRIIGIGTTAVRALESAVEGDRVVPAKGWTELVITPERGVRVIDGLLTGFHEPMASHLDMLAAIADEPLLLACYTEAVRAGYLWHEFGDVNLLLP

SEQ ID NO: 67771 - protein, 333 aa, Kutzneria sp.
  misc_feature (1)..(333): tr|W7SSQ0|W7SSQ0_9PSEU S-adenosylmethionine:tRNA ribosy ltransferase-isomerase (Fragment) OS=Kutzneria sp. 744 OX=345341 GN=KUTG_08164 PE=3 SV=1
DRNRGVHAAGGAGGARAAGGPRTVPRRRSAAGRPTRHGRGQPPSVQRAAEPVDTGRCAGRQHLGDAAGRGAGVERGAAAARVDQAAGRQLAHRTAHGRRSVPRGYGRGTLHTARRRHGDAAGGVLAGSLVDGHVRCSFRAKVSAGSRRPIRYSYVPRQWPLPFYQTVFAEHPGSAEMPSAARPFTDRIVTRLVSAGIQFAPILLHTGVASPEAHERPYPERFSVSATTARLVNQAREAGNRIIGIGTTAVRALESAVEDGRVVPAQGWTDLVITPERGVRVVDGLLTGFHEPMASHLDMLAAIADERLLMACYAEAVQAGYLWHEFGDVNLLF

SEQ ID NO: 67772 - protein, 346 aa, Kyrpidia spormannii
  misc_feature (1)..(346): tr|A0A2K8NAF5|A0A2K8NAF5_9BACL S-adenosylmethionine:tRN A ribosyltransferase-isomerase OS=Kyrpidia spormannii O X=2055160 GN=queA PE=3 SV=1
MRVEDFDYDLPPDRIAQVPSADRTASRLLVLYRDSGRMEHRHFRDLVDYAVPGDALILNDTRVIPARLLGVKAGGGGRVECLLLRRDDPEQDPDLWRVLVKPGRRVHPGHRLVFGDGALEAEVLDTTEERGRLVRFLYAGDWEDLLKRLGEMPLPPYIKERTADSGRYQTVYARVPGSVAAPTAGLHFTEELLEQLRDRSMEVGTITLHVGLGTFRPVQVARVEEHHMHAEYFRIPSETAELVSRVRERGGRIWAVGTTVCRALESAALQGWGPREGWTDLFIYPGFSFHVVDRLITNFHLPKSTLLMLVSALAGREQILRAYQEAIEKGYRFFSFGDAMLITTES

SEQ ID NO: 67773 - protein, 346 aa, Kyrpidia tusciae
  misc_feature (1)..(346): tr|D5WWM4|D5WWM4_KYRT2 S-adenosylmethionine:tRNA ribosy ltransferase-isomerase OS=Kyrpidia tusciae (strain DSM 2912 / NBRC 15312 / T2) OX=562970 GN=queA PE=3 SV=1
MRVEDFDYDLPPDRIAQVPSADRTASRLLVLYRDSGRMEHRHFRDLVDYAVPGDALILNDTRVIPARLLGVKAGGGGQVECLLLRRDDPEQDPDLWRVLVKPGRRVHPGHRLVFGDGALEAEVLDTTEEGGRLVRFRYTGDWEDLLKRLGEMPLPPYIKERRADSGRYQTVYARVPGSVAAPTAGLHFTEELLEQLRDRGMEVGTITLHVGLGTFRPVQVARVEEHHMHAEYFRIPSETAELVSRVRERGGRIWAVGTTVCRALESAALRGWGPREGWTDLFIYPGFSFRVVDRLITNFHLPKSTLLMLVSALAGREQILGAYQEAIEKGYRFFSFGDAMLITTES

SEQ ID NO: 67774 - protein, 338 aa, Labedaea rhizosphaerae
  misc_feature (1)..(338): tr|A0A4V3CZ10|A0A4V3CZ10_9PSEU S-adenosylmethionine:tRN A ribosyltransferase-isomerase OS=Labedaea rhizosphaera e OX=598644 GN=EV186_104170 PE=3 SV=1
MTLTFTLPGELSAAEPPEARGLTRDGVRLLVAGPQGLTHTTFAALPDHLRPGDLVVINTSPTLAAAVEARRADGRHVAVHFAGHRPDGSWVVEIRPARQATGPVQDIVVGERFTVSGLTLIAREPVDARLWTVTVDGDVLELLASHGKPISYAYVHGSWPIADYQTVFAQDDRGSGSAEMPSAGRPFSTRTITDLVAKGVAVAPIVLHTGVSSAEKGEPPQAEPYRVPAPTARLVELTRANGGRVVAVGTTVTRALETVADPDGTVHAGEGWTELVLGPDRPARVVTGLVTGWHAPGASHLSLLEAVAGQELVAKAYAEAVARRYLWHEFGDSCLLLP

SEQ ID NO: 67775 - protein, 411 aa, Labilibaculum antarcticum
  misc_feature (1)..(411): tr|A0A1Y1CE81|A0A1Y1CE81_9BACT S-adenosylmethionine:tRN A ribosyltransferase-isomerase OS=Labilibaculum antarct icum OX=1717717 GN=queA PE=3 SV=1
MDCNINTNSLDAKQIQIADFTYDLPDHRIAKHPLENRDLSKLLIYKKGEISESVFENLPSEIADGTTMVFNNTKVIQARLIFHKETGARIEIFCLEPLKPADYNLAFQACGSSTWKCIVGNARKWKFGVLKMPFYLDEEEYCLTAEQQEVLDGAQEILFTWNHPSLSFSDVLEQTGKIPIPPYLNRDTEATDLVRYQTVYSKYEGSVAAPTAGLHFTEDVFSRLKAKNINREELTLHVGAGTFKPVKSELIGDHEMHTEHIQVTRESLESISKTTGQIVAVGTTSVRSLESLYWMGVKILTQQENPHLLKQWEAYQLPINYSVKESYQAICSHMEKNDLTLFNAATQIIIAPGYDFKVISGLVTNFHQPQSTLLLLISALVGDNWKKIYRYALENNFRFLSYGDSSLLMKE

SEQ ID NO: 67776 - protein, 349 aa, Labilibaculum antarcticum
  misc_feature (1)..(349): tr|A0A1Y1CI10|A0A1Y1CI10_9BACT S-adenosylmethionine:tRN A ribosyltransferase-isomerase OS=Labilibaculum antarct icum OX=1717717 GN=queA PE=3 SV=1
MKLSKFKYKLPSELIALHPAYNRDESRLLVLHKDTGKIEHKIFKDLIDYFDNEDVMVFNNTKVFPARLYGNKEKTGAEIEVFLLRELNREQRLWDVLVDPARKIRIGNKLYFGDDDLLVAEVIDNTTSRGRTLRFLFDGSYEDFKKTLYGLGETPLPKFIERPVEPEDAERYQTIFAKHEGAVAAPTAGMHFSRELMKRLEIKGIDFAEVTLHVGLGNFRSVDVEDLTKHKMDSEQIEINELAVEQVNSGKKKKKQICAVGTTVVRTLETSVSTLGTLKPFEGWTNKFIFPPFEFSVPTSMVTNFHLPLSTLLMMACAFGGYDRVMAAYQEAIKEKYRFGTYGDAMLII

SEQ ID NO: 67777 - protein, 411 aa, Labilibaculum filiforme
  misc_feature (1)..(411): tr|A0A2N3I287|A0A2N3I287_9BACT S-adenosylmethionine:tRN A ribosyltransferase-isomerase OS=Labilibaculum filifor me OX=1940526 GN=queA PE=3 SV=1
MDCNINTNSLDAKQIQISDFTYDLPDHRIAKHPLQNRDLSKLLIYKKGKISESLFENLPSEIMEGSSMVFNNTKVIQARLIFHKETGARIEIFCLEPLRPADYALAFQACDSSSWKCIVGNARKWKSGILKMPFYVEEKEYFLTAEKQEVLEGAQEILFSWNHPSLSFSEVLEQTGKIPIPPYLNRDTEAVDLVRYQTVYSKLEGSVAAPTAGLHFTEAVFARLKAKNIQREELTLHVGAGTFKPVKSEKIGDHEMHTEHIQVTRESIQNMMQISGQIVAVGTTSVRSLESLYWMGVKILSQKENPHLLKQWEAYQLSSKPTRQEAYQAIDKYMEARDLNLFNAATQIIIAPGYDFKVISGLVTNFHQPQSTLLLLISALVGDNWKKIYEYALNNDFRFLSYGDSSLLMKE

SEQ ID NO: 67778 - protein, 351 aa, Labilibaculum filiforme
  misc_feature (1)..(351): tr|A0A2N3HZE5|A0A2N3HZE5_9BACT S-adenosylmethionine:tRN A ribosyltransferase-isomerase OS=Labilibaculum filifor me OX=1940526 GN=queA PE=3 SV=1
MKLSKFKYKLPSELIALHPAYNRDESRLLVLHKDTGKIEHKIFKDLIEYFDNEDVMVFNNTKVFPARLSGNKEKTGAEIEVFLLRELNREQRLWDVLVDPARKIRIGNKLYFGDDDLLVAEVIDNTTSRGRTLRFLFDGPYEEFKEALYSLGKTPLPRSIIDQRKVEPEDAERYQTIFAKHEGAVAAPTAGMHFSRELMKRLEIKGIDFAEVTLHVGLGNFRTVDVEDLTKHKMDSEQIEINDLAVKKVNRGKKKKKNICAVGTTVVRTLETSVSTQGTLKPFEGWTNKFIFPPYEFSVPNSMVTNFHLPLSTLLMMVCAFGGYDQVMAAYQEAIKEKYRFGTYGDAMLII

SEQ ID NO: 67779 - protein, 411 aa, Labilibaculum manganireducens
  misc_feature (1)..(411): tr|A0A2N3IEQ8|A0A2N3IEQ8_9BACT S-adenosylmethionine:tRN A ribosyltransferase-isomerase OS=Labilibaculum mangani reducens OX=1940525 GN=queA PE=3 SV=1
MDCNININSLDARQIQISDFTYDLPDQRIAKHPLANRDLSKLLIYKNGLISESVFENLPSEIASGTTMVFNNTKVIQARLIFHKETGARIEIFCLEPLKPADYNLAFQACGSSSWKCIVGNARKWKSGVLKMPFYVEDKEYFLKAEKQEALEGAQEIFFSWNHPDLSFSEVLEQTGKIPIPPYLNRDTEATDLLRYQTVYSKYEGSVAAPTAGLHFTEDVFSHLEAKKINREELTLHVGAGTFKPVKSEQIGDHEMHTEHIQVTLESIQNIIKLSGQIIAVGTTSVRSLESLYWMGVKILTQKENPHLLGQWEAYQLPANYSRQESYQAICSYMQEKGLTLFNVATQIIIAPGYEFKVISGLVTNFHQPQSTLLLLISALVGDKWKEIYQYALDNDFRFLSYGDSSLLMRG

SEQ ID NO: 67780 - protein, 349 aa, Labilibaculum manganireducens
  misc_feature (1)..(349): tr|A0A2N3I8L7|A0A2N3I8L7_9BACT S-adenosylmethionine:tRN A ribosyltransferase-isomerase OS=Labilibaculum mangani reducens OX=1940525 GN=queA PE=3 SV=1
MKLSKFKYKLPTELIALHPAYNRDESRLLVLHKDTGKIEHKIFKDLIDYFDNEDVMVFNNTKVFPARLYGNKEKTGAEIEVFLLRELNREQRLWDVLVDPARKIRIGNKLYFGDDDLLVAEVIDNTTSRGRTLRFLYDGPYEDFKKALYGLGETPLPKFIDRAVEPEDAERYQTIFAKHEGAVAAPTAGMHFSRELMKRLEIKGVDFAEVTLHVGLGNFRTVDVEDLTKHKMDSEQIEINDLAVKKVNSGKKKKKNICAVGTTVVRTLETSVSTQGTLKPFEGWTNKFIFPPYDFSVPNSMVTNFHLPLSTLLMMVCAFGGYDKVMAAYQEAIKEKYRFGTYGDAMLII

SEQ ID NO: 67781 - protein, 376 aa, Labilithrix luteola
  misc_feature (1)..(376): tr|A0A0K1QCJ5|A0A0K1QCJ5_9DELT S-adenosylmethionine:tRN A ribosyltransferase-isomerase OS=Labilithrix luteola O X=1391654 GN=queA PE=3 SV=1
MRVAEFDFELPAELIAQAPPAHREEARLLVVPPPPASMRTAALDASVSALAEYVPPGTLVVVNDTKVLRARILGIKEGTGGRAEVFLVRKMWDGVENGIHQQRWRAMGRASKALRPGTRIVRDALVVEFEGKADDGLFEVRLFTRDGSSLEEARMSAGQVPLPPYIKRDVRSEDEERYQTVFAKVEGAVAAPTAGLHLTPELLERLRERGCEIESCTLHVGLGTFQPVTVDDLDDHPMHSEYFEVSRSLSTAIARARQRGAKVMAIGTTVVRALESAQDPERPGHVRPCAEETRILIQPGYRFAVVDRLMTNFHLPKSTLLALVCAFGGTDRVLEAYRRAVAQRYRFFSYGDAMVLDRVLDRVLDRVPDRAELPTP

SEQ ID NO: 67782 - protein, 376 aa, Labilithrix luteola
  misc_feature (1)..(376): tr|A0A0K1PZS5|A0A0K1PZS5_9DELT S-adenosylmethionine:tRN A ribosyltransferase-isomerase OS=Labilithrix luteola O X=1391654 GN=AKJ09_05318 PE=3 SV=1
MSPATSPRPVAAMRLLVVDGSTGTLGVADARTFPELLAPGDLVVVNDAATLPASFAARTAAGEPVELRLAGRAAEGSEPRFVAALLGAGDYRTRTEVRPLPPLIASGARLFVGDELVAHVTGHSSISERLVELHFSVAEGSEADVWAAIYRAGRPVQYAHVPEPLALWDVQNVYAFEPWAVEMPSAGRLFRAETFGALKARGIAIARVTHAAGLSSTGDPKIDEALPLPERWRVPEETVRLVEATHARGGRVLAVGTSVVRALESASAGTTLTAGEGITHLKLGPGARRTVVDGVVTGVHEADTTHYALLGAFASAKVLENALVLAEHEDLLGHEFGDACLVWGSPVAAATRKALDRPAPVSRREVTQEGRGWSLA

SEQ ID NO: 67783 - protein, 357 aa, Labrenzia aggregata
  misc_feature (1)..(357): tr|A0A0M6XWQ6|A0A0M6XWQ6_9RHOB S-adenosylmethionine:tRN A ribosyltransferase-isomerase OS=Labrenzia aggregata O X=187304 GN=queA PE=3 SV=1
MRVDQFDFVLPNERIALRPARPRDSARMLVVKPGAEPELSDKGVRELPLLLEPGDALVFNDTKVIPAQLEGTRLRGDITAGIGATLHMRTGPDRWKAFVRPAKKLQVGDTVLFEGFGTRLTAEVTEKGDSGEVLLTFDRSGPDLDIAIASVGHIPLPPYIAQKRGEDDQDRKDYQTIFAEKDGAVAAPTAGLHFTPELLKALSERGIEQHRVTLHVGAGTFLPVKAEDTADHKMHAEWGEISEETAAALLAVKARGNKVVSVGTTSLRILESSAQASGAIAAFAGETSIFITPGYRFKAIDALMTNFHLPRSTLFMLVSALSGLDTMRRAYAHAISQEYRFYSYGDASLLFPQEGAV

SEQ ID NO: 67784 - protein, 357 aa, Labrenzia aggregata
  misc_feature (1)..(357): tr|A0NQU9|A0NQU9_LABAI S-adenosylmethionine:tRNA ribosy ltransferase-isomerase OS=Labrenzia aggregata (strain A TCC 25650 / DSM 13394 / JCM 20685 / NBRC 16684 / NCIMB 2208 / IAM 12614) OX=384765 GN=queA PE=3 SV=1
MRVDQFDFDLPNERIALRPARPRDSARMLVVRPGEQPLLSDAGVRDLPQLLEPGDALVFNDTRVIPAQLEGTRLRGDISAGIGATLHMRTGPDRWKAFVRPAKKLQLGDTVLFEGFGTRLTAEVTEKGYSGEVLLTFDRSGPDLDVAIASVGHIPLPPYIAQKRGEDDQDRKDYQTIFAEKDGAVAAPTAGLHFTPELLQALSYRGIEQHRVTLHVGAGTFLPVKAEDTADHKMHAEWGEVSEETAAALLAVKVRGNKVVSVGTTSLRILESSAQKTGVITAFAGETSIFITPGYRFKAIDALMTNFHLPRSTLFMLVSALSGLDTMRHAYAHAISQEYRFYSYGDASLLFPQEGAV

SEQ ID NO: 67785 - protein, 357 aa, Labrenzia alba
  misc_feature (1)..(357): tr|A0A0M7B2P9|A0A0M7B2P9_9RHOB S-adenosylmethionine:tRN A ribosyltransferase-isomerase OS=Labrenzia alba OX=311 410 GN=queA PE=3 SV=1
MRVEEFDFDLPNERIALRPARPRDSARMLVVNPAEYPVLKDMGIRDLPGLLEPGDALVFNDTKVIPAQLEGQRFRGGVSAGISVTLHMRTAQDQWRAFARPAKKLIAGDVLVFENSVCSMRARVAEKSDGGEVLLVFEASGSELDVAIATVGHVPLPPYIAQKRGEDVQDRQDYQTIFAEKDGAVAAPTAGLHFTQELLEALEDRGIERHLVTLHVGAGTFLPVKADDTRDHKMHAEWGNVSAATAKALLAVRARGNKVVSVGTTSLRILESSAQAGGSIAPFAGETSIFITPGYKFRAIDALMTNFHLPKSTLFMLVSAFSGLETMRGAYAHAIEEQYRFYSYGDGSLLFPAKVTQ

SEQ ID NO: 67786 - protein, 357 aa, Labrenzia alba
  misc_feature (1)..(357): tr|A0A0M6YUX3|A0A0M6YUX3_9RHOB S-adenosylmethionine:tRN A ribosyltransferase-isomerase OS=Labrenzia alba OX=311 410 GN=queA PE=3 SV=1
MRVEQFDFDLPNERIALRPARPRDAARMLVVRPQEEPTLNDMGVRDLPVLLEPGDALVFNDTKVIPAQLEGIRARGDVVAKIGATLHLRSGPDQWRAFVRPAKKLQVDDTVVFENETTALKARVAEKSEGGEVLLVFDRSGAELDAAIALVGHIPLPPYIAQKRGEDEQDRSDYQTIFADRDGAVAAPTAGLHFTPDLLDALKDRGIEQHKVTLHVGAGTFLPVKADDTEDHAMHAEWGEVSAETAAALRAVKARGNKVVGVGTTSLRILESSAQATGKISPFAGETTIFITPGYRFKAIDALMTNFHLPRSTLFMLVSAFAGLETMRAAYTHAVAGKYRFYSYGDASLLFPQENAV

SEQ ID NO: 67787 - protein, 360 aa, Labrenzia alexandrii
  misc_feature (1)..(360): tr|A0A0M7AMA6|A0A0M7AMA6_9RHOB S-adenosylmethionine:tRN A ribosyltransferase-isomerase OS=Labrenzia alexandrii OX=388408 GN=queA PE=3 SV=1
MRVDQFDFELPNERIALRPARPRDAARMLVVRPGETPELSDKGVRDLPALLEPGDALVFNDTKVIPAQLEGKRVRGDIEAGISVTLHLRSAADRWKAFVRPAKKLQVDDLVVFEGNGARLTATVKEKSDGGEVLLAFDCSGPDLDVAIAQVGHIPLPPYIAQKRGEDEQDRQDYQTIFAEKDGAVAAPTAGLHFTPELLASIEDRGIEMHRVTLHVGAGTFLPVKADDTDDHKMHAEWGEVSEETAAALQAVKARGNKVVSIGTTSLRILESAAQETGTIVPFTDETSIFITPGYQFKAIDALMTNFHLPRSTLFMLVSALSGLETMRAAYQHAIDTEYRFYSYGDASLLFPDASQDASS

SEQ ID NO: 67788 - protein, 360 aa, Labrenzia alexandrii
  misc_feature (1)..(360): tr|A0A5E8H1U7|A0A5E8H1U7_LABAD S-adenosylmethionine:tRN A ribosyltransferase-isomerase OS=Labrenzia alexandrii (strain DSM 17067 / NCIMB 14079 / DFL-11) OX=244592 GN= queA PE=3 SV=1
MRVDQFDFELSNERIALRPARPRDAARMLVVRPGEIPELSDMGVRDLPALLEPGDALVFNDTKVIPAQLEGKRVRGDIEAGISVTLHLRSAADGWKAFVRPAKKLQVEDLVVFEGNGARLTATVKEKSDGGEVLLAFDCSGPDLDVAIAQVGHIPLPPYIAQKRGEDEQDRQDYQTIFAEKDGAVAAPTAGLHFTPELLAAIKDRGIEMHRVTLHVGAGTFLPVKADDTDDHKMHAEWGEVSEETAAALQAVKARGNKVVSIGTTSLRILESAAQETGTIVPFADETSIFITPGYKFKAIDALMTNFHLPRSTLFMLVSALSGLETMRAAYQHAIDTEYRFYSYGDASLLFPDASQDASL

SEQ ID NO: 67789 - protein, 357 aa, Labrenzia marina
  misc_feature (1)..(357): tr|A0A2S3UP41|A0A2S3UP41_9RHOB S-adenosylmethionine:tRN A ribosyltransferase-isomerase OS=Labrenzia marina OX=2 81252 GN=queA PE=3 SV=1
MRVDQFDFDLPNERIALRPARPRDAARMLVVRPGSPEVLSDRGVRDLPSLLNPGDALVFNDTRVIPAQLEGKRLRGDVAAGISVTLHLRTDPSRWWAFVRPAKKLQADDTLIFETGDVILTARVVEKAEGGEVLLEFDRAGPELDAVIAVVGHIPLPPYIAHKRAEDEQDRRDYQTIYAERDGAVAAPTAGLHFTPQLLKALDDRGIEQHRVTLHVGAGTFLPVKADDTQDHKMHAEWGEVSEATALALAAVKARGNRVVSVGTTSLRILESAAQVTGSIAPFAGETSIFITPGYRFRVIDALMTNFHLPRSTLFMLVSAFSGLETMHTAYAHAIAEEYRFYSYGDASLLFPQDGAL

SEQ ID NO: 67790 - protein, 357 aa, Labrenzia sp.
  misc_feature (1)..(357): tr|A0A222F341|A0A222F341_9RHOB S-adenosylmethionine:tRN A ribosyltransferase-isomerase OS=Labrenzia sp. VG12 OX =2021862 GN=queA PE=3 SV=1
MRVDQFDFDLPNERIALRPARPRDAARMLVVRPQADPPLVDGGVRDLPDVLEPGDALVFNDTRVIPAQLEGTRLRGEISAGIGATLHMRTGPDRWKAFVRPAKKLQVGDDVLFEGFGTRLTAEVSEKADGGEVLLVFDRSGPALDEAIAAVGHIPLPPYIAQKRGEDEQDRQDYQTMFAEKDGAVAAPTAGLHFTSGLLQALEDRGIEHHRVTLHVGAGTFLPVKADKTEDHKMHAEWGEVSPETAEALAAVKARGNKVVSVGTTSLRILESAAVKTGRIAPFKGETSIFITPGYRFKVIDALMTNFHLPRSTLFMLVSALSGLETMRAAYAHAIDQEYRFYSYGDASLLFPDKDAV

SEQ ID NO: 67791 - protein, 357 aa, Labrenzia sp.
  misc_feature (1)..(357): tr|A0A163VAM0|A0A163VAM0_9RHOB S-adenosylmethionine:tRN A ribosyltransferase-isomerase OS=Labrenzia sp. OB1 OX= 1561204 GN=queA PE=3 SV=1
MRVEQFDFDLPNERIALRPARPRDAARMLVVRPGSQELLTDGGVRDLPALLNPGDALVFNDTRVIPAQLEGKRLRGEVVAGISVTLHLRTDPGSWRAFVRPAKKLQTEDTLVFENEDTVLTARVAEKADGGEVLLAFDRAGLELDAAIAVVGHIPLPPYIAHKRAEDMQDRQDYQTIYAEKDGAVAAPTAGLHFTPQLLKALEERGIEQHRVTLHVGAGTFLPVKADDTQDHKMHAEWGEVSETTALALAAVKKRGNRVVSIGTTSLRILESAAQETGSIAAFSGETSIFITPGYRFRVIDALMTNFHLPRSTLFMLVSAFCGLENMRAAYAHAIAEEYRFYSYGDASLLFPHDSAL

SEQ ID NO: 67792 - protein, 365 aa, Labrenzia suaedae
  misc_feature (1)..(365): tr|A0A1M7KFG0|A0A1M7KFG0_9RHOB S-adenosylmethionine:tRN A ribosyltransferase-isomerase OS=Labrenzia suaedae OX= 735517 GN=queA PE=3 SV=1
MRVDLFDFELPNERIALRPARPRDAARLLVVRPDGSPELTDSIVSALPDWLEPGDALVFNDTKVIPAQLEGTRTRGEATAKISATLHLRAGDDRWWAFVRPAKKLVIGDRVRFGGEGSTCLSGTLDATVAEKGDAGEVLLMFDVAGPALDEAIATVGHIPLPPYIAAQRPEDEQDRADYQTMFAEREGAVAAPTAGLHFTPKLMQNLEARGVETYGVTLHVGAGTFLPVKSDDTDGHKMHAEWGEISASTVAALKAVKARGNKVVAVGTTSLRILESASQGEEGLAPFCGETRIFITPGYRFRTIDALMTNFHLPRSTLFMLVSAFAGLETMHRAYAHAIQTEYRFYSYGDSSLLFPRLTREQQD

SEQ ID NO: 67793 - protein, 379 aa, Labrys neptuniae
  misc_feature (1)..(379): tr|A0A5C1WMG9|A0A5C1WMG9_9RHIZ S-adenosylmethionine:tRN A ribosyltransferase-isomerase OS=Labrys neptuniae OX=3 76174 GN=FZC33_32585 PE=3 SV=1
MIAADNLEPGSARLLTVSDTGKIRHLPRSALSLLFSPGDLVVANDAATLPASLAGIHADSSRPIEVRLAAWIAVGDPCRFIAVVFGTGDHRVRTEERPAPPQLLAGDKLKLGPLTATVERLHGYPRLVSLRFSGAPEQILAGMARHGRPIQYAHVPEPLALWDTWTAVAAEPLAFEPPSAGFVLDWRTIAAWRRRGVGFASLTHAAGISSTGDAVMDLRLPFDEPYRIPAATAAAIARTKATGGRVIAIGTSVVRALEHAASAPGGFRAGDGLAQGRIGPRSRLRLVDTILSGVHQPGESHFELLRAFAGDLVLDRVSLMLEAWNYRAHEFGDSVLIERQAPGREDYTERPAGITATSIWAGGGPYSMRAAFMKQTMVA

SEQ ID NO: 67794 - protein, 352 aa, Labrys okinawensis
  misc_feature (1)..(352): tr|A0A2S9QC30|A0A2S9QC30_9RHIZ S-adenosylmethionine:tRN A ribosyltransferase-isomerase OS=Labrys okinawensis OX =346911 GN=queA PE=3 SV=1
MRVSDFDFHLPPENIALRPAEPRDRARLLEVDPAGNTLADRIVSDLPTLLRPGDMLVFNDTKVIPARLDGLRRRPGGAGAAIEAMLHQRLGPAQWKAFARPGKRLAVGDTIEFGENLSADVEEKGEGGEVTLRFSLKGAALDIAIAMVGHIPLPPYIASKRADDARDREDYQTIYAKADGAVAAPTAGLHFTPDLFARLDAAGIARHFVTLHVGAGTFLPVKGEDLSEHRMHAEFGIVTAETAQALNAGRARGGRIIAVGTTSLRLLESAAAPDGTLEPFADETSIFITPGYRFRTADALMTNFHLPRSTLMMLVSAFAGYDTMKAAYAHAIADGYRFYSYGDASLLWRAPC

SEQ ID NO: 67795 - protein, 368 aa, Labrys okinawensis
  misc_feature (1)..(368): tr|A0A2S9QBB3|A0A2S9QBB3_9RHIZ S-adenosylmethionine:tRN A ribosyltransferase-isomerase OS=Labrys okinawensis OX =346911 GN=C5L14_14910 PE=3 SV=1
MIAADNPEPGAARLLAVSSTGKIRHLPRSALSLLFSPGDLLVANDAATLPASLAGLHAGSDRPIEVRLAAWVSAGDPSRFVAVVFGAGDHRLRTEDRPAPPQLLAGDKLELGPLTAEIERLHGYPRLVSLRFSGPTDQILAGLARHGRPIQYAHVPAPLALWDMWTVIAAEPLAFEAPSAGFALDWRMIAAWRRRGVGFASLTHAAGISSTGDAMMDLSLPFDEPYRIPAATAAAIARTKAAGGRVIAIGTSVVRALEHAASAAGGLRAGDGVAQGRIGPATRLCLVDAILSGVHQPGESHFELLRAFADDLTLDRVCLMLEAWNYRAHEFGDSVLIERRTAKPKEQGTDRQARITPSSLWAGAAPTP

SEQ ID NO: 67796 - protein, 344 aa, Laceyella sacchari
  misc_feature (1)..(344): tr|A0A4V2WAY6|A0A4V2WAY6_LACSH S-adenosylmethionine:tRN A ribosyltransferase-isomerase OS=Laceyella sacchari OX =37482 GN=queA PE=3 SV=1
MDVAQYHFELPQELIAQTPIKDRTGSRLMVVDRKRQTWEHTRFPHLLDYLEAGDVLVLNDSRVRPARLIGVKEETGAKIELLLLKPLGEDRWEALVKPAKRVKEGTVVSFGGGRLRAVAEASTEVAGGRVFRLEYEVDDVESLFQELGQMPLPPYIHEQLDDPERYQTVFSRVIGSAAAPTAGLHFTPELLEQAQQKGVKLAFVTLHVGLGTFRPVTVERVEDHHMHAEYYELSQETADLINEAKRQGKRVIAVGTTSVRTLETVASRHGGEVRADSGWTDIFIYPGYVYQVVDGLVTNFHLPQSTLLMLVSAFATRELIMKAYEEAVKERYRFFSFGDAMLII

SEQ ID NO: 67797 - protein, 344 aa, Laceyella sacchari
  misc_feature (1)..(344): tr|A0A2I7SX07|A0A2I7SX07_LACSH S-adenosylmethionine:tRN A ribosyltransferase-isomerase OS=Laceyella sacchari OX =37482 GN=queA PE=3 SV=1
MDVAQYHFELPQELIAQTPIKDRTGSRLMVVDRKRQTWEHTRFPHLLDYLEAGDVLVLNDSRVRPARLIGVKEETGAKIELLLLKPLGEDRWEALVKPAKRVKEGTVVCFGGGRLRAVAEASTEVAGGRVFRLEYEVDDVESLFQELGQMPLPPYIHEQLDDPERYQTVFSRVIGSAAAPTAGLHFTPELLEQAKQKGVKLAFVTLHVGLGTFRPVTVERVEDHHMHAEYYELNQETAALINEAKRQGKRVIAVGTTSVRTLETVASRHGGEVRADSGWTDIFIYPGYVYQVVDGLVTNFHLPQSTLLMLVSAFATRELIMKAYEEAVKQRYRFFSFGDAMLII

SEQ ID NO: 67798 - protein, 344 aa, Laceyella sediminis
  misc_feature (1)..(344): tr|A0A2T0YKK8|A0A2T0YKK8_9BACL S-adenosylmethionine:tRN A ribosyltransferase-isomerase OS=Laceyella sediminis O X=573074 GN=queA PE=3 SV=1
MDVAQYHFELPQELIAQTPIKDRTGSRLMVVDRKRQTWEHTRFPHLLDYLEAGDVLVLNDSRVRPARLIGVKEETGAKIELLLLKPLGEDRWEALVKPAKRVKEGTVVCFGGGRLRAVAEASTEVAGGRVFRLEYEVDDVESLFQELGQMPLPPYIHEQLDDPERYQTVFSRVIGSAAAPTAGLHFTPELLEQAKQKGVKLAFVTLHVGLGTFRPVTVERVEDHHMHAEYYELSQETAALINEAKRQGKRVIAVGTTSVRTLETVASRHGGEVRADSGWTDIFIYPGYVYQVVDGLVTNFHLPQSTLLMLVSAFATRELIMKAYEEAVKQRYRFFSFGDAMLII

SEQ ID NO: 67799 - protein, 341 aa, Lachnoanaerobaculum orale
  misc_feature (1)..(341): tr|A0A3P3PZH2|A0A3P3PZH2_9FIRM S-adenosylmethionine:tRN A ribosyltransferase-isomerase OS=Lachnoanaerobaculum o rale OX=979627 GN=queA PE=3 SV=1
MDVKDFWYDLPEELIAQDPLEDRASSRLLVLDKNTGEITHKHFYDIIDYLDEGDCLVLNETKVIPARLMGVKKDTGAAIEILLLKRKSKTAWECLVKPGKKCKVGAVIEFGDGLLIGTISDIVEEGNRIIEFEFDGIFEEILDKLGTMPLPPYITHTLKDKNRYQTVYAKNEGSAAAPTAGLHFTKELLKRIEEKGIRLAKVTLHVGLGTFRPVKVSDVNDHHMHSEFFQISKEAADIINSTKANGKRVICVGTTSTRTVESAADENGHLEEKSGWTEIFIYPGYKFKVLDALITNFHLPESTLVMLVSALAGRENILHAYEEAVKEKYRFFSFGDAMFIK

SEQ ID NO: 67800 - protein, 345 aa, Lachnoanaerobaculum saburreum
  misc_feature (1)..(345): tr|E6LKE6|E6LKE6_9FIRM S-adenosylmethionine:tRNA ribosy ltransferase-isomerase OS=Lachnoanaerobaculum saburreum DSM 3986 OX=887325 GN=queA PE=3 SV=1
MATKMDVKDFRYDLPQELIAQDPLEDRSSSRLLVLDKDTGEITHKHFYDIIDYLDEGDCLVLNETKVIPARLMGVKKDTGAVVEILLLKRKSKTVWECLVKPGKKCRVGAVIEFGEGLLTGTVSDIVEEGNRIIEFEFDGIFEEILDKLGTMPLPPYITHTLKDRNRYQTVYAKNDGSAAAPTAGLHFTKELLKDIEDKGVKLAKVTLHVGLGTFRPVKVSDVRQHHMHSEFFQVSKEAADIINSTRANGKRVICVGTTSTRTVESASDDKGYLKETSGWTDIFIYPGYKFKVLDALITNFHLPESTLVMLVSALAGREKVLHAYEEAVKEKYRFFSFGDAMFIK

SEQ ID NO: 67801 - protein, 341 aa, Lachnoanaerobaculum saburreum
  misc_feature (1)..(341): tr|A0A133ZRS3|A0A133ZRS3_9FIRM S-adenosylmethionine:tRN A ribosyltransferase-isomerase OS=Lachnoanaerobaculum s aburreum OX=467210 GN=queA PE=3 SV=1
MDVKDFWYDLPEELIAQDPLEDRASSRLLVIDKNTGEITHKHFYDIIDYLDEGDCLVLNETKVIPARLMGVKKDTGAAIEILLLKRKSKTAWECLVKPGKKCKVGAVIEFGDGLLIGTIRDIVEEGNRIIEFEFDGIFEEILDKLGTMPLPPYITHALKDKNRYQTVYAKNEGSAAAPTAGLHFTKELLKRIEEKGIRLAKVTLHVGLGTFRPVKVSDVNDHHMHSEFFQISKEAADIINSTKAKGKRVICVGTTSTRTVESAADENGHLEEKSGWTEIFIYPGYKFKVLDALITNFHLPESTLVMLVSALAGRENILHAYEEAVKEKYRFFSFGDAMFIM

SEQ ID NO: 67802 - protein, 341 aa, Lachnoanaerobaculum sp.
  misc_feature (1)..(341): tr|A0A3P3QY99|A0A3P3QY99_9FIRM S-adenosylmethionine:tRN A ribosyltransferase-isomerase OS=Lachnoanaerobaculum s p. KCOM 2030 OX=2490855 GN=queA PE=3 SV=1
MDVKDFWYDLPQELIAQDPLEDRASSRLLVLDKVSGDISHKHFFDIIDYLNEGDCLVLNETKVIPARLMGVKKDTGAAIEILLLKRTSKTAWECLVKPGKKCKVGAKIDFGDGLLLGTIVDIVEEGNRIIEFEFEGIFEEILDKLGTMPLPPYITHVLKDKNRYQTVYAKNEGSAAAPTAGLHFTKELLEKIEKKGIRLAKVTLHVGLGTFRPVKVTDVNEHHMHSEFFQISKEAADIINSTRKNGKRVICVGTTSTRTIESAADENGHLEEKSGWTDIFIYPGYKFKVLDALITNFHLPESTLVMLVSALAGRENILHAYEEAVKEKYRFFSFGDAMFIN

SEQ ID NO: 67803 - protein, 341 aa, Lachnoanaerobaculum sp.
  misc_feature (1)..(341): tr|W2VP28|W2VP28_9FIRM S-adenosylmethionine:tRNA ribosy ltransferase-isomerase OS=Lachnoanaerobaculum sp. MSX33 OX=936596 GN=queA PE=3 SV=1
MDVRDFWYDLPQELIAQDPLEDRASSRLLVLDKVSGDISHKHFFDIIDYLNEGDCLVLNETKVIPARLMGVKKDTGAAIEILLLKRKSKTAWECLVKPGKKCKVGAKIDFGDGVLSGTIVDIVEEGNRIIEFEFEGIFEEILDKLGTMPLPPYITHVLKDKNRYQTVYAKNEGSAAAPTAGLHFTKELLEKIEKKGIRLAKVTLHVGLGTFRPVKVTDVNEHHMHSEFFQISKEAADIINSTRENGKRVICVGTTSTRTIESAADENGHLEEKSGWTDIFIYPGYKFKVLDALITNFHLPESTLVMLVSALAGRENILHAYEEAVKEKYRFFSFGDAMFIN

SEQ ID NO: 67804 - protein, 341 aa, Lachnoanaerobaculum umeaense
  misc_feature (1)..(341): tr|A0A385PWM9|A0A385PWM9_9FIRM S-adenosylmethionine:tRN A ribosyltransferase-isomerase OS=Lachnoanaerobaculum u meaense OX=617123 GN=queA PE=3 SV=1
MDVKDFWYDLPQELIAQDPLEDRASSRLLILDKEAGNISHKHFYDIIEYMDEGDCLVLNETKVIPARLMGVKKDTGAAIEILLLKRKTKTAWECLVKPGKKCKIGARIDFGDGVLCGTITDIVEEGNRIIDFEFEGIFEEILDKLGTMPLPPYITHALQDKNRYQTVYAKNEGSAAAPTAGLHFTKELLERIEKKGVKLAKVTLHVGLGTFRPVKVTDVNEHHMHSEFFQISKEAADIINSTKTNGKRVICVGTTSTRTIESAADENGHLEERSGWTDIFIYPGYKFKVLDALITNFHLPESTLVMLVSALAGRENILHAYEEAVNEKYRFFSFGDAMFIN

SEQ ID NO: 67805 - protein, 350 aa, Lachnobacterium bovis
  misc_feature (1)..(350): tr|A0A1H9PR34|A0A1H9PR34_9FIRM S-adenosylmethionine:tRN A ribosyltransferase-isomerase OS=Lachnobacterium bovis OX=140626 GN=queA PE=3 SV=1
MDVKDFYYDLPQELIAQDPLEDRSSSRLLLLDKATGDIKHKHFRDIKHFLKPGDCLVINNTKVIPARLYGVKEDTQAKIEILLLKRKENDIWETLVKPGKKAKVGTRIIFGEGILVGEVVDIIEEGNRLIKFYYEGIFEEILDQLGQMPLPPYITHQLEDKNRYQTVYAKYDGSAAAPTAGLHFTPELLQQVKDMGVEIAEVTLHVGLGTFRPVKVENVLDHHMHSEFYMVSKEAADKINKAKANGNRVIAVGTTSTRTLESASDENGVLKETSGWTEIFIYPGYKFKVIDALITNFHLPESTLVMLVSALAGREHVLSAYEKAIEERYRFFSFGDAMFITDDIIGDEKQ

SEQ ID NO: 67806 - protein, 349 aa, Lachnobacterium bovis
  misc_feature (1)..(349): tr|A0A1H3FJD6|A0A1H3FJD6_9FIRM S-adenosylmethionine:tRN A ribosyltransferase-isomerase OS=Lachnobacterium bovis DSM 14045 OX=1122142 GN=queA PE=3 SV=1
MDVKDFYYDLPQELIAQDPLEDRSSSRLLLLDKKSGDIKHKHFRDITHFLRPGDCLVINNTKVLPARLYGVKEDTQAKIEILLLKRKENDIWETLVKPGKKAKIGTRIIFGEGILVGEVVDIIEEGNRLIKFYYEGIFEEILDQLGQMPLPPYITHQLADKNRYQTVYAKYDGSAAAPTAGLHFTPELLQQVRDMGVDIAEVTLHVGLGTFRPVKVENVLDHHMHSEFYMVSKEAADKINKAKETGNRVIAVGTTSTRTLEAAADENGMLKETSGWTEIFIYPGYKFKVIDALITNFHLPESTLVMLVSALAGREHVLNAYEKAIEERYRFFSFGDAMFITDDIIGDEE

SEQ ID NO: 67807 - protein, 364 aa, Lachnoclostridium phytofermentans
  misc_feature (1)..(364): sp|A9KK69|QUEA_LACP7 S-adenosylmethionine:tRNA ribosylt ransferase-isomerase OS=Lachnoclostridium phytofermenta ns (strain ATCC 700394 / DSM 18823 / ISDg) OX=357809 GN =queA PE=3 SV=1
MKKQDFYFDLPEELIAQDPLEDRSGSRLLVLDKNTGKVTHHIFKEIVKYLKKGDCLVLNNTKVIPARLMGERIIEKTPLAPGHSYGKEGTPIELLLLKRKPDDVWETLVRPGKKAKVGTKISFGDGKLIGEIIDVVEEGNRLVKFTYQGIFEEILDELGQMPLPPYITHELADKNRYQTVYAKHEGSAAAPTAGLHFTNELLKQIEDMGVVIANVTLHVGLGTFRPVKEDDILDHHMHSEVYQVEESEAKKINDAKRAGGRIICVGTTSCRTIESAANEDGFVQAKSGATEIFIYPGYKFKVLNCLITNFHLPESTLLMLVSALASREHIIAAYEEAVKERYRFFSFGDAMFITDNIIETKDTF

SEQ ID NO: 67808 - protein, 359 aa, Lachnoclostridium phytofermentans
  misc_feature (1)..(359): tr|A0A3D2XA32|A0A3D2XA32_9FIRM S-adenosylmethionine:tRN A ribosyltransferase-isomerase OS=Lachnoclostridium phy tofermentans OX=66219 GN=queA PE=3 SV=1
MKKQDFYFDLPEELIAQDPLEDRSSSRLLVLDKNSGKVTHHIFKEIVKYLKKGDCLVLNNTKVIPARLMGERIIEKVPLAPGHSYGKEGTPIELLLLKRRPDDIWETLVRPGKKAKVGTKISFGDGKLIGEIIDVVEEGNRLVKFTYQGIFEEILDELGQMPLPPYITHELADKNRYQTVYAKHEGSAAAPTAGLHFTKELLKQIEDMGVIIANVTLHVGLGTFRPVKEDEILDHHMHSEVYQVEESEAKKINDAKRAGGRIICVGTTSCRTIESAADENGFVQAKSGATEIFIYPGYKFKVLNCLITNFHLPESTLVMLVSALAGREHIIAAYEEAVKERYRFFSFGDAMFITDDIME

SEQ ID NO: 67809 - protein, 341 aa, Lachnoclostridium sp.
  misc_feature (1)..(341): tr|A0A1Y4IC36|A0A1Y4IC36_9FIRM S-adenosylmethionine:tRN A ribosyltransferase-isomerase OS=Lachnoclostridium sp. An196 OX=1965583 GN=queA PE=3 SV=1
MNLHDFYYDLPQELIAQDPLEDRSSSRLLVLHRETGEREHRIFRDIVEYLKPGDCLVINDTKVIPARLMGVKEGTGAGIEVLLLKRKEGNVWETLVKPGKKARPGARILFGDGLLKGEVIDVVEDGNRLIRFEYEGIFEEILDQLGQMPLPPYITHQLKDKNRYQTVYAKHDGSAAAPTAGLHFTPELLRQIEEMGVSIAHVTLHVGLGTFRPVKVENIQEHHMHSEFYVVEEDQAELINRTKKEGGRVIAVGTTSCRTLESATGEDGILKAGGGWTDIFIYPGYQFRMIDALITNFHLPESTLMMLVSAFAGRELIMETYAEAVKERYRFFSFGDAMFIV

SEQ ID NO: 67810 - protein, 341 aa, Lachnoclostridium sp.
  misc_feature (1)..(341): tr|A0A2T3FPI0|A0A2T3FPI0_9FIRM S-adenosylmethionine:tRN A ribosyltransferase-isomerase OS=Lachnoclostridium sp. SNUG30099 OX=2126738 GN=queA PE=3 SV=1
MKLSEFDFELPEELIAQHPVEKRDTSRLMVVNRENGNIEHRHFYDILDYLKPGDVLVRNNTKVIPARLFGIKEETNGHVEVLLLKELKKDTWECLCGNARIVKMNTVITFGEGLLKAKCIEIKDEGIRVFEMMYDGIFYEILDQLGTMPLPPYIKEKLEDKNRYQTVYAKIEGSAAAPTAGLHFTEEINHKIKDKGIEILDVCLHVGLGTFRPVKEENVLDHHMHSEFYMISEEVADKLNKAKANGQRIIAVGTTSTRTLEANMKKYGKFTATSENTDIFIYPGYKFEAIDCLITNFHLPKSTLLMLISAFASKELIFKAYKEAVKEKYRFFSFGDSMMIL

SEQ ID NO: 67811 - protein, 349 aa, Lachnospira multipara
  misc_feature (1)..(349): tr|A0A1H5SDI9|A0A1H5SDI9_9FIRM S-adenosylmethionine:tRN A ribosyltransferase-isomerase OS=Lachnospira multipara OX=28051 GN=queA PE=3 SV=1
MMDLHDFDYDLPEELIAQDPLSDRSSSRLMVLNKNTGKLEHKIFRDIIDYLNPGDCLVLNDTKVIPARLYGEKEGTGAGIEVLLLKRKEDLKDTWEVLVKPGKKAKVGARISFGDGKLVAEVKDIVDDGNRIIQFEYDGIFEEILDDLGQMPLPPYITHKLEDKDRYQTVYATHKGSAAAPTAGLHFTNELLKAIEEKGVKIARVTLHVGLGTFRPVKVENILDHHMHSEFYMVSQEAADIINETKKNGGRVISVGTTSTRTIESVANEDGTVPAKTGWTDIFIYPGYKFKTIDCLITNFHLPESTLVMLVSALAGRENVLNAYKIAVEEKYRFFSFGDAMFITDNEIQ

SEQ ID NO: 67812 - protein, 343 aa, Lachnospira pectinoschiza
  misc_feature (1)..(343): tr|A0A174YGZ8|A0A174YGZ8_9FIRM S-adenosylmethionine:tRN A ribosyltransferase-isomerase OS=Lachnospira pectinosc hiza OX=28052 GN=queA PE=3 SV=1
MDLHDFYYDLPEELIAQDPLSDRSSSRLMVLDKNTGAIEHKIFRDITEYLKPGDCLVINDTKVIPARLIGEKEGTGAAIEVLLLKRLEDRQDTWEVLVKPGKKCKVGARIVFGGGKLTGEIIDIVEEGNRLIQFSYDGIFEEILDELGQMPLPPYITHKLEDKNRYQTVYAKHEGSAAAPTAGLHFTKELLKQIEDMGVKIARVTLHVGLGTFRPVKVENILDHHMHSEFYQVDKEAADIINNTKANGGRVIAVGTTSTRTLESVADENGHIPVKSGWTEIFIYPGYKFKAIDCLITNFHLPESTLVMLVSALAGRENVLNAYEVAVKERYRFFSFGDAMFIK

SEQ ID NO: 67813 - protein, 349 aa, Lachnospira pectinoschiza
  misc_feature (1)..(349): tr|A0A1G9U7Q4|A0A1G9U7Q4_9FIRM S-adenosylmethionine:tRN A ribosyltransferase-isomerase OS=Lachnospira pectinosc hiza OX=28052 GN=queA PE=3 SV=1
MMDLHDFDYDLPEELIAQDPLSDRSSSRLMVLNKNTGKLEHKIFRDIIDYLNPGDCLVLNDTKVIPARLYGEKEGTGAGIEVLLLKRKEDLKDTWEVLVKPGKKAKVGARISFGDGKLVAEVKDIVDDGNRIIQFEYEGIFEEILDDLGQMPLPPYITHKLEDKDRYQTVYATHKGSAAAPTAGLHFTNELLKAIEEKGVKIARVTLHVGLGTFRPVKVENILDHHMHSEFYMVSQEAADIINETKKNGGRVISVGTTSTRTIESVANEDGTVPAKTGWTDIFIYPGYKFKTIDCLITNFHLPESTLVMLVSALAGRENVLNAYKIAVEEKYRFFSFGDAMFITDNEIQ

SEQ ID NO: 67814 - protein, 341 aa, Lachnospiraceae bacterium
  misc_feature (1)..(341): tr|F7JVA4|F7JVA4_9FIRM S-adenosylmethionine:tRNA ribosy ltransferase-isomerase OS=Lachnospiraceae bacterium 2_1 _58FAA OX=658082 GN=queA PE=3 SV=1
MKTSDFYYDLPEELIAQDPLEDRSGSRLLFLDKETGKTEHHIFRDVIDYLNPGDCLVINDTKVIPARLIGEKEGTGAKIEVLLLKRGENDVWETLVKPGKKAKPGTRISFGDGLLVGEVVDVVEEGNRLIHFEYKGIFEEILDQLGQMPLPPYITHQLEDRSRYNTVYAAHEGSAAAPTAGLHFTPELLKEIQEKGVDIARVTLHVGLGTFRPVKVEDVTEHHMHSEFYMVDAEAAEKINKAKEHGGRVICVGTTSCRTIESAADENGRLKPCSGWTEIFIYPGYQFKILDGLITNFHLPESTLIMLVSALAGKEHVMAAYEEAVKERYRFFSFGDAMIIL

SEQ ID NO: 67815 - protein, 341 aa, Lachnospiraceae bacterium
  misc_feature (1)..(341): tr|A0A350VCM3|A0A350VCM3_9FIRM S-adenosylmethionine:tRN A ribosyltransferase-isomerase OS=Lachnospiraceae bacte rium OX=1898203 GN=queA PE=3 SV=1
MKTSDFYYDLPQELIAQDPLEDRAGSRLLVLDKKTGKTEHHMFRDIAGYLEPGDCLVINDTKVIPARLIGVKEDTGAKIEVLLLKRKENNVWETLVKSGKKARPGTRISFGDGLLMGEVMDVVDEGNRLIHFKYEGIFEEILDQLGQMPLPPYITHQLKDKDRYNTVYATHEGSAAAPTAGLHFTPELLQKIQDKGVDIARVTLHVGLGTFRPVKVKEVKEHHMHSEFYIIDEEAAEKINRAKETGKRVICVGTTSCRTIEAAADENGYLKACSGWTEIFIYPGYRFKVLDGLITNFHLPESTLIMLVSALADREHVLAAYEEAVKEKYRFFSFGDAMLIV

SEQ ID NO: 67816 - protein, 341 aa, Lachnospiraceae oral
  misc_feature (1)..(341): tr|F3B2Y0|F3B2Y0_9FIRM S-adenosylmethionine:tRNA ribosy ltransferase-isomerase OS=Lachnospiraceae oral taxon 10 7 str. F0167 OX=575593 GN=queA PE=3 SV=1
MDVKEFWYDLPQELIAQDPLEDRASSRLLVLDKKNGEISHKHFYDIIDYLNEGDCLVLNETKVIPARLMGVKNDTGAAIEILLLKRKTKTSWECLVKPGKKCKVGAKIDFGEGLLTGTIMDIVEEGNRIIEFEFEGIFEEILDKLGTMPLPPYITHALKDRNRYQTVYAKNEGSAAAPTAGLHFTKELLEKIEKKGIRLAKVTLHVGLGTFRPVKVNDINEHHMHSEFFNISSEAADIINSTKKNGKRVVCVGTTSTRTIESAADENGYLEEKSGWTDIFIYPGYKFKVLDALITNFHLPESTLVMLVSALAGRENILHAYEEAVKEKYRFFSFGDAMLIK

SEQ ID NO: 67817 - protein, 341 aa, Lachnotalea glycerini
  misc_feature (1)..(341): tr|A0A255I919|A0A255I919_9FIRM S-adenosylmethionine:tRN A ribosyltransferase-isomerase OS=Lachnotalea glycerini OX=1763509 GN=queA PE=3 SV=1
MKLEDFNFDLPQELIAQDPIEDRSSSRLLVLDKKTGEIQHHIFKEIINYLEEGDCLVINDTKVIPARLIGSRVGTEAKIEVLLLKRKKEDIWETLVKPGKKAKVGTRISFGGGLLIGEVIEIVEEGNRLVKFEYNGIFEEILDQLGQMPLPPYITHELKDKNRYQTVYAKHEGSAAAPTAGLHFTNELLERIQEKGVNIARVTLHVGLGTFRPVKVENILEHHMHSEFFCIEEEEAFKINNAKKNGKRVISVGTTSCRTLESAADDSGMVRAASGWTEIFIYPGYQFKVIDGLITNFHLPESTLLMLVSALAGKENILNAYETAIKERYRFFSFGDAMFIR

SEQ ID NO: 67818 - protein, 341 aa, Lachnotalea sp.
  misc_feature (1)..(341): tr|A0A416EHU1|A0A416EHU1_9FIRM S-adenosylmethionine:tRN A ribosyltransferase-isomerase OS=Lachnotalea sp. AF33- 28 OX=2292046 GN=queA PE=3 SV=1
MDVKDFDYDLPEKLIAQDPLEDRSSSRLMVLDKKSGEIKHTVFKHIIDRLCPGDCLVINNTKVIPARLMGTKRDTGAAIEVLLLKRKENNIWETLVKPGKKAKPGTEIVFGDGLLSGTVLEVVEEGNRLIQFRFEGIFEEILDQLGQMPLPPYITHQLQDKNRYQTVYAKHEGSAAAPTAGLHFTQELLEQIHNKGVDIAEVTLHVGLGTFRPVKVENVQDHHMHSEFYCIDEDAAEKVNRAKRSGRRVIAVGTTSCRTLESAGAQDGSIRACSGWTEIFIYPGYQFKVVDALITNFHLPQSTLIMLVSALAGREHVLAAYEEAVRQKYRFFSFGDAMFIE

SEQ ID NO: 67819 - protein, 409 aa, Lacibacter cauensis
  misc_feature (1)..(409): tr|A0A562SEY1|A0A562SEY1_9BACT S-adenosylmethionine:tRN A ribosyltransferase-isomerase OS=Lacibacter cauensis O X=510947 GN=IQ13_3649 PE=3 SV=1
MHPSQLQISDFTYDLPDERIARYPLTERDLSKLLIYKEGTIISDVYRHLPQHLPADALLVFNNTKVIEARILFQKDTGSKIEIFCLEPAAGVELTQAMMSQGNVRWTCLVGGAGKWKQQFLEKPLQTPKGAVLLKAEKMNVQQGCFEIEFSWDNTYFTFAELLHYAGVLPLPPYLQRQTEAADYDRYQTVYARQEGSVAAPTAGLHFTPQLLLQLQEKGIKHSFVTLHVGAGTFQPVKSTTMQDHHMHREWIEVDADAIEELLQQLPRPVIPVGTTSLRTIESLYWMGVKVLLNPNATIHQLEVQQWDAYDLPLQNASAKDALQALLDWMQQQKLQKIICHTQVLIAPGYTARVAGAILTNFHQPSSTLLLLVAALIGEDWRKVYRYALANDYRFLSYGDGSLLWVNKT

SEQ ID NO: 67820 - protein, 349 aa, Lacibacter cauensis
  misc_feature (1)..(349): tr|A0A562SHK9|A0A562SHK9_9BACT S-adenosylmethionine:tRN A ribosyltransferase-isomerase OS=Lacibacter cauensis O X=510947 GN=queA PE=3 SV=1
MKLSQFTFDLPLNLIAQTPTKKREDSRLMVVHRKTGQIENRTFRDIMEYFDDKDAFVVNNTKVFPARMYGRKEKTGAKIEVFLLRELNKQNRLWDVIVDPARKIRVGNKLYFGDTEDLVAEVIDNTTSRGRTIRFLFDGTDEEFRTVLYNMGETPLPKYIKRKPDEEDRERYQTVFAKHEGAVAAPTAGMHFSQELIKRLEIQGVRFAEVTLHTGLGTFRPIEVEDLSKHKMDAEYYKIDEFACKIVNKAKEGKHRICSIGTTTMRALETSFTAQQLLKPSEGWTNIFIHPPYNFNIADSLVTNFHLPKTSLLIMTCAFAGYELTMEAYKKAIKDKYRFFSYGDAMLVI

SEQ ID NO: 67821 - protein, 417 aa, Lacibacter sp.
  misc_feature (1)..(417): tr|A0A4Q1CNG1|A0A4Q1CNG1_9BACT S-adenosylmethionine:tRN A ribosyltransferase-isomerase OS=Lacibacter sp. TTM-7 OX=2508719 GN=ESA94_06325 PE=3 SV=1
MHPSQLQISDYTYELPDERIARYPLTERDLSKLLIYKEGAIESDVYRHLPQHLPATALLVFNNTKVIDARILFQKDTGSKIEIFCLEPAAGVELTQAMMSLEKVRWTCLVGGAGKWKQQFLEKELHTPKGNVLFRAEKINQQGGNFEIEFSWNNSWFTFAELLHFAGILPLPPYLQRQSEAADYDRYQTVYARYEGSVAAPTAGLHFTPKLLLKLQEKGIKHSFVTLHVGAGTFQPVKAATMQDHPMHREWIEVNAATIKELLEQLPKLVITVGTTSLRTIESLYWMGVKALLNSNATLEELEVQQWDAYDLPLQNASAKDALQALLGWLQQQNLEQIICHTQILIAPGYTVRIASAIITNFHQPNSTLLLLVAALIGDDWRKVYDYALKNDFRFLSYGDGSLLWTSESPSSLACNS

SEQ ID NO: 67822 - protein, 349 aa, Lacibacter sp.
  misc_feature (1)..(349): tr|A0A4Q1CMJ8|A0A4Q1CMJ8_9BACT S-adenosylmethionine:tRN A ribosyltransferase-isomerase OS=Lacibacter sp. TTM-7 OX=2508719 GN=queA PE=3 SV=1
MKLSQFTFDLPLNLIAQNPTKKREDSRLMVVHRKTGQIENRTFRDIMEYFDDKDAFVVNNTKVFPARMYGRKEKTGAKIEVFLLRELNKQNRLWDVIVDPARKIRVGNKLYFGDTEDLVAEVIDNTTSRGRTIRFLFDGTDEEFRTVLYNMGETPLPKYIKRKPDEEDRERYQTVFAKHEGAVAAPTAGMHFSQELIKRLEIQGVRFAEVTLHTGLGTFRPIEVEDLSKHKMDAEYYKIDEFACKIVNKAKEGKHRICSIGTTTMRALETSFTAQQLLKPSEGWTNIFIHPPYNFNIADSLVTNFHLPKTSLLIMTCAFAGYELTMEAYKKAIKDKYRFFSYGDAMLVI

SEQ ID NO: 67823 - protein, 346 aa, Lacimicrobium alkaliphilum
  misc_feature (1)..(346): tr|A0A0U2ZM12|A0A0U2ZM12_9ALTE S-adenosylmethionine:tRN A ribosyltransferase-isomerase OS=Lacimicrobium alkalip hilum OX=1526571 GN=queA PE=3 SV=1
MKVSDFHFDLPDELIARYPAQQRSASRLLHLNGASGAVQHLQFTDIVDLLEPGDLLVFNDTRVIPARLLGNKQTGGQVEVLVERILDEHRVLAHVRASKAPKPDSLLLLEGELEAKMVRRHDALFELCFNHEKPVLALLEQYGHMPLPPYIDRPDEQVDKERYQTVYNNKPGAVAAPTAGLHFDQPILDQLKQKGVNTAFVTLHVGAGTFQPVRVENITEHQMHSEYAEVSQQVVDAVLATKAAGKRVVAVGTTSVRSLESAAQASLKQKQTLQPFFSDTDIFIYPGYEFAVVDAMLTNFHLPESTLIMLVSAFAGKQNIMHAYGQAIENRYRFFSYGDAMFIERA

SEQ ID NO: 67824 - protein, 349 aa, Lacinutrix sp.
  misc_feature (1)..(349): tr|A0A4U0EYA2|A0A4U0EYA2_9FLAO S-adenosylmethionine:tRN A ribosyltransferase-isomerase OS=Lacinutrix sp. CAU 14 91 OX=2565367 GN=queA PE=3 SV=1
MKLSHFNFDLPEELLAEYPSEHRDEARLMVLNRKDQTIEHKLFKDLIDYFEEDDVMILNNTKVFPARLFGNKEKTGARIEVFLLRELNPEQRLWDVLVDPARKIRIGNKLYFGEDETLVAEVIDNTTSRGRTLRFLYDGSYGEFRRKLTELGQTPLPKYIKREVEPEDEDRYQTIYAKNEGAVAAPTAGLHFSKHLLKRLEIKGVNFAEVTLHVGLGTFNPVEVEDLSKHKMDSEEISINKIATDTINSALKEKRRICAVGTTVMRAVESSVSSSGTLNEFTGWTNKFIFPPYDFSIANCMVTNFHTPKSTLLMMVSAFAGHDFVKRAYDEAIKEGYKFYSYGDAMLII

SEQ ID NO: 67825 - protein, 349 aa, Lacinutrix sp.
  misc_feature (1)..(349): tr|A0A1J5KI97|A0A1J5KI97_9FLAO S-adenosylmethionine:tRN A ribosyltransferase-isomerase OS=Lacinutrix sp. MedPE- SW OX=1860087 GN=queA PE=3 SV=1
MKLSHFNFDLPEELLAEYPSENRDESRLMVLNRKEQTIEHKQFKDLIDYFDEEDVMILNNTKVFPARLFGNKEKTGARIEVFLLRELNEEQRLWDVLVDPARKIRIGNKLYFGDDESLVAEVIDNTTSRGRTLRFLYDGSYKEFRNKLKELGETPLPKYIKRDVEPEDEDRYQTIFAKNEGAVAAPTAGMHFSKHLLKRLEIKGIDFAEVTLHVGLGTFNPVEVEDLSKHKMDSEEVTIGPKTVERINRALKDKKRICAVGTTAMRAVESAVSSSNTLNEIDGWTNKFIFPPYDFSIANCMITNFHTPKSTLLMMASAFAGHDFIKRAYEEAVKEKYKFYSYGDAMLII

SEQ ID NO: 67826 - protein, 351 aa, Lacinutrix venerupis
  misc_feature (1)..(351): tr|A0A420ZK07|A0A420ZK07_9FLAO S-adenosylmethionine:tRN A ribosyltransferase-isomerase OS=Lacinutrix venerupis OX=1486034 GN=queA PE=3 SV=1
MKMKLSHFDFELPEELLAEYPAENRDESRLMVLNRKDQTIEHRQFKDIIDYFDEDDVMILNNTKVFPARLFGNKEKTGARIEVFLLRELNEEQRLWDVLVDPARKIRIGNKLYFGDDESLVAEVIDNTTSRGRTLRFLYDGSYAEFRKKLTSLGETPLPKYIKRDVEPEDEERYQTIFAKNEGAVAAPTAGMHFSKHLLKRLEIKGVDFAEVTLHVGLGTFNSVEVEDLSKHKMDSEEVTIGPETVETINKALKNRRRICAVGTTAMRAVESAVSSNQTLNEIDGWTNKFIFPPYDFSIANAMITNFHTPKSTLMMMTSAFAGHDFVKRAYEEAVKEKYKFYSYGDAMLII

SEQ ID NO: 67827 - protein, 344 aa, Lactobacillus acidifarinae
  misc_feature (1)..(344): tr|A0A0R1LDQ3|A0A0R1LDQ3_9LACO S-adenosylmethionine:tRN A ribosyltransferase-isomerase OS=Lactobacillus acidifa rinae DSM 19394 OX=1423715 GN=queA PE=3 SV=1
MAETLEDFDYELPHELIAQTPIKQRDTSRLLVLDHRTGELTDRHFYDILDELHPGDAVVLNNSRVMPARLYGVKPATGGHVEVLLLHNVEGDVWETLMKPAKRLRVGTTVSFGDGQLTATITAERADGVRLIDFHYDGIFMEILERLGETPLPPYIKAKLADPDRYQTIYAKENGSAAAPTAGLHWTQDLLDQVVAKGVKLVYVTLHVGLGTFRPVEAANIEDHKMHSEFYQLDAQAAQTLNDVRAHGGRIVATGTTSIRTLETIGTKFHGRLQADAGWTDIFIKPGYHWQVVDAFITNFHLPKSTLVMLVAAFTGRDQILNAYQHAIDQRYRFFSFGDAMFIK

SEQ ID NO: 67828 - protein, 347 aa, Lactobacillus acidipiscis
  misc_feature (1)..(347): tr|A0A0R2KBP4|A0A0R2KBP4_9LACO S-adenosylmethionine:tRN A ribosyltransferase-isomerase OS=Lactobacillus acidipi scis OX=89059 GN=queA PE=3 SV=1
MSEEHLTTEDFDYDLPQELIAQTPLKKRDESRMLVLDHVSGKYQDDHFYNVIDQLNPGDALVMNDSRVMPARLYGDKPATGGHLEVLLLNNTDGDNWETLVKPAKRAKVGTEISFGNGKLTATVTKELDHGGRMIEFHYDGIFMEILESLGETPLPPYIKEKLDDPEMYQTVYSKEIGSAAAPTAGLHFTKELLQKIEDKGVKLVYLTLHVGLGTFRPVTEENIEDHKMHSEFYSLSEGSAQTLNEVRQNGGKIVATGTTTIRTLETIGTKFNGEIKADSGWTDIFLKPGYEWKVVQAFITNFHLPKSTLVMLVASFTGRENILNAYKHAVEEKYRFFSFGDCMFIY

SEQ ID NO: 67829 - protein, 347 aa, Lactobacillus acidipiscis
  misc_feature (1)..(347): tr|A0A1W7QKE6|A0A1W7QKE6_9LACO S-adenosylmethionine:tRN A ribosyltransferase-isomerase OS=Lactobacillus acidipi scis OX=89059 GN=queA PE=3 SV=1
MSEEHLTTEDFDYDLPQELIAQTPLKKRDESRMLVLDHVSGKYQDDHFYNVIDQLNPGDALVMNDSRVMPARLYGDKPATGGHLEVLLLNNTDGDNWETLVKPAKRAKVGTEISFGNGKLTATVTKELDHGGRMIEFHYDGIFMEILESLGETPLPPYIKEKLDDPEMYQTVYSKEIGSAAAPTAGLHFTKELLQKIEDEGVKLVYLTLHVGLGTFRPVTEENIEDHKMHSEFYSLSEGSAQTLNEVRQNGGKIVATGTTTIRTLETIGTKFNGEIKADSGWTDIFLKPGYEWKVVQAFITNFHLPKSTLVMLVASFTGRENILNAYKHAVEEKYRFFSFGDCMFIY

SEQ ID NO: 67830 - protein, 348 aa, Lactobacillus agilis
  misc_feature (1)..(348): tr|A0A2I2A9A2|A0A2I2A9A2_9LACO S-adenosylmethionine:tRN A ribosyltransferase-isomerase OS=Lactobacillus agilis OX=1601 GN=queA PE=3 SV=1
MTKQAHLTTEDFDYDLPQELIAQTPLEKRDHSRMLVLDSKTGEMKDDVFYNVIDQLNPGDALVMNDSRVMPARIYGVKPDTGGHVEVLLLNNTKGDEWETLVKPAKRAKVGTKLSFGDGKLMATVTKELEHGGRLIEFEYDGIFLEILDQLGEMPLPPYIKEKLDDPEMYQTVYSREVGSAAAPTAGLHFTKELLAKIEAKGVKLVYLTLHVGLGTFRPVSVSNVEDHKMHSEFYRLTEEAAQTLNEVRANGGRIVAVGTTSIRTLETIGSKFNGEIKADSGWTDIFIWPGYEWKVVQAFITNFHLPKSTLVMLVAAFTGRDTILNAYKHAVAEKYRFFSFGDAMFIK

SEQ ID NO: 67831 - protein, 348 aa, Lactobacillus agilis
  misc_feature (1)..(348): tr|A0A0R2AKS7|A0A0R2AKS7_9LACO S-adenosylmethionine:tRN A ribosyltransferase-isomerase OS=Lactobacillus agilis DSM 20509 OX=1423718 GN=queA PE=3 SV=1
MTKQAHLTTEDFDYDLPQELIAQTPLEKRDHSRMLVLDSKTGEMKDDVFYNVIDQLNPGDALVMNDSRVMPARIYGVKPDTGGHVEVLLLNNTKGDEWETLVKPAKRAKVGTKLSFGDGKLMATVTKELEHGGRLIEFEYDGIFLEILDQLGEMPLPPYIKEKLDDPEMYQTVYSREVGSAAAPTAGLHFTKELLTKIEAKGVKLVYLTLHVGLGTFRPVSVSNVEDHKMHSEFYRLTEEAAQTLNEVRANGGRIVAVGTTSIRTLETIGSKFNGEIKADSGWTDIFIWPGYDWKVVQAFITNFHLPKSTLVMLVAAFTGRDTILNAYKHAVAEKYRFFSFGDAMFIK

SEQ ID NO: 67832 - protein, 346 aa, Lactobacillus algidus
  misc_feature (1)..(346): tr|A0A0R1HLV7|A0A0R1HLV7_9LACO S-adenosylmethionine:tRN A ribosyltransferase-isomerase OS=Lactobacillus algidus DSM 15638 OX=1423719 GN=queA PE=3 SV=1
MTKQLSTEDFDYELPQALIAQTPLEERDASRMLVLDHETGDIQDDYFYNVIDQLDAGDALVMNDSRVMPARIHGIRPDTGGHIEVLLLNNTDGDNWETLVKPAKKMKIGSVISFGDGRLTATITKELEHGGRMIRFDYDGIFMEILNELGEMPLPPYIKETLEDQEMYQTVYSKEVGSAAAPTAGLHFTTQLLEKIEEKGVHLVYLTLHVGLGTFRPVSETNIEDHKMHSEFYRLTAGSAKMLNEVRQSGGKIIATGTTSIRTLETIGSKFNGDIQADSGWTEIFIKPGYEFKVVEGFITNFHLPKSTLVMLVAAFTGRENILNAYKHAVDAKYRFFSFGDAMYIK

SEQ ID NO: 67833 - protein, 346 aa, Lactobacillus algidus
  misc_feature (1)..(346): tr|A0A5C6M833|A0A5C6M833_9LACO S-adenosylmethionine:tRN A ribosyltransferase-isomerase OS=Lactobacillus algidus OX=105612 GN=queA PE=3 SV=1
MTKQLSTEDFDYELPQALIAQTPLEERDASRMLVLDHETGDIQDDYFYNVIDQLNAGDALVMNDSRVMPARIHGIRPDTGGHIEVLLLNNTDGDNWETLVKPAKKMKIGSVISFGDGRLTATITKELEHGGRMIRFDYDGIFMEILNELGEMPLPPYIKETLEDQEMYQTVYSKEVGSAAAPTAGLHFTTQLLEKIEAKGVHLVYLTLHVGLGTFRPVSETNIEDHKMHSEFYRLTADSAKMLNEVRQSGGKIIATGTTSIRTLETIGSKFNGDIQADSGWTEIFIKPGYEFKVVEGFITNFHLPKSTLVMLVAAFTGRENILNAYKHAVDAKYRFFSFGDAMYIK

SEQ ID NO: 67834 - protein, 344 aa, Lactobacillus alimentarius
  misc_feature (1)..(344): tr|A0A2N9YJM7|A0A2N9YJM7_9LACO S-adenosylmethionine:tRN A ribosyltransferase-isomerase OS=Lactobacillus aliment arius DSM 20249 OX=1423720 GN=queA PE=3 SV=1
MTLTTEDFDYNLPEELIAQTPIKNRDQSRLLVLDHETGQYQDKHFYDILDYLNPGDALVMNNSRVLPARLYGTKEDTDGHEEVLLLNNIEGDKWEVLMKPARRAKVGTKVKFGDGQLEAEVLEDLEHGGKIIEFHYQGIFMEILEQLGEMPLPPYIKEKLDDPNRYQTVYAKENGSAAAPTAGLHWTKDLLKKVEDKGVKLVYLTLHVGLGTFRPVTESDISKHVMHSEFYRLDEESAKTLNEVRQNGGKIVATGTTSIRTLETIGTKFNGEIKADSGWTDIFIKPGYEWKVVNAFITNFHLPKSTLVMLVAAFTGRENILNAYQHAVEEKYRFFSFGDAMFIK

SEQ ID NO: 67835 - protein, 344 aa, Lactobacillus allii
  misc_feature (1)..(344): tr|A0A1P8PZL4|A0A1P8PZL4_9LACO S-adenosylmethionine:tRN A ribosyltransferase-isomerase OS=Lactobacillus allii O X=1847728 GN=queA PE=3 SV=1
MTLTTEDFDYDLPEELIAQTPIKNRDHSRLLVLDHKTGSYEDKHFYDILDYLNPGDALVMNNSRVLPARLYGTKKDTDGHEEVLLLNNIEGDKWEVLMKPARRAKVGTTVDFGDGKLSATVLEELEHGGKIIEFHYDGIFLEILEQLGETPLPPYIKEKLDDPDRYQTVYAKENGSAAAPTAGLHWTKELLQKVQDKGVKLVYLTLHVGLGTFRPVTESDISKHIMHSEFYRLDEESAQTLNDVREHGGKIVATGTTSIRTLETIGTKFDGEIKADSGWTDIFIKPGYEWKVVDEFITNFHLPKSTLVMLVAAFTGRENILNAYQHAIDEKYRFFSFGDAMFIK

SEQ ID NO: 67836 - protein, 343 aa, Lactobacillus amylophilus
  misc_feature (1)..(343): tr|A0A4Y4JTM5|A0A4Y4JTM5_9LACO S-adenosylmethionine:tRN A ribosyltransferase-isomerase OS=Lactobacillus amyloph ilus OX=1603 GN=queA PE=3 SV=1
MLTTEDFDYDLPEELIAQTPIEQRDTSRLLVLDHQTGELLDQHFYNIIDQLHAGDALVMNDSRVMPARLHGLKEGTGAHIELLLLKNIVGDKWEVLAKPAKKVPVGSVIDFGDGALKATVTKELDFGGREITFSYEGIFLEVLEALGEMPLPPYIKEKLDDPERYQTVYAKEMGSAAAPTAGLHWTKDLLAKVQAKGVKLVYLTLHVGLGTFRPVSEENILDHEMHSEFYSLSEDAARTLNEVKQNGGRIVATGTTSIRTLETIATRNDGKIVAESGWTDIFIYPGYEWKVVDAFITNFHLPKSTLVMLVASFTGRETILNAYKHAVQEKYRFFSFGDAMFIK

SEQ ID NO: 67837 - protein, 343 aa, Lactobacillus amylophilus; identical to SEQ ID NO: 67836
  misc_feature (1)..(343): tr|A0A0R1YIT1|A0A0R1YIT1_9LACO S-adenosylmethionine:tRN A ribosyltransferase-isomerase OS=Lactobacillus amyloph ilus DSM 20533 = JCM 1125 OX=1423721 GN=queA PE=3 SV=1

SEQ ID NO: 67838 - protein, 343 aa, Lactobacillus amylotrophicus; identical to SEQ ID NO: 67836
  misc_feature (1)..(343): tr|A0A0R1GUW7|A0A0R1GUW7_9LACO S-adenosylmethionine:tRN A ribosyltransferase-isomerase OS=Lactobacillus amylotr ophicus DSM 20534 OX=1423722 GN=queA PE=3 SV=1

SEQ ID NO: 67839 - protein, 347 aa, Lactobacillus animalis
  misc_feature (1)..(347): tr|A0A062X9L2|A0A062X9L2_9LACO S-adenosylmethionine:tRN A ribosyltransferase-isomerase OS=Lactobacillus animali s OX=1605 GN=queA PE=3 SV=1
MTEEHLTTEDFDYDLPEELIAQTPLEHRDQSRMLVLDSKTGEYQDDYFYNVIDRLNPGDALVMNDSRVLPARIYGVKPDTGGHLEVLLLNNIKGDQWETLVKPAKRAKVGTKISFGNGELTAVVKEELEHGGRIVEFEYDGIFLEVLESLGEMPLPPYIKEKLDDPEMYQTVYSKEVGSAAAPTAGLHFTEELLAKIEAKGVKLVYLTLHVGLGTFRPVSVDNIEEHKMHSEFYRLSEEAAETLNEVRKNGGRIVATGTTSIRTLETIGSKFNGEIKADSGWTDIFIKPGYEWKVVNAFITNFHLPKSTLVMLVSAFTGRENILNAYRHAVEEKYRFFSFGDAMFIY

SEQ ID NO: 67840 - protein, 347 aa, Lactobacillus animalis
  misc_feature (1)..(347): tr|A0A4S3QE93|A0A4S3QE93_9LACO S-adenosylmethionine:tRN A ribosyltransferase-isomerase OS=Lactobacillus animali s OX=1605 GN=queA PE=3 SV=1
MTEEHLTTEDFDYDLPEELIAQTPLEHRDQSRMLVLDSKTGEYQDDYFYNVIDRLNPGDALVMNDSRVLPARIYGVKPDTGGHLEVLLLNNIKGDQWETLVKPAKRAKVGTKISFGNGELTAVVKEELEHGGRIVEFEYDGIFLEVLESLGEMPLPPYIKEKLDDPEMYQTVYSKEVGSAAAPTAGLHFTEELLAKIEAKGVKLVYLTLHVGLGTFRPVSVDNIEEHKMHSEFYRLSEEAAETLNEVRKNGGRIVATGTTSIRTLETIGSKFNGEIKADSGWTDIFIKPGYEWKVVNAFITNFHLPKSTLVMLVSAFTGRENILNAYCHAVEEKYRFFSFGDAMFIY

SEQ ID NO: 67841 - protein, 350 aa, Lactobacillus apodemi
  misc_feature (1)..(350): tr|A0A0R1TSE5|A0A0R1TSE5_9LACO S-adenosylmethionine:tRN A ribosyltransferase-isomerase OS=Lactobacillus apodemi DSM 16634 = JCM 16172 OX=1423724 GN=queA PE=3 SV=1
MIFLTEEHLTTEDFDYDLPEELIAQTPLEERDQSRMLALNAKTGEYEDDYFYNVIDRLNPGDALVMNDSRVMPARIYGVKPDTGGHLEVLLLNNIEGDRWETLVKPAKRAKVGTKITFGNGELTAVVKEELEHGGRIIEFAYDGIFLEVLESLGEMPLPPYIKEKLDDPEMYQTVYSKEVGSAAAPTAGLHFTEELLQKIEEKGVKLVYLTLHVGLGTFRPVSVDNIEDHKMHSEFYRLSPEAAATLNEVKQNGGRIVATGTTSIRTLETIGSKFDGEIKADSGWTDIFIKPGYQWKVVDAFITNFHLPKSTLVMLVSAFTGRENILNAYKHAVAEKYRFFSFGDAMFIY

SEQ ID NO: 67842 - protein, 350 aa, Lactobacillus aquaticus
  misc_feature (1)..(350): tr|A0A0R2D5Z9|A0A0R2D5Z9_9LACO S-adenosylmethionine:tRN A ribosyltransferase-isomerase OS=Lactobacillus aquatic us DSM 21051 OX=1423725 GN=queA PE=3 SV=1
MTILSEEHLTTEDFDYDLPQELIAQTPLEERDHSRMLILDSKTGAYKDDVFYNVIDQLNAGDALVMNDSRVMPARIYGIKPETGGHIEVLLLNNTQGDEWETLVKPAKRAKVGTRIVFGDGKLSAVITKELEHGGRMIKFEYEGIFMEILDELGEMPLPPYIKEKLDDPEMYQTVYSREVGSAAAPTAGLHFTKELLHKIEAKGVHLVYLTLHVGLGTFRPVSVENIEDHKMHSEFYRLSEDSAKILNDVRANGGKIIATGTTSIRTLETIGTKFNGEIRADSGWTDIFIKPGYDWKVVQAFITNFHLPKSTLVMLVSSFTGRKNILNAYKHAVKEKYRFFSFGDAMFIK

SEQ ID NO: 67843 - protein, 348 aa, Lactobacillus aviarius
  misc_feature (1)..(348): tr|A0A510WR26|A0A510WR26_9LACO S-adenosylmethionine:tRN A ribosyltransferase-isomerase OS=Lactobacillus aviariu s subsp. aviarius OX=147810 GN=queA PE=3 SV=1
MTDKPLKTEDFDYDLPHELIAQTPLKERDEARMLVLNAKTGEYKDDYFYDIIDYLNPGDAVVMNDSRVMPARIYGVKPDTGGHLEVLLLNNTEGDNWETLVKPARRAKVGTKIVFGNGELTATVTKELEHGGRMIKFEYDGIFMEILDKLGEMPLPPYIKEKLDDPEMYQTVYSREIGSAAAPTAGFHWTKELLKKVEEKGVKLVYLTLHVGLGTFRPVNEENIDDHKMHSEFYSMSQEAADTLNEVRKNGGRIVATGTTSIRTLETIGTKFNGELKADSGWTDIFIKPGYKWQVVDAFITNFHLPKSTLVMLVAAFTGRENILNAYKHAVQEKYRFFSFGDAMFIHK

SEQ ID NO: 67844 - protein, 348 aa, Lactobacillus aviarius
  misc_feature (1)..(348): tr|A0A179CI93|A0A179CI93_9LACO S-adenosylmethionine:tRN A ribosyltransferase-isomerase OS=Lactobacillus aviariu s OX=1606 GN=queA PE=3 SV=1
MTDKPLKTEDFDYDLPHELIAQTPLKERDEARMLVLNAKTGEYKDDYFYDIIDYLNPGDAVVMNDSRVMPARIYGVKPDTGGHLEVLLLNNTEGDNWETLVKPARRAKVGTKIVFGNGELTATVTKELEHGGRMIKFEYDGIFMEILDKLGEMPLPPYIKEKLDDPEMYQTVYSKEIGSAAAPTAGFHWTKELLKKVEEKGVKLVYLTLHVGLGTFRPVNEENIDDHKMHSEFYSMSQEAADTLNEVRKNGGRIVATGTTSIRTLETIGTKFNGELKADSGWTDIFIKPGYKWQVVDAFITNFHLPKSTLVMLVAAFTGRENILNAYKHAVQEKYRFFSFGDAMFIHK

SEQ ID NO: 67845 - protein, 344 aa, Lactobacillus backii
  misc_feature (1)..(344): tr|A0A192H2V5|A0A192H2V5_9LACO S-adenosylmethionine:tRN A ribosyltransferase-isomerase OS=Lactobacillus backii OX=375175 GN=queA PE=3 SV=1
MGLTLEDFDYNLPHELIAQTPLKERDASRLLVLDHKTGEMADKHFYDILDELHAGDAVVMNDTRVMPARLYGVKPDTGGHMEVLLLNNTDGDNWETLMKPAKRAKVGTEIVFGDGQLKATVTKELEHGGRMIEFHYAGIFMEILEQLGETPLPPYIKEKLDDPEMYQTVYAKENGSAAAPTAGLHWTKDLLKQVQDKGVKLIYLTLHVGLGTFRPVDEENIDDHKMHSEFYRLTPKAAAELNEVRQNGGRIVATGTTSIRTLETIGTKFNGAIKADSGWTDIFIKPGYKWQVVDAFITNFHLPKSTLVMLVAAFTGRDTILNAYAHAIEERYRFFSFGDAMFIK

SEQ ID NO: 67846 - protein, 344 aa, Lactobacillus bifermentans
  misc_feature (1)..(344): tr|A0A0R1H0Y8|A0A0R1H0Y8_9LACO S-adenosylmethionine:tRN A ribosyltransferase-isomerase OS=Lactobacillus biferme ntans DSM 20003 OX=1423726 GN=queA PE=3 SV=1
MGLSTEDFDYDLPQELIAQTPLKERDASRMLVLDHKTGAYSDQHFYDVLEQLNPGDAVVMNDTRVMPARLYGIKAETGAHLEVLLLNNTEGDHWETLMKPAKRAKVGTEITFGDGQLKAVVTEELEHGGRMIEFHYDGIFMEILEQLGETPLPPYIKAKLDDPEMYQTVYAKENGSAAAPTAGLHWTKELLQKVQDKGVKLVYLTLHVGLGTFRPVDVDDIDNHKMHSEFYRLTPEAAAQLNEVRANGGRIIATGTTSIRTLETIGTKFDGEIKPDSGWTDIFIKPGYQWQVVDAFITNFHLPKSTLVMLVAAFTGRDNILNAYQHAIDERYRFFSFGDAMFIK

SEQ ID NO: 67847 - protein, 344 aa, Lactobacillus bombi
  misc_feature (1)..(344): tr|A0A347SQ91|A0A347SQ91_9LACO S-adenosylmethionine:tRN A ribosyltransferase-isomerase OS=Lactobacillus bombi O X=1303590 GN=queA PE=3 SV=1
MMLTLDDFDYDLPQELIAQTPLKKRDQSRLLVLDHQSGAYQDRHFYDVLDYLNPGDALVMNDTKVLPARLYGVKEDTQAHLEVLLLNNTEGDDWEVLMKPARRAPIGTKVDFGNGKLTATVTQELDHGGRMIHFDYEGIFMEILEELGEMPLPPYIKTKLDDPNRYQTVYAREEGSAAAPTAGLHWTKDLLQKVQDKGIKLVYLTLHVGLGTFRPVSEQNIDEHKMHSEFYRLTAESAQILNEVRQNGGKIVATGTTSIRTLETIGTKFDGEIKADSGWTDIFIKPGYQWKVVDEFITNFHLPKSTLVMLVASFTGRENILNAYQHAVAEKYRFFSFGDAMFIK

SEQ ID NO: 67848 - protein, 344 aa, Lactobacillus bombi
  misc_feature (1)..(344): tr|A0A3R7CJV1|A0A3R7CJV1_9LACO S-adenosylmethionine:tRN A ribosyltransferase-isomerase OS=Lactobacillus bombi O X=1303590 GN=queA PE=3 SV=1
MMLTLDDFDYDLPQELIAQTPLKKRDQSRLLILDHQSGAYQDRHFYDVLDYLNPGDALVMNDTKVLPARLYGVKEDTQAHLEVLLLNNTEGDDWEVLMKPARRAPIGTKVDFGNGKLTATVTQELDHGGRMIHFDYEGIFMEILEELGEMPLPPYIKTKLDDPNRYQTVYAREEGSAAAPTAGLHWTKDLLQKVQDKGIKLVYLTLHVGLGTFRPVSEQNIDEHKMHSEFYRLTTESAQILNEVRQNGGKIVATGTTSIRTLETIGTKFDGEIKADSGWTDIFIKPGYQWKVVDEFITNFHLPKSTLVMLVASFTGREIILNAYQHAVAEKYRFFSFGDAMFIK

SEQ ID NO: 67849 - protein, 348 aa, Lactobacillus brantae
  misc_feature (1)..(348): tr|A0A0R2AWA7|A0A0R2AWA7_9LACO S-adenosylmethionine:tRN A ribosyltransferase-isomerase OS=Lactobacillus brantae DSM 23927 OX=1423727 GN=queA PE=3 SV=1
MEGIIVLTTEDFDYNLPEELIAQTPLKERDASRLLTLNHTTGAMEDKHFYDIIDYLNPGDAVVMNDTRVMPARLYGVKADTGAHMEVLLLTNIEGDKWETLMKPARKAPVGTKVTFGDGLLVATVLEELDHGGRIVEFSYSGIFMEVLEQLGETPLPPYIKEKLDDPEMYQTVYAREVGSAAAPTAGLHWTKELLDKAQAKGVKLVYLTLHVGLGTFRPVSEDNIEDHKMHSEFYRLTEEAAAELTAVKANGGRIIATGTTSIRTLETIGTKFNGEIKADSGWTDIFIKPGYKWQVVDAFITNFHLPKSTLVMLVAAFTGRENILNAYQHAIDERYRFFSFGDAMYIY

SEQ ID NO: 67850 - protein, 344 aa, Lactobacillus brevis
  misc_feature (1)..(344): sp|Q03R37|QUEA_LACBA S-adenosylmethionine:tRNA ribosylt ransferase-isomerase OS=Lactobacillus brevis (strain AT CC 367 / JCM 1170) OX=387344 GN=queA PE=3 SV=1
MAYTLDDFDYDLPHELIAQTPIKQRDTSRLLVLDHQANTLEDKHFYDILDELHAGDAVVMNNSRVMPARLYGIKPETGGHVEVLLLHNVEGDVWETLMKPAKRLRVGTTVTFGDGQLTATVTEEREDGIRLIEFHYDGIFMEILEQLGETPLPPYIKEKLDDPDRYQTVYAKENGSAAAPTAGLHWTQELLDQVAAKGVKLVYITLHVGLGTFRPVEEANIEDHKMHSEFYRLDEAAAATLNEVRANGGRIIATGTTSIRTLETIGTKFKGEIKPDSGWTDIFIKPGYQWQVVNAFITNFHLPKSTLVMLVAAFTGRDQILNAYHHAIEEKYRFFSFGDAMFIK

SEQ ID NO: 67851 - protein, 344 aa, Lactobacillus brevis
  misc_feature (1)..(344): tr|U2QXS6|U2QXS6_LACBR S-adenosylmethionine:tRNA ribosy ltransferase-isomerase OS=Lactobacillus brevis ATCC 148 69 = DSM 20054 OX=649758 GN=queA PE=3 SV=1
MAYTLDDFDYDLPHELIAQTPIKQRDTSRLLVLDHQANTLEDKHFYDILDELHAGDAVVMNNSRVMPARLYGIKPETGGHVEVLLLHNVEGDVWETLMKPAKRLRVGTTVTFGDGQLTATVTEEREDGIRLIEFHYDGIFMEILEQLGETPLPPYIKEKLDDPDRYQTVYAKENGSAAAPTAGLHWTQELLDQVAAKGVKLVYITLHVGLGTFRPVEEANIEDHKMHSEFYRLDEAAASTLNEVRANGGRIIATGTTSIRTLETIGTKFKGEIKPDSGWTDIFIKPGYQWQVVNAFITNFHLPKSTLVMLVAAFTGRDQILNAYHHAIEEKYRFFSFGDAMFIK

SEQ ID NO: 67852 - protein, 346 aa, Lactobacillus buchneri
  misc_feature (1)..(346): tr|A0A4R5NN76|A0A4R5NN76_LACBU S-adenosylmethionine:tRN A ribosyltransferase-isomerase OS=Lactobacillus buchner i DSM 20057 OX=1423728 GN=queA PE=3 SV=1
MKTNYTLEDFDYDLPHELIAQTPIKDRDESRLLVLDKESGEMQDRHFYNIIDYLNPGDALVMNDSKVMPARIYGVKADTGGHMEVLLLHNIEGDRWETLMKPAKKAKVGTVINFGDGQLKAVVTKELDHGGREIEFQYDGIFIEILERLGETPLPPYIKEKLDDPDRYQTVYAKEMGSAAAPTAGLHWTKDLLKKVEDKGVHLVYLTLHVGLGTFRPVDEENIEDHKMHSEFYRLSDQAAATLNAVRDNSGKIVATGTTSIRTLETVGTKFDGQIRPDSGWTDIFIKPGYQWRVVDSFITNFHLPKSTLVMLVASFTGRENILNAYQHAIDEKYRFFSFGDAMYIH

SEQ ID NO: 67853 - protein, 346 aa, Lactobacillus buchneri; identical to SEQ ID NO: 67852
  misc_feature (1)..(346): tr|A0A4V5LJ99|A0A4V5LJ99_LACBU S-adenosylmethionine:tRN A ribosyltransferase-isomerase OS=Lactobacillus buchner i OX=1581 GN=queA PE=3 SV=1

SEQ ID NO: 67854 - protein, 350 aa, Lactobacillus cacaonum
  misc_feature (1)..(350): tr|A0A0R2CPD8|A0A0R2CPD8_9LACO S-adenosylmethionine:tRN A ribosyltransferase-isomerase OS=Lactobacillus cacaonu m DSM 21116 OX=1423729 GN=queA PE=3 SV=1
MAVLSEKHLTTEDFDYNLPEELIAQTPLKERDHSRMLILDSKTGDYQDDIFYNVIDQLNPGDALVMNDSRVMPARIYGTKTDTEGHLEVLLLNNTDGDNWETLVKPAKRAKVGTKINFGDGKLSAIVTKELDHGGRMIKFEYDGIFMEILEKLGEMPLPPYIKEKLDDPEMYQTVYSREIGSAAAPTAGLHFTKELLQKIEEKGVHLVYLTLHVGLGTFRPVSVDNIEDHKMHSEFYRLNEEAAKVLNDVKKNGGKIVATGTTSIRTLETIGSKFNGEIKPDSGWTDIFIKPGYEWKVVQAFITNFHLPKSTLVMLVSAFTGRENILNAYKHAVDEKYRFFSFGDAMFIK

SEQ ID NO: 67855 - protein, 344 aa, Lactobacillus camelliae
  misc_feature (1)..(344): tr|A0A0R2F6H5|A0A0R2F6H5_9LACO S-adenosylmethionine:tRN A ribosyltransferase-isomerase OS=Lactobacillus camelli ae DSM 22697 = JCM 13995 OX=1423730 GN=queA PE=3 SV=1
MLTTEDFDYDLPHELIAQTPLKKRDASRLLVLNAETGAYEDKHFYDILDYLNPGDAVVMNDTKVMPARLYGVKKETGAHMEVLLLHNTEGDQWETLMKPAKKAPVGTVIDFGDGLLQATVKEELDHGGRIIEFHYDGIFMEILDKLGETPLPPYIKAKLDDPDMYQTVYAKEMGSAAAPTAGLHWTPELLQKVQDKGIKLVYLTLHVGLGTFRPVSEDNIEDHKMHSEFYRFSQEAADTLNEVKQNGGRIIATGTTSIRTLETIGTKFHGAIKPSSGWTDIFIKPGYQWQLVDAFITNFHLPKSTLVMLVAAFTGRENILNAYQHAIQEKYRFFSFGDAMYIHK

SEQ ID NO: 67856 - protein, 350 aa, Lactobacillus capillatus
  misc_feature (1)..(350): tr|A0A0R1MDD4|A0A0R1MDD4_9LACO S-adenosylmethionine:tRN A ribosyltransferase-isomerase OS=Lactobacillus capilla tus DSM 19910 OX=1423731 GN=queA PE=3 SV=1
MKVLAEEHLTTEDFDYDLPQNLIAQTPLKERDHSRMLILDSKTGAYKDDIFYNVIDQLNAGDALVMNDSRVMPARIYGVKPETGGHIEVLLLNNTQGDNWETLVKPAKRAKVGTRIVFGDGKLSAVITKELEHGGRMIRFEYDGIFMEILDQLGEMPLPPYIKEKLDDPEMYQTVYSREVGSAAAPTAGLHFTKELLQRIADKGVRLVYLTLHVGLGTFRPVSVENIEDHKMHSEFYRLSEESAKVLNDVRANGGKIVATGTTSIRTLETIGTKFNGEIRADSGWTDIFIKPGYEWKVVQAFITNFHLPKSTLVMLVSAFTGRTNILNAYKHAVEEKYRFFSFGDAMFIK

SEQ ID NO: 67857 - protein, 357 aa, Lactobacillus casei
  misc_feature (1)..(357): tr|K6R432|K6R432_LACCA S-adenosylmethionine:tRNA ribosy ltransferase-isomerase OS=Lactobacillus casei 21/1 OX=1 051651 GN=queA PE=3 SV=1
MVQENKRYHKVEDKHYQLSDFDYDLPHELIAQTPLKERDASRLLVLNSETGEMQDKHFYDILDYFKPGDALVMNDTRVMPARLYGVKPETGAHMEVLLLNNTSGDDWETLMKPARKAPVGTVIDFGDGLLKATVTKELEHGGRMIHFDYDGIFMEILDKLGETPLPPYIKEKLEDPEMYQTVYSKELGSAAAPTAGLHWTKDLLKKVQEKGVKLVYLTLHVGLGTFRPVVEENIEAHKMHSEFYRLTPEAAATLNDVRDNGGRIIATGTTSIRTLEAIGTKFDGAIKADSGWTDIFIKPGYQWKVVDAFITNFHLPKSTLVMLVAAFTGRDTILNAYKHAIDEKYRFFSFGDAMFIY

SEQ ID NO: 67858 - protein, 357 aa, Lactobacillus casei; identical to SEQ ID NO: 67857
  misc_feature (1)..(357): tr|A0A510WJ70|A0A510WJ70_LACCA S-adenosylmethionine:tRN A ribosyltransferase-isomerase OS=Lactobacillus casei O X=1582 GN=queA PE=3 SV=1

SEQ ID NO: 67859 - protein, 347 aa, Lactobacillus ceti
  misc_feature (1)..(347): tr|A0A0R2KSE7|A0A0R2KSE7_9LACO S-adenosylmethionine:tRN A ribosyltransferase-isomerase OS=Lactobacillus ceti DS M 22408 OX=1122146 GN=queA PE=3 SV=1
MTEKHLTTEDFDYELPERLIAQTPLEERDASRMLILDSKTGEYQDDYFYNVIDQLNPGDALVMNNSRVLPARIYGVKPDTGGHLEVLLLNNIQGDKWETLVKPAKRAKVGTKISFGDGQLTAVVTEELEHGGRIIEFQYDGIFMEILEGLGEMPLPPYIKEKLDNPEMYQTVYSKEIGSAAAPTAGLHFTEELLEKIEQKGVKLVYLTLHVGLGTFRPVSVDNLEDHKMHSEFYALSEQAAQTLNEVRQNGGRIIATGTTSIRTLETIGSKFNGEIKADSGWTEIFIKPGYQWQVVQGFITNFHLPKSTLVMLVSAFTGRENILNAYRHAVEENYRFFSFGDAMFIK

SEQ ID NO: 67860 - protein, 361 aa, Lactobacillus chiayiensis
  misc_feature (1)..(361): tr|A0A4Q1TZ63|A0A4Q1TZ63_9LACO S-adenosylmethionine:tRN A ribosyltransferase-isomerase OS=Lactobacillus chiayie nsis OX=2100821 GN=queA PE=3 SV=1
MEANKVQDKKRYRQVENKNYQLSDFDYDLPHELIAQTPLKERDASRLLVLNADTGAMQDRHFYDILDYFKPGDALVMNDTRVMPARLYGVKPETGAHMEVLLLNNTSGDDWETLMKPARKAPVGTVIDFGDGLLKATVTKELEHGGRMIHFDYDGIFMEILDKLGETPLPPYIKEKLDDPEMYQTVYSKELGSAAAPTAGLHWTKELLKKVQDKGVKLVYLTLHVGLGTFRPVVEENIEAHKMHSEFYRLTPEAAATLNEVRDSGGRIIATGTTSIRTLEAIGTKFDGEIKPDSGWTDIFIKPGYQWKVVDAFITNFHLPKSTLVMLVAAFTGRDTILNAYKHAIKEEYRFFSFGDAMFIY

SEQ ID NO: 67861 - protein, 344 aa, Lactobacillus collinoides
  misc_feature (1)..(344): tr|A0A0R2BDW3|A0A0R2BDW3_LACCL S-adenosylmethionine:tRN A ribosyltransferase-isomerase OS=Lactobacillus collino ides DSM 20515 = JCM 1123 OX=1423733 GN=queA PE=3 SV=1
MTLTTDDFDYDLPHELIAQTPIEKRDASRLLVMDHTTGALEDKHFYDIIDQLHAGDAVVMNDSRVMPARIYGVKPETGGHVEVLLLHNTKGDEWETLMKPAKRIKVGTTVTFGDGQLTATVTKELEHGGRMIEFHYDGIFMEVLEKLGETPLPPYIKEKLDDLERYQTVYARESGSAAAPTAGLHWTKALLQKVQDKGVKLVYLTLHVGLGTFRPVDEKNIDDHKMHSEFYRLSEESAKTLNEVRANGGRIVATGTTSIRTLETIGSKFNGEIKADSGWTDIFIFPGYQWKVVDAFITNFHLPKSTLVMLVAAFTGRDNILNAYQHAIEEKYRFFSFGDAMFIK

SEQ ID NO: 67862 - protein, 343 aa, Lactobacillus composti
  misc_feature (1)..(343): tr|X0PEB1|X0PEB1_9LACO S-adenosylmethionine:tRNA ribosy ltransferase-isomerase OS=Lactobacillus composti DSM 18 527 = JCM 14202 OX=1423734 GN=queA PE=3 SV=1
MLTTEDFDYELPHELIAQTPLKERDASRMLVLDHKTGKLEDKHFYDILAELNPGDAVVMNDTRVMPARLYGQKPDTGGHMEVLLLHNTEGDNWETLMKPARHAKVGTVIEFGNGLLKATVTKELEHGGRMVEFHYDGIFMEILDQLGETPLPPYIKAKLDDPEMYQTVYAKESGSAAAPTAGLHWTKELLQKVQDKGVKLVYLTLHVGLGTFRPVSEDNIEDHKMHSEFYRLSEAAAATLNDVRAHGGRIIATGTTSIRTLETIGTKFDGAIQADSGWTDIFIKPGYKWRVVDAFITNFHLPKSTLVMLVAAFTGREMILNAYQHAIDERYRFFSFGDAMFIK

SEQ ID NO: 67863 - protein, 343 aa, Lactobacillus concavus
  misc_feature (1)..(343): tr|A0A0R1WHU5|A0A0R1WHU5_9LACO S-adenosylmethionine:tRN A ribosyltransferase-isomerase OS=Lactobacillus concavu s DSM 17758 OX=1423735 GN=queA PE=3 SV=1
MLTTEDFDYDLPQELIAQTPIEKRDSSRLLVLDHQTGEMQDKHFYDIIDELHAGDAVVMNNSRVMPARLYGVKADTGGHEEVLLLRNTVGDEWETLMKPARHAHVGTKVVFGDGELTATVTRILEHGGRMIKFDYDGIFLEILERLGETPLPPYIKEKLDDPERYQTVYSKELGSAAAPTAGLHWTKELLEKVEAKGVKLVYLTLHVGLGTFRPVSEDNIEDHKMHSEFYQFSQEAADTLNGVHRNGGRIVATGTTSIRTMETVATKFDGELQADSGWTDIFIKPGYQWKAVDAFITNFHLPKSTLVMLVASFTGRETILNAYEHAIKERYRFFSFGDAMFIK

SEQ ID NO: 67864 - protein, 342 aa, Lactobacillus coryniformis
  misc_feature (1)..(342): tr|J3JBQ4|J3JBQ4_9LACO S-adenosylmethionine:tRNA ribosy ltransferase-isomerase OS=Lactobacillus coryniformis su bsp. coryniformis CECT 5711 OX=1185325 GN=queA PE=3 SV= 1
MSLSDFDYDLPHELIAQTPLKERDASRMLILDHKTGALQDKHFYDILDELHAGDAVVMNNTRVMPARLYGVKPDTGGHEEVLLLNNTEDDKWETLMKPARRAKVGTEVVFGDGQLKATVTEELEHGGRMIEFHYDGIFMEILEQLGETPLPPYIKEKLDDPEMYQTVYAKENGSAAAPTAGLHWTKELLAKAEAKGVKLIYLTLHVGLGTFRPVDEDDIDDHKMHSEFYRLTPEAADELNEVRKNGGRIIATGTTSIRTLETIGTKFNGEIKPDSGWTDIFIKPGYQWQVVDAFITNFHLPKSTLVMLVAAFTGRDNILNAYQHAIDERYRFFSFGDAMFIK

SEQ ID NO: 67865 - protein, 344 aa, Lactobacillus coryniformis
  misc_feature (1)..(344): tr|A0A2D1KQ15|A0A2D1KQ15_9LACO S-adenosylmethionine:tRN A ribosyltransferase-isomerase OS=Lactobacillus corynif ormis subsp. torquens DSM 20004 = KCTC 3535 OX=1423822 GN=queA PE=3 SV=1
MGLSLSDFDYDLPHELIAQIPLKERDASRMLILDHKTGALQDKHFYDILDELHAGDAVVMNNTRVMPARLYGVKPDTGGHEEVLLLNNTEDDKWETLMKPARRAKVGTEVVFGDGQLKATVTEELEHGGRMIEFHYDGIFMEILEQLGETPLPPYIKEKLDDPEMYQTVYAKENGSAAAPTAGLHWTKELLAKAEAKGVKLIYLTLHVGLGTFRPVDEDDIDDHKMHSEFYRLTPEAADELNEVRKNGGRIIATGTTSIRTLETIGTKFNGEIKPDSGWTDIFIKPGYQWQVVDAFITNFHLPKSTLVMLVAAFTGRDNILNAYQHAIDERYRFFSFGDAMFIK

SEQ ID NO: 67866 - protein, 345 aa, Lactobacillus crustorum
  misc_feature (1)..(345): tr|A0A512GTN8|A0A512GTN8_9LACO S-adenosylmethionine:tRN A ribosyltransferase-isomerase OS=Lactobacillus crustor um OX=392416 GN=queA PE=3 SV=1
MSLSTEDFDYDLPEELIAQTPIKNRDQSRLLVLDHETGEYQDKHFYDILDYLNPGDALVMNNSRVLPARLYGTKEDTDGHEEVLLLNNIEGDKWEVLMKPARRAKVGTKVQFGEDGQLEAEVLEDLEHGGKIIEFHYQGIFMEILEQLGEMPLPPYIKEKLDDPDRYQTVYAKENGSAAAPTAGLHWTKELLKKVEAKGVKLVYITLHVGLGTFRPVTETDVDKHVMHSEFYRLDEASAKTLNEVRQNGGKIVATGTTSIRTLETIGTKFNGEIKADSGWTDIFIKPGYEWKVVDEFITNFHLPKSTLVMLVSAFTGRENILNAYRHAVEEKYRFFSFGDAMFIK

SEQ ID NO: 67867 - protein, 345 aa, Lactobacillus crustorum
  misc_feature (1)..(345): tr|A0A1L7ICE4|A0A1L7ICE4_9LACO S-adenosylmethionine:tRN A ribosyltransferase-isomerase OS=Lactobacillus crustor um OX=392416 GN=queA PE=3 SV=1
MSLSTEDFDYDLPEELIAQTPIKNRDQSRLLVLDHETGEYQDKHFYDILDYLNPGDALVMNNSRVLPARLYGTKEDTDGHEEVLLLNNIEGDKWEVLMKPARRAKVGTKVQFGEDGQLEAEVLEDLEHGGKIIEFHYQGIFMEILEQLGEMPLPPYIKEKLDDPDRYQTVYAKENGSAAAPTAGLHWSKELLKKVEAKGVKLVYITLHVGLGTFRPVTETDVDKHVMHSEFYRLDEASAKTLNEVRQNGGKIVATGTTSIRTLETIGTKFNGEIKADSGWTDIFIKPGYEWKVVDEFITNFHLPKSTLVMLVSAFTGRENILNAYRHAVEEKYRFFSFGDAMFIK

SEQ ID NO: 67868 - protein, 346 aa, Lactobacillus curieae
  misc_feature (1)..(346): tr|A0A401FMX6|A0A401FMX6_9LACO S-adenosylmethionine:tRN A ribosyltransferase-isomerase OS=Lactobacillus curieae OX=1138822 GN=queA PE=3 SV=1
MNDQYTLEDFNYDLPQELIAQTPIKDRDTSRLLVLDRQNGETKDRHFYDILDYLNPGDALVMNDSKVMPARIYGEKADTGGHVEVLLLHNIEGDHWETLMKPARKFKVGSTVTFGDGKLTAVVTKELDHGGREIEFQYDGIFIEILNKLGETPLPPYIKEKLDDPDRYQTVYAKEMGSAAAPTAGLHWTKDLLRKAEAKGVKLVYLTLHVGLGTFRPVDEDNIEDHKMHSEFYRLSDEAAATLNDVRASGGKIIATGTTSIRTLETVGSKFDGEIRADSGWTDIFIKPGYEWKVVDSFITNFHLPKSTLVMLVASFTGRDNILNAYHHAIEEKYRFFSFGDAMYIH

SEQ ID NO: 67869 - protein, 346 aa, Lactobacillus curieae
  misc_feature (1)..(346): tr|A0A1S6QKT4|A0A1S6QKT4_9LACO S-adenosylmethionine:tRN A ribosyltransferase-isomerase OS=Lactobacillus curieae OX=1138822 GN=queA PE=3 SV=1
METHYTLDDFDYDLPHELIAQTPIKNRDTSRLLVLNHESGETQDRHFYDILDYLNPGDALVMNDSKVMPARIYGEKESTGGHLEVLLLHNIEGDKWETLMKPAKKAKVGSVITFGDGKLKAVVTKELEHGGREIEFKYDGIFIEILEELGETPLPPYIKEKLDDPDRYQTVYAKEMGSAAAPTAGLHWTKELLQKVADKGVKLVYLTLHVGLGTFRPVDEENIEDHKMHSEFYRLSEEAARTLNKVRDSGGKIVATGTTSIRTLETVGSKFNGEIHPDSGWTDIFIKPGYEWKVVDSFITNFHLPKSTLVMLVAAFTGRDNILNAYEHAIDEKYRFFSFGDAMYIY

SEQ ID NO: 67870 - protein, 343 aa, Lactobacillus curvatus
  misc_feature (1)..(343): tr|A0A0B2XNF5|A0A0B2XNF5_LACCU S-adenosylmethionine:tRN A ribosyltransferase-isomerase OS=Lactobacillus curvatu s OX=28038 GN=queA PE=3 SV=1
MVSTEDFDYNLPEELIAQTPMIERAASRLLVMDHKTGALEDKVFYDIIDELNPGDAVVMNNTRVLPARLYGVKPDTGGHEEVLLLNNTHDDEWEVLMKPARRAKVGTEVVFGDGQLKAVVTKELEHGGRMIEFKYDGIFMQILEALGEMPLPPYIKEKLDDPEMYQTVYAKEPGSAAAPTAGFHWTEELLQKVQDKGIKLVYLTLHVGLGTFRPVSEDNVEDHKMHSEFYRLTEEAAATLNEVKQNGGRIVATGTTSIRTLETIATKFDGELKADSGWTSIFIKPGYQWKAVDAFITNFHLPKSTLVMLVASFTGRENILNAYQHAVDERYRFFSFGDAMFVK

SEQ ID NO: 67871 - protein, 343 aa, Lactobacillus dextrinicus
  misc_feature (1)..(343): tr|A0A0R2BGZ3|A0A0R2BGZ3_9LACO S-adenosylmethionine:tRN A ribosyltransferase-isomerase OS=Lactobacillus dextrin icus DSM 20335 OX=1423738 GN=queA PE=3 SV=1
MLTTEDFDYDLPQELIAQTPIAKRDNSRMLVLDHQTGAMEDKHFYDIIDQLNPGDAVVMNNSRVMPARIYGVKADTGGHEEVLLLRNTEGDEWETLMKPARHAHVGTKVVFGNGELTATVTKELEHGGRMIKFDYDGIFLEILEKLGEMPLPPYIKEKLDDPERYQTVYSKELGSAAAPTAGLHWTKKLLQKVQDKGVKLVYLTLHVGLGTFRPVTEDNIEDHKMHSEFYQFSQEAADTLNEVRKNGGRIIATGTTSIRTLETVATKFNGELKEDSGWTDIFIKPGYEWKAVNAFITNFHLPKSTLVMLVASFTGRDNILNAYQHAIDEKYRFFSFGDAMFIK

SEQ ID NO: 67872 - protein, 343 aa, Lactobacillus dextrinicus; identical to SEQ ID NO: 67871
  misc_feature (1)..(343): tr|A0A5J6USZ3|A0A5J6USZ3_9LACO tRNA preQ1(34) S-adenosy lmethionine ribosyltransferase-isomerase QueA OS=Lactob acillus dextrinicus OX=51664 GN=queA PE=4 SV=1

SEQ ID NO: 67873 - protein, 346 aa, Lactobacillus diolivorans
  misc_feature (1)..(346): tr|A0A0R1SIF1|A0A0R1SIF1_9LACO S-adenosylmethionine:tRN A ribosyltransferase-isomerase OS=Lactobacillus diolivo rans DSM 14421 OX=1423739 GN=queA PE=3 SV=1
MKTNYTLEDFDYDLPHELIAQTPIKDRDESRLLVLDRKSGDMQDRRFYNIIDYLNPGDALVMNDSKVMPARIYGVKADTGANLEVLLLHNIEGDRWETLMKPAKRAKVGTVIDFGEGQLKAVVTKELDHGGREIEFKYKGIFIEILERLGETPLPPYIKEKLDDPDRYQTVYAKEMGSAAAPTAGLHWTKELLQKVADKGVHLVYLTLHVGLGTFRPVDEENIEDHKMHSEFYRLSQDAAQTLNQVRDSGGKIVATGTTSIRTLETVGTKFDGAIHADSGWTDIFIKPGYDWKIVDSFITNFHLPKSTLVMLVASFTGRENILNAYQHAIEEKYRFFSFGDAMYIH

SEQ ID NO: 67874 - protein, 344 aa, Lactobacillus fabifermentans
  misc_feature (1)..(344): tr|W6T6N8|W6T6N8_9LACO S-adenosylmethionine:tRNA ribosy ltransferase-isomerase OS=Lactobacillus fabifermentans T30PCM01 OX=1400520 GN=queA PE=3 SV=1
MSLTLEDFDYDLPHELIAQTPIKQRDTSRLLELDRQTGEMQDKHFYDIIDQLNPGDAVVMNNSRVMPARLYGVKPETGGHCEVLLLHNTEGDQWETLMKPAKRLKVGTVVSFGDGKLTATVTEEKEDGIRMIEFHYDGIFMEILEALGETPLPPYIKEKLDDPDRYQTVYAKENGSAAAPTAGLHWTKDLLQKVQDKGVKLVYLTLHVGLGTFRPVEEDNIEDHKMHSEFYRLDEDAAKTLNEVRANGGRIIATGTTSIRTLETIGTKFDGEIKPDSGWTDIFIKPGYQWKVVDAFITNFHLPKSTLVMLVAAFTGRDMILNAYQHAIDEKYRFFSFGDAMFIH

SEQ ID NO: 67875 - protein, 344 aa, Lactobacillus fabifermentans; identical to SEQ ID NO: 67874
  misc_feature (1)..(344): tr|A0A0R2NR63|A0A0R2NR63_9LACO S-adenosylmethionine:tRN A ribosyltransferase-isomerase OS=Lactobacillus fabifer mentans DSM 21115 OX=1413187 GN=queA PE=3 SV=1

SEQ ID NO: 67876 - protein, 344 aa, Lactobacillus farciminis
  misc_feature (1)..(344): tr|A0A4V3A322|A0A4V3A322_9LACO S-adenosylmethionine:tRN A ribosyltransferase-isomerase OS=Lactobacillus farcimi nis OX=1612 GN=queA PE=3 SV=1
MSLSTEDFDYDLPEELIAQTPIKDRDHSRLLVLDHETGEYQDKHFYDILDYLNPGDALVMNNSRVLPARLYGTKEDTDGHEEVLLLNNIEGDKWEVLMKPARRAKVGTKVQFGDGQLEAEVLENLEHGGKIIEFHYQGIFMEILEQLGEMPLPPYIKEKLDDPDRYQTVYAKENGSAAAPTAGLHWTKDLLKQVEAKGVKLVYVTLHVGLGTFRPVTESDVDKHVMHSEFYRLDEDSAKTLNEVKKNGGKIVATGTTSIRTLETIGTKFNGEIKADSGWTDIFIKPGYEWKVVDEFITNFHLPKSTLVMLVAAFTGRENILNAYRHAVEEKYRFFSFGDAMFIK

SEQ ID NO: 67877 - protein, 344 aa, Lactobacillus farciminis
  misc_feature (1)..(344): tr|A0A0H4LCZ2|A0A0H4LCZ2_9LACO S-adenosylmethionine:tRN A ribosyltransferase-isomerase OS=Lactobacillus farcimi nis OX=1612 GN=queA PE=3 SV=1
MSLSTEDFDYDLPEELIAQTPIKDRDHSRLLVLDHKTGEYQDKHFYDILDYLNPGDALVMNNSRVLPARLYGTKEDTDGHEEVLLLNNIEGDKWEVLMKPARRAKVGTKVQFGDGQLEAEVLEDLEHGGKIIEFHYQGIFMEILEQLGEMPLPPYIKEKLDDPDRYQTVYAKENGSAAAPTAGLHWTKDLLKKVEEKGVKLVYVTLHVGLGTFRPVTETDVDKHVMHSEFYRLDEDSAKTLNEVRKNGGKIVATGTTSIRTLETIGTKFNGEIKADSGWTDIFIKPGYEWKVVDEFITNFHLPKSTLVMLVAAFTGRENILNAYRHAVEEKYRFFSFGDAMFIK

SEQ ID NO: 67878 - protein, 352 aa, Lactobacillus farraginis
  misc_feature (1)..(352): tr|X0P909|X0P909_9LACO S-adenosylmethionine:tRNA ribosy ltransferase-isomerase OS=Lactobacillus farraginis DSM 18382 = JCM 14108 OX=1423743 GN=queA PE=3 SV=1
MKGTGTLKTNYTLEDFDYDLPHELIAQTPIKDRDESRLLVLDKKTGEMQDRRFYNIIDYLNPGDALVMNDSKVMPARIYGVKKETGAHIEVLLLHNIEGDRWETLMKPAKRAKVGTVIDFGEGQLQAVVTKELDHGGREIEFKYDGIFIEILERLGETPLPPYIKEKLDDPNRYQTVYAKEMGSAAAPTAGLHWTKALLQKVADKGVHLVYLTLHVGLGTFRPVEEDNIEEHKMHSEFYRLSQEAAQTLNDVRKNGGKIVATGTTSIRTLETVGTKFNGEIHPDSGWTDIFIKPGYHWQVVDSFITNFHLPKSTLVMLVASFTGRENILNAYQHAIQEKYRFFSFGDAMYIH

SEQ ID NO: 67879 - protein, 343 aa, Lactobacillus floricola
  misc_feature (1)..(343): tr|A0A0R2DVF6|A0A0R2DVF6_9LACO S-adenosylmethionine:tRN A ribosyltransferase-isomerase OS=Lactobacillus florico la DSM 23037 = JCM 16512 OX=1423744 GN=queA PE=3 SV=1
MQSIDEFDYELPEELIAQTPLDQRDHSRLLTLNHQTGELNDRHFYDLIDELQAGDVLVMNNSRVLPARLYGQKAKTHGHVELLLLAQEQGDNWEVLIKPARKIHVGDELEFGDGQLTAVVNKRREEGKFQIEFSYEGIFLEVLEQLGQMPLPPYIKEHLEDNDRYQTVYAKENGSAAAPTAGLHFTPDLLARIEQKGIQLAYVTLHVGLGTFRPVVFSDIDEHKMHREFYQLDDDNARLIGQAKVEGRRVIAVGTTTIRTLETIASRFDGEVKADSGWTDIFIKPGYEFKAVDAFVTNFHLPKSTLVMLVASFTGRDNILNAYHHAVIERYRFFSFGDAMFIY

SEQ ID NO: 67880 - protein, 345 aa, Lactobacillus formosensis; identical to SEQ ID NO: 67866
  misc_feature (1)..(345): tr|A0A2P4R9G7|A0A2P4R9G7_9LACO S-adenosylmethionine:tRN A ribosyltransferase-isomerase OS=Lactobacillus formose nsis OX=1617889 GN=queA PE=3 SV=1

SEQ ID NO: 67881 - protein, 343 aa, Lactobacillus fuchuensis
  misc_feature (1)..(343): tr|A0A0R1RPX7|A0A0R1RPX7_9LACO S-adenosylmethionine:tRN A ribosyltransferase-isomerase OS=Lactobacillus fuchuen sis DSM 14340 = JCM 11249 OX=1423747 GN=queA PE=3 SV=1
MVSTEDFDYVLPEELIAQTPMTERAASRMLVMDSKTGALEDKVFYDVIDELNPGDAVVMNNTRVLPARLYGVKPDTGGHEEVLLLNNTHDDEWEVLMKPAKRAKVGTEVVFGDGQLKAVVTKELEHGGRMIEFQYDGIFMQILEELGEMPLPPYIKEKLDDPEMYQTVYAKEPGSAAAPTAGFHWTEELLQKVQDKGIKLVYLTLHVGLGTFRPVSEDNVEDHKMHSEFYRLTEEAAATLNEVHQNGGRVIATGTTSIRTLETIATKFNGELKADSGWTEIFIKPGYQWKVVDGFITNFHLPKSTLVMLVASFTGREHILNAYKHAVDEKYRFFSFGDAMFIK

SEQ ID NO: 67882 - protein, 343 aa, Lactobacillus fuchuensis; identical to SEQ ID NO: 67881
  misc_feature (1)..(343): tr|A0A2N9DTR0|A0A2N9DTR0_9LACO S-adenosylmethionine:tRN A ribosyltransferase-isomerase OS=Lactobacillus fuchuen sis OX=164393 GN=queA PE=3 SV=1

SEQ ID NO: 67883 - protein, 344 aa, Lactobacillus futsaii
  misc_feature (1)..(344): tr|A0A5B7T3W8|A0A5B7T3W8_9LACO S-adenosylmethionine:tRN A ribosyltransferase-isomerase OS=Lactobacillus futsaii OX=938155 GN=queA PE=3 SV=1
MSLSTEDFDYDLPEELIAQTPIKDRDHSRLLVLDHETGEYQDKHFYDILDYLNPGDALVMNNSRVLPARLYGTKEDTDGHEEVLLLNNIEGDKWEVLMKPARRAKVGTKVQFGDGQLEAEVLEDLEHGGKIIEFRYQGIFMEILEQLGEMPLPPYIKEKLDDPDRYQTVYAKENGSAAAPTAGLHWTKDLLKQVEAKGVKLVYVTLHVGLGTFRPVTESDVDKHVMHSEFYRLDEDSAKTLNEVKKNGGKIVATGTTSIRTLETIGTKFNGEIKADSGWTDIFIKPGYEWKVVDEFITNFHLPKSTLVMLVAAFTGRENILNAYRHAVEEKYRFFSFGDAMFIK

SEQ ID NO: 67884 - protein, 350 aa, Lactobacillus ghanensis
  misc_feature (1)..(350): tr|A0A0R1VKZ6|A0A0R1VKZ6_9LACO S-adenosylmethionine:tRN A ribosyltransferase-isomerase OS=Lactobacillus ghanens is DSM 18630 OX=1423750 GN=queA PE=3 SV=1
MKILSEEHLTTEDFDYDLPQELIAQTPLKERDHSRMLILDSKTGEYQDDVFYHVIDQLNPGDALVMNDSRVMPARLYGVKPDTGGHLEVLLLNNTEGDDWETLIKPARRAKVGTKIVFGDGKLSAVVTKELEHGGRMIHFEYQGIFMEILDRLGEMPLPPYIKQKLDDPEMYQTVYSREIGSAAAPTAGLHFTKELLQKIADKGVHLVYLTLHVGLGTFRPVSVTNIKEHHMHSEFYRLSEDAAQVLNDVRQNGGKIVATGTTSIRTLETIGTKFNGEIRADSGWTDIFIYPGYQWKVVQAFITNFHLPKSTLVMLVASFTGRDNILNAYRHAVKEKYRFFSFGDAMFIK

SEQ ID NO: 67885 - protein, 344 aa, Lactobacillus ginsenosidimutans
  misc_feature (1)..(344): tr|A0A0H4QG70|A0A0H4QG70_9LACO S-adenosylmethionine:tRN A ribosyltransferase-isomerase OS=Lactobacillus ginseno sidimutans OX=1007676 GN=queA PE=3 SV=1
MTLTTEDFDYNLPEELIAQTPIKDRDHSRLLVLDHESGKYEDKHFYDILDYLNPGDALVMNNSRVLPARLYGTKEGSEGHEEVLLLNNTEGDKWEVLMKPAKRAHPGTVVTFGDGQLKATVLEDLEHGGKIIEFHYDGIFLEILEALGEMPLPPYIKEKLDDPDRYQTVYAKENGSAAAPTAGLHWTKDLLEKVQEKGVKLVYLTLHVGLGTFRPVTESDISKHVMHSEFYRLDEDSAKTLNEVRKNGGKIVATGTTSIRTLETIGTKFNGEIKPDSGWTDIFIKPGYQWKVVDEFITNFHLPKSTLVMLVAAFTGRENILNAYQHAIDEKYRFFSFGDAMFIK

SEQ ID NO: 67886 - protein, 343 aa, Lactobacillus graminis
  misc_feature (1)..(343): tr|A0A0R1X3D9|A0A0R1X3D9_9LACO S-adenosylmethionine:tRN A ribosyltransferase-isomerase OS=Lactobacillus gramini s DSM 20719 OX=1423752 GN=queA PE=3 SV=1
MVSTEDFDYNLPEELIAQTPMIERAASRLLVMDHKTGALEDQVFYDIIDELNPGDAVVMNNTRVLPARLYGVKPDTGGHEEVLLLNNTHDDEWEVLMKPARRAKVGTEVVFGDGQLKAVVTKELEHGGRMIEFKYDGIFMQILETLGEMPLPPYIKEKLDDPEMYQTVYAKEPGSAAAPTAGFHWTEELLQKVQDKGVKLVYLTLHVGLGTFRPVSEDNVEDHKMHSEFYRLTEDAAATLNEVRQNGGRIIATGTTSIRTLETIATKFNGEIKADSGWTDIFIKPGYEWKVVDAFITNFHLPKSTLVMLVASFTGRENILHAYQHAVDERYRFFSFGDAMFVK

SEQ ID NO: 67887 - protein, 343 aa, Lactobacillus graminis; identical to SEQ ID NO: 67886
  misc_feature (1)..(343): tr|A0A5J6Z270|A0A5J6Z270_9LACO tRNA preQ1(34) S-adenosy lmethionine ribosyltransferase-isomerase QueA OS=Lactob acillus graminis OX=60519 GN=queA PE=4 SV=1

SEQ ID NO: 67888 - protein, 357 aa, Lactobacillus harbinensis
  misc_feature (1)..(357): tr|A0A0R1XD50|A0A0R1XD50_9LACO S-adenosylmethionine:tRN A ribosyltransferase-isomerase OS=Lactobacillus harbine nsis DSM 16991 OX=1122147 GN=queA PE=3 SV=1
MLTTEDFDYDLPQELIAQTPLPERDASRMLVLDTATGETTDKHFYDILDYVHPGDAVVMNDTRVMPARLYGIKPETGGHVEVLLLNNTRGDDWEVLMKPAKRIHVGTQIDFGDGLLKATVTEERDEGVRMIRFQYDGIFMEILDKLGETPLPPYIKAKLDDPEMYQTVYAKEIGSAAAPTAGLHWTKELLQKVQDKGVKLVYLTLHIGLGTFRPVLEENVEDHKMHSEFYRLTPEAAQALNDVRANGGRIIATGTTVIRTLESIGTKFNGAIKADSGWTDIFIKPGYQWKIVDAFITNFHLPKSTLVMLVASFTGRHMILNAYQHAVAEKYRFFSFGDAMFIYNSQNPHPQPLKEND

SEQ ID NO: 67889 - protein, 357 aa, Lactobacillus harbinensis; identical to SEQ ID NO: 67888
  misc_feature (1)..(357): tr|A0A510TTY5|A0A510TTY5_9LACO S-adenosylmethionine:tRN A ribosyltransferase-isomerase OS=Lactobacillus harbine nsis OX=304207 GN=queA PE=3 SV=1

SEQ ID NO: 67890 - protein, 347 aa, Lactobacillus hayakitensis
  misc_feature (1)..(347): tr|A0A0R1WMV3|A0A0R1WMV3_9LACO S-adenosylmethionine:tRN A ribosyltransferase-isomerase OS=Lactobacillus hayakit ensis DSM 18933 = JCM 14209 OX=1423755 GN=queA PE=3 SV= 1
MSEEHLTTEDFNYNLPEELIAQTPLEKRDQSRMLVLDSKTGEYCDDYFYNVIDELNPGDALVMNDSRVMPARIYGVKPETGGHVEMLLLNNIKGDQWETLVKPAKRAKVGTKISFGDGALIATVTEELEHGGRIIEFEYDGIFMEILDKLGEMPLPPYIKEKLEDKEMYQTVYSREIGSAAAPTAGLHFTKELLQKIEDKGVKLVYLTLHVGLGTFRPVSEDKIENHKMHSEFYRLSQESADILNEVRKNGGKIVATGTTSIRTLETIGSKFNGEIKADSGWTDIFIKPGYEWKVVQAFITNFHLPKSTLVMLVAAFTGRENILNAYKHAVEEKYRFFSFGDAMFIK

SEQ ID NO: 67891 - protein, 345 aa, Lactobacillus heilongjiangensis
  misc_feature (1)..(345): tr|A0A0K2LB03|A0A0K2LB03_9LACO S-adenosylmethionine:tRN A ribosyltransferase-isomerase OS=Lactobacillus heilong jiangensis OX=1074467 GN=queA PE=3 SV=1
MSLSTEDFDYDLPEELIAQTPIKDRDQSRLLVLDHETGEYQDKHFYDILDYLNPGDALVMNNSRVLPARLYGSKEDTDGHEEVLLLNNIEGDKWEVLMKPAKRAKVGTKVQFGEDGQLEAEVLEDLEHGGKIIEFHYQGIFMEILEKLGEMPLPPYIKEKLDDPDRYQTVYAKENGSAAAPTAGLHWTKELLQKVEDKGVKLVYVTLHVGLGTFRPVTETDVDKHVMHSEFYRLDEDSAKTLNDVKKNGGKIVATGTTSIRTLETIGTKFNGEIKADSGWTDIFIKPGYQWKVVDEFITNFHLPKSTLVMLVAAFTGRENILNAYQHAVEEKYRFFSFGDAMFIK

SEQ ID NO: 67892 - protein, 352 aa, Lactobacillus hilgardii
  misc_feature (1)..(352): tr|C0XLD2|C0XLD2_LACHI S-adenosylmethionine:tRNA ribosy ltransferase-isomerase OS=Lactobacillus hilgardii DSM 2 0176 = ATCC 8290 OX=1423757 GN=queA PE=3 SV=1
MKGIGTLKTTYTLEDFDYKLPHELIAQTPIKDRDESRLLVLNKETGDMQDRRFYNIIDYLNPGDALVMNDSKVMPARIYGVKKDTGAHIEVLLLHNIEGDRWETLMKPAKRAKVGTVIGFGEGQLQAVVTKELDHGGREIEFKYEGIFIEILERLGETPLPPYIKEKLDDPNRYQTVYAKEMGSAAAPTAGLHWTKELLQKVADKGVHLVYLTLHVGLGTFRPVEEDNIEDHKMHSEFYRLSEEASKTLNDVRKNGGKIVATGTTSIRTLETVGTKFNGEIRPDSGWTDIFIKPGYQWQVVDSFITNFHLPKSTLVMLVASFTGRENILNAYQHAISEKYRFFSFGDAMYIH

SEQ ID NO: 67893 - protein, 345 aa, Lactobacillus hokkaidonensis
  misc_feature (1)..(345): tr|A0A0A1GZZ8|A0A0A1GZZ8_9LACO S-adenosylmethionine:tRN A ribosyltransferase-isomerase OS=Lactobacillus hokkaid onensis JCM 18461 OX=1291742 GN=queA PE=3 SV=1
MSELTVDDFDYELPHELIAQTPIKERDESRLLILDHETGEMQDKHFYDILDQLNPGDAVVMNNSRVMPARIYGVKPETGGHVEVLLLHNTEGDVWETLVKPAKKFKVGVQITFGNGELTATITKELEHGGRMIEFHYDGIFMEVLEKLGEMPLPPYIKEKLDDPDRYQTVYAKENGSAAAPTAGLHWTKELLQKVQDKGVKLVYLTLHVGLGTFRPVDEKRIEDHVMHSEFYQLDEQSAQTLNEVRQHGGRIIATGTTSIRTLETIGSKFNGVLRADSGWTDIFIKPGYEWKVVDAFITNFHLPKSTLVMLVAAFTGRDKILNAYQHAIEEKYRFFSFGDAMFIK

SEQ ID NO: 67894 - protein, 350 aa, Lactobacillus hordei
  misc_feature (1)..(350): tr|A0A0R1MPZ0|A0A0R1MPZ0_9LACO S-adenosylmethionine:tRN A ribosyltransferase-isomerase OS=Lactobacillus hordei DSM 19519 OX=1423759 GN=queA PE=3 SV=1
MAILSEKHLTTEDFDYDLPQELIAQTPLKERDHSRMLILDSKSGEYRDDVFYNVIDQLNPGDALVMNDSRVMPARIYGTKLDTDGHLEVLLLNNTEGDNWETLVKPAKRAKVGTRINFGDGQLSAVVTEELEHGGRMIRFEYDGIFMEILDKLGEMPLPPYIKEKLDDPEMYQTVYSKEIGSAAAPTAGLHFTKELLQKIEDKGVHLVYLTLHVGLGTFRPVSVDNIEDHKMHSEFYRLNEEAAKVLNDVRKNGGKIVATGTTSIRTLETIGSKFDGEIKPDSGWTDIFIKPGYEWKVVQAFITNFHLPKSTLVMLVSAFTGRENILNAYKHAVDEKYRFFSFGDAMFIK

SEQ ID NO: 67895 - protein, 347 aa, Lactobacillus hordei
  misc_feature (1)..(347): tr|A0A3Q8CAK2|A0A3Q8CAK2_9LACO S-adenosylmethionine:tRN A ribosyltransferase-isomerase OS=Lactobacillus hordei OX=468911 GN=queA PE=3 SV=1
MSEKHLTTEDFDYDLPQELIAQTPLKERDHSRMLILDSKSGEYRDDVFYNVIDQLNPGDALVMNDSRVMPARIYGTKPDTDGHLEVLLLNNTEGDNWETLVKPAKRAKVGTRINFGDGQLSAVVTEELEHGGRMIRFEYDGIFMEILDKLGEMPLPPYIKEKLDDPEMYQTVYSKEIGSAAAPTAGLHFTKELLQKIEDKGVHLVYLTLHVGLGTFRPVSVDNIEDHKMHSEFYRLNEEAAKVLNDVRKNGGKIVATGTTSIRTLETIGSKFDGEIKPDSGWTDIFIKPGYEWKVVQAFITNFHLPKSTLVMLVSAFTGRENILNAYKHAVDEKYRFFSFGDAMFIK

SEQ ID NO: 67896 - protein, 344 aa, Lactobacillus kimchicus
  misc_feature (1)..(344): tr|A0A0R1HKZ2|A0A0R1HKZ2_9LACO S-adenosylmethionine:tRN A ribosyltransferase-isomerase OS=Lactobacillus kimchic us JCM 15530 OX=1302272 GN=queA PE=3 SV=1
MTLTTEDFDYNLPHELIAQTPIETRDASRLLVLDHKTGAMQDKHFYDIIDELHAGDAVVMNDSRVMPARIYGTKDDTGGHVEVLLLHNTQGDVWETLMKPAKRIRVGTQVTFGDGALTATVIEDLEHGGKMIEFHYDGIFMEILEKLGEMPLPPYIKEKLDDPERYQTVYARQAGSAAAPTAGLHWTKELLERVQAKDVKLVYLTLHVGLGTFRPVDEDKIEDHKMHSEFYQLTEAAAQTLNEVRQSGGRIIATGTTSIRTLETIGSKFDGAIQADSGWTDIFIKPGYQWRVVDAFITNFHLPKSTLVMLVAAFTGRDTILNAYEHAIQERYRFFSFGDAMFIK

SEQ ID NO: 67897 - protein, 344 aa, Lactobacillus kimchiensis
  misc_feature (1)..(344): tr|A0A0R2L8Z8|A0A0R2L8Z8_9LACO S-adenosylmethionine:tRN A ribosyltransferase-isomerase OS=Lactobacillus kimchie nsis OX=993692 GN=queA PE=3 SV=1
MSLSTEDFDYDLPEELIAQTPIKNRDQSRLLVLDHETGEYTDKHFYDILDYLNPGDALVMNNSRVLPARLYGAKKDSNGHEEVLLLNNIEGDKWEVLMKPAKRAKVGTKVEFGDGQLEAEVIEDLEHGGKIIEFHYQGIFMEILEQLGEMPLPPYIKEKLDDPDRYQTVYAKENGSAAAPTAGLHWTKELLQKVEDKGVKLVYITLHVGLGTFRPVTETDVDKHVMHSEFYRLDEDSAKTLNEVKKNGGKIVATGTTSIRTLETIGTKFNGEIKADSGWTDIFIKPGYEWKVVDEFITNFHLPKSTLVMLVAAFTGRENILNAYHHAVEDKYRFFSFGDAMFIK

SEQ ID NO: 67898 - protein, 346 aa, Lactobacillus kisonensis
  misc_feature (1)..(346): tr|H1LJN8|H1LJN8_9LACO S-adenosylmethionine:tRNA ribosy ltransferase-isomerase OS=Lactobacillus kisonensis F043 5 OX=797516 GN=queA PE=3 SV=1
MIKNYTLEDFDYDLPHELIAQTPIKDRDESRLLVLNKETGKMQDRRFYNIIDYLNPGDALVMNDSKVMPARIYGVKEDTGANMEVLLLHNIEGDRWETLMKPAKRAKVGTVIDFGEGQLKAVVTKELDHGGREIEFKYQGIFIEILEHLGETPLPPYIKEKLDDPDRYQTVYAKEMGSAAAPTAGLHWTKELLQKVADKGIHLVYLTLHVGLGTFRPVDEENIEDHKMHSEFYRLSDEAADTLNDVRKNGGKIVATGTTSIRTLETVGTKFNGEIQADSGWTDIFIKPGYEWKVVDSFITNFHLPKSTLVMLVASFTGRENILNAYEHAIQEKYRFFSFGDAMYIH

SEQ ID NO: 67899 - protein, 346 aa, Lactobacillus kisonensis; identical to SEQ ID NO: 67898
  misc_feature (1)..(346): tr|A0A0R1NN21|A0A0R1NN21_9LACO S-adenosylmethionine:tRN A ribosyltransferase-isomerase OS=Lactobacillus kisonen sis DSM 19906 = JCM 15041 OX=1423766 GN=queA PE=3 SV=1

SEQ ID NO: 67900 - protein, 344 aa, Lactobacillus malefermentans
  misc_feature (1)..(344): tr|A0A4R5NIF1|A0A4R5NIF1_9LACO S-adenosylmethionine:tRN A ribosyltransferase-isomerase OS=Lactobacillus malefer mentans OX=176292 GN=queA PE=3 SV=1
MTLTTEDFDYDLPHELIAQTPIEKRDASRLLVLDHKTGEMEDKHFYDIIDQLNSGDAVVMNDSRVMPARIYGEKPETGGHVELLLLHNTQGDEWETLAKPAKRATVGTTIVFGDGKLTATVTKDLEHGGKMIEFHYAGIFMEILESLGEMPLPPYIKEKLDDPERYQTVYAKQVGSAAAPTAGLHWTKELLQKVQDKGIKLVYLTLHVGLGTFRPVDEDNIEDHKMHSEFYQLSEESARTLREVKANGGRIVATGTTSIRTLETIGTKFKGEIKADSGWTEIFIKPGYQWQIVDAFITNFHLPKSTLVMLVAAFTGRENILNAYEHAIKEHYRFFSFGDAMFIK

SEQ ID NO: 67901 - protein, 350 aa, Lactobacillus mali
  misc_feature (1)..(350): tr|A0A0R2E876|A0A0R2E876_9LACO S-adenosylmethionine:tRN A ribosyltransferase-isomerase OS=Lactobacillus mali KC TC 3596 = DSM 20444 OX=1046596 GN=queA PE=3 SV=1
MAILSEKHLTTEDFDYDLPQELIAQTPLKQRDHSRMLILDSKSGEYKDDIFYNVIDQLNPGDALVMNDSRVMPARIYGTKPDTEGHLEVLLLNNTEGDNWETLVKPARRAKVGTRINFGDGQLSAVVTEELEHGGRMIRFEYEGIFMEILDKLGEMPLPPYIKEKLDDPEMYQTVYSREVGSAAAPTAGLHFTKELLQKIEDKGIHLVYLTLHVGLGTFRPVSVDNIEDHKMHSEFYRLDADAAKVLNDVRKNGGKIVATGTTSIRTLETIGSKFNGEIKPDSGWTDIFIRPGYEWKVVQAFITNFHLPKSTLVMLVSAFTGRENILNAYKHAVEEKYRFFSFGDAMFIK

SEQ ID NO: 67902 - protein, 350 aa, Lactobacillus mali
  misc_feature (1)..(350): tr|A0A0R2FTH1|A0A0R2FTH1_9LACO S-adenosylmethionine:tRN A ribosyltransferase-isomerase OS=Lactobacillus mali OX =1618 GN=queA PE=3 SV=1
MAILSEKHLTTEDFDYDLPQELIAQTPLKQRDHSRMLILDSKSGEYKDDIFYNVIDQLNPGDALVMNDSRVMPARIYGTKPDTEGHLEVLLLNNTEGDNWETLVKPARRAKVGTRINFGDGQLSAVVTEELEHGGRMIRFEYEGIFMEILDKLGEMPLPPYIKEKLDDPEMYQTVYSREVGSAAAPTAGLHFTKELLQKIEDKGVHLVYLTLHVGLGTFRPVSVDNIEDHKMHSEFYRLDADAAKVLNDVRKNGGKIVATGTTSIRTLETIGSKFNGEIKPDSGWTDIFIRPGYEWKVVQAFITNFHLPKSTLVMLVSAFTGRENILNAYKHAVEEKYRFFSFGDAMFIK

SEQ ID NO: 67903 - protein, 344 aa, Lactobacillus manihotivorans
  misc_feature (1)..(344): tr|A0A0R1Q4Y4|A0A0R1Q4Y4_9LACO S-adenosylmethionine:tRN A ribosyltransferase-isomerase OS=Lactobacillus manihot ivorans DSM 13343 = JCM 12514 OX=1423769 GN=queA PE=3 S V=1
MLTTEDFDYDLPHELIAQTPLKERDASRMLVLNAETGATEDRHFYDILDYIEPGDAIVMNDTRVMPARLYGVKPQTGAHMEVLLLHNTEGDKWETLMKPARKAPVGTEIEFGDGLLKATVTEELEHGGRIIEFHYDGIFMEILDKLGETPLPPYIKEKLDDPEMYQTVYAKEVGSAAAPTAGLHWTEELLQKAQDKGAKLVYLTLHVGLGTFRPVSVSNIEDHKMHSEFYRFSQEAADTLNEVRKNGGKIIATGTTSIRTLETIGTKFNGEIKPSSGWTDIFIKPGYQWRVVDAFITNFHLPKSTLVMLVSSFTGRENILNAYAHAVQERYRFFSFGDAMYIHK

SEQ ID NO: 67904 - protein, 343 aa, Lactobacillus mellifer
  misc_feature (1)..(343): tr|A0A0F4LV31|A0A0F4LV31_9LACO S-adenosylmethionine:tRN A ribosyltransferase-isomerase OS=Lactobacillus mellife r OX=1218492 GN=queA PE=3 SV=1
MLTLDDFDYDLPAELIAQTPLKKRDQSRLLVLDHQTGAYQDRHFYNILDYLHSGDALVMNDTKVLPARLYGVKKNTQAHLEVLLLHNTTGDNWEVLMKPARRAPVGTVIDFGEGQLQCTVTQEMEHGGRMVRFDYQGIFMEILERLGEMPLPPYIKAKLDDPDRYQTVYAKEEGSAAAPTAGLHWTQDLLAQVQAKGVHLVYLTLHVGLGTFRPVSENNIEKHKMHSEFYRLTPQAAQELNDVRAQGGKIVATGTTSIRTLETIGTKFAGAIKPDSGWTDIFIKPGYQWKVVDEFITNFHLPKSTLVMLVASFTGRKNILQAYQHAIQEKYRFFSFGDAMFIK

SEQ ID NO: 67905 - protein, 343 aa, Lactobacillus mellis
  misc_feature (1)..(343): tr|A0A0F4KS65|A0A0F4KS65_9LACO S-adenosylmethionine:tRN A ribosyltransferase-isomerase OS=Lactobacillus mellis OX=1218508 GN=queA PE=3 SV=1
MLTLDDFDYDLPQELIAQTPLKKRDQSRLMVLDHQSGEYQDRHFFDIVDYLHPGDALVMNDTKVMPARLYGIKIPTKAHLEVLLLNNTAGDDWEVLMKPARRAPVGTKVSFGDGKLQATVTKELDHGGRMIHFDYDGIFMEILEELGETPLPPYIKQKLDDPNRYQTVYAREEGSAAAPTAGLHWTKELLQKVQNQGVQLVYLTLHVGLGTFRPVSEQNIDEHKMHSEFYRLTPEAAQVLNEVRQKGGKIVATGTTSIRTLETIGTKFQGEIRPDSGWTDIFIKPGYQWKIVDEFITNFHLPKSTLVMLVASFTGRENILRAYQHAVDEKYRFFSFGDAMFIK

SEQ ID NO: 67906 - protein, 344 aa, Lactobacillus mindensis
  misc_feature (1)..(344): tr|A0A0R1QGR7|A0A0R1QGR7_9LACO S-adenosylmethionine:tRN A ribosyltransferase-isomerase OS=Lactobacillus mindens is DSM 14500 OX=1423770 GN=queA PE=3 SV=1
MSLSTEDFDYDLPEELIAQTPIKNRDQSRLLVLDSKTGEYQDKHFYDILDYLNPGDALVMNNSRVLPARLYGTKEDTDGHEEVLLLNNIEGDKWEVLMKPAKRAKVGTKVEFGDGQLEAEVLEDLEHGGKIIEFHYQGIFMEILEQLGEMPLPPYIKEKLDDPDRYQTVYAKENGSAAAPTAGLHWTKELLKKVEDKGVKLVYVTLHVGLGTFRPVTETDVDKHVMHSEFYRLDEESAKTLNDVKKNGGKIVATGTTSIRTLETIGTKFDGEIKADSGWTDIFIKPGYQWKVVDEFITNFHLPKSTLVMLVAAFTGRENILNAYHHAVEEKYRFFSFGDAMFIK

SEQ ID NO: 67907 - protein, 344 aa, Lactobacillus mixtipabuli
  misc_feature (1)..(344): tr|A0A1Z5IBJ6|A0A1Z5IBJ6_9LACO S-adenosylmethionine:tRN A ribosyltransferase-isomerase OS=Lactobacillus mixtipa buli OX=1435342 GN=queA PE=3 SV=1
MTLTTEDFDYDLPHELIAQTPIEKRDASRLLVLDHQTGALADKHFYDILDYLNPGDAVVMNNSRVMPARIYGIKPETGGHVETLLLHNTKGDEWETLMKPAKKMKVGSTLSFGDGLLTATVTEELEHGGRMIEFHYDGIFMEILNQLGEMPLPPYIKEKLDDPERYQTVYAKTPGSAAAPTAGLHWTKDLLQKVQDKGAKLVYLTLHVGLGTFRPVDEKNIEDHKMHSEFYQLSEESAKTLNDVRANGGRIIATGTTSIRTLETIGTKFNGEIKADSGWTDIFIKPGYQWQVVDAFITNFHLPKSTLVMLVAAFTGRKNILNAYQHAIDERYRFFSFGDAMFIK

SEQ ID NO: 67908 - protein, 347 aa, Lactobacillus murinus
  misc_feature (1)..(347): tr|A0A4S2E9W3|A0A4S2E9W3_9LACO S-adenosylmethionine:tRN A ribosyltransferase-isomerase OS=Lactobacillus murinus OX=1622 GN=queA PE=3 SV=1
MTEEHLTTEDFDYELPEELIAQTPLEHRDQSRMLVLDSKTGKYQDDYFYNVIDRLEPGDALVMNDSRVLPARIYGVKPDTGGHLEVLLLNNIKGDQWETLIKPAKRAKVGTKISFGNGELTAVVKEELEHGGRIVEFEYDGIFLEVLESLGEMPLPPYIKEKLDDPEMYQTVYSKEVGSAAAPTAGLHFTEELLAKIEAKGVKLVYLTLHVGLGTFRPVSVDNIEEHKMHSEFYRLSEEAAKTLNEVRQNGGRIVATGTTSIRTLETIGSKFNGEIKDDSGWTDIFIKPGYEWKVVNAFITNFHLPKSTLVMLVSAFTGRENILNAYRHAVEEKYRFFSFGDAMFIY

SEQ ID NO: 67909 - protein, 347 aa, Lactobacillus murinus
  misc_feature (1)..(347): tr|A0A4S2EQ47|A0A4S2EQ47_9LACO S-adenosylmethionine:tRN A ribosyltransferase-isomerase OS=Lactobacillus murinus OX=1622 GN=queA PE=3 SV=1
MTEEHLTTEDFDYELPEELIAQTPLEHRDQSRMLVLDSKTGKYQDDYFYNVIDRLEPGDALVMNDSRVLPARIYGVKPDTGGHLEVLLLNNIKGDQWETLIKPAKRAKVGTKISFGNGELTAVVKEELEHGGRIVEFEYDGIFLEVLESLGEMPLPPYIKEKLDDPEMYQTVYSKEVGSAAAPTAGLHFTEELLAKIEAKGVKLVYLTLHVGLGTFRPVSVDNIEEHKMHSEFYRLSEEAAKTLNEVRQNGGRIVATGTTSIRTLETIGSKFNGEIKADSGWTDIFIKPGYEWKVVNAFITNFHLPKSTLVMLVSAFTGRENILNAYRHAVEEKYRFFSFGDAMFIY

SEQ ID NO: 67910 - protein, 347 aa, Lactobacillus nagelii
  misc_feature (1)..(347): tr|A0A3S6QU00|A0A3S6QU00_9LACO S-adenosylmethionine:tRN A ribosyltransferase-isomerase OS=Lactobacillus nagelii OX=82688 GN=queA PE=3 SV=1
MSEEHLTTEDFDYDLPQELIAQTPLKERDHSRMLILNSKTGEYQDDVFYHVIDQLNPGDALVMNDSRVMPARLYGVKPDTGGHLEVLLLNNTEGDNWETLIKPARRAKVGTRIIFGDGKLSAVVTEELEHGGRMIRFEYQGIFMEILDQLGEMPLPPYIKQKLDDPEMYQTVYSREIGSAAAPTAGLHFTKELLQKIAAKGVHLVYLTLHVGLGTFRPVSVSNIKEHHMHSEFYRLSEDAAQTLNDVRKNGGKIVATGTTSIRTLETIGTKFNGEIRADSGWTDIFIYPGYEWKVVQAFITNFHLPKSTLVMLVASFTGRDNILNAYRHAVKEHYRFFSFGDAMFIK

SEQ ID NO: 67911 - protein, 350 aa, Lactobacillus nagelii
  misc_feature (1)..(350): tr|A0A0R1Q7Z5|A0A0R1Q7Z5_9LACO S-adenosylmethionine:tRN A ribosyltransferase-isomerase OS=Lactobacillus nagelii DSM 13675 OX=1122150 GN=queA PE=3 SV=1
MKILSEEHLTTEDFDYDLPQELIAQTPLKERDHSRMLILNSKTGEYQDDVFYHVIDQLNPGDALVMNDSRVMPARLYGVKPDTGGHLEVLLLNNTEGDNWETLIKPARRAKVGTRIIFGDGKLSAVVTEELEHGGRMIRFEYQGIFMEILDQLGEMPLPPYIKQKLDDPEMYQTVYSREIGSAAAPTAGLHFTKELLQKIAAKGVHLVYLTLHVGLGTFRPVSVSNIKEHHMHSEFYRLSEDAAQTLNDVRKNGGKIVATGTTSIRTLETIGTKFNGEIRADSGWTDIFIYPGYEWKVVQAFITNFHLPKSTLVMLVASFTGRDNILNAYRHAVKEHYRFFSFGDAMFIK

SEQ ID NO: 67912 - protein, 361 aa, Lactobacillus nantensis
  misc_feature (1)..(361): tr|A0A0R1WER6|A0A0R1WER6_9LACO S-adenosylmethionine:tRN A ribosyltransferase-isomerase OS=Lactobacillus nantens is DSM 16982 OX=1423774 GN=queA PE=3 SV=1
MYLKNFVKPVIKGDFYMSLSTEDFDYDLPEELIAQTPIKDRDQSRLLVLDHETGEYQDKHFYDILDYLNPGDALVMNNSRVLPARLYGTKEDTDGHEEVLLLNNIEGDKWEVLMKPAKRAKVGTKVQFGEDGQLEAEVLEDLEHGGKIIEFHYQGIFMEILEQLGEMPLPPYIKEKLDDPDRYQTVYAKENGSAAAPTAGLHWTKDLLKKVEDKGVKLVYVTLHVGLGTFRPVTETDVDKHVMHSEFYRLDEESAKTLNDVKKNGGKIVATGTTSIRTLETIGTKFNGEIKADSGWTDIFIKPGYEWKVVDEFITNFHLPKSTLVMLVAAFTGRENILNAYHHAVEEKYRFFSFGDAMFIK

SEQ ID NO: 67913 - protein, 344 aa, Lactobacillus nasuensis
  misc_feature (1)..(344): tr|A0A0R1JRQ5|A0A0R1JRQ5_9LACO S-adenosylmethionine:tRN A ribosyltransferase-isomerase OS=Lactobacillus nasuens is JCM 17158 OX=1291734 GN=queA PE=3 SV=1
MLTTEDFDYDLPHELIAQTPLKERDASRMLVLNATTGDMADKHFYDILDYLNPGDAVVMNDTRVMPARLYGVKPDTGAHMEVLLLHNTEGDQWETLMKPARKAPVGAEIDFGDGLLKATVIKELDHGGRIIEFHYDGIFMEILDQLGETPLPPYINAKLDDSEMYQTVYAKEVGSAAAPTAGLHWTEDLLAKAKAKGVHLVYLTLHVGLGTFRPVSVDNIEDHKMHSEFYRFSQEAADELNDVRNHGGRIIATGTTSIRTLETIGTKFDGEIKADSGWTDIFIKPGYQWRLVDAFITNFHLPKSTLVMLVASFTGRERILNAYQHAIQERYRFFSFGDAMFIHK

SEQ ID NO: 67914 - protein, 344 aa, Lactobacillus nodensis
  misc_feature (1)..(344): tr|A0A0R1K855|A0A0R1K855_9LACO S-adenosylmethionine:tRN A ribosyltransferase-isomerase OS=Lactobacillus nodensi s DSM 19682 = JCM 14932 = NBRC 107160 OX=1423775 GN=que A PE=3 SV=1
MTLTTEDFDYNLPEELIAQTPIKDRDHSRLLVLDHETGEYQDKHFYDILDYLNPGDALVMNNSRVLPARLYGTKEDTDGHEEVLLLNNIEGDKWEVLMKPARRAKVGTKVQFGDGQLEATVMEELEHGGKIIEFHYDGIFLEILEKLGEMPLPPYIKEKLDDPDRYQTVYAKENGSAAAPTAGLHWTKDLLEKVQEKGIKLVYLTLHVGLGTFRPVTESDISKHIMHSEFYRLDEESAKTLNEVRKNGGKIVATGTTSIRTLETIGTKFNGEIKADSGWTDIFIKPGYEWKVVDEFITNFHLPKSTLVMLVAAFTGRENILNAYEHAIDEKYRFFSFGDAMFIK

SEQ ID NO: 67915 - protein, 345 aa, Lactobacillus nuruki
  misc_feature (1)..(345): tr|A0A2N7ASI4|A0A2N7ASI4_9LACO S-adenosylmethionine:tRN A ribosyltransferase-isomerase OS=Lactobacillus nuruki OX=1993540 GN=queA PE=3 SV=1
MSLSTEDFDYDLPEELIAQTPIKNRDQSRLLVLDSKTGEYQDKHFYDILDYLNPGDALVMNNSRVLPARLYGTKEDTDGHEEVLLLNNIEGDKWEVLMKPARRATVGTKVRFGEDGQLEAEVLENLEHGGKIIEFHYQGIFMEILEKLGEMPLPPYIKEKLDDPDRYQTVYAKENGSAAAPTAGLHWTKELLKKVEDKGVKLVYVTLHVGLGTFRPVTESDVDKHVMHSEFYRLDEESAKTLNDVKKNGGKIVATGTTSIRTLETIGTKFNGEIKADSGWTDIFIKPGYEWKVVDEFITNFHLPKSTLVMLVAAFTGRENILNAYHHAVEEKYRFFSFGDAMFIK

SEQ ID NO: 67916 - protein, 344 aa, Lactobacillus odoratitofui
  misc_feature (1)..(344): tr|A0A0R1LW95|A0A0R1LW95_9LACO S-adenosylmethionine:tRN A ribosyltransferase-isomerase OS=Lactobacillus odorati tofui DSM 19909 = JCM 15043 OX=1423776 GN=queA PE=3 SV= 1
MTLTTEDFDYDLPHELIAQTPIEKRDASRLLVLDHKTGELSDQHFYDIIDQLNPGDAVVMNNSRVMPARIYGVKPETGGHVEVLLLHNTKGDEWETLMKPAKRIKVGTTVSFGDGLLTATVTEELEHGGRMIEFHYDGIFMEILEKLGETPLPPYIKEKLDDPERYQTVYAKENGSAAAPTAGLHWTKELLQQVQDKGVKLVYLTLHVGLGTFRPVDEKNIEDHKMHSEFYQLSEESAKTLNEVRANGGRIVATGTTSIRTLETIGTKFHGEIKADSGWTDIFIKPGYQWQVVDAFITNFHLPKSTLVMLVAAFTGRDMILNAYQHAIDEKYRFFSFGDAMFIK

SEQ ID NO: 67917 - protein, 347 aa, Lactobacillus oeni
  misc_feature (1)..(347): tr|A0A0R1MA11|A0A0R1MA11_9LACO S-adenosylmethionine:tRN A ribosyltransferase-isomerase OS=Lactobacillus oeni DS M 19972 OX=1423777 GN=queA PE=3 SV=1
MSEEHLTTEDFDYELPEELIAQTPLKKRDHSRMLVLDSQTGEYKDDIFYNVIDQLNPGDALVMNDSRVMPARIYGTKPETGGHLEVLLLNNTEGDNWETLVKPARRAKVGTRVVFGDGQLSAVITKELEHGGRMIRFEYTGIFMEILDKLGEMPLPPYIKEKLDDPEMYQTVYSREIGSAAAPTAGLHFTKELLQKIAAKGVHLVYLTLHVGLGTFRPVSEKNIEDHKMHSEFYRLSKDAAQTLNEVRKNGGKIVATGTTTIRTLETIGTKFNGEIHEDSGWTDIFIKPGYEWKVVQAFITNFHLPKSTLVMLVASFTGRKTILNAYRHAVIDKYRFFSFGDAMFIK

SEQ ID NO: 67918 - protein, 345 aa, Lactobacillus oligofermentans
  misc_feature (1)..(345): tr|A0A0R1RP10|A0A0R1RP10_9LACO S-adenosylmethionine:tRN A ribosyltransferase-isomerase OS=Lactobacillus oligofe rmentans DSM 15707 = LMG 22743 OX=1423778 GN=queA PE=3 SV=1
MSDLTLDDFDYDLPHELIAQTPIEQRDTSRLLVLDSKTGEMQDQHFYDVLDQLNPGDAVVMNNSRVLPARIHGVKLDTGAHVEVLLLNNTEGDTWETLVKPGKKIKVGTVLTFGNGELTATVTEELEHGGRMIEFHYEGIFLEVLEKLGEMPLPPYIKEKLDDPDRYQTVYAKENGSAAAPTAGLHWTKDLLQKVEDKGIKLVYLTLHVGLGTFRPVDEERIEDHVMHSEFYRLDAESAKTLNEVKANGGRIIATGTTSIRTLETIGSKFNGVLQADSGWTDIFIMPGYKWTVVDAFITNFHLPKSTLVMLVAAFTGRDNILNAYQHAIQEKYRFFSFGDAMFVK

SEQ ID NO: 67919 - protein, 344 aa, Lactobacillus oryzae
  misc_feature (1)..(344): tr|A0A081BJ23|A0A081BJ23_9LACO S-adenosylmethionine:tRN A ribosyltransferase-isomerase OS=Lactobacillus oryzae JCM 18671 OX=1291743 GN=queA PE=3 SV=1
MTLTTEDFDYDLPHELIAQTPIEQRDASRLLVLDHETGEMQDKHFYDILDELNAGDAVVMNDSRVMPARIYGTKPETGGHIELLLLHNTEGDKWETLAKPAKKAPVGTTITFGDGQLTATVTEDLDHGGKMIEFHYDGIFMEILEALGEMPLPPYIKEKLDDPERYQTVYAKQVGSAAAPTAGLHWTKDLLKKAQDKGVKLVYLTLHVGLGTFRPVDEDNIEDHKMHSEFYQLTEEAAQTLREVRANGGRIIATGTTSIRTLETIGTKFNGEIKADSGWTDIFIKPGYQWQVVDAFITNFHLPKSTLVMLVAAFTGRETILNAYEHAIEERYRFFSFGDAMFIK

SEQ ID NO: 67920 - protein, 346 aa, Lactobacillus otakiensis
  misc_feature (1)..(346): tr|S4PNM1|S4PNM1_9LACO S-adenosylmethionine:tRNA ribosy ltransferase-isomerase OS=Lactobacillus otakiensis DSM 19908 = JCM 15040 OX=1423780 GN=queA PE=3 SV=1
MKTNYTLEDFDYNLPHELIAQTPIKDRDESRLLVLDKDTGDMQDRHFYNIIDYLNPGDALVMNDSKVMPARIYGVKEDTGGHMEVLLLHNIEGDRWETLMKPAKKAKVGTVINFGEGQLKAVVTKELEHGGREIEFKYDGIFIEILERLGETPLPPYIKEKLDDPNRYQTVYAKEMGSAAAPTAGLHWTKELLQKVEDKGVHLVYLTLHVGLGTFRPVDEENIEDHKMHSEFYRLSEESAETLNAVRKNGGKIVATGTTSIRTLETVGTKFNGEIHPDSGWTDIFIKPGYQWKVVDSFITNFHLPKSTLVMLVASFTGRDNILNAYQHAIDEKYRFFSFGDAMYIH

SEQ ID NO: 67921 - protein, 352 aa, Lactobacillus parabuchneri
  misc_feature (1)..(352): tr|A0A0R1YYA9|A0A0R1YYA9_9LACO S-adenosylmethionine:tRN A ribosyltransferase-isomerase OS=Lactobacillus parabuc hneri DSM 5707 = NBRC 107865 OX=1423784 GN=queA PE=3 SV =1
MKGIKILKTNYTLEDFDYNLPHELIAQTPIKDRDESRLLVLNKETGEMQDRHFYNIIDYLNPGDALVMNDSKVMPARIYGVKEDTGGNMEVLLLHNIEGDRWETLMKPAKRAKVGTVIDFGEGQLKAVVTKELEHGGREIEFKYDGIFIEILERLGETPLPPYIKEKLDDPNRYQTVYAKEMGSAAAPTAGLHWTKELLQKVADKGVHLVYLTLHVGLGTFRPVDEENIEDHKMHSEFYRLTDEAAQTLNDVRQNGGKIVATGTTSIRTLETVGTKFNGEIRPDSGWTDIFIKPGYEWKVVDSFITNFHLPKSTLVMLVASFTGRDNILNAYQHAIEEKYRFFSFGDAMYIH

SEQ ID NO: 67922 - protein, 352 aa, Lactobacillus parabuchneri; identical to SEQ ID NO: 67921
  misc_feature (1)..(352): tr|A0A1X1FC57|A0A1X1FC57_9LACO S-adenosylmethionine:tRN A ribosyltransferase-isomerase OS=Lactobacillus parabuc hneri OX=152331 GN=queA PE=3 SV=1

SEQ ID NO: 67923 - protein, 361 aa, Lactobacillus paracasei
  misc_feature (1)..(361): tr|A0A243PV95|A0A243PV95_LACPA S-adenosylmethionine:tRN A ribosyltransferase-isomerase OS=Lactobacillus paracas ei OX=1597 GN=queA PE=3 SV=1
MEANMVQENKRYHKVEDKHYQLSDFDYDLPHELIAQTPLKERDASRLLVLNSETGEMQDKHFYDILDYFKPGDALVMNDTRVMPARLYGVKPETGAHMEVLLLNNTSGDDWETLMKPARKAPVGTVIDFGDGLLKATVTKELEHGGRMIHFDYDGIFMEILDKLGETPLPPYIKEKLEDPEMYQTVYSKELGSAAAPTAGLHWTKDLLKKVQEKGVKLVYLTLHVGLGTFRPVVEENIEAHKMHSEFYRLTPEAAATLNDVRDNGGRIIATGTTSIRTLEAIGTKFDGAIKADSGWTDIFIKPGYQWKVVDAFITNFHLPKSTLVMLVAAFTGRDTILNAYKHAIDEKYRFFSFGDAMFIY

SEQ ID NO: 67924 - protein, 357 aa, Lactobacillus paracasei
  misc_feature (1)..(357): tr|K6S0B3|K6S0B3_LACPA S-adenosylmethionine:tRNA ribosy ltransferase-isomerase OS=Lactobacillus paracasei OX=15 97 GN=queA PE=3 SV=1
MVQENKRYHKVEDKHYQLSDFDYDLPHELIAQTPLKERDASRLLVLNSETGEMQDKHFYDILDYFKPGDALVMNDTRVMPARLYGVKPETGAHMEVLLLNNTSGDDWETLMKPARKAPVGTVIDFGDGLLKARVTKELEHGGRMIHFDYDGIFMEILDKLGETPLPPYIKEKLEDPEMYQTVYSKELGSAAAPTAGLHWTKDLLKKVQEKGVKLVYLTLHVGLGTFRPVVEENIEAHKMHSEFYRLTPEAAATLNDVRDNGGRIIATGTTSIRTLEAIGTKFDGAIKADSGWTDIFIKPGYQWKVVDAFITNFHLPKSTLVMLVAAFTGRDTILNAYKHAIDEKYRFFSFGDAMFIY

SEQ ID NO: 67925 - protein, 344 aa, Lactobacillus paracollinoides
  misc_feature (1)..(344): tr|A0A0R1TC82|A0A0R1TC82_9LACO S-adenosylmethionine:tRN A ribosyltransferase-isomerase OS=Lactobacillus paracol linoides DSM 15502 = JCM 11969 OX=1423785 GN=queA PE=3 SV=1
MTLTTDDFDYDLPHELIAQTPIEKRDASRLLVMDHATGALEDKHFYDIIDELHAGDAVVMNDSRVMPARIYGIKPDTGGHVEVLLLHNTNGDEWETLMKPAKRIKVGTTVTFGDGQLTATVTKELEHGGRMIEFHYDGIFMEILEKLGETPLPPYIKEKLDDPERYQTVYARESGSAAAPTAGLHWTKELLQKVQDKGIKLVYLTLHVGLGTFRPVDEKNIDDHKMHSEFYRLSEESAKTLNEVRANGGRIVATGTTSIRTLETIGTKFNGEIKADSGWTDIFIFPGYQWKVVDAFITNFHLPKSTLVMLVAAFTGRDNILNAYQHAIEEKYRFFSFGDAMFIK

SEQ ID NO: 67926 - protein, 344 aa, Lactobacillus paracollinoides
  misc_feature (1)..(344): tr|A0A1B2J1S7|A0A1B2J1S7_9LACO S-adenosylmethionine:tRN A ribosyltransferase-isomerase OS=Lactobacillus paracol linoides OX=240427 GN=queA PE=3 SV=1
MTLTTDDFDYDLPHELIAQTPIEKRDASRLLVMDHATGALEDKHFYDIIDELHAGDAVVMNDSRVMPARIYGIKPDTGGHVEVLLLHNTNGDEWETLMKPAKRIKVGTTVTFGDGQLTATVTKELEHGGRMIEFHYDGIFMEILEKLGETPLPPYIKEKLDDPERYQTVYARESGSAAAPTAGLHWTKELLQKVQDKGIKLVYLTLHVGLGTFRPVDEKNIDDHKMHSEFYRLSEESAKTLNEVRANGGRIVATGTTSIRTLETIGTKFNGEIKADSGWTDIFIFPGYQWKVVDAFITNFHLPKSTLVMLVAAFTGRDNILNAYQHVIEEKYRFFSFGDAMFIK

SEQ ID NO: 67927 - protein, 352 aa, Lactobacillus parafarraginis
  misc_feature (1)..(352): tr|G9ZT45|G9ZT45_9LACO S-adenosylmethionine:tRNA ribosy ltransferase-isomerase OS=Lactobacillus parafarraginis F0439 OX=797515 GN=queA PE=3 SV=1
MKGNLTLKTNYTLEDFDYDLPHELIAQTPIKDRDESRLLVLDKETGEMQDRHFYNIIDYLNPGDALVMNDSKVMPARIYGVKEDTGGHLEVLLLHNIEGDRWETLMKPAKHAKVGTRIDFGDGQLKAVVTKELDHGGREIEFQYQGIFIEILEKLGETPLPPYIKEKLDDPNRYQTVYAKEMGSAAAPTAGLHWTKELLQKVADKGVHLVYLTLHVGLGTFRPVEEDNIDDHKMHSEFYRLSDDAAATLNAVRKNGGKIVATGTTSIRTLETVGSKFNGEIHPDSGWTDIFIKPGYQWKVVDSFITNFHLPKSTLVMLVASFTGRDNILNAYQHAIDEKYRFFSFGDAMYIH

SEQ ID NO: 67928 - protein, 352 aa, Lactobacillus parafarraginis
  misc_feature (1)..(352): tr|A0A0R1YSX0|A0A0R1YSX0_9LACO S-adenosylmethionine:tRN A ribosyltransferase-isomerase OS=Lactobacillus parafar raginis DSM 18390 = JCM 14109 OX=1423786 GN=queA PE=3 S V=1
MKGNLTLKTNYTLEDFDYDLPHELIAQTPIKDRDESRLLVLDKETGEMQDRHFYNIIDYLNPGDALVMNDSKVMPARIYGVKEDTGGHLEVLLLHNIEGDRWETLMKPAKHAKVGTRIDFGDGQLKAVVTKELDHGGREIEFQYEGIFIEILEKLGETPLPPYIKEKLDDPNRYQTVYAKEMGSAAAPTAGLHWTKELLQKVADKGVHLVYLTLHVGLGTFRPVEEDNIDDHKMHSEFYRLSDDAAATLNAVRKNGGKIVATGTTSIRTLETVGSKFNGEIHPDSGWTDIFIKPGYQWKVVDSFITNFHLPKSTLVMLVASFTGRDNILNAYQHAIDEKYRFFSFGDAMYIH

SEQ ID NO: 67929 - protein, 242 aa, Lactobacillus parakefiri
  misc_feature (1)..(242): tr|A0A4R5NZJ1|A0A4R5NZJ1_9LACO S-adenosylmethionine:tRN A ribosyltransferase-isomerase OS=Lactobacillus parakef iri OX=152332 GN=C5L28_000451 PE=3 SV=1
MKTNYTLEDFDYDLPHELIAQTPIKDRDESRLLVLDKKTGEMQDRHFYNIIDYLNPGDALVMNDSKVMPARIYGVKEDTGGHMEVLLLHNIEGDRWETLMKPAKKAKVGTVINFGDGQLKAVVTKELDHGGREIEFKYDGIFIEILERLGETPLPPYIKEKLDDPNRYQTVYAREMGSAAAPTAGLHWTKDLLKKVEDKGVHLVYLTLHVGLGTFRPVDEENIEDHKMHSEFYVCQMKQPTR

SEQ ID NO: 67930 - protein, 346 aa, Lactobacillus parakefiri
  misc_feature (1)..(346): tr|A0A269YM88|A0A269YM88_9LACO S-adenosylmethionine:tRN A ribosyltransferase-isomerase OS=Lactobacillus parakef iri OX=152332 GN=queA PE=3 SV=1
MKTNYTLEDFDYDLPHELIAQTPIKDRDESRLLVLDKKTGEMQDRHFYNIIDYLNPGDALVMNDSKVMPARIYGVKEDTGGHMEVLLLHNIEGDRWETLMKPAKKAKVGTVINFGDGQLKAVVTKELDHGGREIEFKYDGIFIEILERLGETPLPPYIKEKLDDPNRYQTVYAREMGSAAAPTAGLHWTKDLLKKVEDKGVHLVYLTLHVGLGTFRPVDEENIEDHKMHSEFYRLSDEAADTLNAVRDNGGKIVATGTTSIRTLETVGTKFGGDIRPDSGWTDIFIKPGYQWQVVDSFITNFHLPKSTLVMLVASFTGRDNILNAYQHAIEEKYRFFSFGDAMYIH

SEQ ID NO: 67931 - protein, 360 aa, Lactobacillus paralimentarius
  misc_feature (1)..(360): tr|A0A0R1KN12|A0A0R1KN12_9LACO S-adenosylmethionine:tRN A ribosyltransferase-isomerase OS=Lactobacillus paralim entarius DSM 19674 OX=1423788 GN=queA PE=3 SV=1
MYLKKNIIPRLKGDFTMTLTTEDFDYDLPEELIAQTPIKNRDQSRLLVLDHETGEYQDKHFYDILDYLNPGDALVMNNSRVLPARLYGTKEDTDGHEEVLLLNNIEGDKWEVLMKPARRAKVGTKVEFGDGQLEAEVLEDLEHGGKIIEFHYQGIFMEILEQLGEMPLPPYIKEKLDDPDRYQTVYAKENGSAAAPTAGLHWTKDLLKKVEDKGVKLVYITLHVGLGTFRPVTESDISKHVMHSEFYRLDEDSAKTLNEVKKNGGKIVATGTTSIRTLETIGTKFNGEIKADSGWTDIFIKPGYEWKVVDEFITNFHLPKSTLVMLVAAFTGRENILNAYQHAVEEKYRFFSFGDAMFIK

SEQ ID NO: 67932 - protein, 360 aa, Lactobacillus paralimentarius
  misc_feature (1)..(360): tr|A0A0R1I862|A0A0R1I862_9LACO S-adenosylmethionine:tRN A ribosyltransferase-isomerase OS=Lactobacillus paralim entarius DSM 13961 = JCM 10707 OX=1423765 GN=queA PE=3 SV=1
MYLKKNIIPRLKGEFTMTLTTEDFDYDLPEELIAQTPIKNRDQSRLLVLDHETGEYQDKHFYDILDYLNPGDALVMNNSRVLPARLYGTKEDTDGHEEVLLLNNIEGDKWEVLMKPARRAKVGTKVEFGDGQLEAEVLEDLEHGGKIIEFHYQGIFMEILEQLGEMPLPPYIKEKLDDPDRYQTVYAKENGSAAAPTAGLHWTKDLLKKVEDKGVKLVYITLHVGLGTFRPVTESDISKHVMHSEFYRLDEDSAKTLNEVKKNGGKIVATGTTSIRTLETIGTKFNGEIKADSGWTDIFIKPGYEWKVVDEFITNFHLPKSTLVMLVAAFTGRENILNAYQHAVEEKYRFFSFGDAMFIK

SEQ ID NO: 67933 - protein, 344 aa, Lactobacillus paraplantarum
  misc_feature (1)..(344): tr|A0A098R2K6|A0A098R2K6_9LACO S-adenosylmethionine:tRN A ribosyltransferase-isomerase OS=Lactobacillus parapla ntarum OX=60520 GN=queA PE=3 SV=1
MSLTLEDFDYDLPHELIAQTPIKERDSSRLLELDRQTGEMQDKHFYDIIDQLNPGDAVVMNNSRVMPARLYGVKPETGGHAEVLLLHNTEGDEWETLMKPAKRAKVGTVISFGDGQLTATVTAEKEDGIRMIEFHYDGIFMEILERLGETPLPPYIKEKLDDPDRYQTVYAKENGSAAAPTAGLHWTKELLQKVQDKGIKLVYLTLHVGLGTFRPVEEDNIEDHKMHSEFYRLDEDAAKTLNEVRQSGGRIIATGTTSIRTLETIGSKFDGEIKPDSGWTDIFIKPGYQWKVVDAFITNFHLPKSTLVMLVAAFTGRDLILKAYQHAIDEKYRFFSFGDAMFIH

SEQ ID NO: 67934 - protein, 344 aa, Lactobacillus paraplantarum
  misc_feature (1)..(344): tr|A0A4Q9Y0H7|A0A4Q9Y0H7_9LACO S-adenosylmethionine:tRN A ribosyltransferase-isomerase OS=Lactobacillus parapla ntarum OX=60520 GN=queA PE=3 SV=1
MSLTLEDFDYDLPHELIAQTPIKERDSSRLLELDRQTGEMQDKHFYDIIDQLNPGDAVVMNNSRVMPARLYGVKPETGGHAEVLLLHNTEGDEWETLMKPAKRAKVGTVISFGDGQLTATVTAEKEDGIRMIEFHYDGIFMEILERLGETPLPPYIKEKLDDPDRYQTVYAKENGSAAAPTAGLHWTKELLQKVQDKGIKLVYLTLHVGLGTFRPVEEDNIEDHKMHSEFYRLDEEAAKTLNEVRQSGGRIIATGTTSIRTLETIGSKFDGEIKPDSGWTDIFIKPGYQWKVVDAFITNFHLPKSTLVMLVAAFTGRDLILKAYQHAIDEKYRFFSFGDAMFIH

SEQ ID NO: 67935 - protein, 344 aa, Lactobacillus pentosiphilus
  misc_feature (1)..(344): tr|A0A1Z5IUT1|A0A1Z5IUT1_9LACO S-adenosylmethionine:tRN A ribosyltransferase-isomerase OS=Lactobacillus pentosi philus OX=1714682 GN=queA PE=3 SV=1
MTLTTEDFDYDLPHELIAQTPIEKRDASRLLVLDHKTGALADKHFYDILDYLNPGDAVVMNNSRVMPARIYGIKPETGGHVETLLLHNTKGDEWETLMKPAKKMKVGATLSFGDGLLTATVTEELDHGGRMIEFHYDGIFMEILDKLGEMPLPPYIKEKLDDPERYQTVYAKTPGSAAAPTAGLHWTKELLQKVQDKGVKLVYLTLHVGLGTFRPVDEKNIEDHKMHSEFYQLSEASAQTLNEVRANGGRIIATGTTSIRTLETIGTKFNGEIKADSGWTDIFIKPGYQWQVVDAFITNFHLPKSTLVMLVAAFTGRDNILNAYQHAIDERYRFFSFGDAMFIK

SEQ ID NO: 67936 - protein, 344 aa, Lactobacillus pentosiphilus
  misc_feature (1)..(344): tr|A0A1Z5IQQ8|A0A1Z5IQQ8_9LACO S-adenosylmethionine:tRN A ribosyltransferase-isomerase OS=Lactobacillus pentosi philus OX=1714682 GN=queA PE=3 SV=1
MTLTTEDFDYDLPHELIAQTPIEKRDASRLLVLDHKTGALADKHFYDILDYLNPGDAVVMNNSRVMPARIYGIKPETGGHVETLLLHNTKGDEWETLMKPAKKMKVGATLSFGDGLLTATVTEELDHGGRMIEFHYDGIFMEILDKLGEMPLPPYIKEKLDDPERYQTVYAKTPGSAAAPTAGLHWTKELLQKVQDKGVKLVYLTLHVGLGTFRPVDEKNIEDHKMHSEFYQLSEASAQTLNEVRANGGRIIATGTTSIRTLETIGAKFNGEIKADSGWTDIFIKPGYQWQVVDAFITNFHLPKSTLVMLVAAFTGRDNILNAYQHAIDERYRFFSFGDAMFIK

SEQ ID NO: 67937 - protein, 344 aa, Lactobacillus pentosus
  misc_feature (1)..(344): tr|A0A241RSN8|A0A241RSN8_LACPE S-adenosylmethionine:tRN A ribosyltransferase-isomerase OS=Lactobacillus pentosu s OX=1589 GN=queA PE=3 SV=1
MSLTLEDFDYDLPHELIAQTPIKKRDSSRLLELDRKTGEMQDKHFYDIIDQLNPGDAVVMNNSRVMPARLYGVKPETGGHAEVLLLHNTEGDEWETLMKPAKRAKVGTVISFGDGKLTATVTAEKEDGIRMIEFHYDGIFMEILESLGETPLPPYIKEKLDDPDRYQTVYAKENGSAAAPTAGLHWTKELLQKVQDKGVKLVYLTLHVGLGTFRPVEEDNIDDHKMHSEFYRLDEDAAKTLNEVRQNGGRIIATGTTSIRTLETIGSKFDGEIKPDSGWTDIFIKPGYQWKVVDAFITNFHLPKSTLVMLVAAFTGRDMILKAYQHAIDEKYRFFSFGDAMFIH

SEQ ID NO: 67938 - protein, 344 aa, Lactobacillus pentosus; identical to SEQ ID NO: 67937
  misc_feature (1)..(344): tr|I9AKL5|I9AKL5_LACPE S-adenosylmethionine:tRNA ribosy ltransferase-isomerase OS=Lactobacillus pentosus KCA1 O X=1136177 GN=queA PE=3 SV=1

SEQ ID NO: 67939 - protein, 357 aa, Lactobacillus perolens
  misc_feature (1)..(357): tr|A0A0R1N3F3|A0A0R1N3F3_9LACO S-adenosylmethionine:tRN A ribosyltransferase-isomerase OS=Lactobacillus perolen s DSM 12744 OX=1423792 GN=queA PE=3 SV=1
MLTTEDFDYDLPQELIAQTPLPERDASRMLVLDTATGKTTDKHFYDILDYLNPGDAVVLNDTRVMPARLYGVKPDTGGHVEVLLLNNTRGDDWEVLMKPAKRVHVGTEIDFGDGLLKATVIEERDEGIRMIRFTYQGIFMEILDKLGETPLPPYIKAKLDDPEMYQTVYAKEVGSAAAPTAGLHWTKELLKKAQDKGVKLVYLTLHIGLGTFRPVLEENVEDHKMHSEFYRLTPESAAALNAVRQNGGRIIATGTTVIRTLESIGTKFDGKIQADSGWTDIFLKPGYQWKIVDAFITNFHLPKSTLVMLVASFTGRHMILNAYQHAIEEKYRFFSFGDAMFIYNSENPHPQPMKEMD

SEQ ID NO: 67940 - protein, 344 aa, Lactobacillus plantarum
  misc_feature (1)..(344): sp|Q88V04|QUEA_LACPL S-adenosylmethionine:tRNA ribosylt ransferase-isomerase OS=Lactobacillus plantarum (strain ATCC BAA-793 / NCIMB 8826 / WCFS1) OX=220668 GN=queA P E=3 SV=1
MSLTLEDFDYDLPHELIAQTPIKKRDSSRLLELDRQTGEMQDKHFYDIIDQLNPGDAVVMNNSRVMPARLYGVKPETGGHAEVLLLHNTEGDEWETLMKPAKRAKVGTVISFGDGKLTATVTAEKEDGIRMIEFHYDGIFMEILESLGETPLPPYIKEKLDDPDRYQTVYAKENGSAAAPTAGLHWTKELLQKVQDKGIKLVYLTLHVGLGTFRPVEEDNIDDHKMHSEFYRLDEDAAKTLNEVRQNGGRIIATGTTSIRTLETIGSKFDGEIKPDSGWTDIFIKPGYQWKVVDAFITNFHLPKSTLVMLVAAFTGRDMILKAYQHAIDEKYRFFSFGDAMFIH

SEQ ID NO: 67941 - protein, 344 aa, Lactobacillus plantarum; identical to SEQ ID NO: 67940
  misc_feature (1)..(344): tr|A0A0G9F941|A0A0G9F941_LACPN S-adenosylmethionine:tRN A ribosyltransferase-isomerase OS=Lactobacillus plantar um OX=1590 GN=queA PE=3 SV=1

SEQ ID NO: 67942 - protein, 347 aa, Lactobacillus pobuzihii
  misc_feature (1)..(347): tr|A0A0R2L3M9|A0A0R2L3M9_9LACO S-adenosylmethionine:tRN A ribosyltransferase-isomerase OS=Lactobacillus pobuzih ii OX=449659 GN=queA PE=3 SV=1
MSEEHLTTEDFDYELPQELIAQTPLKKRDESRMLVLNHVSGEYEDDHFYNVIDRLNPGDALVMNDSRVMPARLYGNKPATGGHLEVLLLNNTEGDNWETLVKPAKRAKVGTEISFGNGELTATVTKELEHGGRMIEFHYNGIFMEVLERLGETPLPPYIKEKLDDPEMYQTVYSKEIGSAAAPTAGLHFTKELLQKIEDKGVKLVYLTLHVGLGTFRPVTEANIEDHKMHSEFYSLSEKSAQTLNKVRQNGGKIVATGTTTIRTLETIGTKFSGDIKADSGWTDIFLKPGYDWKVVQAFITNFHLPKSTLVMLVASFTGRDNILNAYKHAVEERYRFFSFGDCMFIY

SEQ ID NO: 67943 - protein, 346 aa, Lactobacillus rapi
  misc_feature (1)..(346): tr|A0A512PJU3|A0A512PJU3_9LACO S-adenosylmethionine:tRN A ribosyltransferase-isomerase OS=Lactobacillus rapi OX =481723 GN=queA PE=3 SV=1
MKTNYTLEDFDYDLPHELIAQTPIKDRDESRLLVLNKDTGEMQDRHFYNIIDYLNPGDALVMNDSKVMPARIYGVKADTGANMEILLLHNIEADRWETLMKPAKRAKVGTVIDFGEGQLKAVVTKELDHGGREIEFKYEGIFIEILEKLGETPLPPYIKEKLDDPNRYQTVYAKEMGSAAAPTAGLHWTKELLQKVADKGVHLVYLTLHVGLGTFRPVDEENIEDHKMHSEFYRLSQEAADTLNDVRHNGGKIVATGTTSIRTLETVGTKFNGEIRPDSGWTDIFIKPGYQWQVVDSFITNFHLPKSTLVMLVASFTGRENILNAYEHAIQEKYRFFSFGDAMYIH

SEQ ID NO: 67944 - protein, 344 aa, Lactobacillus rennini
  misc_feature (1)..(344): tr|A0A1K2I807|A0A1K2I807_9LACO S-adenosylmethionine:tRN A ribosyltransferase-isomerase OS=Lactobacillus rennini OX=238013 GN=queA PE=3 SV=1
MGLTLEDFDYDLPQELIAQTPLKERDASRLLVLDHQTGRLQDKHFYDILDQLHAGDAVVMNDTRVMPARLYGVKPATGGHEEVLLLNNTEGDQWETLMKPARRAKVGTELVFGDGQLKATVIKELDHGGRLIEFHYNGIFMEILEQLGETPLPPYIKAKLDNPEMYQTVYAKESGSAAAPTAGLHWTKALLDKVQAKGVKLVYLTLHVGLGTFRPVLEDNIDEHKMHSEFYRLTPEAAATLNQVRQNGGRIIATGTTSIRTLETIGTKFDGQIKPDSGWTDIFIKPGYQWRVVDAFITNFHLPKSTLVMLVAAFTGRDQILHAYQHAIKERYRFFSFGDAMFIK

SEQ ID NO: 67945 - protein, 344 aa, Lactobacillus rennini; identical to SEQ ID NO: 67944
  misc_feature (1)..(344): tr|A0A0R2D6W9|A0A0R2D6W9_9LACO S-adenosylmethionine:tRN A ribosyltransferase-isomerase OS=Lactobacillus rennini DSM 20253 OX=1423796 GN=queA PE=3 SV=1

SEQ ID NO: 67946 - protein, 167 aa, Lactobacillus rhamnosus
  misc_feature (1)..(167): tr|F3MYG3|F3MYG3_LACRH S-adenosylmethionine:tRNA ribosy ltransferase-isomerase (Fragment) OS=Lactobacillus rham nosus MTCC 5462 OX=947828 GN=AAULR_05528 PE=3 SV=1
AAPTAGLHWTKELLQKVQDKGVKLVYLTLHVGLGTFRPVVEENIEAHKMHSEFYRLTPEAAATLNEVRDNGGRIIATGTTSIRTLEAIGTKFDGAIKADSGWTDIFIKPGYQWKVVDAFITNFHLPKSTLVMLVAAFTGRDTILNAYKHAIEEKYRFFSFGDAMFIY

SEQ ID NO: 67947 - protein, 361 aa, Lactobacillus rhamnosus
  misc_feature (1)..(361): tr|K8QHH7|K8QHH7_LACRH S-adenosylmethionine:tRNA ribosy ltransferase-isomerase OS=Lactobacillus rhamnosus LRHMD P2 OX=1203258 GN=queA PE=3 SV=1
MEANKLQDKKRYRRVENKDYQLSDFDYDLPHELIAQTPLKERDASRLLVLNADTGAMQDKHFYDILDYFKPGDALVMNDTRVMPARLYGVKPETGAHMEVLLLNNTSGDDWETLMKPARKAPVGTVIDFGDGLLKATVTKELEHGGRMIHFDYDGIFMEILDKLGETPLPPYIKEKLEDPEMYQTVYSKELGSAAAPTAGLHWTKELLQKVQDKGVKLVYLTLHVGLGTFRPVVEENIEAHKMHSEFYRLTPEAAATLNEVRDNGGRIIATGTTSIRTLEAIGTKFDGTIKADSGWTDIFIKPGYQWKVVDAFITNFHLPKSTLVMLVAAFTGRDTILNAYKHAIEEKYRFFSFGDAMFIY

SEQ ID NO: 67948 - protein, 350 aa, Lactobacillus ruminis
  misc_feature (1)..(350): tr|E7FTB9|E7FTB9_9LACO S-adenosylmethionine:tRNA ribosy ltransferase-isomerase OS=Lactobacillus ruminis ATCC 25 644 OX=525362 GN=queA PE=3 SV=1
MTILSEKHLTTEDFDYDLPQELIAQTPLKERDQSRLLVLDSKTGKYQDDYFYNVIDRLNPGDALVMNDSRVMPARLYGVKPETGGHVEVLLLNNTDGDNWETLVKPAKRAKVGTEISFGDGKLTATVTEELEHGGRMIEFHYDGIFMEILDQLGEMPLPPYIKEKLDDPEMYQTVYSREIGSAAAPTAGLHFTTELLKKIEDKGVKLVYLTLHVGLGTFRPVSEENIEDHKMHSEFYRLTEDAAKTLNEVKANGGRIVATGTTSIRTLETIGTKFNGEIRADSGWTDIFIKPGYKWQVVDAFITNFHLPKSTLVMLVASFTGRENILNAYRHAVSEKYRFFSFGDAMFIY

SEQ ID NO: 67949 - protein, 347 aa, Lactobacillus ruminis
  misc_feature (1)..(347): tr|R6TLS3|R6TLS3_9LACO S-adenosylmethionine:tRNA ribosy ltransferase-isomerase OS=Lactobacillus ruminis CAG:367 OX=1263085 GN=queA PE=3 SV=1
MSEKHLTTEDFDYDLPQELIAQTPLKERDQSRLLVLDSKTGKYQDDYFYNVIDRLNPGDALVMNDSRVMPARLYGVKPETGGHVEVLLLNNTDGDNWETLVKPAKRAKVGTEISFGDGKLTATVTEELEHGGRMIEFHYDGIFMEILDQLGEMPLPPYIKEKLDDPEMYQTVYSREIGSAAAPTAGLHFTKELLKKIEDKGVKLVYLTLHVGLGTFRPVSEENIEDHKMHSEFYRLTEDAAKTLNEVKANGGRIVATGTTSIRTLETIGTKFNGEIRADSGWTDIFIKPGYKWQVVDAFITNFHLPKSTLVMLVASFTGRENILNAYRHAVSEKYRFFSFGDAMFIY

SEQ ID NO: 67950 - protein, 347 aa, Lactobacillus saerimneri
  misc_feature (1)..(347): tr|M5J6U6|M5J6U6_9LACO S-adenosylmethionine:tRNA ribosy ltransferase-isomerase OS=Lactobacillus saerimneri 30a OX=1227363 GN=queA PE=3 SV=1
MSTPHYTTSDFDYDLPEELIAQTPLEKRDQSRMLVLDAQTGEYQDDYFYNVIDQLNPGDALVMNDSRVMPARIYGTKPETGGHLEVLLLNNTHGDEWETLVKPAKRAKVGTTISFGDGELTATVIKELEHGGRMIEFHYDGIFMEILDRLGEMPLPPYIKEKLDNPEMYQTVYSREVGSAAAPTAGLHFTKELLQKIADKGVKLVYLTLHVGLGTFRPVSTDNIEEHKMHSEFYRLTPEAAATLNEVRANGGKIVATGTTSIRTLETIGTKFNGEIKADSGWTDIFIKPGYEWKVVQAFITNFHLPKSTLVMLVASFTGRENILNAYKHAVQEKYRFFSFGDAMFIK

SEQ ID NO: 67951 - protein, 347 aa, Lactobacillus saerimneri
  misc_feature (1)..(347): tr|A0A0R1SYG0|A0A0R1SYG0_9LACO S-adenosylmethionine:tRN A ribosyltransferase-isomerase OS=Lactobacillus saerimn eri DSM 16049 OX=1122153 GN=queA PE=3 SV=1
MSTPHYTTSDFDYDLPEELIAQTPLEKRDQSRMLVLDAQTGEYQDDYFYNVIDQLNPGDALVMNDSRVMPARIYGTKPETGGHLEVLLLNNTHGDEWETLVKPAKRAKVGTTISFGDGELTATVTKELEHGGRMIEFHYDGIFMEILDRLGEMPLPPYIKEKLDNPEMYQTVYSREVGSAAAPTAGLHFTKELLQKIADKGVKLVYLTLHVGLGTFRPVSTDNIEEHKMHSEFYRLTPEAAATLNEVRANGGKIVATGTTSIRTLETIGTKFNGEIKADSGWTDIFIKPGYEWKVVQAFITNFHLPKSTLVMLVASFTGRENILNAYKHAVQEKYRFFSFGDAMFIK

SEQ ID NO: 67952 - protein, 343 aa, Lactobacillus sakei
  misc_feature (1)..(343): sp|Q38YQ8|QUEA_LACSS S-adenosylmethionine:tRNA ribosylt ransferase-isomerase OS=Lactobacillus sakei subsp. sake i (strain 23K) OX=314315 GN=queA PE=3 SV=1
MVSTEDFDYNLPEELIAQTPMIERAASRLLVMDHETGALEDKVFYDIIDELNPGDAVVMNNTRVLPARLYGVKPDTGGHEEVLLLNNTHDDEWEVLMKPAKRAKVGTEVVFGDGQLRAIVTKELEHGGRMIEFKYDGIFMQILEALGEMPLPPYIKEKLDDPEMYQTVYAKEPGSAAAPTAGFHWTEELLQKVQDKGIKLVYLTLHVGLGTFRPVSEDNVEDHKMHSEFYRLTEEAAATLNEVKQNGGRIVATGTTSIRTLETIATKFDGEIKADSGWTEIFIKPGYQWKAVDAFITNFHLPKSTLVMLVASFTGRENILNAYQHAVDERYRFFSFGDAMFVK

SEQ ID NO: 67953 - protein, 343 aa, Lactobacillus sakei; identical to SEQ ID NO: 67952
  misc_feature (1)..(343): tr|A0A4R5MXX5|A0A4R5MXX5_LACSK S-adenosylmethionine:tRN A ribosyltransferase-isomerase OS=Lactobacillus sakei s ubsp. sakei OX=214326 GN=queA PE=3 SV=1

SEQ ID NO: 67954 - protein, 347 aa, Lactobacillus salivarius
  misc_feature (1)..(347): tr|F7QSK7|F7QSK7_9LACO S-adenosylmethionine:tRNA ribosy ltransferase-isomerase OS=Lactobacillus salivarius GJ-2 4 OX=1041521 GN=queA PE=3 SV=1
MSEKHLTTEDFDYDLPESLIAQTPLEERDQSRMLILDSKTGEYQDDYFYNVIDQLNPGDALVMNDSRVMPARIYGVKPETGGHVEVLLLNNTHGDEWETLVKPARRAKVGTKISFGDGALKATVTKELEHGGRLIEFEYDGIFMEILDKLGEMPLPPYIKEKLENPEMYQTVYSREVGSAAAPTAGLHFTKELLHKIEEKGVKLVYLTLHVGLGTFRPVSEKNIEDHKMHSEFYRLTEEAAATLNEVRKNGGRIVATGTTSIRTLETIGTKYDGEIKADSGWTDIFIKPGYEWKVVQAFITNFHLPKSTLVMLVASFTGRENILNAYKHAVEEKYRFFSFGDAMFIK

SEQ ID NO: 67955 - protein, 347 aa, Lactobacillus salivarius
  misc_feature (1)..(347): tr|V6DIH8|V6DIH8_9LACO S-adenosylmethionine:tRNA ribosy ltransferase-isomerase OS=Lactobacillus salivarius cp40 0 OX=1273133 GN=queA PE=3 SV=1
MSEKHLTTGDFDYDLPESLIAQTPLEERDQSRMLILDSKTGEYQDDYFYNVIDQLNPGDALVMNDSRVMPARIYGVKPETGGHVEVLLLNNTHGDEWETLVKPARRAKVGTKISFGDGALKATVTKELEHGGRLIEFEYDGIFMEILDKLGEMPLPPYIKEKLENPEMYQTVYSREVGSAAAPTAGLHFTKELLHKIEEKGVKLVYLTLHVGLGTFRPVSEKNIEDHKMHSEFYRLTEEAAATLNEVRKNGGRIVATGTTSIRTLETIGTKYNGEIKADSGWTDIFIKPGYEWKVVQAFITNFHLPKSTLVMLVASFTGRENILNAYKHAVEEKYRFFSFGDAMFIK

SEQ ID NO: 67956 - protein, 343 aa, Lactobacillus saniviri
  misc_feature (1)..(343): tr|A0A0R2N4K9|A0A0R2N4K9_9LACO S-adenosylmethionine:tRN A ribosyltransferase-isomerase OS=Lactobacillus sanivir i JCM 17471 = DSM 24301 OX=1293598 GN=queA PE=3 SV=1
MLTTEDFDYNLPEELIAQTPLKERDASRMLVLDHETGEMADKHFYDILDYLNPGDAVVMNDTRVMPARLYGVKEDTGAHMEVLLLNNIEGDKWETLVKHSRKAPVGTKITFGDGLLVATVTEELEHGGRIVEFSYDGIFMEVLEQLGETPLPPYIKEKLDDPEMYQTVYAKEIGSAAAPTAGLHWTKELLDQAQAKGVKLVYLTLHVGLGTFRPVSVDNIEDHKMHSEFYRLTQDAADTLNEVKQNGGRIIATGTTSIRTLETIGTKFDGEIKADSGWTDIFIKPGYQWRVVNAFITNFHLPKSTLVMLVAAFTGRDNILNAYQHAIDERYRFFSFGDAMFIK

SEQ ID NO: 67957 - protein, 344 aa, Lactobacillus satsumensis
  misc_feature (1)..(344): tr|A0A0R1UWA7|A0A0R1UWA7_9LACO S-adenosylmethionine:tRN A ribosyltransferase-isomerase OS=Lactobacillus satsume nsis DSM 16230 = JCM 12392 OX=1423801 GN=queA PE=3 SV=1
MHLTTEDFDYDLPEELIAQTPLTERDHSRMLVLDSQTGKYRDDVFYHVIDQLNPGDALVMNDSRVMPARIYGIKPETGGHLEVLLLNNTDGDNWETLVKPARRAKVGTRIVFGDGQLSAVITKELEHGGRMIKFEYTGIFMEILDQLGEMPLPPYIKEKLDDPEMYQTVYSREIGSAAAPTAGLHFTKELLQKIADKGVHLVYLTLHVGLGTFRPVSVENIEDHKMHSEFYRLSREAAAVLNQVRAEGGKIVATGTTTIRTLETIGTKFNGEIQEDSGWTDIFIKPGYEWKVVQAFITNFHLPKSTLVMLVASFTGRENILNAYQHAVAEKYRFFSFGDAMFIK

SEQ ID NO: 67958 - protein, 344 aa, Lactobacillus selangorensis
  misc_feature (1)..(344): tr|A0A0R2FFU7|A0A0R2FFU7_9LACO S-adenosylmethionine:tRN A ribosyltransferase-isomerase OS=Lactobacillus selango rensis OX=81857 GN=queA PE=3 SV=1
MSLTTEDFDYELPHELIAQTPLQERDASRMLVLNHKTDQMWDKHFYDILDYLNPGDAVVMNDTRVMPARLYGTKEGTGAHMEVLLLNNTQGDEWETLMKPARRAPVGTKIDFGDGLLSATVTKELEHGGRMIEFHYDGIFMEILEKLGETPLPPYIKEKLDDPEMYQTVYAKEMGSAAAPTAGLHWTKELLQKAQDKGVKLVYLTLHVGLGTFRPVSEANIEDHKMHSEFYRLTPEAAQELNEVKANGGRIIATGTTSIRTLETIGTKFDGEIKADSGWTDIFIKPGYQWKVVDAFITNFHLPKSTLVMLVASFTGRDTILNAYQHAVAEKYRFFSFGDAMFIY

SEQ ID NO: 67959 - protein, 346 aa, Lactobacillus senioris
  misc_feature (1)..(346): tr|A0A0R2CRR7|A0A0R2CRR7_9LACO S-adenosylmethionine:tRN A ribosyltransferase-isomerase OS=Lactobacillus seniori s DSM 24302 = JCM 17472 OX=1423802 GN=queA PE=3 SV=1
MTEKYTLADFDYDLPKELIAQTPIEKRDTSRLLVMNHETGELTDKHFYDIIDYLNPGDALVMNDSKVMPARIYGVKEDTGAHVEVLLLHNIEGDSWETLMKPARKLKVGAVVSFGDGQLKAVVTKELDHGGREIKFEYDGIFIEILERLGETPLPPYIKEKLDDPDRYQTVYAKEMGSAAAPTAGLHWTPELLDKVQAKGIKLVYLTLHVGLGTFRPVDEDNIEDHKMHSEFYRLSEDAAATLNEVRQNGGRIVATGTTSIRTLETIGSKFNGAIKADSGWTDIFIKPGYDWKVVNAFITNFHLPKSTLVMLVASFTGRDNILNAYQHAIEEKYRFFSFGDAMYIY

SEQ ID NO: 67960 - protein, 357 aa, Lactobacillus shenzhenensis
  misc_feature (1)..(357): tr|U4TMP3|U4TMP3_9LACO S-adenosylmethionine:tRNA ribosy ltransferase-isomerase OS=Lactobacillus shenzhenensis L Y-73 OX=1231336 GN=queA PE=3 SV=1
MLSTEDFDYDLPQELIAQTPLPERDASRMLVLDTATGETTDKHFYDILDYVHPGDAVVMNDTRVMPARLYGIKPETGGHVEVLLLNNPQGDDWEVLMKPAKRIHVGTEIDFGDGLLKATVTEERDEGVRMIRFSYDGIFMEILDKLGETPLPPYIKAKLDDPEMYQTVYAKEVGSAAAPTAGLHWTKELLQKVQDKGVKLVYLTLHIGLGTFRPVLEENVEDHKMHSEFYRLTPEAAATLNDVRAKGGRIIATGTTVIRTLESIGTKFDGAIKADSGWTDIFIKPGYQWKVVDAFITNFHLPKSTLVMLVASFTGRHMILNAYQHAVAEKYRFFSFGDAMFIYNSQNPHPLPLHEMD

SEQ ID NO: 67961 - protein, 344 aa, Lactobacillus silagei
  misc_feature (1)..(344): tr|A0A1Z5IK76|A0A1Z5IK76_9LACO S-adenosylmethionine:tRN A ribosyltransferase-isomerase OS=Lactobacillus silagei JCM 19001 OX=1302250 GN=queA PE=3 SV=1
MTLTTEDFDYDLPHELIAQTPIEKRDASRLLVLDHQTGELTDKHFYDILDYLNPGDAVVMNNSRVMPARIYGIKPDTGGHVEVLLLHNTQGDEWETLMKPAKRMRVGSTVSFGDGVLTATVTKELEHGGRMIEFHYDGIFMEILEKLGETPLPPYIKEKLDDPERYQTVYAKTVGSAAAPTAGLHWTKELLQKVQDKGVKLVYLTLHVGLGTFRPVDEKNIEDHKMHSEFYQLSEESAKTLNEVRANGGRIIATGTTSIRTLETIGTKFHGEIKADSGWTDIFIKPGYQWQVVNAFITNFHLPKSTLVMLVAAFTGRDNILNAYHHAIEERYRFFSFGDAMFIK

SEQ ID NO: 67962 - protein, 344 aa, Lactobacillus silagincola
  misc_feature (1)..(344): tr|A0A1Z5J3S6|A0A1Z5J3S6_9LACO S-adenosylmethionine:tRN A ribosyltransferase-isomerase OS=Lactobacillus silagin cola OX=1714681 GN=queA PE=3 SV=1
MTLTTEDFDYDLPHELIAQTPIEKRDASRLLVLDHETGEMADKHFYDIIDYLNPGDAVVMNNSRVMPARIYGVKPDTGGHAEVLLLHNTKGDEWETLMKPAKRIRVGSVISFGDGLLTATVTKELEHGGRMIEFHYDGIFMEILEKLGETPLPPYIKEKLDDPERYQTVYAKTPGSAAAPTAGLHWTKELLQKVQDKGIKLVYLTLHVGLGTFRPVDEKNIEDHKMHSEFYQLSEESAKTLNEVRENGGRIVATGTTSIRTLETIGTKFNGEIKADSGWTDIFIKPGYKWQVVDAFITNFHLPKSTLVMLVAAFTGRDNILNAYQHAIEERYRFFSFGDAMFIK

SEQ ID NO: 67963 - protein, 345 aa, Lactobacillus similis
  misc_feature (1)..(345): tr|A0A0R2ESM7|A0A0R2ESM7_9LACO S-adenosylmethionine:tRN A ribosyltransferase-isomerase OS=Lactobacillus similis DSM 23365 = JCM 2765 OX=1423804 GN=queA PE=3 SV=1
MTLTTEDFDYDLPHELIAQTPIEKRDASRLLVMDHETGELEDEHFYNIIDHLNPGDAVVMNDSRVMPARIYGVKPETGGHVEVLLLHNTQGDEWETLMKPAKRIRVGQTVTFGDDGALTATVTKELEHGGRMIEFHYDGIFMEILEKLGETPLPPYIKEKLDDPERYQTVYAKQAGSAAAPTAGLHWTKELLKKVEDKGIKLVYLTLHVGLGTFRPVDEENIEDHKMHSEFYQLSEESAKTLNEVRANGGRIVATGTTSIRTLETIGTKFHGEIKADSGWTDIFIKPGYQWQVVDAFITNFHLPKSTLVMLVAAFTGRDNILNAYQHAIEERYRFFSFGDAMFIK

SEQ ID NO: 67964 - protein, 347 aa, Lactobacillus sp.
  misc_feature (1)..(347): tr|A0A3D3IH79|A0A3D3IH79_9LACO S-adenosylmethionine:tRN A ribosyltransferase-isomerase OS=Lactobacillus sp. OX= 1591 GN=queA PE=3 SV=1
MTEEHLTTEDFDYELPEELIAQTPLEHRDQSRMLVLDSKTGKYQDDYFYNVIDRLEPGDALVMNDSRVLPARIYGVKPDTGGHLEVLLLNNIKGDQWETLIKPAKRAKVGTKISFGNGELTAVVKEELEHGGRIVEFEYDGIFLEVLESLGEMPLPPYIKEKLDDPEMYQTVYSKEVGSAAAPTAGLHFTEELLAKIEAKGVKLVYLTLHVGLGTFRPVSVDNIEEHKMHSEFYRLSEEAAKTLNEVRQNGGRIVATGTTSIRTLETIGSKFNGEIKADSGWTDIFIKPGYEWKVVNAFITNFHLPKSTLVMLVSAFTGRENILNAYRHAVKEKYRFFSFGDAMFIY

SEQ ID NO: 67965 - protein, 347 aa, Lactobacillus sp.
  misc_feature (1)..(347): tr|A0A401ISV1|A0A401ISV1_9LACO S-adenosylmethionine:tRN A ribosyltransferase-isomerase OS=Lactobacillus sp. YK4 3 OX=2163553 GN=queA PE=3 SV=1
MSEKHLTTEDFDYDLPHELIAQTPLKKRDESRMLLLDHVSGEYQDDHFYNVIDQLNPGDALVMNDSRVMPARLYGEKPATNGHLEVLLLNNTEGDQWETLVKPAKRAKVGTEIKFGDGELTATVTEELEHGGRMIEFHYDGIFMEILESLGETPLPPYIKGKLDDPEMYQTVYSKEIGSAAAPTAGLHFTKELLQKIEDKGVKLVYLTLHVGLGTFRPVSEENIEDHKMHSEFYRLSEESAQTLNEVRQNGGKIVATGTTTIRTLETIGTKFNGEIKADSGWTDIFLKPGYDWKVVQAFITNFHLPKSTLVMLVASFTGRENILNAYKHAVEERYRFFSFGDCMFIY

SEQ ID NO: 67966 - protein, 346 aa, Lactobacillus suantsaii
  misc_feature (1)..(346): tr|A0A4Q0VM89|A0A4Q0VM89_9LACO S-adenosylmethionine:tRN A ribosyltransferase-isomerase OS=Lactobacillus suantsa ii OX=2292255 GN=queA PE=3 SV=1
MLTMTTLADYDYELPPELIAQTPIEHRDASRLLVLDHRTGQLTDKHFYDILAEIHPGDAIVMNNSRVMPARLYGVKEDTGGHVEVLLLHNVAGDVWETLMKPAKRLRVGTTVSFGAGQLTATVTEEREDGIRLIEFHYQGIFMEILEQLGETPLPPYIKEKLADADRYQTVYAKENGSAAAPTAGLHWTQALLDQAVAKGAKLVYLTLHVGLGTFRPVEEENVDDHKMHSEFYRLDEKSAATLNQVRQNGGRIIATGTTSIRTLETIGTKFHGEIRADSGWTDIFIRPGYHWQVVDAFITNFHLPKSTLIMLVAAFTGREQILAAYQHAIAERYRFFSFGDAMFIK

SEQ ID NO: 67967 - protein, 350 aa, Lactobacillus sucicola
  misc_feature (1)..(350): tr|A0A0R2DPN5|A0A0R2DPN5_9LACO S-adenosylmethionine:tRN A ribosyltransferase-isomerase OS=Lactobacillus sucicol a DSM 21376 = JCM 15457 OX=1423806 GN=queA PE=3 SV=1
MTILSEEHLTTEDFDYDLPQELIAQTPLKKRDHSRMLILDSKTGTYKDDVFYNVIDQLHAGDALVMNDSRVMPARIYGIKPETGGHIEVLLLNNTQGDEWETLVKPAKRAKVGTRIVFGDGKLSAVITKELEHGGRMIRFEYQGIFMEILDELGEMPLPPYIKEKLDDPEMYQTVYSREIGSAAAPTAGLHFTKELLKKIENKGVHLVYLTLHVGLGTFRPVSVENIEDHKMHSEFYRLSEDSAKVLNEVRANGGKIVATGTTSIRTLETIGTKFNGEIHADSGWTDIFIKPGYEWKIVQAFITNFHLPKSTLVMLVSSFTGRKNILNAYKHAVDEKYRFFSFGDAMFIK

SEQ ID NO: 67968 - protein, 345 aa, Lactobacillus suebicus
  misc_feature (1)..(345): tr|A0A0R1WF05|A0A0R1WF05_9LACO S-adenosylmethionine:tRN A ribosyltransferase-isomerase OS=Lactobacillus suebicu s DSM 5007 = KCTC 3549 OX=1423807 GN=queA PE=3 SV=1
MTELTVDDFDYDLPHELIAQTPIKERDASRLLVLDHKTGEMEDKHFYNIIDQLHEGDAVVMNNSRVMPARLYGIKPDTGGHVEVLLLNNTEGDTWETLVKPAKRIRPGTVIKFGDGELTATVTEELEHGGRMIEFHYDGIFLEILEKLGETPLPPYIKEKLDDPERYQTVYAKENGSAAAPTAGLHWTKELLQKVEDKGIKLVYLTLHVGLGTFRPVDEEKIEDHKMHSEFYRLDEESAKVLNDVRKNGGRIVATGTTSIRTLETIGTKFNGEIKADSGWTDIFIKPGYDWKVVDAFITNFHLPKSTLVMLVASFTGRDTILNAYKHAIEEKYRFFSFGDAMFIK

SEQ ID NO: 67969 - protein, 346 aa, Lactobacillus sunkii
  misc_feature (1)..(346): tr|A0A1E7XDG8|A0A1E7XDG8_9LACO S-adenosylmethionine:tRN A ribosyltransferase-isomerase OS=Lactobacillus sunkii OX=481719 GN=queA PE=3 SV=1
MKTNYTLEDFDYNLPHELIAQTPIKDRDESRLLVLNKDTGEMEDRRFYNIIDYLNPGDALVMNDSKVMPARIYGVKEDTGGHMEVLLLHNIEGDRWETLMKPAKKAKVGMVINFGDGQLKAVVTKELDHGGREIEFKYDGIFIEILERLGETPLPPYIKEKLDDPNRYQTVYAKEMGSAAAPTAGLHWTKELLKKVEDKGVHLVYLTLHVGLGTFRPVDEENIEDHKMHSEFYRLSEEAAETLNSVRQNGGKIVATGTTSIRTLETVGTKFDGEIRPDSGWTDIFIKPGYDWKVVDSFITNFHLPKSTLVMLVASFTGRDNILNAYQHAIDEKYRFFSFGDAMYIH

SEQ ID NO: 67970 - protein, 346 aa, Lactobacillus sunkii
  misc_feature (1)..(346): tr|A0A0R1KZL6|A0A0R1KZL6_9LACO S-adenosylmethionine:tRN A ribosyltransferase-isomerase OS=Lactobacillus sunkii DSM 19904 OX=1423808 GN=queA PE=3 SV=1
MKTNYTLEDFDYNLPHELIAQTPIKDRDESRLLVLNKDTGEMEDRRFYNIIDYLNPGDALVMNDSKVMPARIYGVKEDTGGHMEVLLLHNIEGDRWETLMKPAKKAKVGTVINFGDGQLKAVVTKELDHGGREIEFKYDGIFIEILERLGETPLPPYIKEKLDDPNRYQTVYAKKMGSAAAPTAGLHWTKELLKKVEDKGVHLVYLTLHVGLGTFRPVDEENIEDHKMHSEFYRLSEEAAETLNSVRQNGGKIVATGTTSIRTLETVGTKFDGEIRPDSGWTDIFIKPGYDWKVVDSFITNFHLPKSTLVMLVASFTGRDNILNAYQHAIDEKYRFFSFGDAMYIH

SEQ ID NO: 67971 - protein, 344 aa, Lactobacillus tucceti
  misc_feature (1)..(344): tr|A0A0R1IXQ4|A0A0R1IXQ4_9LACO S-adenosylmethionine:tRN A ribosyltransferase-isomerase OS=Lactobacillus tucceti DSM 20183 OX=1423811 GN=queA PE=3 SV=1
MTLTTEDFDYNLPEELIAQTPIKDRDHSRLLVLDHETGKYEDKHFYDILDYLNPGDALVMNNSRVLPARLYGTKEDTDGHEEVLLLNNIEGDKWEVLMKPARRAKVGTKVQFGDGQLEATVLEELEHGGKIIEFNYEGIFLEILEKLGEMPLPPYIKEKLDDPDRYQTVYAKENGSAAAPTAGLHWTKDLLEKVQEKGIKLVYLTLHVGLGTFRPVTESDISKHVMHSEFYRLDEDSANTLNEVRKNGGKIVATGTTSIRTLETIGTKFNGEIKPDSGWTDIFIKPGYEWKVVDEFITNFHLPKSTLVMLVAAFTGRENILNAYEHAIEEKYRFFSFGDAMFIK

SEQ ID NO: 67972 - protein, 350 aa, Lactobacillus uvarum
  misc_feature (1)..(350): tr|A0A0R1Q8K3|A0A0R1Q8K3_9LACO S-adenosylmethionine:tRN A ribosyltransferase-isomerase OS=Lactobacillus uvarum DSM 19971 OX=1423812 GN=queA PE=3 SV=1
MTILSEEHLTTEDFDYNLPQELIAQTPLKERDHSRMLILDSKTGTYKDDVFYNVIDQLNAGDALVMNDSRVMPARIYGIKPETGGHIEVLLLNNTQGDEWETLVKPAKRAKVGTRISFGDGKLSAVITKELEHGGRMIKFEYEGIFMEILDELGEMPLPPYIKEKLDDPEMYQTVYSREVGSAAAPTAGLHFTKELLHKIEDKGVHLVYLTLHVGLGTFRPVSVENIEDHKMHSEFYRLSEESAKILNDVRANGGRIVATGTTSIRTLETIGTKFKGEIHADSGWTDIFIKPGYDWKVVQAFITNFHLPKSTLVMLVSAFTGRKNILNAYKHAVEEKYRFFSFGDAMFIK

SEQ ID NO: 67973 - protein, 346 aa, Lactobacillus vaccinostercus
  misc_feature (1)..(346): tr|A0A0R2AAG4|A0A0R2AAG4_9LACO S-adenosylmethionine:tRN A ribosyltransferase-isomerase OS=Lactobacillus vaccino stercus DSM 20634 OX=1423813 GN=queA PE=3 SV=1
MMTELTVDDFDYDLPHELIAQTPIKKRDASRLLVLDHKTGQMQDQHFYDILDQLHAGDAVVMNNSRVLPARLYGVKPDTGGHVEVLLLNNTEGDVWETLVKPAKRIKPGTEIKFGDGELTATVTEELEHGGRMIEFHYDGIFLEVLEKLGETPLPPYIKEKLDDPERYQTVYAKENGSAAAPTAGLHWTKELLQKVEEKGVKLVYLTLHVGLGTFRPVDEKNIEDHKMHSEFYRLDAQSAQTLNDVRANGGRIIATGTTSIRTLETIGSKFDGEIKPDSGWTDIFIKPGYDWKVVDAFITNFHLPKSTLVMLVASFTGRDTILNAYQHAIEEKYRFFSFGDAMFIK

SEQ ID NO: 67974 - protein, 344 aa, Lactobacillus versmoldensis
  misc_feature (1)..(344): tr|A0A0R1SIM3|A0A0R1SIM3_9LACO S-adenosylmethionine:tRN A ribosyltransferase-isomerase OS=Lactobacillus versmol densis DSM 14857 = KCTC 3814 OX=1423815 GN=queA PE=3 SV =1
MTLTTEDFDYDLPEELIAQTPIKDRDHSRLLVLDHDTGAYEDKHFYDILDYLNPGDALVMNNSRVLPARLYGSKEDTDGHEEVLLLNNTEGDKWEVLMKPARRAHPGTVITFGDGQLKATVLEDLEHGGKIIEFHYDGIFLEILERLGEMPLPPYIKEKLDDPDRYQTVYAKENGSAAAPTAGLHWTKDLLEKVQEKGVKLVYLTLHVGLGTFRPVTESDISKHVMHSEFYRLDEDSAKTLNDVRKNGGKIVATGTTSIRTLETIGTKFNGEIKPDSGWTDIFIKPGYEWKVVDEFITNFHLPKSTLVMLVAAFTGRENILNAYQHAIEEKYRFFSFGDAMFIK

SEQ ID NO: 67975 - protein, 350 aa, Lactobacillus vini
  misc_feature (1)..(350): tr|A0A0R2CC21|A0A0R2CC21_9LACO S-adenosylmethionine:tRN A ribosyltransferase-isomerase OS=Lactobacillus vini DS M 20605 OX=1133569 GN=queA PE=3 SV=1
MEILTEEHLTTEDFDYELPKELIAQTPLKQRDHSRLLILDSQTGKYQDDIFYNVINQLNPGDALVMNDSRVMPARLYGEKPDTGGHLEVLLLNNTDGDNWETLIKPARRAKIGTKITFGNGELKAVVTKELEHGGRMIRFEYDGIFMEILDRLGEMPLPPYIKQKLEDPEMYQTVYSREIGSAAAPTAGLHFTKELLQKIAEKGVRLVYLTLHVGLGTFRPVSEKNIKDHQMHSEFYRLSEDAAQTLNEVRKNGGRIVATGTTVIRTLETIGTKFKGEIKADSGWTDIFIYPGYQWKVVQAFITNFHLPKSTLVMLVASFTGRENILNAYRHAVSQKYRFFSFGDAMFIK

SEQ ID NO: 67976 - protein, 345 aa, Lactobacillus wasatchensis
  misc_feature (1)..(345): tr|A0A0D1A6A2|A0A0D1A6A2_9LACO S-adenosylmethionine:tRN A ribosyltransferase-isomerase OS=Lactobacillus wasatch ensis OX=1335616 GN=queA PE=3 SV=1
MSELTVNDFDYDLPHELIAQTPIKERDASRLLVLDHQTGEMKDKHFYDILDQLNPGDAVVMNNSRVLPARLYGVKSETGGHVEVLLLNNTEGNTWETLVKPAKKLKTGTQITFGDGELTATIKEELEHGGRMIEFHYDGIFMEVLEKLGETPLPPYIKEKLDDPERYQTVYAKENGSAAAPTAGLHWTKGLLQKVQDKGIKLVYLTLHVGLGTFRPVDEEKIEDHKMHSEFYRLDEQSAQTLNEVRQKGGRIIATGTTSIRTLETIGSKFNGAIKADSGWTDIFIKPGYEWKVVDAFITNFHLPKSTLVMLVAAFTGRDKILTAYQHAIAEKYRFFSFGDAMFIK

SEQ ID NO: 67977 - protein, 344 aa, Lactobacillus xiangfangensis
  misc_feature (1)..(344): tr|A0A0R2M072|A0A0R2M072_9LACO S-adenosylmethionine:tRN A ribosyltransferase-isomerase OS=Lactobacillus xiangfa ngensis OX=942150 GN=queA PE=3 SV=1
MSLTLEDFDYDLPHELIAQTPIKQRDTSRLLELDRKTGVMQDKHFYDIIDQLNPGDAVVMNNSRVMPARLYGVKPETGGHAEVLLLHNTEGDEWETLMKPAKRAHVGTVISFGDGKLTATVTAEKEDGIRMIEFHYDGIFMEILESLGETPLPPYIKEKLDDPDRYQTVYAKENGSAAAPTAGLHWTKDLLQKVQDKGVKLVYLTLHVGLGTFRPVEEDNIEDHKMHSEFYRLDEDAAKTLNEVRQNGGRIIATGTTSIRTLETVGTKFNGEIKPDSGWTDIFIKPGYQWKVVDAFITNFHLPKSTLVMLVAAFTGRDMILNAYQHAIDERYRFFSFGDAMFIH

SEQ ID NO: 67978 - protein, 361 aa, Lactobacillus zeae
  misc_feature (1)..(361): tr|A0A0R1EZ78|A0A0R1EZ78_LACZE S-adenosylmethionine:tRN A ribosyltransferase-isomerase OS=Lactobacillus zeae DS M 20178 = KCTC 3804 OX=1423816 GN=queA PE=3 SV=1
MEANKVQDKKRYRQVENKNYQLSDFDYDLPHELIAQTPLKERDASRLLVLNADTGAMQDRHFYDILDYFKPGDALVMNDTRVMPARLYGVKPETGAHMEVLLLNNTSGDDWETLMKPARKAPVGTVIDFGDGLLKATVTKELDHGGRMIHFDYDGIFMEILDKLGETPLPPYIKEKLEDPEMYQTVYSKELGSAAAPTAGLHWTKELLKKVQDKGVKLVYLTLHVGLGTFRPVVEENIEAHKMHSEFYRLTPEAAATLNEVRDNGGRIIATGTTSIRTLEAIGTKFDGEIKPDSGWTDIFIKPGYQWKVVDAFITNFHLPKSTLVMLVAAFTGRDTILNAYKHAIEEKYRFFSFGDAMFIY

SEQ ID NO: 67979 - protein, 344 aa, Lactobacillus zymae
  misc_feature (1)..(344): tr|A0A1Y6JXG6|A0A1Y6JXG6_9LACO S-adenosylmethionine:tRN A ribosyltransferase-isomerase OS=Lactobacillus zymae O X=267363 GN=queA PE=3 SV=1
MTETLADFDYDLPHELIAQTPIKQRDTSRLLVLNHQTGDLADKHFYDILAELRPGDAVVLNSSRVMPARLYGVKPETGGHVEVLLLHNVAGDVWETLMKPAKRLRVGTTVSFGDGQLTATITEEREDGIRLIEFHYDGIFMEILERLGETPLPPYIKAKLDDPDRYQTIYAKENGSAAAPTAGLHWTQELLDQVVAKGVKLVYLTLHVGLGTFRPVEERNIDDHKMHSEFYRLDEQAARTLNDVRAHGGRIVATGTTSIRTLETIGTKFHGQLRADSGWTDIFIKPGYQWQVVDAFITNFHLPKSTLVMLVAAFTGRERILNAYQHAIAEKYRFFSFGDATFIK

SEQ ID NO: 67980 - protein, 344 aa, Lactobacillus zymae
  misc_feature (1)..(344): tr|A0A0R1MRE4|A0A0R1MRE4_9LACO S-adenosylmethionine:tRN A ribosyltransferase-isomerase OS=Lactobacillus zymae D SM 19395 OX=1423817 GN=queA PE=3 SV=1
MTETLADFDYDLPHELIAQTPIKQRDTSRLLVLDHQTGDLADKHFYDILAELHPGDAVVLNNSRVMPARLYGVKPETGGHVEVLLLHNVAGDVWETLMKPAKRLRVGTTVSFGDGQLTATITEEREDGIRLIEFHYDGIFMEILERLGETPLPPYIKAKLDDPDRYQTIYAKENGSAAAPTAGLHWTQELLNQVVAKGVKLVYLTLHVGLGTFRPVEERNIDDHKMHSEFYRLDEQAARTLNDVRAHGGRIVATGTTSIRTLETIGTKFHGQLRADSGWTDIFIKPGYQWQVVDAFITNFHLPKSTLVMLVAAFTGRERILNAYQHAIAEKYRFFSFGDAMFIK

SEQ ID NO: 67981 - protein, 343 aa, Lactococcus chungangensis
  misc_feature (1)..(343): tr|A0A1K2H4D2|A0A1K2H4D2_9LACT S-adenosylmethionine:tRN A ribosyltransferase-isomerase OS=Lactococcus chungange nsis CAU 28 = DSM 22330 OX=1122154 GN=queA PE=3 SV=1
MNIEDFNFDLPEELIAQTPLEKRSESRLLVIDKTAQTMTDKHFYDIIDELETGDTLVLNNTRVLPARLHGQKADTGGHIELLLLKNTVADTWEVLAKPAKKLKNGTVISFGDGRLTATVIDDSLDHGGRIVTFNYDGIFLEVLESLGEMPLPPYIHEKLKDQGRYQTVYAKENGSAAAPTAGLHFTDDLLAQIKAKGVNIAWVTLHVGLGTFRPVSVDNIEEHDMHSEFYVLPEETADVINTTKAAGKRVIAVGTTSIRTLESVAQKFGGKVQDDSDWTNIFIKPGYKFQVVDAFSTNFHLPKSTLVMLVSAFAGREFVLDAYQHAIDEHYRFFSFGDAMFVK

SEQ ID NO: 67982 - protein, 345 aa, Lactococcus fujiensis
  misc_feature (1)..(345): tr|A0A2A5RQ73|A0A2A5RQ73_9LACT S-adenosylmethionine:tRN A ribosyltransferase-isomerase OS=Lactococcus fujiensis JCM 16395 OX=1291764 GN=queA PE=3 SV=1
MNINDFDFNLPEELIAQTPLKVRDSSRLLVLDPKTGQMEDKHFTDILDEFEAGDALVLNNTRVLPARLHGVKPDTQGHVELLLLKDKGNNEWETLAKPARRLHPGSEISFGDGRLKATVLEDLEHGGKIVKFAYDGIFLEVLESLGEMPLPPYIHEQLEDQERYQTVYAKENGSAAAPTAGLHYTPELLEAIKAKGVHIVELTLHVGLGTFRPVSVENVDEHIMHSEFYRLTEDAAAELRAVKSSGHKIVASGTTSIRTLETIGTKFNGDIQADSGWTDIFIKPGYDWKVVDAFNTNFHLPKSTLVMLVASFAGREFVLEAYKHAVDERYRFFSFGDAMFVKPKN

SEQ ID NO: 67983 - protein, 342 aa, Lactococcus garvieae
  misc_feature (1)..(342): tr|F9VEH5|F9VEH5_LACGL S-adenosylmethionine:tRNA ribosy ltransferase-isomerase OS=Lactococcus garvieae (strain Lg2) OX=420890 GN=queA PE=3 SV=1
MNINDFDFNLPEELIAQTPLEKRSESKLLVLDKESHSMEDKHFYDIVDELNPGDALVLNNTRVLPARLYGVKPETQGHVELLLLKNTEGDQWETLAKPAKRMRIGQELSFGDGRLKATVVEELEHGGRIVEFSYDGIFLEVLESLGEMPLPPYIHEKLEDQERYQTVFAKENGSAAAPTAGLHYTPELLDKIRAKGVHVVELTLHVGLGTFRPVSVDNIEEHHMHSEFYQLSEEAAATLRAVKASGHRVIACGTTSIRTLETIGTKFDGDIQADSGWTDIFIKPGYQWKVVDAFNTNFHLPKSTLVMLVAAFAGQEFILEAYQHAIDEHYRFFSFGDAMFVK

SEQ ID NO: 67984 - protein, 342 aa, Lactococcus garvieae; identical to SEQ ID NO: 67983
  misc_feature (1)..(342): tr|V8APP1|V8APP1_9LACT S-adenosylmethionine:tRNA ribosy ltransferase-isomerase OS=Lactococcus garvieae TRF1 OX= 1380772 GN=queA PE=3 SV=1

SEQ ID NO: 67985 - protein, 345 aa, Lactococcus lactis
  misc_feature (1)..(345): sp|Q9CFA6|QUEA_LACLA S-adenosylmethionine:tRNA ribosylt ransferase-isomerase OS=Lactococcus lactis subsp. lacti s (strain IL1403) OX=272623 GN=queA PE=3 SV=1
MNINDFDFDLPEELIAQTPLEKRSESRLLILDPKTEELEDRHFYNIIDELEAGDALVLNNTRVLPARLHGERAETGGHIELLLLKDMGQNRWETLAKPARKMKVGEEVVFGDGRLKAVVVEVLDHGGRIVEFKYDGIFLEILESLGEMPLPPYIHEQLQDQERYQTVFAKENGSAAAPTAGLHYTPELLEKIADKGVKIVELTLHVGLGTFRPVSVDNVDEHQMHSEFYRLTEEAAAQLRAVKASGHKIVASGTTSIRTLETIGSKFDGDIQADSGWTDIFIKPGYEWKVVDAFNTNFHLPKSTLVMLVAAFAGRDFVLDAYQHAIDEKYRFFSFGDAMFVRPKK

SEQ ID NO: 67986 - protein, 346 aa, Lactococcus lactis
  misc_feature (1)..(346): sp|A2RJR5|QUEA_LACLM S-adenosylmethionine:tRNA ribosylt ransferase-isomerase OS=Lactococcus lactis subsp. cremo ris (strain MG1363) OX=416870 GN=queA PE=3 SV=1
MNINDFDFDLPEELIAQTPLEKRSESRLLILDPKTEELEDRHFYDIIDELEAGDALVLNNTRVLPARLHGERAETGGHIELLLLKDMGENRWETLAKPARKMKVGEEVVFGDGRLKAVVVEILEHGGRIVEFKYDGIFLEILESLGEMPLPPYIHEQLEDQERYQTVFAKENGSAAAPTAGLHYTPELLEKIADKGVKIVELTLHVGLGTFRPVSVDNVDEHHMHSEFYRLTEEAAAQLRAVKASGHKIFASGTTSIRTLETIGSKFDGDIQADSGWTDIFIKPGYEWKVVDAFNTNFHLPKSTLVMLVAAFAGRDFVLEAYQHAIDEKYRFFSFGDAMFVRSKNK

SEQ ID NO: 67987 - protein, 342 aa, Lactococcus petauri
  misc_feature (1)..(342): tr|A0A252CCK9|A0A252CCK9_9LACT S-adenosylmethionine:tRN A ribosyltransferase-isomerase OS=Lactococcus petauri O X=1940789 GN=queA PE=3 SV=1
MNINDFDFNLPEELIAQTPLEKRSESKLLVLDKESHSMEDKHFYDIVDELNPGDALVLNNTRVLPARLYGVKPETQGHVELLLLKNTEGDQWETLAKPAKRMRIGQELSFGDGRLKATVVEELEHGGRIVEFSYDGIFLEVLESLGEMPLPPYIHEKLEDQERYQTVFAKENGSAAAPTAGLHYTPELLDKIRAKGVHVVELTLHVGLGTFRPVSVDNIEEHHMHSEFYQLSEEAAATLRAVKASGHRVIACGTTSIRTLETIGTKFDGDIQADSGWTDIFIKPGYQWKVVDAFNTNFHLPKSTLVMLVAAFAGQDFILEAYQHAIDEHYRFFSFGDAMFVK

SEQ ID NO: 67988 - protein, 343 aa, Lactococcus piscium
  misc_feature (1)..(343): tr|A0A1C3SXE1|A0A1C3SXE1_9LACT S-adenosylmethionine:tRN A ribosyltransferase-isomerase OS=Lactococcus piscium O X=1364 GN=queA PE=3 SV=1
MNIEDFNFDLPETLIAQTPLEHRSESRLLVIDKTKQTMTDKHFFDIIDELNSGDTLVLNNTRVLPARLHGQKADTGGHIELLLLKNTVDDTWEVLAKPAKKLKNGTMITFGDGRLTATVVDDSLDHGGRIVTFTYDGIFLEVLESLGEMPLPPYIHEKLADQGRYQTVYAKENGSAAAPTAGLHFTDDLLAQIKAKGVNIAWVTLHVGLGTFRPVSVDNIEEHDMHSEFYILPQETADIINETKAAGKRVIAVGTTSIRTLESVAKKFDGQVQADSDWTNIFIKPGYQFQVVDAFSTNFHLPKSTLVMLVSAFAGREFVLSAYQHAIDEHYRFFSFGDAMFVK

SEQ ID NO: 67989 - protein, 343 aa, Lactococcus piscium
  misc_feature (1)..(343): tr|A0A0D6DXP3|A0A0D6DXP3_9LACT S-adenosylmethionine:tRN A ribosyltransferase-isomerase OS=Lactococcus piscium M KFS47 OX=297352 GN=queA PE=3 SV=1
MNIEDFNFDLPETLIAQTPLEHRSESRLLVIDKTKQTMTDKHFFDIIDELNSGDTLVLNNTRVLPARLHGQKADTGGHIELLLLKNTVDDTWEVLAKPAKKLKNGTKITFGDGRLTATVVDDSLDHGGRIVTFNYDGIFLEVLESLGEMPLPPYIHEKLADQGRYQTVYAKENGSAAAPTAGLHFTDDLLAQIKAEGVNIAWVTLHVGLGTFRPVSVDNIEEHDMHSEFYILPQETADIINETKAAGKRVIAVGTTSIRTLESVAKKFDGQVQADSDWTNIFIKPGYQFQVVDAFSTNFHLPKSTLVMLVSAFAGREFVLSAYQHAIDEHYRFFSFGDAMFVK

SEQ ID NO: 67990 - protein, 343 aa, Lactococcus plantarum
  misc_feature (1)..(343): tr|A0A2A5S1W0|A0A2A5S1W0_9LACT S-adenosylmethionine:tRN A ribosyltransferase-isomerase OS=Lactococcus plantarum OX=1365 GN=queA PE=3 SV=1
MNIEAFDFDLPEALIAQTPLEHRSESRLLVIDKATHTMADKHFFDIVDELHTGDTLVLNNTRVLPARLHGEKADTGGHIELLLLKNKVDDTWEVLAKPAKKLKNGTVIKFGDGRLTATVIDDSLDHGGRIVTFNYDGIFLEVLESLGEMPLPPYIHEKLADQGRYQTVYAKENGSAAAPTAGLHFTDDLLDKIKAKGVNIAWVTLHVGLGTFRPVSVDNIEEHDMHSEFYILPQETADVINATKKAGKRVIAVGTTSIRTLESVAQKFDGQVKADSDWTKIFIKPGYTFQVVDAFSTNFHLPKSTLVMLVSAFAGREFVLDAYQHAIDEHYRFFSFGDAMFVK

SEQ ID NO: 67991 - protein, 343 aa, Lactococcus raffinolactis
  misc_feature (1)..(343): tr|A0A2A5SDG5|A0A2A5SDG5_9LACT S-adenosylmethionine:tRN A ribosyltransferase-isomerase OS=Lactococcus raffinola ctis OX=1366 GN=queA PE=3 SV=1
MNIEDFNFDLPEALIAQTPLEKRSESRLLIIDKATQTMTDQHFYNIIDELETGDTLVLNNTRVLPARLHGQKADTGGHIELLLLKNTVDDTWEVLAKPAKKLKNGTVISFGDGRLTATVVDDTLDHGGRIVTFNYDGIFLEVLESLGEMPLPPYIHEKLKDQGRYQTVYAKENGSAAAPTAGLHFTDDLLAQIKAKGVNIAWVTLHVGLGTFRPVSVDNIEEHDMHSEFYILPEETAAIINATKTAGKRVIAVGTTSIRTLESVAQKFGGKVQADSDWTNIFIKPGYKFQVVDAFSTNFHLPKSTLVMLVSAFAGREFVLEAYQHAIDEHYRFFSFGDAMFVK

SEQ ID NO: 67992 - protein, 343 aa, Lactococcus raffinolactis
  misc_feature (1)..(343): tr|I7L626|I7L626_9LACT S-adenosylmethionine:tRNA ribosy ltransferase-isomerase OS=Lactococcus raffinolactis 487 7 OX=1215915 GN=queA PE=3 SV=1
MNIEDFNFDLPEELIAQTPLEKRSESRLLVIDKATQTMADKHFYDIIDELETGDTLVLNNTRVLPARLHGQKADTGGHIELLLLKNTVADTWEVLAKPAKKLKNGTVISFGDGRLTATVIDDTLDHGGRIVTFNYDGIFLEVLESLGEMPLPPYIHEKLKDQGRYQTVYAKENGSAAAPTAGLHFTDELLAQIKTKGVNIAWVTLHVGLGTFRPVSVDNIEEHDMHSEFYILPEETADVINATKAAGKRVIAVGTTSIRTLESVAQKFGGKVQADSDWTNIFIKPGYKFQVVDAFSTNFHLPKSTLVMLVSAFAGREFVLDAYQHAIDEHYRFFSFGDAMFVK

SEQ ID NO: 67993 - protein, 343 aa, Lactococcus reticulitermitis
  misc_feature (1)..(343): tr|A0A224WW02|A0A224WW02_9LACT S-adenosylmethionine:tRN A ribosyltransferase-isomerase OS=Lactococcus reticulit ermitis OX=2025039 GN=queA PE=3 SV=1
MNIEDFNFDLPEALIAQTPLEKRSESRLLVIDKATQTMTDQHFYDIIDELEAGDTLVLNNTRVLPARLHGQKADTGGHIELLLLKNTVDDTWEVLAKPAKKLKNGTVISFGDGRLTARVVDDSLDHGGRIVTFNYEGIFLEVLESLGEMPLPPYIHEKLKDQGRYQTVYAKENGSAAAPTAGLHFTDDLLAQIKAKGVNIAWVTLHVGLGTFRPVSVDNIEEHEMHSEFYILPEETADVITATKAAGKRVIAVGTTSIRTLESVAQKFGGKVQADSDWTTIFIKPGYKFQVVDAFSTNFHLPKSTLVMLVSAFAGRDFVLAAYQHAIDEHYRFFSFGDAMFVK

SEQ ID NO: 67994 - protein, 345 aa, Lactococcus sp.
  misc_feature (1)..(345): tr|A0A387B9W7|A0A387B9W7_9LACT S-adenosylmethionine:tRN A ribosyltransferase-isomerase OS=Lactococcus sp. 1JSPR -7 OX=2419773 GN=queA PE=3 SV=1
MNINDFDFDLPEELIAQTPLEKRSESRLLVLDPKTHQMQDKHFYNIIDELESGDALVLNNTRVLPARLHGVRSETKGHIELLLLKDLGENRWETLAKPARKMKVGEQVIFGDGRLSAVVIEILEHGGRIVEFHYDGIFLEILESLGEMPLPPYIHEQLEDQERYQTVFAKENGSAAAPTAGLHYTPELLQAIEDKGVKIVELTLHVGLGTFRPVSVDNVDEHHMHSEFYQLSEEAAKTLREVKTSGHKVVACGTTSIRTLETIGSKFKGDIQADSGWTDIFIKPGYEWKVVDAFNTNFHLPKSTLVMLVAAFAGRDFVLEAYQHAVDEKYRFFSFGDAMFVRTKS

SEQ ID NO: 67995 - protein, 345 aa, Lactococcus sp.
  misc_feature (1)..(345): tr|A0A5C8KA29|A0A5C8KA29_9LACT S-adenosylmethionine:tRN A ribosyltransferase-isomerase OS=Lactococcus sp. dk310 OX=2603289 GN=queA PE=3 SV=1
MNINDFDFELPEELIAQTPLKIRDSSRLLVLDPKAHEMKDQHFTDILDQFEAGDALVLNNTRVLPARLHGVKPDTQGHVELLLLKDKGDNQWETLAKPARRLHPGSEIIFGDGRLKATIIEDLEHGGKIVKFSYEGIFLEVLESLGEMPLPPYIHEQLEDQERYQTVYAKENGSAAAPTAGLHYTPELLAAIKAKGVHIVELTLHVGLGTFRPVSVENVDEHIMHSEFYRLTEEAAAELRAVKAAGHKIVASGTTSIRTLETIGTKFNGDIQADSGWTDIFIKPGYEWKVVDAFNTNFHLPKSTLVMLVASFAGRDFVLDAYKHAVDERYRFFSFGDAMFVKPKK

SEQ ID NO: 67996 - protein, 343 aa, Lactococcus termiticola
  misc_feature (1)..(343): tr|A0A2R5HDZ2|A0A2R5HDZ2_9LACT S-adenosylmethionine:tRN A ribosyltransferase-isomerase OS=Lactococcus termitico la OX=2169526 GN=queA PE=3 SV=1
MLDINDFDFELPEELIAQTPLEQRSNSRLLVLDKDAKSMEDKHFFDIVDEMNEGDALVLNNTRVLPARLYGERAETHGHVELLLLKDLGGNRWETLAKPARKMTVGQKVIFGDGRLSATIVEELEHGGRIVEFSYEGIFLEVLESLGEMPLPPYIHEKLEDQERYQTVYAKVNGSAAAPTAGLHYTPELLDAIRAKGVKIVELTLHVGLGTFRPVSVDNIEDHHMHSEFYQLSEEAAATLREVKASGHRIIASGTTSIRTLETIGTKFDGDIQADSGWTDIFIKPGYDWKVVDAFNTNFHLPKSTLVMLVSAFAGRDFVLDAYQHAIDEHYRFFSFGDAMFIK

SEQ ID NO: 67997 - protein, 341 aa, Lactonifactor longoviformis
  misc_feature (1)..(341): tr|A0A1M4WYX8|A0A1M4WYX8_9CLOT S-adenosylmethionine:tRN A ribosyltransferase-isomerase OS=Lactonifactor longovi formis DSM 17459 OX=1122155 GN=queA PE=3 SV=1
MKTSDFYYDLPQELIAQDPLEDRSASRLLHLDPLTGEIEHRIFKDVVQYLNPGDCLVVNDTRVIPARLYGTKEGTEAGIEILLLKRKPDDVWETLVKPGKKAKIGTKISFGDGILRGEVIDIVEEGNRLIRFTYDGIFEEILDRLGEMPLPPYITHKLQDKERYQTVYAKHEGSAAAPTAGLHFTEPLLEEIKKKGVHIAHVTLHVGLGTFRPVKVEDVTQHHMHSEYYVVEEEQAKLINDAKKRGNKVISVGTTSCRTLESAAGEDGMVRAQSGWTDIFIYPGYQFKVIDGLITNFHLPESTLLMLVSALAGKQHIMAAYEEAVRERYRFFSFGDAMLIL

SEQ ID NO: 67998 - protein, 400 aa, Lacunisphaera limnophila
  misc_feature (1)..(400): tr|A0A1D8AQZ0|A0A1D8AQZ0_9BACT S-adenosylmethionine:tRN A ribosyltransferase-isomerase OS=Lacunisphaera limnoph ila OX=1838286 GN=queA PE=3 SV=1
MSPLSTDLFDYPLPERLIAQSPAQQRDASRLLVVDRSTRTLAHRHFRDLPDYLRAGDTLFRNNAAVIPARLHATRPTGGQVECLLLRPAVDTAGLPAVLSAIGPATAEATQSPSRMESPPSPSLRRTASALTSLGEGWWCLLRPGKKLPVGATFGLAGAFTATVLEKTDDGLARVAFTTTGGDLLAVANRIGDMPLPPYISGHENAADRTTDRERYQTVYADRGHQVAAAAPTAGLHFTPELLTRIAGQGVTFADLTLHVGLGTFRPIMTDTIQDHAIHREVYEIPVATQQALFAGQGRRIAVGTTSVRSIEDYLSRTTSAMPQDWMAEAGIFIYPPRPFRGVDALITNFHQPRSTLLCLVSAFLTPGSTEGIAWLKDIYAEAVAEEYRFFSYGDAMLIL

SEQ ID NO: 67999 - protein, 387 aa, Lacunisphaera sp.
  misc_feature (1)..(387): tr|A0A4Q1C371|A0A4Q1C371_9BACT S-adenosylmethionine:tRN A ribosyltransferase-isomerase OS=Lacunisphaera sp. TWA -58 OX=2508720 GN=queA PE=3 SV=1
MNADLFDYSLPERLIAQQPAQRRDESRLLVVDRKNRSLAHRQFRDLPEYLRAGDTLFRNNAAVIPARLHAVRPTGGAVECLLLRPAVAPVQVSGFSASVSQSENRGQTPGGQQSATAKSQVSQEWWCLIRPGKKLPVGASFGLEHQFTGTVLEKTEDGLARVSFTTTDGDILAVANRIGEMPLPPYITGHESAEAHRLDRERYQTVYADRGHQVAAAAPTAGLHFTPELLAKVSALGVSCADLTLHVGLGTFRPITAERIEDHAIHREVYEMPVVTQRALFETKGRRIAVGTTSVRSIEDYLSRTNAPSTDAWMAEASIFIYPPRSFRGVDALITNFHQPRSTLLCLVSSFLTPGSMDGINWLKEIYAEAIAREYRFFSYGDAMLIL

SEQ ID NO: 68000 - protein, 373 aa, Lampropedia cohaerens
  misc_feature (1)..(373): tr|A0A0U1PYS7|A0A0U1PYS7_9BURK S-adenosylmethionine:tRN A ribosyltransferase-isomerase OS=Lampropedia cohaerens OX=1610491 GN=queA PE=3 SV=1
MVGFACLAMSERRYTLADFDYPLPEELIAHHPAPVRSASRLLDGRQWPAQDRVFHDLPALLAPGDLLIFNDTKVVKARIFGEKASGGKLEILIERVLEDDQVAVHLRVSKKPAVGATLHFAGGLAHGGFDATLLGRYPGADGPLFCLQLQLPPGETAWSVMERFGHLPLPPYIERHQADGDDADAAEDAERYQTVFARKPGAVAAPTAALHFDAATLQALQDKGIERAGITLHVGAGTFQPVKTEDIGQHRMHSEYYEIPAATLAAIDACRARGGRVVAVGTTSVRTLESWAQTGQTRGDTQIFITPGFRFRVVDLLVTNFHLPKSTLMMLVSAFAGYDHIRRLYAHAIAGRYRFFSYGDSMLLQRTESPQAS

SEQ ID NO: 68001 - protein, 368 aa, Lampropedia hyalina
  misc_feature (1)..(368): tr|A0A1M4YRJ7|A0A1M4YRJ7_9BURK S-adenosylmethionine:tRN A ribosyltransferase-isomerase OS=Lampropedia hyalina D SM 16112 OX=1122156 GN=queA PE=3 SV=1
MTTPQTQPHTLSDFDYVLPPELIAQHPTAQRSASRLLDGRHLPPADRHFHDLPQLLQAGDLLVFNDTRVVRARIFGEKASGGKLEILIERVLGGDEVAVHLKVSKKPAIGGLLHLAGGLHDGGFDAVLLGRYPHADGPLFRLRLIGPPDATPWSLMEQHGHLPLPPYIARQQAADFDPDEAEDNERYQTVFAREPGAVAAPTAALHFDAAVLEQLAQRGVQRANLTLHVGAGTFQPVKTENIAEHRMHSEWYHIPASTVQAIADCKARGGRVVAVGTTSVRTLESWARSGQTEGDTQIFITPGFDFQVVDVLITNFHLPKSTLMMLVSAFAGYTHIRQLYEHAVAQQYRFFSYGDSMLLERQPLSASR

SEQ ID NO: 68002 - protein, 361 aa, Lampropedia puyangensis
  misc_feature (1)..(361): tr|A0A4S8FCI1|A0A4S8FCI1_9BURK S-adenosylmethionine:tRN A ribosyltransferase-isomerase OS=Lampropedia puyangens is OX=1330072 GN=queA PE=3 SV=1
MSLPVYSLADFDYDLPEALIAHHPAQERSASRLLDGRSWPPVDRIFRDLPGLLRKGDLLVFNDTQVVKARIFGEKASGGKLEILIERVLDERHIAVHLRVSKKPLPGSLMHFAGGLRQGGFDAVMQGRYPDADGPLFLLQVNAPEGQTPWTLMERFGHLPLPPYIERHQQGNDPDAKEDAERYQTVFAREPGAVAAPTAALHFDEPTLQALQAQGVERANITLHVGAGTFQPVKTEDLSQHRMHSEYYHIPQSTVDAINACKARGGRVIAVGTTSVRTLESWAKTGQTQGDTQIFITPGFRFEVVDVLVTNFHLPKSTLMMLVSAFAGYEHIRQIYQHAIAQQYRFFSYGDSMLLSRLQPA

SEQ ID NO: 68003 - protein, 364 aa, Lampropedia sp.
  misc_feature (1)..(364): tr|A0A4S5BJC0|A0A4S5BJC0_9BURK S-adenosylmethionine:tRN A ribosyltransferase-isomerase OS=Lampropedia sp. YIM M LB12 OX=2562762 GN=queA PE=3 SV=1
MPPVSYTLADFDYDLPEALIAHHPAEQRSASRLLDARSAQLQDRIFRDLPGLLQAGDLLVFNDTQVVKARIFGEKASGGKLEILIERVLDEQHVAVHLRVSKKPLPGSTMHFAGGLQQGGFDAVMQGRYPDADGPLFLFKIQAPEGQTPWSLMERFGHLPLPPYIERHQQENDLDAEEDAERYQTVFAREPGAVAAPTAALHFDQMTLDALQANGIERANITLHVGAGTFQPVKTEDLSQHRMHSEYYHIPDSTLAAIAACKARGGRVVAVGTTSVRTLESWAKTGKTQGDTQIFITPGFAFQVVDVLITNFHLPKSTLMMLVSAFAGYEHIRHVYQHAIAQQYRFFSYGDSMLLSRVAPATAV

SEQ ID NO: 68004 - protein, 380 aa, Laribacter hongkongensis
  misc_feature (1)..(380): tr|A0A248LF17|A0A248LF17_9NEIS S-adenosylmethionine:tRN A ribosyltransferase-isomerase OS=Laribacter hongkongen sis OX=168471 GN=queA PE=3 SV=1
MQNFPSPPASMENPPHACATPCRRVTYNRPVFPSADAMQLSDFDYHLPEHLIAQFPPAERGNSRLLHVSPAGLADLQFADLPGLLSPDDLLVVNDTRVIKARLFGRKASGGAVEALVERVLDERTALAHVRASKSPKPGSRLVFADRWEAEMVERQGELFLLRFPGDTSVLDILDAAGHLPLPPYITRSAGDNDDERYQTIYAREQGAVAAPTAGLHFTDGLMAAIRTRGIDVARVTLHVGAGTFQPVRVDNIAEHKMHSERFVIPQATVDAIASCRARGGRVVAVGTTSMRALEAGAQSGELRAGPSETDIFITPGYRFRVVDRLVTNFHLPKSTLMMLVSAFAGTETIRVAYRHAIERQYRFFSYGDAMLLERQDAQP

SEQ ID NO: 68005 - protein, 380 aa, Laribacter hongkongensis
  misc_feature (1)..(380): tr|C1DCV5|C1DCV5_LARHH S-adenosylmethionine:tRNA ribosy ltransferase-isomerase OS=Laribacter hongkongensis (str ain HLHK9) OX=557598 GN=queA PE=3 SV=1
MQNFPSPPASMENPPHACATPCRRVTYNRPVFPSADAMQLSDFDYHLPEHLIAQFPPAERGNSRLLHVSPAGLADLQFADLPGLLSPDDLLVVNDTRVIKARLFGRKASGGAVEALVERVLDERTALAHVRASKSPKPGSRLVFADRWEAEMVERQGELFLLRFPGDTSVLDILDAAGHLPLPPYITRSAGDNDDERYQTIYAREQGAVAAPTAGLHFTDGLMAAIRARGIDVARVTLHVGAGTFQPVRVDNIAEHKMHSERFVIPQATVDAIAACRARGGRVVAVGTTSMRALEAGAQSGELRAGPSETDIFITPGYRFRVVDRLVTNFHLPKSTLMMLVSAFAGTETIRAAYRHAIERQYRFFSYGDAMLLERQDAQP

SEQ ID NO: 68006 - protein, 347 aa, Larkinella arboricola
  misc_feature (1)..(347): tr|A0A327WQ89|A0A327WQ89_9BACT S-adenosylmethionine:tRN A ribosyltransferase-isomerase OS=Larkinella arboricola OX=643671 GN=queA PE=3 SV=1
MKLSEFRFDLPQSLVALYPPERGEARLMVVDRKNKTIEHKQFSDIISYFGDGDVMVINDTKVFPARLYGNKEKTGAKIEVFLLRELNREMRLWDVLVDPARKIRVGNKLYFGDSDLVAEVIDNTTSRGRTIRFLFEGSHEEFMKAIDELGETPLPREIKRKTEDADRDRYQTIFAQHVGAVAAPTAGLHFTKTIMKRMEIKGIHFAPITLHVGLGTFRTVDVEDLTKHKTDSENYSITETAADVVNQALDNGKRVCAIGTTSLKAIESSVSANGRLKPVDGWTDRFIFPPYDFKIANALLTNFHLPESILIMMTSAFGGYDLIKQAYEVAIQEKYKFFSYGDAMLIL

SEQ ID NO: 68007 - protein, 405 aa, Larkinella arboricola
  misc_feature (1)..(405): tr|A0A327XBN5|A0A327XBN5_9BACT S-adenosylmethionine:tRN A ribosyltransferase-isomerase OS=Larkinella arboricola OX=643671 GN=queA PE=3 SV=1
MQKTRMEELQLNDFQYHLADERIARFPLAQRDQSKLLEYRRGVIEHRSFFELPDRLPADSLLIFNNTKVIPARLHFQRATGAVIELFLLNPLPADRLVTEAMQDHQQSIWQCMIGNRKRWKPDETLSKEIRIGEQTVLLRAYWHDADRSSIRFEWTGNEAFASILHEAGKIPLPPYLNRDVTDADQENYQTVYSRIEGAVAAPTAGLHFTPAVLARLEEKGIRTDYLTLHVGAGTFQPIKATDVRQHMMHTEQVVYSRQNLENLVDHRGPVIAVGTTSMRSLESLYWFGVRLLKDEPEPFLLDQHYAYSLQEADLPDRKDAIRAVLNYLQETGQPQVVAHTGIYCMPGYRFRITNGLVTNFHQPGSTLILLVAAFVGEQWRTIYNEALQNGYRFLSYGDSSLLLP

SEQ ID NO: 68008 - protein, 347 aa, Larkinella knui
  misc_feature (1)..(347): tr|A0A3P1CLR1|A0A3P1CLR1_9BACT S-adenosylmethionine:tRN A ribosyltransferase-isomerase OS=Larkinella knui OX=20 25310 GN=queA PE=3 SV=1
MKLSEFRFDLPQSLVALYPPERGEARLMVVDRKTKTIEHKQFSDILSYFDDGDVMVINNTKVFPARLYGNKEKTGAKIEVFLLRELNREMRLWDVLVDPARKIRVGNKLYFGDSDLVAEVIDNTTSRGRTIRFLFEGSHEEFMKAIDELGETPLPREIKRKTEDSDRDRYQTIFAQHVGAVAAPTAGMHFTKTIMKRMEIKGIHFAPITLHVGLGTFRTVDVEDLTKHKTDSENYSITDSAANIVNQALDKNKRVCAVGTTSLKAIESSVSANGRLKSVEGWTDRFIFPPYDFKIANALLTNFHLPESILIMMTSAFGGYDLIKQAYDIAIQEKYKFFSYGDAMLIL

SEQ ID NO: 68009 - protein, 402 aa, Larkinella knui
  misc_feature (1)..(402): tr|A0A3P1CN53|A0A3P1CN53_9BACT S-adenosylmethionine:tRN A ribosyltransferase-isomerase OS=Larkinella knui OX=20 25310 GN=queA PE=3 SV=1
MMKELQLNDFQYDLPDERIARFPLAQRDQSKLLEYRQGIIAHRSFRELPERLPATSLLIFNNTKVIPARLHFQRSTGAVIELFLLNPVPADRLVSEAMQDKNRSVWQCMIGNRKRWKPDEILTKEIRFGEHTLVVRAQWHDMEQSQVRFEWTPGDETFAAILHETGKIPLPPYLNRDATEADKETYQTVYSRIEGAVAAPTAGLHFTPDVLSRLAQHGIQTDYLTLHVGAGTFQPIKSADVRQHAMHTEQVVYARQNLEKLLTHPGPVIAVGTTSMRSLESLYWFGVRLLNNERDPFTLDQHYAYLFPEDQLPEKREALAAVLTYLTQTDQTHVIGHTGIYCVPGYRFRVVNGLVTNFHQPGSTLILLVAAFIGENWRTIYKEALQNDYRFLSYGDSSLLLP

SEQ ID NO: 68010 - protein, 347 aa, Larkinella rosea
  misc_feature (1)..(347): tr|A0A3P1BJ20|A0A3P1BJ20_9BACT S-adenosylmethionine:tRN A ribosyltransferase-isomerase OS=Larkinella rosea OX=2 025312 GN=queA PE=3 SV=1
MKLSEFRFDLPQSLVALYPPERGEARLMVVDRKTKTIEHKQFSDILNYFGDGDVMVINNTKVFPARLYGNKEKTGAKIEVFLLRELNREMRLWDVLVDPARKIRVGNKLYFGDSDLVAEVIDNTTSRGRTIRFLFEGSHEEFMKAIDELGETPLPREIKRKTEDSDRDRYQTIFAQHVGAVAAPTAGMHFTKTIMKRMEIKGIHFAPITLHVGLGTFRTVDVEDLTKHKTDSENYSIQDSAAAIVNEALDNNKRVCAVGTTSLKAIESSVSANGRLKSVDGWTDRFIFPPYDFKIANSLLTNFHLPESILIMMTSAFGGYDLVKQAYDIAIQEKYKFFSYGDAMLIL

SEQ ID NO: 68011 - protein, 411 aa, Larkinella rosea
  misc_feature (1)..(411): tr|A0A3P1B9I4|A0A3P1B9I4_9BACT S-adenosylmethionine:tRN A ribosyltransferase-isomerase OS=Larkinella rosea OX=2 025312 GN=queA PE=3 SV=1
MEELQLNDFQYNLPDERIARFPLPQRDRSKLLEYRQGKIDHRSFRDLPDQLPSGSLLVFNDTKVIPARLHFRRSTGATIELFLLNPVPADRLVSEAMQDHHQSIWQCMIGNRKRWKPDEVLEQEVRIHDHTVLVKAHWHDAHQSQVRFEWTPGNEMPGDEMPGDESFAAILHEAGKIPLPPYLNRDVTEADKETYQTVYSRIEGAVAAPTAGLHFTPEVLAQLAQKGIKTDYLTLHVGAGTFQPIKTSDVRQHAMHSEQVVYSRQNLQHLLTHTGPVIAVGTTSMRSLESLYWFGVRLLKQEPDPWHLDQKYAYSVSENDLPEKPEAVRAVLNYLEKTGQEAVIGHTGIYCMPGYRFRITNGLVTNFHQPGSTLILLIAAFVGENWRTIYKEALQNGYRFLSYGDSSLLLP

SEQ ID NO: 68012 - protein, 347 aa, Larkinella sp.
  misc_feature (1)..(347): tr|A0A4V3GGN9|A0A4V3GGN9_9BACT S-adenosylmethionine:tRN A ribosyltransferase-isomerase OS=Larkinella sp. BK230 OX=2512173 GN=queA PE=3 SV=1
MKLSEFRFDLPQSLVALYPSERGESRLMVVDRKTKTIEHKQFSDILSYFGDGDVMVINDTKVFPARLYGNKEKTGAKIEVFLLRELNREMRLWDVLVDPARKIRVGNKLYFGDSDLVAEVIDNTTSRGRTIRFLFEGSHEEFMKAIDELGETPLPREIKRKTEDADRDRYQTIFAQHVGAVAAPTAGLHFTKTIMKRMEIKGIHFAPITLHVGLGTFRTVDVEDLTKHKTDSENYSITEPAVDIVNEALDNGKRVCAVGTTSLKAIESSVSANGRLKAVDGWTDRFIFPPYDFKIANALLTNFHLPESILIMMTSAFGGYDLIKQAYEVAIQEKYKFFSYGDAMLIL

SEQ ID NO: 68013 - protein, 347 aa, Larkinella sp.
  misc_feature (1)..(347): tr|A0A368JCY6|A0A368JCY6_9BACT S-adenosylmethionine:tRN A ribosyltransferase-isomerase OS=Larkinella sp. ZZJ9 O X=2315727 GN=queA PE=3 SV=1
MKLSEFRFDLPQSLVALYPPERGEARLMVVDRKTKTIEHKQFSDILSYFGDGDVMVINNTKVFPARLYGNKEKTGAKIEVFLLRELNREMRLWDVLVDPARKIRVGNKLYFGDSDLVAEVIDNTTSRGRTIRFLFEGSHEEFMKAIDELGETPLPREIKRKTEDSDRDRYQTIFAQHVGAVAAPTAGLHFTKTIMKRMEIKGIHFAPITLHVGLGTFRTVDVEDLTKHKTDSENYAITDSAAGIVNTALDNNRRVCAVGTTSLKAIESSVSANGRLKSVEGWTDRFIFPPYDFKIANSLLTNFHLPESILIMMTSAFGGYDLIKQAYDVAIQEKYKFFSYGDAMLIL

SEQ ID NO: 68014 - protein, 350 aa, Latescibacteria bacterium
  misc_feature (1)..(350): tr|A0A0S7XC60|A0A0S7XC60_9BACT S-adenosylmethionine:tRN A ribosyltransferase-isomerase OS=Latescibacteria bacte rium DG_63 OX=1703781 GN=queA PE=3 SV=1
MARDEDELELFRYELPEDLIARRPVSSRSSARLMVLDRGAKSIEHASFESLSSYFDEGDCLVLNETRVIPCRLDGTRTETGGKLELLFVRKRERSLWEALVRPARRLRDGTDVSVSGGATMKIIERVSGARFLVEVPENFESYLEQWGKMPIPPYLKRAPDSQDKKDYQTVYARVLGSSAAPTAGLHFSRETMRKLEAKGVSVTKLVLHVGPGTFKPLVPGPLSSQKLDPEYYEITSETCHVVNRTRGRGGRVFAVGTSTARALETVTALANNGRDSSLVPSHGWTEKFIYPPYEFRAIDALVTNFHLPASSVLLLVCAFAGTEFTLSAYEEAKERQYRFYSYGDAMLII

SEQ ID NO: 68015 - protein, 351 aa, Lautropia mirabilis
  misc_feature (1)..(351): tr|E7RY55|E7RY55_9BURK S-adenosylmethionine:tRNA ribosy ltransferase-isomerase OS=Lautropia mirabilis ATCC 5159 9 OX=887898 GN=queA PE=3 SV=1
MKLSDFDYHLPEELIAQYPPEQRAGGRLLDVTTLMQQPEASAADRLLADLPELIAPGSLLVFNDTRVIHARLAGRKESGGRIEVMVERIDGEHEVLAMVRASHPPKAGSRLHFGPENATECATVVSAREPGSMMLRIRFDAPAAGVLERLGELPLPPYIQHQPDQADEARYQTVFAREPGAVAAPTAGLHFDEALLAALRARGIDSAHLTLHVGAGTFLPVRTEDLSQHHMHSERYTLSAETAQAIARAKAEGRPVVAIGTTALRALEASGGVAGSGETDLFITPGYRFRVVDRLFTNFHLPKSTLLILVSAFAGRETIRRAYAHAIAQRYRFFSYGDAMLLDRAPVEGDA

SEQ ID NO: 68016 - protein, 388 aa, Lautropia sp.
  misc_feature (1)..(388): tr|A0A3R8NBL4|A0A3R8NBL4_9BURK S-adenosylmethionine:tRN A ribosyltransferase-isomerase OS=Lautropia sp. KCOM 25 05 OX=2490857 GN=queA PE=3 SV=1
MKLSDFDYHLPDELIAQYPPEHRAGGRLLDVSALGAAAGSGTGHLATEHSVADRLLTDLPSLLAPGSLVVFNDTKVIHARLFGHKESGGRIEVMVERIDGEFEVLAMVRASHPPKEGSRLYFGDAGAGSGSGSGSGSGSRAGSGASSHGDGPPASHAAATATVVSAREPGSMLLRLRFDAPAAEVLERLGELPLPPYIQHTPDGADESRYQTVFAREPGAVAAPTAGLHFDEALLAALRARGVEMTHLTLHVGAGTFLPVRTEDLSQHQMHAERYAISPETAQAIARAKAGGRPVVAIGTTAMRALEASSGQAGVGETNLFITPGYRFRVVDRLFTNFHLPKSTLLILVSAFAGRETIRRAYAHAIAQRYRFFSYGDAMLLDRDDHAT

SEQ ID NO: 68017 - protein, 372 aa, Lautropia sp.
  misc_feature (1)..(372): tr|A0A1D2TIN7|A0A1D2TIN7_9BURK S-adenosylmethionine:tRN A ribosyltransferase-isomerase OS=Lautropia sp. SCN 70- 15 OX=1660105 GN=queA PE=3 SV=1
MRLSDFDFELPAELIAQHPPAERGASRLLVVRAGGAGDDAAGAGGAEAPPEDRPQARLEDRVFADLPSLLAPGDLLVLNDTRVIRARLFGVKDSGGRVEALVERVTGTHEAIAMLRASKPPKPGSRIAWRSGGAEVLERADEFWRLRFDDPVMEVLEREGRLPLPPYITHAPGAEDERRYQTVYAREAGSVAAPTAGLHFDESMLARLREAGIGLAWVTLHVGAGTFQPVRVEDLSRHRMHAERYEVPEATARAIAGTRAAGGRIVAVGTTSLRTLEGVAAAHEGAVVAGAGETRLFVTPGFRFRVVDRLITNFHLPKSTLLMLVSAFAGVETIRRAYAHAIAQRYRFFSYGDAMLLERSPDAAGHAPADPL

SEQ ID NO: 68018 - protein, 366 aa, Lawsonia intracellularis
  misc_feature (1)..(366): tr|Q1MQ84|Q1MQ84_LAWIP S-adenosylmethionine:tRNA ribosy ltransferase-isomerase OS=Lawsonia intracellularis (str ain PHE/MN1-00) OX=363253 GN=queA PE=3 SV=1
MSSITESDFLLSSYMFSLPKTQIAQYPYERGKSRLLVLTKKNSTIIHTDFSKIEHYLPNNSLLIANNSRVFPARIFCSYDKRNIEVFLLTPISFLEIQAKSSDEHYGAWSTAIGECLIRPAKRVNIGSKLYLQQELEIEVLKKEDFGRHIVKLCWKGSLSNIFFSYGDIPHPPYIHQSNKVQDKERYQTVYSRLDKLGSVAAPTAGLHFSETIRNKLQKNGISWAEITLHVGYGTFSPVRCNDIRKHIMHSEFVEVPETTVQAIKKARFEGRPIFAIGTTVVRALEGVSTICGSLQPYTGFINIFISPGYKFSYVDGLVTNFHLPGSTLLMLVSAFTKRSIMINTYNKAIELGYRFFSYGDAMLII

SEQ ID NO: 68019 - protein, 350 aa, Lawsonibacter asaccharolyticus
  misc_feature (1)..(350): tr|A0A2P2FB91|A0A2P2FB91_9FIRM S-adenosylmethionine:tRN A ribosyltransferase-isomerase OS=Lawsonibacter asaccha rolyticus OX=2108523 GN=queA PE=3 SV=1
MKTSDFDFELPEELIAQTPLERRDASRLLTLDKYTGETGHHHFYELPRFLRPGDCLVLNDSRVLPARLIGRRSTGGACEVLLLIDRGEGLWECLVRPGRKMKPGAQLSFGEGKLTAAVEAELPGGNRLVRFHYQGIFLEILEELGRMPLPPYIKAELQDNERYQTVYSKVLGSAAAPTAGLHFTPELLRQVEEMGVRLCYVTLHVGLGTFRPVKEEEITDHEMHSEYCMVPGETARIINETRKNGGRVICVGTTSCRTVESFAAEDGTMEESAGWTNIFIYPGYRFKVLDGLITNFHLPESTLIMLVSALAGREHVLAAYREAVRERYRFFSFGDAMLIADFKEQEREKG

SEQ ID NO: 68020 - protein, 350 aa, Leadbetterella byssophila
  misc_feature (1)..(350): tr|E4RWQ7|E4RWQ7_LEAB4 S-adenosylmethionine:tRNA ribosy ltransferase-isomerase OS=Leadbetterella byssophila (st rain DSM 17132 / KACC 11308 / 4M15) OX=649349 GN=queA P E=3 SV=1
MKLSSFKFDLPDSLIAQHPYEDRDGARMMVLHRKTGKIEHKQFRDIIEYFGDGDVMVANDTKVFPARLYGSKEKTGAKIEVFLLRELNREMRLWDVLVDPARKIRVGNKLYFGDSDLVAEVIDNTTSRGRTIRFLFDGNHEEMMQAIYELGETPIPKDILQREVADYDEERFQTIFAKNEGAVAAPIAGIHFTKNIVRRMEINGVDFAPLTLHIGIGTFRQVEVEDLTKHKTDSENFFIPEATCNIVNRALDENKRVCAIGSTSLRAMESSVSANNRLKPLDNAWTDKFIFPPFDFKIANALLTNFHLPESILLMTTCAFGGYDTVMEAYQVAIKEKYKFFTYGDAMLII

SEQ ID NO: 68021 - protein, 394 aa, Leadbetterella byssophila
  misc_feature (1)..(394): tr|E4RZT0|E4RZT0_LEAB4 S-adenosylmethionine:tRNA ribosy ltransferase-isomerase OS=Leadbetterella byssophila (st rain DSM 17132 / KACC 11308 / 4M15) OX=649349 GN=queA P E=3 SV=1
MKIDIKEYTYPLIEEQIARFPHSPRDESKLLVYKDGQISHQIFKQIGDFLPDGAHLVLNDTKVIPARLYFTRQTGALIEIFLLNPLQPSTVLPIVMDETREVVWHCVIGNKKKWKADEVLEGKFTLEGRSYKLWAKQGEDNAVALTWEGDWAFSKVVEAYGNIPLPPYLKRESQESDLTDYQTVYSEHEGAVAAPTAGLHFTDAVFQDLEGRGVKKSFVTLHVGAGTFMPVKEENALNHPMHSEQIIVSRQFLNEILAQEDFIIPVGTTSMRSLESMYWWGVKLIKGEDQPFSIEKLYPYQDHPPITARESFEALLKEMGDEGQLVGNTEIMIFPSYTFRVCKGLITNFHQPTSTLLLLVAALVGEETWRKIYAEAGQQGYRFLSFGDSSLLLP

SEQ ID NO: 68022 - protein, 339 aa, Lebetimonas natsushimae
  misc_feature (1)..(339): tr|A0A292Y941|A0A292Y941_9PROT S-adenosylmethionine:tRN A ribosyltransferase-isomerase OS=Lebetimonas natsushim ae OX=1936991 GN=queA PE=3 SV=1
MNDFLVSAYDYNLPEGLIAKYPAKPRDLAKLLVYDRKSDKIIHTVFKNILDFVPHSAFIFNNTKVIKARIFGVKETGGKVELLLNRPYKNAYLVYIRGKVKVGSKLFFDKGLVAEVKELLEDGSRVVDFKLKMDNGEWKILDFLDLVNILEKIGHVPLPPYIKRNDEKIDETEYQTVFAKKEGAVAAPTASLHFTDELLNKIKEKYFLTLHVGAGTFKPVEVEDIREHKMHSEFYEIPENTAKILDSKKEIVAVGTTVTRTIEYYARTKKLSGECDLFLHPKNPPIRVNHLLTNFHLPKSTLIMLVAAFIGRKKTLEIYKEAIEKKYRFYSYGDAMLII

SEQ ID NO: 68023 - protein, 356 aa, Leclercia adecarboxylata
  misc_feature (1)..(356): tr|A0A5B7XPC1|A0A5B7XPC1_9ENTR S-adenosylmethionine:tRN A ribosyltransferase-isomerase OS=Leclercia adecarboxyl ata OX=83655 GN=queA PE=3 SV=1
MRVADFSFDLPESLIAHYPMPERSSCRLLSLDGPTGALTHGTFTDLLDKLNPGDLLVFNNTRVIPARLFGRKASGGKIEVLVERMLDDKRILAHIRASKAPKPGAELLLGDDESIKATMTARHDALFEVEFNDERTVLDILNAIGHMPLPPYIERPDEEADRELYQTVYSQKPGAVAAPTAGLHFDEPLLEKLRAKGIEMAFVTLHVGAGTFQPVRVDSIEDHIMHSEYAEVPQGVVDAVMAAKARGNRVIAVGTTSVRSLESAAQAAKNDLIEPFFGDTQIFIYPGYQYQVIDALVTNFHLPESTLIMLVSAFAGYQNTMNAYKAAVEQKYRFFSYGDAMFITYNPQALNERVGE

SEQ ID NO: 68024 - protein, 356 aa, Leclercia adecarboxylata
  misc_feature (1)..(356): tr|A0A3E1ZZH2|A0A3E1ZZH2_9ENTR S-adenosylmethionine:tRN A ribosyltransferase-isomerase OS=Leclercia adecarboxyl ata OX=83655 GN=queA PE=3 SV=1
MRVADFSFELPESLIAHYPMPERSSCRLLSLDGPTGALTHGTFTDLLDKLNPGDLLVFNNTRVIPARLFGRKASGGKIEVLVERMLDDKRILAHIRASKAPKPGAELLLGDDESINATMVARHDALFEVQFNDERPVLDILNSIGHMPLPPYIDRPDEDADRELYQTVYSQKPGAVAAPTAGLHFDDPLLAKLREKGVELAFVTLHVGAGTFQPVRVDSIEDHIMHSEYAEVPQDVVDAVLAAKARGNRVIAVGTTSVRSLESAAQAAKNDLIEPFFGDTQIFIYPGYQYQVIDALVTNFHLPESTLIMLVSAFAGYQNTMNAYKAAVEQKYRFFSYGDAMFITYNPQALNERVGE

SEQ ID NO: 68025 - protein, 356 aa, Leclercia sp.; identical to SEQ ID NO: 68024
  misc_feature (1)..(356): tr|A0A2S4X1Q0|A0A2S4X1Q0_9ENTR S-adenosylmethionine:tRN A ribosyltransferase-isomerase OS=Leclercia sp. LSNIH4 OX=1920117 GN=queA PE=3 SV=1

SEQ ID NO: 68026 - protein, 356 aa, Leclercia sp.
  misc_feature (1)..(356): tr|A0A0J6Q5L8|A0A0J6Q5L8_9ENTR S-adenosylmethionine:tRN A ribosyltransferase-isomerase OS=Leclercia sp. LK8 OX= 1628210 GN=queA PE=3 SV=1
MRVADFSFELPESLIAHYPMPERSSCRLLSLDGPTGELTHGTFTDLLDKLNPGDLLVFNNTRVIPARLFGRKASGGKIEVLVERMLDDKRILAHIRASKAPKPGAELLLGDDESIKATMTARHDALFEVEFNDERTVLDILNAIGHMPLPPYIERPDEEADRELYQTVYSQKPGAVAAPTAGLHFDEPLLEKLRAKGIEMAFVTLHVGAGTFQPVRVDSIEDHIMHSEYAEVPQDVVDAVLAAKARGSRVVAVGTTSVRSLESAAQAAKNDLIEPFFGDTQIFIYPGYQYKVIDALVTNFHLPESTLIMLVSAFAGYQHTMNAYKSAVEQKYRFFSYGDAMFITYNPQALNERVGE

SEQ ID NO: 68027 - protein, 351 aa, Leeuwenhoekiella aequorea
  misc_feature (1)..(351): tr|A0A4Q0PD43|A0A4Q0PD43_9FLAO S-adenosylmethionine:tRN A ribosyltransferase-isomerase OS=Leeuwenhoekiella aequ orea OX=283736 GN=queA PE=3 SV=1
MGMKLSHFNFDLPNELLAEYPAENRDEARLMVLNRKTKTIEHKLFKDIIDYFEPNDIMVLNNTKVFPARLYGNKEKTGARIEVFLLRELNSETRLWDVLVDPARKIRIGNKLYFGDDESLVAEVIDNTTSRGRTLRFLYDGSYQEFRNKLTELGETPLPKYIKREVEPEDAERYQTIFAKEEGAVAAPTAGLHFSKHLLKRLEIKGLDFAEVTLHVGLGTFSAVEVEDLSKHKMDSEEAYIKPEAVSIINKAISEKRKICAVGTTVMRTLESAVSSNHTLNEFGGWTNKFIFPPYDFSIANCMVTNFHTPKSTLMMMVSAFAGHDFMKQAYEEAVKEKYKFYTYGDAMLII

SEQ ID NO: 68028 - protein, 351 aa, Leeuwenhoekiella blandensis
  misc_feature (1)..(351): tr|A3XI59|A3XI59_LEEBM S-adenosylmethionine:tRNA ribosy ltransferase-isomerase OS=Leeuwenhoekiella blandensis ( strain CECT 7118 / CCUG 51940 / MED217) OX=398720 GN=qu eA PE=3 SV=1
MGMKLSHFNFDLPKELLAEYPAENRDEARLMVLNRKTQTIEHKLFKDLIDYFEPNDVMVLNNTKVFPARLYGNKEKTGARIEVFLLRELNSETRLWDVLVDPARKIRIGNKLYFGDDESLVAEVIDNTTSRGRTLRFLYDGSYQEFRNKLTELGETPLPKYIKRDVEPEDAERYQTIFAKNEGAVAAPTAGLHFSKHLLKRLEIKGLNFAEVTLHVGLGTFSPVEVEDLSKHKMDSEEAYIDRTATSTINKAIGENRKVCAVGTTVMRALESSVSSNRTLNEFSGWTNKFIFPPYDFSIANCMITNFHTPKSTLMMMVSAFAGHDFMKEAYEQAVKEKYKFYSYGDAMLII

SEQ ID NO: 68029 - protein, 351 aa, Leeuwenhoekiella marinoflava
  misc_feature (1)..(351): tr|A0A4Q0PMW6|A0A4Q0PMW6_9FLAO S-adenosylmethionine:tRN A ribosyltransferase-isomerase OS=Leeuwenhoekiella mari noflava OX=988 GN=queA PE=3 SV=1
MGMKLSHFNFDLPKELLAEYPAENRDEARLMVLNRKTQTIEHKLFKDIIDYFDADDVMVLNNTKVFPARLYGNKEKTGARIEVFLLRELNSETRLWDVLVDPARKIRIGNKLYFGDDESLVAEVIDNTTSRGRTLRFLYDGSYEEFRNKLTELGETPLPKYIKREVEPEDAERYQTIFAKEEGAVAAPTAGLHFSKHLLKRLEIKGLNFAEVTLHVGLGTFSPVEVEDLSKHKMDSEEAYIHAPATATINNAISENRRICAVGTTVMRALESSVSSNHTLNEFSGWTNKFIFPPYDFSIANCMITNFHTPKSTLMMMVSAFAGHEFMKEAYEEAVKEKYKFYSYGDAMLII

SEQ ID NO: 68030 - protein, 349 aa, Leeuwenhoekiella nanhaiensis
  misc_feature (1)..(349): tr|A0A2G1VX46|A0A2G1VX46_9FLAO S-adenosylmethionine:tRN A ribosyltransferase-isomerase OS=Leeuwenhoekiella nanh aiensis OX=1655491 GN=queA PE=3 SV=1
MKLSNFNFDLPKELLAEYPAENRDEARLMVLNRKTKTIEHKLFKDLIDYFEPEDVMVLNNTKVFPARLYGNKEKTGARIEVFLLRELNSETRLWDVLVDPARKIRIGNKLYFGDDESLVAEVIDNTTSRGRTLRFLYDGSYQEFRNKLTELGETPLPKYIKREVEPEDAERYQTIFAKEEGAVAAPTAGLHFSKHLLKRLEIKGINFAEVTLHVGLGTFSPVEVEDLSKHKMDSEEAFIQKPATEVINKAINENRKVCAVGTTVMRALESAVSSNHTLNEFSGWTNKFIFPPYDFSIANCMITNFHTPKSTLMMMVSAFAGHEFMKEAYELAVKEKYKFYSYGDAMLII

SEQ ID NO: 68031 - protein, 351 aa, Leeuwenhoekiella palythoae
  misc_feature (1)..(351): tr|A0A1M5YUS3|A0A1M5YUS3_9FLAO S-adenosylmethionine:tRN A ribosyltransferase-isomerase OS=Leeuwenhoekiella paly thoae OX=573501 GN=queA PE=3 SV=1
MGMKLSHFNFDLPKELLAEYPAENRDEARLMVLNRKTQTIEHKLFKDLIDYFEPNDVMVLNNTKVFPARLYGNKEKTGARIEVFLLRELNSETRLWDVLVDPARKIRIGNKLYFGDDESLVAEVIDNTTSRGRTLRFLYDGSYQEFRNKLTELGETPLPKYIKRDVEPEDAERYQTIFAKNEGAVAAPTAGLHFSKHLLKRLEIKGLNFAEVTLHVGLGTFSPVEVEDLSKHKMDSEEAYIDSSATTTINKAIGENRKVCAVGTTVMRALESSVSSNKTLNEFSGWTNKFIFPPYDFSIANCMITNFHTPKSTLMMMVSAFAGHDFMKEAYEQAVKEKYKFYSYGDAMLII

SEQ ID NO: 68032 - protein, 351 aa, Leeuwenhoekiella polynyae
  misc_feature (1)..(351): tr|A0A4Q0PFQ8|A0A4Q0PFQ8_9FLAO S-adenosylmethionine:tRN A ribosyltransferase-isomerase OS=Leeuwenhoekiella poly nyae OX=1550906 GN=queA PE=3 SV=1
MGMKLSQFNFDLPKELLAEYPAENRDEARLMVLNRKTQTIEHKLFKDLIDYFDADDVMVLNNTKVFPARLYGNKEKTGARIEVFLLRELNSETRLWDVLVDPARKIRIGNKLYFGDDESLVAEVIDNTTSRGRTLRFLYDGSYQEFRNKLTELGETPLPKYIKREVEPEDAERYQTIFAKEEGAVAAPTAGLHFSKHLLKRLEIKGLNFAEVTLHVGLGTFSPVEVEDLSKHKMDSEEAYIHAPATATINNAIKENRRICAVGTTVMRALESSVSSNHTLNEFSGWTNKFIFPPYDFSIANCMITNFHTPKSTLMMMVSAFAGHDFMKEAYEEAVKEKYKFYSYGDAMLII

SEQ ID NO: 68033 - protein, 349 aa, Leeuwenhoekiella sp.
  misc_feature (1)..(349): tr|A0A2D9E0L8|A0A2D9E0L8_9FLAO S-adenosylmethionine:tRN A ribosyltransferase-isomerase OS=Leeuwenhoekiella sp. OX=1977054 GN=queA PE=3 SV=1
MKLSHFNFDLPKELLAEYPAENRDEARLMVLNRKTQTIEHKLFKDLIDYFEPNDVMVLNNTKVFPARLYGNKEKTGARIEVFLLRELNSETRLWDVLVDPARKIRIGNKLYFGDDESLVAEVIDNTTSRGRTLRFLYDGSYQEFRNKLTELGETPLPKYIKRDVEPEDAERYQTIFAKNEGAVAAPTAGLHFSKHLLKRLEIKGLNFAEVTLHVGLGTFSPVEVEDLSKHKMDSEEAYIDRTATSTINKAIGENRKVCAVGTTVMRALESSVSSNRTLNEFSGWTNKFIFPPYDFSIANCMITNFHTPKSTLMMMVSAFAGHDFMKEAYEQAVKEKYKFYSYGDAMLII

SEQ ID NO: 68034 - protein, 351 aa, Leeuwenhoekiella sp.
  misc_feature (1)..(351): tr|A0A4Q0NSB7|A0A4Q0NSB7_9FLAO S-adenosylmethionine:tRN A ribosyltransferase-isomerase OS=Leeuwenhoekiella sp. R-50232 OX=2249425 GN=queA PE=3 SV=1
MGMKLSHFNFDLPKELLAEYPAENRDEARLMVLNRKTQTIEHKLFKDLIDYFDADDVMVLNNTKVFPARLYGNKEKTGARIEVFLLRELNSETRLWDVLVDPARKIRIGNKLYFGDDESLVAEVIDNTTSRGRTLRFLYDGSYQEFRNKLTELGETPLPKYIKREVEPEDAERYQTIFAKEEGAVAAPTAGLHFSKHLLKRLEIKGLNFAEVTLHVGLGTFSPVEVEDLSKHKMDSEEAYIHAPATATINNAIKENRRICAVGTTVMRALESSVSSNHTLNEFSGWTNKFIFPPYDFSIANCMITNFHTPKSTLMMMVSAFAGHDFMKEAYEEAVKEKYKFYSYGDAMLII

SEQ ID NO: 68035 - protein, 338 aa, Legionella adelaidensis
  misc_feature (1)..(338): tr|A0A0W0R1P3|A0A0W0R1P3_9GAMM S-adenosylmethionine:tRN A ribosyltransferase-isomerase OS=Legionella adelaidens is OX=45056 GN=queA PE=3 SV=1
MKKQDFYFELPSELIAQYPLENRSDSRLLVYNRKTETYEHKQFKSIIQYLEEGDLLVLNNTKVIPARLYGYKLTGGKVELLIERKLSEYSFLAHIKASKAPKIGNKICLKEGWFFEITNRHDDLFECKINERLETVLNEIGHIPLPPYITREDKKTDFDRYQTVYACHEGSVAAPTAGLHFDEELLKELRQKGVNIAYVTLHVGAGTFRPVRCENVQDHKMHSEFFSITPSLCDLIHQTKVKSKRVVAVGTTALRSLESAATASGTIEPYSGETDIFIYPGYQFKICDALITNFHLPESTLLMLVSAFIGYPQAMDLYRVAIENKYRFFSYGDASLLL

SEQ ID NO: 68036 - protein, 337 aa, Legionella anisa
  misc_feature (1)..(337): tr|A0A2Z3KR26|A0A2Z3KR26_9GAMM S-adenosylmethionine:tRN A ribosyltransferase-isomerase OS=Legionella anisa OX=2 8082 GN=queA PE=3 SV=1
MNKQDFYFDLPPELIAQYPLENRSDSRLLTYNRQKGEYGHYQFREIADFLNPGDLLVMNDSKVIPARLYGHKTTGGKVELLVERITGEFTFLAHIKASKALKPGSIIKLEQNKEIEILDRKDDLFICKAAMDVLQLLNGIGHIPLPPYIERNDEILDQDRYQTVYAKYEGSVAAPTAGLHFDESVLSSLHSRGVAVAYLTLHVGAGTFRPVRCEHIKDHKMHSEQFTISPELCAAVHATKAAGNRVIAVGTTALRSLESAAQNGVLTACSRDTDIFIYPGYEFKICDGLMTNFHLPESTLLMLVSAFIGHKQAMMLYQEAIEKRYRFFSYGDTSLLL

SEQ ID NO: 68037 - protein, 337 aa, Legionella beliardensis
  misc_feature (1)..(337): tr|A0A378I2Y9|A0A378I2Y9_9GAMM S-adenosylmethionine:tRN A ribosyltransferase-isomerase OS=Legionella beliardens is OX=91822 GN=queA PE=3 SV=1
MNKQDFYFELPPELIAQYPLAKRRDSRLLNYNRHTQTQAHYQFSQLSELLEPGDLLVMNDTKVIPARFFGLKETGGRVEFLVERVQDDHHFLAHIKASKAPRAGMTIFLDAKWQVKVMAKIDDLYQCFVSGDIETMLEEIGHIPLPPYITRTDETLDKERYQTIYAKHKGSVAAPTAGLHFDDYVLAQLQEKGIQLGYCTLHVGAGTFRPVRCENINDHKMHKEHYVITEELSELVKQTQSHGGRIIAVGTTAMRSLESATQDGYLKPGKHETDIFIYPGYTFKLCNGLITNFHLPESTLLMLVSAFIGYQQTMALYKEAIAKRYRFFSYGDACLLL

SEQ ID NO: 68038 - protein, 337 aa, Legionella birminghamensis
  misc_feature (1)..(337): tr|A0A378I844|A0A378I844_9GAMM S-adenosylmethionine:tRN A ribosyltransferase-isomerase OS=Legionella birmingham ensis OX=28083 GN=queA PE=3 SV=1
MKKQDFYFELPEELIAQYPLPNRSDSRLLFYSRKQEAYQHLQFKNLSELLEPNDLLVLNNTKVIPARFFGTKSTGGKVEFLVERRIGNNQFIAHIKASKTPKNGSLIQLEKNWQVEVLEKQDDLYLCRSLGELDRLLQDIGHIPLPLYIEREDEKADEERYQTVYAQHEGSVAAPTAGLHFDDFVISQLLEKGIRLAHVTLHVGAGTFRPVRCDDIRDHKMHSEQFELSEAVCEAVSETRRRGGRVIAVGTTAMRTLESAASKGSLKACQGETDIFIYPGYEFKVCDGLITNFHLPESTLLMLVSAFLGREQTMALYEEAIAKRYRFYSYGDATLLL

SEQ ID NO: 68039 - protein, 337 aa, Legionella brunensis
  misc_feature (1)..(337): tr|A0A0W0SEH2|A0A0W0SEH2_9GAMM S-adenosylmethionine:tRN A ribosyltransferase-isomerase OS=Legionella brunensis OX=29422 GN=queA PE=3 SV=1
MKKQDFYFDLPQELIAQYPLPNRRDSRLLVYNRQTGTRAHHQFAGISQFLEAGDLLVMNNSKVIPARLFGHKASGGKVELLVERLLDEHTFLAHVKASKSPKAGTVIYLDKEWSLEVIAKLDDLYHCQISGNVEVMLQEIGHIPLPLYITRSDESLDSERYQTVYALHKGSVAAPTAGLHFDETLLQEIRTKGVNLAYSTLHVGAGTFRPVRCDDITEHKMHSEQFLISEELAQAVNATRAAGKRVIAVGTTALRSLESAAQEGVLQACHRDTDIFIYPGYRFQICDGLLTNFHLPESTLLMLVSAFIGHKQAMALYQEAIAEKYRFFSYGDASLLL

SEQ ID NO: 68040 - protein, 337 aa, Legionella busanensis
  misc_feature (1)..(337): tr|A0A378JKN4|A0A378JKN4_9GAMM S-adenosylmethionine:tRN A ribosyltransferase-isomerase OS=Legionella busanensis OX=190655 GN=queA PE=3 SV=1
MKRQDFYFDLPEELIAQYPLENRRDSRLLFYNREEQIYNHHQFDHLPKLLKPGDLLVMNNTKVIPARFFGVKETGGRVEFLIERIQDDHHFLTHIKASKALRAGMTVFLSSNWQVQIIEKVNDLYRCQVEGDIDVMLEEIGHIPLPPYITRPDELKDKERYQTIYAEHKGSVAAPTAGLHFDEDILTELKNQGVNIGYCTLHVGAGTFRPVRCDHITDHKMHKEQYVISETLCELVNKTKSQGKRVIAVGSTSLRSLESAAQKGYLESGQGETDIFIYPGYKFKICDGLITNFHLPESTLLMLVAAFIGYEQMMALYKEAIAKKYRFFSYGDACLLL

SEQ ID NO: 68041 - protein, 337 aa, Legionella cherrii
  misc_feature (1)..(337): tr|A0A0W0S7F3|A0A0W0S7F3_9GAMM S-adenosylmethionine:tRN A ribosyltransferase-isomerase OS=Legionella cherrii OX =28084 GN=queA PE=3 SV=1
MNKQDFYFDLPPELIAQYPLPNRSDSRLLIYDRQKGDYGHYQFREIADFLNPGDLLVMNDSKVIPARLHGQKTTGGKVELLVERITGEFTFLAHIKASKSLKSGSIIKLEQNKEIEVLDRQDDLFTCKADMDVLTLLNGIGHIPLPPYITRNDEHLDQDRYQTVYAKHEGSVAAPTAGLHFDESVLSSLHSRGVAVAYLTLHVGAGTFRPVRCDNIKDHKMHSERFTISPELCAAVHATKAAGNRVIAVGTTAMRSLESAVQNGTLTPCSRDTDIFIYPGYEFKICDGLMTNFHLPESTLLMLVSAFIGHKQAMMLYQEAIEKKYRFFSYGDTSLLL

SEQ ID NO: 68042 - protein, 337 aa, Legionella cincinnatiensis
  misc_feature (1)..(337): tr|A0A378ILT0|A0A378ILT0_9GAMM S-adenosylmethionine:tRN A ribosyltransferase-isomerase OS=Legionella cincinnati ensis OX=28085 GN=queA PE=3 SV=1
MNKEDFYFDLPPELIAQYPLANRSDSRLLVYDRKIGEYGHHQFQKIADFLKPGDLLVMNNSKVIPARLYGHKTTGGKVELLVERITGELTFLAHIKASKALKAGSIIQLEQNKHLEILDRQDDLFVCKADMDVLELLNGVGHIPLPPYIARNDETLDKDRYQTIYAKYEGSVAAPTAGLHFDEAVLSNIRSRGISVAYLTLHVGAGTFRPVRCDNIKDHKMHHEHFTISAELCAAIHATKAAGNRVIAVGTTALRSLESAAQNGVLTPCSRDTDIFIYPGYEFKICDGLMTNFHLPESTLLMLVSAFIGHKQAMKLYQEAIEKRYRFFSYGDTSLLL

SEQ ID NO: 68043 - protein, 338 aa, Legionella clemsonensis
  misc_feature (1)..(338): tr|A0A222P410|A0A222P410_9GAMM S-adenosylmethionine:tRN A ribosyltransferase-isomerase OS=Legionella clemsonens is OX=1867846 GN=queA PE=3 SV=1
MKKQDFYFDLPEELIAQYPLPNRSDSRLLVYNRQTERSSHHQFKEITEFLEEGDLLVMNNSKVIPARLYGKKVSGGKVELLVERLLEGESFLAHIKASKAPKAGSSIHLDKDWIIEVIAKLDDLYHCRVVVGDVERMLQEIGHIPLPLYINRPDEPLDLQRYQTVYALHNGSVAAPTAGLHFDERLLKEIKNKGVTLGYSTLHVGAGTFRPVRCDNIKEHKMHSEQFTISRELAEQVNATRASGRRVIAVGTTALRSLESAAHEGKLQACQRDTDIFIYPGYQFQICDGLLTNFHLPESTLLMLVSAFIGHAQAMALYKEAIAEKYRFFSYGDASLLL

SEQ ID NO: 68044 - protein, 337 aa, Legionella donaldsonii
  misc_feature (1)..(337): tr|A0A378J390|A0A378J390_9GAMM S-adenosylmethionine:tRN A ribosyltransferase-isomerase OS=Legionella donaldsoni i OX=45060 GN=queA PE=3 SV=1
MNKQDFYFDLPEELIAQYPLAKRSDSRLLIYNRKTGCSAHHQFKDIVQFFQPGDLLVMNNSKVIPARLYGRKESGGKIELLIERLQGNNSFLAHIKASKSPKAGTLIYLDNDWRVEVVSKQDDLYHCQVLGDVEMMLEQIGHMPLPPYITRADDTMDSERYQTVYAKYKGSVAAPTAGLHFDEELLQQLQGKGINIAYSTLHVGAGTFRPVRCDSISEHKMHSEQFTVTEALCQAVNETRAAGKRVIAVGTTALRSLESAAEGGRLKPCSRDTDIFIYPGYQFQICDGLITNFHLPESTLLMLVSAFIGHAQAMALYQEAIAQNYRFFSYGDASLLL

SEQ ID NO: 68045 - protein, 338 aa, Legionella drancourtii
  misc_feature (1)..(338): tr|G9EMD0|G9EMD0_9GAMM S-adenosylmethionine:tRNA ribosy ltransferase-isomerase OS=Legionella drancourtii LLAP12 OX=658187 GN=queA PE=3 SV=1
MNKQDFYFDLPSELIAQYPLANRSDSRLLTYNRHIGEYGHHQFRDIADFLKPGDLLVMNDSKVIPARLYGHKATGGKVELLVERITGEFTFLAHIKASKALKAGALIYLEQDRQLEVLERHDDLFVCKSNIDVLQLLHGVGHMPLPPYITRSDEVMDEDRYQTVYAKYEGSVAAPTAGLHFDEAVLASLHARGVDIAHVTLHVGAGTFRPVRCENIKEHKMHSEHFTLNPELCSAVHATKAAGNRVIAVGTTALRSLESAAQEGGVLTPCSRDTNIFIYPGYKFKICDGLMTNFHLPESTLLMLVSAFIGYKEAMMLYQEAIAKGYRFFSYGDTSLLL

SEQ ID NO: 68046 - protein, 337 aa, Legionella drozanskii
  misc_feature (1)..(337): tr|A0A0W0SWX0|A0A0W0SWX0_9GAMM S-adenosylmethionine:tRN A ribosyltransferase-isomerase OS=Legionella drozanskii LLAP-1 OX=1212489 GN=queA PE=3 SV=1
MNKQDFYFDLPEELIAQYPLPNRSDSRLFVFNRQTAQYNHQQFKDITDYFQPGDLLVMNNSKVIPARLYGQKASGGKVELLVERLYGDDSFLAHIKASKAPKAGSLIRLANDWQIEVLQKLDDLYHCKVLGDVDVMLNEIGHIPLPLYINRPDESLDMDRYQTVYAMHKGSVAAPTAGLHFDEALIQQLKEKGVNIAYSTLHVGAGTFRPVRSDSIHEHKMHSEHFTVSEELCQAVNSTRAAGKRVIAVGTTSMRSLESAAENGVLKPCSRDTNIFIYPGYQFQICNGLITNFHLPESTLLMLVSAFIGHAQAMALYKEAIALGYRFFSYGDASLLL

SEQ ID NO: 68047 - protein, 337 aa, Legionella erythra
  misc_feature (1)..(337): tr|A0A0W0TUV6|A0A0W0TUV6_LEGER S-adenosylmethionine:tRN A ribosyltransferase-isomerase OS=Legionella erythra OX =448 GN=queA PE=3 SV=1
MYKHDFYFDLPEELIAQYPLPGRSDSRLLVYHRGDEQYHHQQFKQLPDFLNEGDLLVMNNSKVIPARFFGRKPSGGQVEFLIERLKPDNQFLAHIKASKTPKAEMIIDLANGWQVQILAKLDDLYHCQALGDLETMLADIGHIPLPPYIARHDEKADFERYQTVYALHKGSVAAPTAGLHFDEPLMATLQQKGVRIAYSTLHVGAGTFRPVRCDVIEDHKMHSEQLTISEELAAAVNSTRAAGKRVIAVGTTALRSLESAMVDGLLQPCVKETDIFIYPGYEFKVCDGLITNFHLPESTLLMLVSAFIGHGRAMDLYQEAIARRYRFFSYGDATLLL

SEQ ID NO: 68048 - protein, 349 aa, Legionella fallonii
  misc_feature (1)..(349): tr|A0A098G6I2|A0A098G6I2_9GAMM S-adenosylmethionine:tRN A ribosyltransferase-isomerase OS=Legionella fallonii L LAP-10 OX=1212491 GN=queA PE=3 SV=1
MYNAINLFSGCIMNKQDFYFDLPPELIAQYPLDSRSDSRLLCYNRQKKEHGHYQFKDIVNFLEPGDLLVMNDTRVIPARLYGQKLTGGKVELLVERITGEFTFLAHIKASKALRPGGIIQLEQGNQLEVIDRRDDLFVCKTSISVLELLNRLGHIPLPPYIARQDESLDADRYQTVYAKYAGSVAAPTAGLHFDEAVLSSLNAKGINIAYVTLHVGAGTFRPVRCDNIKEHKMHSEHFIISPELVNAVKATKAAGKRVIAVGTTALRSLESAVNAGELTACSRDTDIFIYPGYQFKICDGLMTNFHLPESTLLMLVSAFIGHQEAMDLYQEAIDKKYRFFSYGDTSLLL

SEQ ID NO: 68049 - protein, 337 aa, Legionella feeleii
  misc_feature (1)..(337): tr|A0A378IX52|A0A378IX52_9GAMM S-adenosylmethionine:tRN A ribosyltransferase-isomerase OS=Legionella feeleii OX =453 GN=queA PE=3 SV=1
MNKQDFYFDLPQELIAQHPLAKRSDSRLLIYNRETGSSAHHQFKDIVQFLQPGDLLVMNNSKVIPARLYGRKESGGKIELLIERLQGDNSFLAHIKASKSPKAGTLIYLDNDWRIEVLSKQDDLYHCQVLGDVEMMLEQIGHMPLPPYITRADDTMDSERYQTVYAKYKGSVAAPTAGLHFDEELLQQLQGKGINIAYSTLHVGAGTFRPVRCEAISEHKMHSEQFTVTEALCQAVNETREAGKRVIAVGTTALRSLESAAEGGRLKPCSRDTDIFIYPGYQFQICDGLITNFHLPESTLLMLVSAFIGHAQAMALYQEAIAQNYRFFSYGDASLLL

SEQ ID NO: 68050 - protein, 337 aa, Legionella feeleii
  misc_feature (1)..(337): tr|A0A0W0TUX9|A0A0W0TUX9_9GAMM S-adenosylmethionine:tRN A ribosyltransferase-isomerase OS=Legionella feeleii OX =453 GN=queA PE=3 SV=1
MNKQDFYFDLPQELIAQHPLAKRSDSRLLIYNRETGSSAHHQFKDIVQFLQPGDLLVMNNSKVIPARLYGRKESGGKIELLIERLQGDNSFLAHIKASKSPKAGTLIYLDNDWRIEVLSKQDDLYHCQVLGDVEMMLEQIGHMPLPPYITRADDTMDSERYQTVYAKYKGSVAAPTAGLHFDEELLQQLQGKGINIAYSTLHVGAGTFRPVRCEAISEHKMHSEQFTVTEALCQAVNGTREAGKRVIAVGTTALRSLESAAEGGRLKPCSRDTDIFIYPGYQFQICDGLITNFHLPESTLLMLVSAFIGHAQAMALYQEAIAQNYRFFSYGDASLLL

SEQ ID NO: 68051 - protein, 337 aa, Legionella geestiana
  misc_feature (1)..(337): tr|A0A0W0TWX2|A0A0W0TWX2_9GAMM S-adenosylmethionine:tRN A ribosyltransferase-isomerase OS=Legionella geestiana OX=45065 GN=queA PE=3 SV=1
MQTRDFHFELPEELIAQYPLPNRTDSRLLCYERATGTTTHTMFSNLLERLVPGDVLVLNDSRVIPARMFGQKASGGRVEILLERITGEDCFLAHIRGGKSLSQGARLTLEKGSVLEVTGREGELFCCRCTMDVMELLHLEGHIPLPPYIHRPDESGDFSRYQTVYARVNGSVAAPTAGLHFDEALLASLRAGGVEIGHVTLHVGAGTFQPVRSENIHEHVMHREQFEVSEALCDTILRAKAEGRRVIAVGTTAMRSLESAARDGVLKPMRGDTDIFIFPGFQFNVCDGLLTNFHLPQSTLLMLVSAFIGHREALALYEEAVRERYRFFSYGDTSLLL

SEQ ID NO: 68052 - protein, 338 aa, Legionella gratiana
  misc_feature (1)..(338): tr|A0A378JEL0|A0A378JEL0_9GAMM S-adenosylmethionine:tRN A ribosyltransferase-isomerase OS=Legionella gratiana O X=45066 GN=queA PE=3 SV=1
MNKEDFYFDLPTELIAQYPLVNRSDSRLLVYDRNIGEYGHYQFREIADFLKPGDLLVMNDSKVIPARLYGHKPTGGKVELLVERITGELTFLAHIKASKALRAGSIIHLAQNKEIEILDRQDDLFVCKADTEVLELLNGVGHIPLPPYIARNDETLDKDRYQTIYAKYDGSVAAPTAGLHFDEAVLSSIRSRGISVAYVTLHVGAGTFRPVRCDNIKDHKMHSEHFTLSAELCAAVQATKAAGNRVIAIGTTALRSLESAAQQNGVLTPCSRDTDIFIYPGYEFKICDGLMTNFHLPESTLLMLVSAFIGHKQAMKLYEEAIEKGYRFFSYGDTSLLL

SEQ ID NO: 68053 - protein, 337 aa, Legionella hackeliae
  misc_feature (1)..(337): tr|A0A0A8URD7|A0A0A8URD7_LEGHA S-adenosylmethionine:tRN A ribosyltransferase-isomerase OS=Legionella hackeliae OX=449 GN=queA PE=3 SV=1
MKKQDFYFDLPEELIAQYPLPNRSDSRLLVHHRQTQSNSHHQFKGISQFLEAGDLLVMNNSKVIPARFYGQKASGGKVELLVERLQGDQSFLAHIKASKAPKAGSIIYLDKGWSIEVIAKHDELYQCQVLGDMDAMLQEIGHIPLPLYITRPDERLDLDRYQTVYALHKGSVAAPTAGLHFDEAILEELKEKGVNIGFSTLHVGAGTFRPVRCDDIKEHKMHSEQFTITKELSEMVNATRAAGKRVIAVGTTALRSLESAACDGLLHPCQRDTNIFIYPGYQFQICDGLLTNFHLPESTLLMLVSAFIGHSQAMALYQEAIAEKYRFFSYGDASLLL

SEQ ID NO: 68054 - protein, 338 aa, Legionella israelensis
  misc_feature (1)..(338): tr|A0A516N059|A0A516N059_9GAMM S-adenosylmethionine:tRN A ribosyltransferase-isomerase OS=Legionella israelensi s OX=454 GN=queA PE=3 SV=1
MKKQDFYFDLPPELIAQYPLSNRSDSRLLTYSRATGEYGHHIFKDLPDFLRTGDVLIMNDSKVIPARLYGHKTTGGKIELLVERIVDERTFLAHIKTSKAPKPGSQIRLDHDFIIEIAGRQDDLFVCVSEKEVFDVLYQVGHIPLPPYITRREELLDEQRYQTIYARKEGSVAAPTAGLHFDESIISRLIAKGIHIGYLTLHVGAGTFRPVRCENIKEHKMHSEHYSIDAELCSLVNQTRARGGRIIAVGTTAMRTLESAADDNGLLHPRYGETDIFIYPGYKFKICNGLITNFHLPESTLLMLVSAFIGHKTAMALYKEAIEKQYRFFSYGDTSLLL

SEQ ID NO: 68055 - protein, 338 aa, Legionella israelensis
  misc_feature (1)..(338): tr|A0A0W0VY26|A0A0W0VY26_9GAMM S-adenosylmethionine:tRN A ribosyltransferase-isomerase OS=Legionella israelensi s OX=454 GN=queA PE=3 SV=1
MKKQDFYFDLPPELIAQYPLSNRSDSRLLTYSRATGEYGHHIFKDLPDFLRTGDVLIMNDSKVIPARLYGHKTTGGKIELLVERIVDERTFLAHIKTSKAPKPGSQIRLDHDFIIEIAGRQDDLFVCVSEKEVFEVLYQVGHIPLPPYITRREELLDEQRYQTIYARKEGSVAAPTAGLHFDESIISRLIAKGIHIGYLTLHVGAGTFRPVRCENIKEHKMHSEHYSIDAELCSLVNQTRARGGRIIAVGTTAMRTLESAADDNGLLHPRYGETDIFIYPGYKFKICNGLITNFHLPESTLLMLVSAFIGHKTAMALYKEAIEKQYRFFSYGDTSLLL

SEQ ID NO: 68056 - protein, 337 aa, Legionella jamestowniensis
  misc_feature (1)..(337): tr|A0A0W0UHG8|A0A0W0UHG8_9GAMM S-adenosylmethionine:tRN A ribosyltransferase-isomerase OS=Legionella jamestowni ensis OX=455 GN=queA PE=3 SV=1
MKKQDFYFDLPEELIAQYPLPNRSDSRLLVYNRQTGCRSHHHFKGIAEFLEAGDLLVMNNSKVIPARLFGKKASGGKVELLVERLQGEETFLAHIKASKAPKAGSLIHLDKGWIVEVIAKLDDLYHCRAVGEVETMLQEIGHIPLPLYINRPDERLDLQRYQTVYALHNGSVAAPTAGLHFDEVLLKGIKEKGVNLGYSTLHVGAGTFRPVRCDNIQEHKMHSEQFTISKELAEQVNATRASGKRVIAVGTTALRSLESAAYEGKLQACQGDTSIFIYPGYRFQICDGLLTNFHLPESTLLMLVAAFIGHAQAMALYKEAIAEKYRFFSYGDASLLL

SEQ ID NO: 68057 - protein, 337 aa, Legionella jordanis
  misc_feature (1)..(337): tr|A0A0W0VE84|A0A0W0VE84_9GAMM S-adenosylmethionine:tRN A ribosyltransferase-isomerase OS=Legionella jordanis O X=456 GN=queA PE=3 SV=1
MKKQDFYFDLPEELIAQYPLANRTDSRLLAYNRQTGEYSHQQFKDLGQFLRPGDLLVMNNTKVIPARLYGHKGSGGKIELLIERFLENNSFLAHIKASKAPKAGSILYLDKGWQIEVLAKEEDLYRCRTLGDTDSMLQDIGHIPLPLYITRPDESLDQDRYQTVYALHQGSVAAPTAGLHFDEVLLKKLNEQGINLAYSTLHVGAGTFRPVRCDNIKEHKMHQEQFSISDELALAVNEAKAAGHRVIAVGTTALRSLESAAEGNKLIPCEGDTDIFIYPGYEFKICDGLITNFHLPESTLVMLVSAFIGHAETMALYQEAIARRYRFFSYGDATLLL

SEQ ID NO: 68058 - protein, 337 aa, Legionella lansingensis
  misc_feature (1)..(337): tr|A0A0W0VTS9|A0A0W0VTS9_9GAMM S-adenosylmethionine:tRN A ribosyltransferase-isomerase OS=Legionella lansingens is OX=45067 GN=queA PE=3 SV=1
MKKQDFYFDLPQELIAQYPLANRSDSRLLVYDRRTGERNHHQFREITQFFRAGDLLVMNNTKVIPARLYGQKASGGKVELLIERFQGDNLLLAHMKASKSPQPGTLIFLDKGWKIEVISKNDDLYSCRVLGDAETMLQEIGHVPLPPYICRADESLDLDRYQTVYAMHDGSVAAPTAGLHFDEFLLQQLQEQGIHLAYLTLHVGAGTFRPVRCDNIKEHKMHHERFSISEELAEAVNSTRAKGHRVIAVGTTTLRSLESAAQGGILKAYQGDTDIFIYPGYQFQICDGLLTNFHLPESTLLMLVSAFIGHPEAMALYQEAIAQRYRFFSYGDASLLL

SEQ ID NO: 68059 - protein, 337 aa, Legionella londiniensis
  misc_feature (1)..(337): tr|A0A0W0VNU3|A0A0W0VNU3_9GAMM S-adenosylmethionine:tRN A ribosyltransferase-isomerase OS=Legionella londiniens is OX=45068 GN=queA PE=3 SV=1
MKRQDFYFELPEELIAQYPLPNRSDSRLLAYERQKGTIAHLGFSAITDLLEPGDLLVMNNSMVIPARLYGQKVSGGKVELLVERLIGEDCFLAHIKASKPPKAGSIVTLQDKWQLEVLSRDDDLFHCKVNGKAEEMLEQIGHIPLPPYISRQDEMLDKSRYQTVYAQHKGSVAAPTAGLHFDDQLLGVLKNKGIKIGFSTLHVGAGTFRPVRSIEIKDHKMHREYFSVAPELCDLVNQTKAKKKRVIAVGTTALRSLESAAENGILYPASRDTDIFIYPGYQFQICDGLITNFHLPESTLLMLVSAFIGYKETMNLYRIAVEERYRFFSYGDACLLL

SEQ ID NO: 68060 - protein, 337 aa, Legionella longbeachae
  misc_feature (1)..(337): tr|A0A378KZD7|A0A378KZD7_LEGLO S-adenosylmethionine:tRN A ribosyltransferase-isomerase OS=Legionella longbeacha e OX=450 GN=queA PE=3 SV=1
MKRQDFNFELPPELIAQYPLSNRSDSRLLTYSRQSECHEHHQFKSLADFLEPGDLLVMNDSKVIPARLYGHKSSGGKVECLIERLTNDDCFWAHIKASKAPKPGSRIFLDQGWSIEIIGRDDDLFQCKASGNVAVMLEEIGHIPLPPYIQRSDESLDASRYQTVYARYKGSVAAPTAGLHFDESLLAAIQQKGINIAYSTLHVGAGTFRPLRCEDIKDHKMHSEFFTVSEPLCAAVNATHAAGNRVIAVGTTALRSLESAAQQGKLEPCSRDTNIFIYPGYQFQICDGLITNFHLPESTLLMLVAAFIGYEQAMKLYQIAIAHRYRFFSYGDASLLL

SEQ ID NO: 68061 - protein, 337 aa, Legionella longbeachae
  misc_feature (1)..(337): tr|D3HQU0|D3HQU0_LEGLN S-adenosylmethionine:tRNA ribosy ltransferase-isomerase OS=Legionella longbeachae serogr oup 1 (strain NSW150) OX=661367 GN=queA PE=3 SV=1
MNKEDFYFDLPHELIAQYPLANRSDSRLLVYDRKIGEYGHHQFREIADFLKSGDLLVMNDSKVIPARLYGHKTTGGKVELLVERITGEFTFLAHIKASKALKAGSIIQLEQNKHIEILDRQDDLFVCKANIEVLELLNGVGHIPLPPYIARNDETLDIDRYQTIYAKHAGSVAAPTAGLHFDEAVLANIRSRGISVGYVTLHVGAGTFRPVRCDNIEDHKMHREHFTISAELCAAIHATKAAGNRVIAVGTTALRSLESAVQNGALTPCSRDTDIFIYPGYEFKICDGLMTNFHLPESTLLMLVSAFIGHKQAMKLYHEAIEKRYRFFSYGDTSLLL

SEQ ID NO: 68062 - protein, 337 aa, Legionella maceachernii
  misc_feature (1)..(337): tr|A0A0W0W8L5|A0A0W0W8L5_9GAMM S-adenosylmethionine:tRN A ribosyltransferase-isomerase OS=Legionella maceachern ii OX=466 GN=queA PE=3 SV=1
MNKQDFYFDLPEELIAQYPLPNRSDSRLLAFDRQTGLCTHRQFKDIIDFLQPGDLLVMNNSKVIPARLHGHKASGGKVELLVERLLAEDSFLAHIKASKAPKADTIIHLNKDWQLKVICKVDDLYHCRVLGNAEQMLEEIGHIPLPLYINRPDESVDAERYQTVYALHKGSVAAPTAGLHFDQALLQRLKNKGVNIAYSTLHVGAGTFRPVRTDAIKDHKMHSEQFTVSEALCQIVNETRAAGKRVIAVGTTSMRSLESAAENGMLKPCSRDTDIFIYPGYQFQICDGLITNFHLPESTLLMLVAAFIGHAQTMMLYQEAIAQKYRFFSYGDASLLL

SEQ ID NO: 68063 - protein, 337 aa, Legionella massiliensis
  misc_feature (1)..(337): tr|A0A078KZ95|A0A078KZ95_9GAMM S-adenosylmethionine:tRN A ribosyltransferase-isomerase OS=Legionella massiliens is OX=1034943 GN=queA PE=3 SV=1
MNKQDFYFDLPEELIAQYPLAKRSDSRLLVYSRQAETTNHHQFKDITDFLEAGDLLVLNDSKVIPARLYGFKASGGKIELLVERLYGDNSFLGHIKASKAPKAGAILQLNDGWQVKVLQKVDDLYHCQVLGDAEQMLEQIGHIPLPLYITRPDEKTDLERYQTVYAKHKGSVAAPTAGLHFEQELLEKIRAKGVRIAYSTLHVGAGTFRPVRCDAIKDHKMHSERFSVSDELCEAVNNTRAAGKRVIAVGTTALRCLESAAAEGILKPCNRDTDIFIYPGYQFQICDGLITNFHLPESTLLMLVSAFVGHKQAMTLYQEAITQRYRFYSYGDASLLI

SEQ ID NO: 68064 - protein, 337 aa, Legionella moravica
  misc_feature (1)..(337): tr|A0A378JYV7|A0A378JYV7_9GAMM S-adenosylmethionine:tRN A ribosyltransferase-isomerase OS=Legionella moravica O X=39962 GN=queA PE=3 SV=1
MNKHDFYFDLPEELIAQYPLPQRSDSRLLTYSRETGEYGHYQFRDIADFLNPGDLLVMNNSKVIPARLYGHKLTGGKVELLVERITGPNTFLAHIKTSKALKAGGIIQLEQGNQLEILDRNDDLFICKSNCETLELLNTQGHIPLPPYISRNDESLDEERYQTIYAKYEGSVAAPTAGLHFDDAVISSLQSRGVNIAYVTLHVGAGTFRPVRCDNIKEHKMHSEQYTLTPELCDAVKATKAAGNRVIAVGTTTLRSLESAAREGELTPCTRDTDIFIYPGYEFKICDGLMTNFHLPESTLLMLVSAFIGHQQAMDLYQEAINKRYRFFSYGDTSLLV

SEQ ID NO: 68065 - protein, 337 aa, Legionella nautarum
  misc_feature (1)..(337): tr|A0A0W0WU20|A0A0W0WU20_9GAMM S-adenosylmethionine:tRN A ribosyltransferase-isomerase OS=Legionella nautarum O X=45070 GN=queA PE=3 SV=1
MNKQDFYFDLPEKLIAQYPLPNRSDSRLFVFNRQTGQYNHHQFKEISEFFQPGDLLVMNNSKVIPARLYGQKQSGGKVELLVERLNGDDSFLAHIKASKAPKAGSLILLAKDWQIEVLQKLDDLYHCKVLGDVDLMLNEIGHIPLPLYITRPDESLDTDRYQTVYARHKGSVAAPTAGLHFDEALIKQLKEKGVNIAYSTLHVGAGTFRPVRSDSIHEHKMHSEQFIVSEELCQAVNSTRAAGKRVIAVGTTSMRSLESAAENGLLKPCNRDTNIFIYPGYQFQICDGLITNFHLPESTLLMLVSAFIGHAQAMALYQEAIALGYRFFSYGDASLLL

SEQ ID NO: 68066 - protein, 337 aa, Legionella norrlandica
  misc_feature (1)..(337): tr|A0A0A2SQI3|A0A0A2SQI3_9GAMM S-adenosylmethionine:tRN A ribosyltransferase-isomerase OS=Legionella norrlandic a OX=1498499 GN=queA PE=3 SV=1
MNKQDFYFDLPTELVAQYPLANRSDSRLLIYRRETEEYGHHQFKEIADFLQPGDLLVMNDSKVMPARLYGHKSTGGKVELLVERVTGDFTFLAHIKASKSLKAGSRIYLDTEKQLEVLERQDDLFLCKASEHVLELLNRLGHIPLPPYITREDELLDKDRYQTVYAKYAGSVAAPTAGLHFDEAVLSSVRARGVNIAYVTLHVGAGTFRPVRCERIQDHKMHSEHFTVSPELCDAVHATKSTGNRVIAVGTTALRSLESAVIDGVLTPCSRNTDIFIYPGYQFKICDGLMTNFHLPESSLMMLVSALIGHKQTMALYQEAINKKYRFFSYGDASLLL

SEQ ID NO: 68067 - protein, 337 aa, Legionella oakridgensis; identical to SEQ ID NO: 68060
  misc_feature (1)..(337): tr|A0A0W0WZN3|A0A0W0WZN3_9GAMM S-adenosylmethionine:tRN A ribosyltransferase-isomerase OS=Legionella oakridgens is OX=29423 GN=queA PE=3 SV=1

SEQ ID NO: 68068 - protein, 337 aa, Legionella oakridgensis; identical to SEQ ID NO: 68060
  misc_feature (1)..(337): tr|W0B7U6|W0B7U6_9GAMM S-adenosylmethionine:tRNA ribosy ltransferase-isomerase OS=Legionella oakridgensis ATCC 33761 = DSM 21215 OX=1268635 GN=queA PE=3 SV=1

SEQ ID NO: 68069 - protein, 337 aa, Legionella parisiensis
  misc_feature (1)..(337): tr|A0A1E5JP91|A0A1E5JP91_9GAMM S-adenosylmethionine:tRN A ribosyltransferase-isomerase OS=Legionella parisiensi s OX=45071 GN=queA PE=3 SV=1
MNKQDFYFDLPPELIAQYPLAHRSDSRLLLYNRQKDEYGHYQFREIADFLNPGDLLVMNDSKVIPARLYGHKTTGGKVELLVERITGEFTFLAHIKASKALKAGSIIKLEHNKEIEVLDREDDLFICKADIDVLQLLNGIGHIPLPPYITRNDEILDQDRYQTVYAKYEGSVAAPTAGLHFDEAVLSSLHSRGVAVAYLTLHVGAGTFRPVRCDNIEDHKMHSEQFTISPELCAAVHATKAAGNRVIAVGTTALRSLESAAQNGVLTACSRDTDIFIYPGYEFKICDGLMTNFHLPESTLLMLVSAFIGHKQAMKLYQEAIEKKYRFFSYGDTSLLL

SEQ ID NO: 68070 - protein, 337 aa, Legionella pneumophila
  misc_feature (1)..(337): sp|Q5ZU04|QUEA_LEGPH S-adenosylmethionine:tRNA ribosylt ransferase-isomerase OS=Legionella pneumophila subsp. p neumophila (strain Philadelphia 1 / ATCC 33152 / DSM 75 13) OX=272624 GN=queA PE=3 SV=2
MNKQDFYFDLPSELIAQYPLANRSDSRLLIYNRQTEEYGHYQFREIADFLQPGDLLVMNDSKVIPARLYGHKATGGKVELLVERITGDFTFLAHIKASKSLKSNDLIYLDAGKRLEVLQRQDDLFLCKACENILDLLNDLGHIPLPPYIAREDESLDKERYQTVYAKCAGSVAAPTAGLHFDDAVLSSIRARGVNIAYVTLHVGAGTFRPVRCERIQDHKMHSEWFTVSPDLCTAVKAAKSMGNRVIAVGTTALRSLESAAMGGELIPCSRDTDIFIYPGYQFKVCDGLITNFHLPESTLVMLVSAFIGHQECMALYQEAIDKRYRFFSYGDASLLL

SEQ ID NO: 68071 - protein, 337 aa, Legionella pneumophila
  misc_feature (1)..(337): sp|A5IDI6|QUEA_LEGPC S-adenosylmethionine:tRNA ribosylt ransferase-isomerase OS=Legionella pneumophila (strain Corby) OX=400673 GN=queA PE=3 SV=1
MNKQDFYFDLPSELIAQYPLANRSDSRLLIYNRQTEEYGHYQFREIADFLQPGDLLVMNDSKVIPARLYGHKATGGKVELLVERITGDFTFLAHIKASKSLKSNDFIYLDAGKRLEVLERQDDLFLCKASENILDLLNDLGHIPLPPYIAREDESLDKERYQTVYAKCAGSVAAPTAGLHFDDAVLSSIRARGVNIAYVTLHVGAGTFRPVRCERIQDHKMHSEWFTVSPDLCAAVKAAKSMGNRVIAVGTTALRSLESAAMGGELIPCSRDTDIFIYPGYQFKVCDGLITNFHLPESTLVMLVSAFIGHQECMALYQEAIDKRYRFFSYGDASLLL

SEQ ID NO: 68072 - protein, 337 aa, Legionella quateirensis
  misc_feature (1)..(337): tr|A0A378KZM2|A0A378KZM2_9GAMM S-adenosylmethionine:tRN A ribosyltransferase-isomerase OS=Legionella quateirens is OX=45072 GN=queA PE=3 SV=1
MNKQDFYFDLPEELIAQYPLAQRSDSRLLTYNRQSGEYGHYQFREIADFLNPGDLLVMNDSKVIPARLYGHKLSGGKVELLVERITGPNTFLAHIKASKALKPGGIIQLEQGNQLEILDRNDDLFVCKSNCDALSLLNTLGHIPLPPYITRNDELLDEDRYQTVYAKHAGSVAAPTAGLHFDDAVISSLKSRGVNISYVTLHVGAGTFRPVRCDNIKDHKMHSEQFTLSPELCAAVHATKAAGNRVIAVGTTALRSLESAARDGELSPCSRDTDIFIYPGYQFKVCDGLMTNFHLPESTLLMLVSAFIGHQQAMDLYQEAIKKGYRFFSYGDTSLLL

SEQ ID NO: 68073 - protein, 337 aa, Legionella quinlivanii
  misc_feature (1)..(337): tr|A0A0W0XL87|A0A0W0XL87_9GAMM S-adenosylmethionine:tRN A ribosyltransferase-isomerase OS=Legionella quinlivani i OX=45073 GN=queA PE=3 SV=1
MKKQDFYFELPQELIAQYPLPNRSDSRLLYYNRKQAAYQHQQFKNLPELLEPNDLLVLNNTKVIPARFFGTKSTGGKVEFLIERRMADNQFLAHIKASKTPKNRSLIQLEKAWQVEILDKLDDLYLCRSLGDLDCLLQEVGHIPLPLYITREDEQADEERYQTVYAKHEGSVAAPTAGLHFDEFVISQLQEKGIRLMNVTLHVGAGTFRPVRCDDIRDHKMHREQFEVSEAVCEAVNETRQRGGRVIAVGTTAMRTLESAASEGHLKACKGETDIFIYPGYQFKVCDGLITNFHLPESTLLMLVSAFLGREQTMALYEEAIARRYRFYSYGDATLLL

SEQ ID NO: 68074 - protein, 337 aa, Legionella quinlivanii
  misc_feature (1)..(337): tr|A0A364LJZ3|A0A364LJZ3_9GAMM S-adenosylmethionine:tRN A ribosyltransferase-isomerase OS=Legionella quinlivani i OX=45073 GN=queA PE=3 SV=1
MKKQDFYFELPQELIAQYPLPNRSDSRLLYYNRKQAAYQHQQFKNLSELLAPDDLLVLNNTKVIPARFFGTKSTGGKVEFLIERRMADNQFLAHIKASKTPKNGSLIQLEKAWQVEVLDKLDDLYLCRSLGDLDCLLQEVGHIPLPLYITREDEQADEERYQTVYAKHEGSVAAPTAGLHFDEFVISQLQEKGIRLMDVTLHVGAGTFRPVRCDDIRDHKMHREQFEVSEAVCEAVSETRQRGGRVIAVGTTAMRTLESAARDGYLKACKGETDIFIYPGYQFKVCDGLITNFHLPESTLLMLVSAFLGREQTMALYEEAIARRYRFYSYGDATLLL

SEQ ID NO: 68075 - protein, 337 aa, Legionella rubrilucens
  misc_feature (1)..(337): tr|A0A0W0XRR4|A0A0W0XRR4_9GAMM S-adenosylmethionine:tRN A ribosyltransferase-isomerase OS=Legionella rubrilucen s OX=458 GN=queA PE=3 SV=1
MYKHDFYFDLPEELIAQYPLPGRSDSRLLVYHRDDEQYRHQQFKQLPDFLNEGDLLVMNNSKVIPARFFGKKPSGGQVEFLIERLKPDNQFIAHIKASKAPKAQMIIDLANGWQVQILAKQDDLYHCQTLGDLETMLADIGHIPLPPYITRHDEKADFERYQTIYARHKGSVAAPTAGLHFDDSLMERLQQKGVQIAYSTLHVGAGTFRPVRCEAIKDHKMHSEQLIISDALAEAVNRTRASGRRVIAVGTTALRSLESAVVDGRLQACVKETDIFIYPGYEFKICDGLITNFHLPESTLLMLVSAFIGHARAMDLYREAIAERYRFFSYGDASLLL

SEQ ID NO: 68076 - protein, 337 aa, Legionella sainthelensi
  misc_feature (1)..(337): tr|A0A0W0YCC0|A0A0W0YCC0_9GAMM S-adenosylmethionine:tRN A ribosyltransferase-isomerase OS=Legionella sainthelen si OX=28087 GN=queA PE=3 SV=1
MNKEDFYFDLPPELIAQYPLANRSDSRLLVYDRKIGEYGHHQFREIADFLKSGDLLVMNDSKVIPARLYGHKTTGGKVELLVERITGELTFLAHIKASKALKAGSIIQLEQNKHIEILDRQDDLFVCKANTEVLELLNGVGHIPLPPYIARNDESLDIDRYQTIYAKYEGSVAAPTAGLHFDETVLANIRSRGIAVAYVTLHVGAGTFRPVRCDKIEDHKMHCEHFTISAELCAAIHATKAAGNRVIAVGTTALRSLESAVQNGALTPCSRDTDIFIYPGYEFKICDGLMTNFHLPESTLLMLVSAFIGHKQAMKLYHEAIEKKYRFFSYGDTSLLL

SEQ ID NO: 68077 - protein, 283 aa, Legionella sainthelensi
  misc_feature (1)..(283): tr|A0A3S4L5S6|A0A3S4L5S6_9GAMM S-adenosylmethionine:tRN A ribosyltransferase-isomerase OS=Legionella sainthelen si OX=28087 GN=queA_1 PE=3 SV=1
MNKEDFYFDLPPELIAQYPLANRSDSRLLVYDRKIGEYGHHQFREIADFLKSGDLLVMNDSKVIPARLYGHKTTGGKVELLVERITGELTFLAHIKASKALKAGSMIQLEQNKYIEILDRQDDLFVCKANTEVLELLNGVGHIPLPPYIARNDESLDIDRYQTIYAKYEGSVAAPTAGLHFDETVLANIRSRGIAVAYVTLHVGAGTFRPVRCEKIEDHKMHCEHFTISAELCAAIHATKAAGNRVIAVGTTALRSLESAVQNGALTPCSRDTDIFIYPGYEF

SEQ ID NO: 68078 - protein, 337 aa, Legionella santicrucis
  misc_feature (1)..(337): tr|A0A0W0YFP9|A0A0W0YFP9_9GAMM S-adenosylmethionine:tRN A ribosyltransferase-isomerase OS=Legionella santicruci s OX=45074 GN=queA PE=3 SV=1
MNKEDFYFNLPPELIAQYPLANRSDSRLLVYDRKIGEYSHHQFREIADFLKPGDLLVMNDSKVIPARLYGHKTTGGKVELLVERITGELTFLAHIKASKALKAGSIIQLEQNKHIEVLDRQDDLFVCKADMEVLELLNGVGHIPLPPYIARNDETLDKDRYQTIYAKYEGSVAAPTAGLHFDAAVLSHIRSRGISVAYVTLHVGAGTFRPVRCDNIADHKMHHEHFTISAELCAAIQATKVAGNRVIAVGTTALRSLESAAQNGVLTPCSRDTDIFIYPGYEFKICDGLMTNFHLPESTLLMLVSAFIGHTQAMKLYQEAIEKKYRFFSYGDTSLLL

SEQ ID NO: 68079 - protein, 337 aa, Legionella shakespearei
  misc_feature (1)..(337): tr|A0A0W0ZB93|A0A0W0ZB93_9GAMM S-adenosylmethionine:tRN A ribosyltransferase-isomerase OS=Legionella shakespear ei DSM 23087 OX=1122169 GN=queA PE=3 SV=1
MNKQDFYFDLPPELIAQYPLANRSDSRLLIYNREVREYGHYQFREIADFLNPGDLLVMNDSKVIPARLYGHKATGGKVELLVERITGEFTFLAHIKASKALKAGGIIHLDQGNQLVILERQDDLFVCQTQTEVLPLLNHLGHIPLPPYITRNDEQSDEDRYQTVYAKYEGSVAAPTAGLHFDESVLASLKSRGVNVAYVTLHVGAGTFRPVRTDDIKEHKMHSEQFTVSDELCAAVAATKAAGNRVIAIGTTALRSLESAARSGVLQACSGDTDIFIYPGYQFKVCDGLMTNFHLPESTLLMLVSAFIGHQEAMSLYQEAINQGYRFFSYGDTSLLL

SEQ ID NO: 68080 - protein, 242 aa, Legionella sp.
  misc_feature (1)..(242): tr|A0A1Q4CFH4|A0A1Q4CFH4_9GAMM S-adenosylmethionine:tRN A ribosyltransferase-isomerase (Fragment) OS=Legionella sp. 40-6 OX=1895903 GN=BGO90_03615 PE=3 SV=1
MNKQDFYFNLPEELIAQYPLPNRSDSRLLVYDRKTHEHKHHSFKSITDFLEPGDLLVLNNSKVIPARLFGQKMTGGKVELLVERIIDERKFLAHIKASKALQAGSIVLLEKGQQLEILGRDDDLFICQTQIPALELLHQAGHIPLPPYITRQDELMDVSRYQTVYAQDAGSVAAPTAGLHFDEEVLAKVQAKGVKIGYVTLHVGAGTFRPVRSEQITDHKMHKEFFTVDEALCQAVSETKAA

SEQ ID NO: 68081 - protein, 337 aa, Legionella sp.
  misc_feature (1)..(337): tr|A0A522EXS6|A0A522EXS6_9GAMM S-adenosylmethionine:tRN A ribosyltransferase-isomerase OS=Legionella sp. OX=459 GN=queA PE=3 SV=1
MNRQDFYFDLPPELIAQFPLAQRSDSRLLTYNRQQGEYGHHQFRDIADFLNPGDLLVMNDSKVIPARLYGQKTTGGKVELLVERITGEFTFLAHIKASKALKAGGIIQLEKGQRLEILGRDDDLFICKASAEVLSLLDGLGHMPLPPYITRSDELLDEDRYQTIYAKYAGSVAAPTAGLHFDDTVLARLKSKGVNIAYITLHVGAGTFKPVRSDKITEHKMHSERFTISPELCAAVQATKAAGKRVIAVGTTSLRSLESAAVAGQLQACSRDTDIFIYPGYQFKICDGLMTNFHLPESTLLMLVSAFIGHQEAMNLYQEAINKKYRFFSYGDTSLLL

SEQ ID NO: 68082 - protein, 337 aa, Legionella spiritensis
  misc_feature (1)..(337): tr|A0A0W0Z9A3|A0A0W0Z9A3_LEGSP S-adenosylmethionine:tRN A ribosyltransferase-isomerase OS=Legionella spiritensi s OX=452 GN=queA PE=3 SV=1
MYKQDFYFDLPPELIAQHPLPERSDSRLLVYHRQGGHYEHQQFKNLVDFLNPGDLLVMNDSKVIPARFYGSKASGGRVEFLVERLQGERRFLSHIKASKAPKPDSIIHLEKGWHIRVLAKIEDLYQCEASGELNTMLDEIGHIPLPLYITRQDDEMDLKRYQTVYARHKGSVAAPTAGLHFDDALMQRLQEHGVRIAYATLHVGAGTFRPVRCDAIKDHKMHGEQLTISEELARIVNETKAAGHRVIAVGTTAMRSLESSMDNGCLLPGTRETNIFIYPGYQFKICDGLITNFHLPESTLLMLVAAFIGHPQALDLYREAILHRYRFFSYGDASLLL

SEQ ID NO: 68083 - protein, 337 aa, Legionella steelei
  misc_feature (1)..(337): tr|A0A0W0ZDP4|A0A0W0ZDP4_9GAMM S-adenosylmethionine:tRN A ribosyltransferase-isomerase OS=Legionella steelei OX =947033 GN=queA PE=3 SV=1
MNKQDFYFDLPPELIAQYPLANRSDSRLLTYNRQKGEYGHYQFREIADFLNPGDLLVMNDSKVIPARLYGHKTTGGKVELLVERITGELTFLAHIKASKALKSGSIIKLDQNKEIEILDRQDDLFICKADMEVLKLLNGIGHIPLPPYITRNDETLDLDRYQTVYAKYEGSVAAPTAGLHFDESVLSSIQSRGVTVAYLTLHVGAGTFRPVRSDNIKDHKMHSERFTISPELCAAVHATKAAGNRVIAIGTTALRSLESAAQDGVLTACSRDTDIFIYPGYQFKICDGLMTNFHLPESTLLMLVSAFIGHERAMMLYQEAIEKRYRFFSYGDTSLLL

SEQ ID NO: 68084 - protein, 337 aa, Legionella steigerwaltii
  misc_feature (1)..(337): tr|A0A378LCJ2|A0A378LCJ2_9GAMM S-adenosylmethionine:tRN A ribosyltransferase-isomerase OS=Legionella steigerwal tii OX=460 GN=queA PE=3 SV=1
MNKQDFYFDLPPELIAQYPLANRSDSRLLIYDRQKGEYGHYQFREIADFLNPGDLLVMNDSKVIPARLYGHKTTGGKVELLVERITGEFTFLAHIKASKALKSGSVIKLEQNKEIEILDRHDDLFMCRADMDVLNLLNGIGHIPLPPYITRTDETLDQDRYQTVYAKYEGSVAAPTAGLHFDESVLSSLNSRGVAVAYLTLHVGAGTFRPVRCDNIKDHKMHSEQFTISPELCAAVHATKAAGNRVIAVGTTALRSLESAVQDGMLTPCSRDTDIFIYPGYEFKICDGLMTNFHLPESTLLMLVSAFVGHQQAMMLYQEAIEKGYRFFSYGDTSLLL

SEQ ID NO: 68085 - protein, 337 aa, Legionella taurinensis
  misc_feature (1)..(337): tr|A0A3A5LGD7|A0A3A5LGD7_9GAMM S-adenosylmethionine:tRN A ribosyltransferase-isomerase OS=Legionella taurinensi s OX=70611 GN=queA PE=3 SV=1
MYKHDFYFHLPEELIAQYPLPGRSDSRLLVYRRGEEQYRHQQFKQLPDFLNDGDLLVMNNSKVIPARFFGRKPSGGQVEFLIERLKPDNQFLAHIKASKAPKAQMIIDLANGWQVQILAKQDDLYHCQTLGDLDTMLADIGHIPLPPYITRHDEKADFERYQTVYARHKGSVAAPTAGLHFDDSLMAQLQQKGVQIAYSTLHVGAGTFRPVRCEAIKDHKMHSEQLIISDALAEAVNRTRASGKRVIAVGTTALRSLESAVVDGQLQACVKETDIFIYPGYEFKICDGLITNFHLPESTLLMLVSAFIGHARAMDLYREAIAERYRFFSYGDASLLL

SEQ ID NO: 68086 - protein, 337 aa, Legionella tucsonensis
  misc_feature (1)..(337): tr|A0A0W0ZY27|A0A0W0ZY27_9GAMM S-adenosylmethionine:tRN A ribosyltransferase-isomerase OS=Legionella tucsonensi s OX=40335 GN=queA PE=3 SV=1
MNKQDFYFDLPPELIAQYPLSKRSDSRLLIYNRQKGECGHYQFREIADFLNPGDLLVMNDSKVIPARLYGHKNTGGKVELLVERITDEFTFLAHIKASKALKAGSIIKLEHNKEIEVLDRKDDLFICKANMDVLQLLNGIGHIPLPPYITRNDEILDQDRYQTVYAKYEGSVAAPTAGLHFDESVLSSLRSRGVAVAYLTLHVGAGTFRPVRCDNIKEHKMHSEQFTISPELCAAVHATKAAGNRVIAVGTTTLRSLESAAQDGVLTACSKDTDIFIYPGYEFKICDGLMTNFHLPESTLLMLVSAFIGHKQAMMLYQEAIEKRYRFFSYGDTSLLL

SEQ ID NO: 68087 - protein, 337 aa, Legionella wadsworthii
  misc_feature (1)..(337): tr|A0A378LPU3|A0A378LPU3_9GAMM S-adenosylmethionine:tRN A ribosyltransferase-isomerase OS=Legionella wadsworthi i OX=28088 GN=queA PE=3 SV=1
MNKQDFYFDLPQELIAQYPLPHRSDSRLLVYNRQNEGYGHYQFREIADFLNPGDLLVMNNSKVIPARLYGHKTTGGKVELLVERITSEYTFLAHIRASKALKPGSIIQLEQHKEIEILERQDDLFVCKADIQVLELLNGIGHIPLPPYINRNDENLDHDRYQTVYAKYEGSVAAPTAGLHFDEAVLKSIQARGVSVAYLTLHVGAGTFRPVRCDDIKDHKMHREHFTISPELCTAVQAAKASGNRVIAIGTTALRSLESAAQDGVLTACSRDTDIFIYPGYEFKICDGLMTNFHLPESTLLMLVSAFIGHKQAMALYQEAIEKKYRFFSYGDTSLLL

SEQ ID NO: 68088 - protein, 337 aa, Legionella waltersii
  misc_feature (1)..(337): tr|A0A0W1ANW4|A0A0W1ANW4_9GAMM S-adenosylmethionine:tRN A ribosyltransferase-isomerase OS=Legionella waltersii OX=66969 GN=queA PE=3 SV=1
MNTHDFYFDLPPELIAQYPLDKRSDSRLLVYNRHQSSYGHHQFKDIADFLNSGDLLVMNNSRVIPARLYGSKSTGGKVELLVERIIDGDKILAHIKASKALKPGSLIHLDQGFELEVIDRQDDLFHCKSSAPILDLLNRIGHIPLPPYITRDDENLDKSRYQTVYAKYDGSVAAPTAGLHFDDQVLEKLAVKGVNVSYVTLHVGAGTFRPVRCEKIQDHKMHSEQFTISQELCDAVKVTKEAGNRVIAIGTTAMRSLESAAVSGELCPCSRDTDIFIYPGYEFRICDGLMTNFHLPESTLLMLVSAFIGHRQAMDLYQEAIDKKYRFFSYGDTSLLL

SEQ ID NO: 68089 - protein, 337 aa, Legionella worsleiensis
  misc_feature (1)..(337): tr|A0A0W1AIX6|A0A0W1AIX6_9GAMM S-adenosylmethionine:tRN A ribosyltransferase-isomerase OS=Legionella worsleiens is OX=45076 GN=queA PE=3 SV=1
MNKHDFYFDLPEELIAQYPLPERSDSRLLIYNRQSGEYGHYQFREIADFLNPGDLLVMNDSKVIPARLYGHKLTGGKVELLVERITGPNTFLAHIKASKALKPGGIIQLEQGNQLEILDRDDDLFICKSSLETINLLNTVGHIPLPPYISRNDEAMDKDRYQTVYAKHEGSVAAPTAGLHFDDAVISSLHARGVNIAYVTLHVGAGTFRPVRCDDIKEHKMHSEQYTVTPELCAAVQATKAAGNRVIAIGTTAMRSLESAAKDGDLTPGTKDTDIFIYPGYQFRVCDGLMTNFHLPESTLLMLVSAFIGHQQAMDLYQEAINKRYRFFSYGDTSLLI

SEQ ID NO: 68090 - protein, 337 aa, Legionellaceae bacterium
  misc_feature (1)..(337): tr|A0A2E5Y6X2|A0A2E5Y6X2_9GAMM S-adenosylmethionine:tRN A ribosyltransferase-isomerase OS=Legionellaceae bacter ium OX=2026753 GN=queA PE=3 SV=1
MNTQDFDFDLPAELIAQYPLEERRASRLLYFNRQTKNHEHSSVASIANYLKPGDLLVMNDSKVIPARFFGKKETGGQVEFLVERLLDAHTFLAHIKASKALKPGMKVIINAKWQVEIIAKHDDLYHCRVSGYISELMDEVGHMPLPPYITRCDSAFDKTRYQTVYARYDGSVAAPTAGLHFDQALLTQLEEKGVELGYVTLHVGAGTFRPVRVETLAEHTMHAEQFTVSQALCTQIQATKARGGRVIAVGTTSMRSLESAAQNGELKACTKETRIFIYPGFKFQVCDGLLTNFHLPQSTLIMLVAAFIGQTQTKALYQTAINAGYRFFSYGDTSLLL

SEQ ID NO: 68091 - protein, 337 aa, Legionellales bacterium
  misc_feature (1)..(337): tr|A0A352C645|A0A352C645_9GAMM S-adenosylmethionine:tRN A ribosyltransferase-isomerase OS=Legionellales bacteri um OX=2026754 GN=queA PE=3 SV=1
MLRQDFNYELPEHLIAQFPVYPRHTARLLAYSRAQDSIQHHTQVLDIVDYFQAGDLLISNDTKVLPARFYAQKTSGGKVEVLMERMLSETTMLCHIRSSKSPKAGAEILVNEQWSLKVLGREHDLFHVEANGSIVKMLNEVGHMPLPPYIQRADEESDKTSYQTIFAKHEGSVAAPTAGLHFDEVLLKKLQDKQVDMASVTLHVGAGTFQPVRVDAIKDHVMHYEWYEVSPELLAKIKKTKAYGNRVIAVGTTSLRALESAARNDFAKLSGLTNLFITPGYEFQVIDGLMTNFHLPESTLLMLVSALIGHEPLMRVYQEAVSLSYRFFSYGDACLFI

SEQ ID NO: 68092 - protein, 345 aa, Legionellales bacterium
  misc_feature (1)..(345): tr|A0A2E0GWC0|A0A2E0GWC0_9GAMM S-adenosylmethionine:tRN A ribosyltransferase-isomerase OS=Legionellales bacteri um OX=2026754 GN=queA PE=3 SV=1
MTYTTADFDYALPSELIAQEPLIERSRSRMITIDATQQHFSDSDFQDIVDLVQPDDLIIFNDTRVFPARFSGRKITGGKVEGLVERIVDSQTAWVHLKCSKSPKVGSVLNLGADLSVVVEERDHDLFCLKIRGCQSPGWLAWLELHGDLPLPPYITRQPDQTDFQRYQTVFAQQVGAVAAPTAGLHFDNALLDQLQKKSIAMEYITLHVGAGTFQPVRVESLSEHVMHKEWITVSVSVCEAIESCRKRGGRVIAIGTTVLRALETAALSGQLAPFEGDTNLFITPGFKFNVVDSLLTNFHLPQSTLLMLVSAFGGYDLMRKAYRHAVDSQYRFFSYGDCMLVHRH

SEQ ID NO: 68093 - protein, 354 aa, Leisingera aquaemixtae
  misc_feature (1)..(354): tr|A0A0P1HBN8|A0A0P1HBN8_9RHOB S-adenosylmethionine:tRN A ribosyltransferase-isomerase OS=Leisingera aquaemixta e OX=1396826 GN=queA PE=3 SV=1
MKLSDFDFDLPDALIATRPANPRSSARLLVAAGGNLHDGRVTDLVDWLQPGDRLVLNDTKVIPARLSGQRHRDSAQGLVSAKIEATLLEPRADGNWAALLKPLKKIREGEEIVFSEDLSATLEAIEDGQGHLRFNLSGTDFDAALAEAGAMPLPPYIAAKRAADEQDKTDYQTVWARNSGAVAAPTASLHFDAPLLEALKARGVEISYVTLHVGAGTFLPVKVEDVTTHRMHAEWGKVSEGAAADIAATKASGGRVIPVGTTALRLIESAAKDGQIHAWEGDTDIFIYPGFEFQVADALMTNFHLPKSTLLMLVSALMGQEEIRRIYDHAVRSGYRFFSYGDASLLIPAKADTP

SEQ ID NO: 68094 - protein, 361 aa, Leisingera methylohalidivorans
  misc_feature (1)..(361): tr|V9VT20|V9VT20_9RHOB S-adenosylmethionine:tRNA ribosy ltransferase-isomerase OS=Leisingera methylohalidivoran s DSM 14336 OX=999552 GN=queA PE=3 SV=1
MKLSDFDFDLPDDLIATRPASPRSAARLLVAAGGDLHDGQVTDLVRWLNPGDRLVLNDTKVIPARLSGLRHRDSAQGAVAARIEATLLEPRADGTWAALLKPLKKIKPGEEIVFSADLSATLEAVSEGQGHLRFNLSGTGFDAALAEAGAMPLPPYIAAKRAADEQDKTDYQTVWARNSGAVAAPTASLHFDAPLLAALKARGVEISYVTLHVGAGTFLPVKVEDVTTHRMHAEWGRVSEQAAAEIAATKAAGGRVIPVGTTALRLIESAAKDGQIHPWEGDTDIFIYPGFGFQVADALMTNFHLPKSTLLMLVSALMGQEEIRRIYDHAVGNRYRFFSYGDASLLIPAKADTLQKSGKKS

SEQ ID NO: 68095 - protein, 361 aa, Leisingera sp.
  misc_feature (1)..(361): tr|A0A0B4BXK6|A0A0B4BXK6_9RHOB S-adenosylmethionine:tRN A ribosyltransferase-isomerase OS=Leisingera sp. ANG-Vp OX=1577896 GN=queA PE=3 SV=1
MKLSDFDFNLPDDLIATRPANPRSSARLLVASDGALHDGKVTDLVDWLQPGDRLVLNDTKVIPARLSGLRHRDSAQGPVSAKIEATLLEPRADGSWAALLKPLKKIKQGEEIVFSDDLSATLEDVSEGQGRLRFNLSGTDFDAALAEAGAMPLPPYIAAKRAADEQDKTDYQTVWARNSGAVAAPTASLHFDAPLLDALASRGVEISYVTLHVGAGTFLPVKVEDVTTHRMHAEWGKVSGEAAAEIAATKAAGGRVIPVGTTALRLIESAAKDGQIHPWEGDTDIFIYPGFEFQVADALMTNFHLPKSTLLMLVSALMGREEILQIYDHAVRSGYRFFSYGDASLLIPAKADTPQKNGANP

SEQ ID NO: 68096 - protein, 361 aa, Leisingera sp.
  misc_feature (1)..(361): tr|A0A481PLP1|A0A481PLP1_9RHOB S-adenosylmethionine:tRN A ribosyltransferase-isomerase OS=Leisingera sp. NJS204 OX=2508307 GN=queA PE=3 SV=1
MKLSDFDFDLPDDLIATRPANPRSAARLLVAAGGELHDGQVTDLVQWLQPGDRLVLNDTKVIPARLSGLRHRDSAQGPVAAKIEATLLEPRADGSWAALLKPLKKIKPGEDIVFSDDLSATLETVSEGQGHLRFNLSGTDFDAALAEAGAMPLPPYIAAKRAADEQDKTDYQTVWARNTGAVAAPTASLHFDAPLLAALKARGVDVSYVTLHVGAGTFLPVKVEDVTTHRMHAEWGKVSAQAAAEITATKAAGKRVIPVGTTALRLIESAAKDGQIHAWEGDTDIFIYPGFGFQVADALMTNFHLPKSTLLMLVSALMGQEEIRRIYEHAVGNRYRFFSYGDASLLIPAKADTPQKSGANS

SEQ ID NO: 68097 - protein, 356 aa, Lelliottia amnigena
  misc_feature (1)..(356): tr|A0A3S5XXY1|A0A3S5XXY1_LELAM S-adenosylmethionine:tRN A ribosyltransferase-isomerase OS=Lelliottia amnigena O X=61646 GN=queA PE=3 SV=1
MRVADFSFELPESLIAHYPQPERSGCRLLSLDGPTGALTHGTFTDLLDKLNPGDLLVFNNTRVIPARLFGRKASGGKIEVLVERMLDDKRILAHIRASKAPKPGAELLLGDDESINATMVARHDALFEVEFNDERPVLDILNAIGHMPLPPYIDRPDEDADRELYQTVYSQKPGAVAAPTAGLHFDEPLLERLREKGIEMAFVTLHVGAGTFQPVRVDTIEDHIMHSEYAEVPQDVVDAVLAAKARGNRVIAVGTTSVRSLESAAQAAKKDLIEPFFGDTQIFIFPGYQYTVIDALVTNFHLPESTLIMLVSAFAGYQNTMNAYKAAVEQNYRFFSYGDAMFITYNPQALNERVGE

SEQ ID NO: 68098 - protein, 356 aa, Lelliottia amnigena
  misc_feature (1)..(356): tr|A0A1A9F7Q4|A0A1A9F7Q4_LELAM S-adenosylmethionine:tRN A ribosyltransferase-isomerase OS=Lelliottia amnigena O X=61646 GN=queA PE=3 SV=1
MRVADFSFELPESLIAHYPMPERSSCRLLSLDGPTGALTHGTFTDLLDKLNPGDLLVFNNTRVIPARLFGRKASGGKIEVLVERMLDDKRILAHIRASKAPKPGAELLLGDDESIKATMTARHDALFEVAFNDERTVLDILNAIGHMPLPPYIDRPDEDADRELYQTVYSQKPGAVAAPTAGLHFDDPLLAALREKGVEMAFVTLHVGAGTFQPVRVDSIEDHIMHSEYAEVPQDVVDAVLAAKARGSRVIAVGTTSVRSLESAAQAATSDLIEPFFGDTQIFIYPGYQYKVIDALVTNFHLPESTLIMLVSAFAGYQHTMAAYKSAVEQKYRFFSYGDAMFITYNPQALNERVGE

SEQ ID NO: 68099 - protein, 356 aa, Lelliottia nimipressuralis
  misc_feature (1)..(356): tr|A0A4Y8IWZ6|A0A4Y8IWZ6_9ENTR S-adenosylmethionine:tRN A ribosyltransferase-isomerase OS=Lelliottia nimipressu ralis OX=69220 GN=queA PE=3 SV=1
MRVADFSFELPESLIAHYPMPERSSCRLLSLDGPTGELTHGTFTDLLDKLNPGDLLVFNNTRVIPARLFGRKASGGKIEVLVERMLDDKRILAHIRASKAPKPGAELLLGDDESIKATMTARHDALFEVEFNDERTVLDILNAIGHMPLPPYIERPDEEADRELYQTVYSQKPGAVAAPTAGLHFDEPLLEKLRAKGIEMAFVTLHVGAGTFQPVRVDSIEDHIMHSEYAEVPQDVVDAVLAAKARGSRVIAVGTTSVRSLESAAQAAKNDLIEPFFGDTQIFIYPGYQYKVIDALVTNFHLPESTLIMLVSAFAGYQHTMNAYKSAVEQKYRFFSYGDAMFITYNPLALNERVGE

SEQ ID NO: 68100 - protein, 356 aa, Lelliottia nimipressuralis
  misc_feature (1)..(356): tr|A0A4V1LIF6|A0A4V1LIF6_9ENTR S-adenosylmethionine:tRN A ribosyltransferase-isomerase OS=Lelliottia nimipressu ralis OX=69220 GN=queA PE=3 SV=1
MRVADFSFELPESLIAHYPQPERSGCRLLSLDGPTGALTHGTFTDLLDKLNPGDLLVFNNTRVIPARLFGRKASGGKIEVLVERMLDDKRILAHIRASKAPKPGAELLLGDDESINATMTARHGALFEVEFNDERPVLDILNAIGHMPLPPYIDRPDEDADRELYQTVYSEKPGAVAAPTAGLHFDEPLLEKLREKGIEMAFVTLHVGAGTFQPVRVDSIEDHIMHSEYAEVPQGVVDAVLAAKARNNRVIAVGTTSVRSLESAAQAAKTDLIEPFFGDTQIFIYPGYQYKVIDALVTNFHLPESTLIMLVSAFAGYQHTMNAYKAAVEQNYRFFSYGDAMFITYNPQALNERVGD

SEQ ID NO: 68101 - protein, 356 aa, Lelliottia sp.
  misc_feature (1)..(356): tr|A0A2S5C3W5|A0A2S5C3W5_9ENTR S-adenosylmethionine:tRN A ribosyltransferase-isomerase OS=Lelliottia sp. 7254-1 6 OX=2080842 GN=queA PE=3 SV=1
MRVADFSFELPESLIAHYPQPERSGCRLLSLDGPTGALTHGTFTDLLDKLNPGDLLVFNNTRVIPARLFGRKASGGKIEVLVERMLDDKRILAHIRASKAPKPGAELLLGDDESINATMTARHGALFEVEFNDERPVLDILNAIGHMPLPPYIDRPDEDADRELYQTVYSEKPGAVAAPTAGLHFDEPLLEKLREKGIEMAFVTLHVGAGTFQPVRVDSIEDHIMHSEYAEVPQEVVDAVLAAKARNSRVIAVGTTSVRSLESAAQAAKTDLIEPFFGDTQIFIYPGYQYKVIDALVTNFHLPESTLIMLVSAFAGYQNTMNAYKAAVEQNYRFFSYGDAMFITYNPSAIQERVGE

SEQ ID NO: 68102 - protein, 354 aa, Leminorella grimontii
  misc_feature (1)..(354): tr|A0A085HHL8|A0A085HHL8_9GAMM S-adenosylmethionine:tRN A ribosyltransferase-isomerase OS=Leminorella grimontii ATCC 33999 = DSM 5078 OX=1005999 GN=queA PE=3 SV=1
MRVSDFSFELPESLIARYPQEQRSACRLLGLNGESGELSDGVFTDVLDKLEAGDLLVFNNTRVIPARLFGRKASGGKIEMLVERVLDDHRVLAHVRASKAPKPGAQLLLGDDESIPATMVARHDALFEVRFDDGRDVLAILNAAGHMPLPPYIDRPDEEADRELYQTVYSEKPGAVAAPTAGLHFDEPLLEALRQKGVEMAFVTLHVGAGTFQPVRVDDVKEHVMHSEYAEVPQDVVDAVLACKARGNRVIAVGTTSVRSLESAAQASGEGVLQPFFNDTAIFIYPGYRFRVIDALITNFHLPESTLIMLVSAFAGYANTMKAYRQAVEKQYRFFSYGDAMFITRNPQAINEIP

SEQ ID NO: 68103 - protein, 354 aa, Leminorella grimontii; identical to SEQ ID NO: 68102
  misc_feature (1)..(354): tr|A0A485AHI7|A0A485AHI7_9GAMM S-adenosylmethionine:tRN A ribosyltransferase-isomerase OS=Leminorella grimontii OX=82981 GN=queA PE=3 SV=1

SEQ ID NO: 68104 - protein, 358 aa, Leminorella richardii
  misc_feature (1)..(358): tr|A0A2X4V972|A0A2X4V972_9GAMM S-adenosylmethionine:tRN A ribosyltransferase-isomerase OS=Leminorella richardii OX=158841 GN=queA PE=3 SV=1
MRVSDFSFELPESLIAHYPQEKRSACRLLSLNGESGELSDGVFTDILDKLEEGDLLVFNNTRVIPARLFGRKASGGKIEMLVERVLDDRRVLAHVRASKAPKPGTELLLGDDESIPATMVARHDALFEVQFNDGRDVLTILNAAGHMPLPPYIDRPDEDADRELYQTVYSEKPGAVAAPTAGLHFDEPLLDALRRKGVETAFVTLHVGAGTFQPVRVDDVKEHIMHSEYAEVPQDVVDAVLACKARGNRVIAVGTTSVRSLESAAQASGEGELKPFFDDTAIFIYPGYRFKVIDALITNFHLPESTLIMLVSAFAGYSNTMKAYRWAVDKQYRFFSYGDAMFITQNLQAVDEVINKNC

SEQ ID NO: 68105 - protein, 342 aa, Lentibacillus amyloliquefaciens
  misc_feature (1)..(342): tr|A0A0U4E4J6|A0A0U4E4J6_9BACI S-adenosylmethionine:tRN A ribosyltransferase-isomerase OS=Lentibacillus amyloli quefaciens OX=1472767 GN=queA PE=3 SV=1
MNIDEFDFDLPDDLIAQTPLKNRDASRLLVLHRTEQEIEHKQFTDIKRYLKKGDCLVLNDTRVLPARLYGIKEDTGANVEVLLLHQQGKDLWEVLVKPAKKVKKGTVINFGDGKIRATCTGLKDHGGRILQLAYEGIFYEILNELGQMPLPPYIKEQLSEKERYQTVYASEEGSAAAPTAGLHFTNELLDEIKAMGVSIEFITLHVGLGTFRPVSADKIEEHKMHAEFYHMSGKTAEKLKTVKENGGRIISVGTTSTRTLETIVRDNNGNFAESSGWTDIFIYPPYEFQAIDGLITNFHLPKSTLIMMVSAFANRESIMNAYQEAVNERYRFFSFGDAMLIL

SEQ ID NO: 68106 - protein, 342 aa, Lentibacillus halodurans
  misc_feature (1)..(342): tr|A0A1I0UYL9|A0A1I0UYL9_9BACI S-adenosylmethionine:tRN A ribosyltransferase-isomerase OS=Lentibacillus halodur ans OX=237679 GN=queA PE=3 SV=1
MKPEEFDFDLPDELIAQTPLKNRTASRLLVLHRDTQEVKHKQFSDIKSYLKKGDCLVLNDTRVLPARLYGIKDDTGAKVEVLLLHQQEKDTWEVLVKPAKKVKIGTVIVFGDGKIRATCTGLKEHGGRILQLEYEGIFYELLEELGEMPLPPYIKEQLPEKERYQTVYAKEEGSAAAPTAGLHFTNELLDEIRAMGVTIEFITLHVGLGTFRPVSVEKIEEHKMHAEFYQMSKKTADTLSSVKENGGRIISVGTTSTRTLETIVRDNNGKFTESSGWTDIFIYPPYEFQAVDGLITNFHLPKSTLIMMVSAFAGRENIMNAYQEAVDKRYRFFSFGDAMLIL

SEQ ID NO: 68107 - protein, 341 aa, Lentibacillus persicus
  misc_feature (1)..(341): tr|A0A1I1TGA8|A0A1I1TGA8_9BACI S-adenosylmethionine:tRN A ribosyltransferase-isomerase OS=Lentibacillus persicu s OX=640948 GN=queA PE=3 SV=1
MNIEDFDFDLPEELIAQTPLKDRDASRLLVLHRTTEEIEHKQFTDIKRYLKKGDCLVLNNTRVLPARLYGIKEDTGAKVEVLLLHQQGEDLWEVLAKPAKKVREGTVLSFGNGKIRATCTGFKDHGGRMLKLEYEGIFYEILNELGQMPLPPYIKEQLEEKERYQTVYAREEGSAAAPTAGLHFTNELLDEIKAMGVSIEFITLHVGLGTFRPVSADKVEDHKMHAEFYHMSRETADNLKAVKENGGRVISVGTTSTRTLETIVRDNGGFTESSGWTDIFIYPPYAFQAIDGLVTNFHLPKSTLVMMVSAFATRENIMNAYQSAVKERYRFFSFGDAMLIL

SEQ ID NO: 68108 - protein, 345 aa, Lentibacillus salicampi
  misc_feature (1)..(345): tr|A0A4Y9ADX3|A0A4Y9ADX3_9BACI S-adenosylmethionine:tRN A ribosyltransferase-isomerase OS=Lentibacillus salicam pi OX=175306 GN=queA PE=3 SV=1
MNIEDFDFNLPEELIAQTPLKNRAASRLLVLHPDTGEVAHKQFPDIKNYLKKGDCLVLNDTRVLPARLYGIKEGTGAKVEVLLLHQQEKDTWEVLMKPAKKIKIGTVIVFGDGKIRATCTGIKDHGGRVLQMEYEGIFYEILNELGEMPLPPYIKEQLPEKERYQTVYAREEGSAAAPTAGLHFTNELLDEIRAMGVTIEFITLHVGLGTFRPVSADKIEDHQMHAEFYQMSEETADALTSVREHGGRIITVGTTSTRTLETIARDHDGQFVKSSGWTDIFIYPPYKFQAIDGLITNFHLPKSTLIMMVSALAGRGNILKAYNEAVQERYRFFSFGDAMLILSRM

SEQ ID NO: 68109 - protein, 342 aa, Lentibacillus sp.
  misc_feature (1)..(342): tr|A0A549YLS1|A0A549YLS1_9BACI S-adenosylmethionine:tRN A ribosyltransferase-isomerase OS=Lentibacillus sp. NKC 851-2 OX=2584959 GN=queA PE=3 SV=1
MNTEDFDFDLPEELIAQTPLKNRAASRLLVLDRDKDSLRHKRFSDITGYLQEGDCLVLNDTRVLPARLYGIKQDTGAKVEVLLLHQREEDTWEVLVKPAKKVKPGTVIQFGGGKIHATCTEMLDHGGRILRLEYDGILYEILDELGEMPLPPYIKEQLPEKERYQTVYAKEEGSAAAPTAGLHFTNELLDKIKSMGVTIVFITLHVGLGTFRPVSVESVDDHTMHAEFYHMSKEAANTLANVRANNGRIIAVGTTSTRTLETIARDNHGDFRETSGWTDIFIYPPYRFQAIDGLITNFHLPKSTLIMMVSAFAGKDRIMNAYREAVEQRYRFFSFGDAMLIL

SEQ ID NO: 68110 - protein, 342 aa, Lentibacillus sp.
  misc_feature (1)..(342): tr|A0A4Q3XC09|A0A4Q3XC09_9BACI S-adenosylmethionine:tRN A ribosyltransferase-isomerase OS=Lentibacillus sp. SSK P1-9 OX=2510307 GN=queA PE=3 SV=1
MNTEDFDFDLPEELIAQTPLKNRDASRLLVLDRDRDSVEHKQFTDIKDYLQKGDCLVLNDTRVLPARLYGIKEDTGAKAEVLLLHQQEEDTWEVLAKPAKKIKEGTVLLFGGGKIRATCTEIKDHGGRMLQLEYDGILYEILDELGEMPLPPYIKEQLPEKERYQTVYAKEEGSAAAPTAGLHFTNALLDEIREMGVTITFITLHVGLGTFRPVSVDAIDDHTMHAEFYHMSQETADTLANVRANNGRIIAVGTTSTRTLETIARDNNGQFNESSGWTDIFIYPPYNFQAIDGLITNFHLPKSTLIMMISAFAGRERILNAYKEAVHERYRFFSFGDAMLIL

SEQ ID NO: 68111 - protein, 353 aa, Lentibacter algarum
  misc_feature (1)..(353): tr|A0A1H3KKM3|A0A1H3KKM3_9RHOB S-adenosylmethionine:tRN A ribosyltransferase-isomerase OS=Lentibacter algarum O X=576131 GN=queA PE=3 SV=1
MKLSDFDFDLPEALIATRPARPRSSARLLVAQGASLGAPIKDASVIDLTRWLGAGDRLVINDTKVIPARLFGTRERLGETGLTQSSMEVTLLSPTASGGWSALIKPLRKIRDGEEIAFAAGLRATLVSRSDGQAELAFNLEGDAFEAALNEAGAMPLPPYIAAKRAADEQDKTDYQTVFARQTGAVAAPTASLHFDEALLAALAAAGVAFSYVTLHVGAGTFLPVKVEDVTTHKMHAEWGEVTPEAAAEIAATKAAGGRVIPVGTTALRLIESAAKPTGQIAPWQGETDIFIYPGFEFKVADGLMTNFHLPKSTLMMLISALMGQERVMEIYKHAIDTQYRFFSYGDSSLLLP

SEQ ID NO: 68112 - protein, 405 aa, Lentimicrobiaceae bacterium
  misc_feature (1)..(405): tr|A0A2E2XZC4|A0A2E2XZC4_9BACT S-adenosylmethionine:tRN A ribosyltransferase-isomerase OS=Lentimicrobiaceae bac terium OX=2026756 GN=CMF58_05240 PE=3 SV=1
MIVHPGKLKIEEYDYNLNDAQIAKYPLVERDSSKLLYLDGGIPKNKRFKQLTELIPSDSLLLFNKTKVVNARINFKKITGAIIEVFCLEPVEPVNDFQLALQQNSPVVWKCLVGNAKRWKSGLLELAIQVEGRSICLIARKKLKLSNEYLIEFSWNDNEITFSQIINAIGMIPIPPYLNRKAEESDNKRYQTIYAEDEGSVAAPTAGLHFTESIFNALKIKGIEVDSITLHVGAGTFKPVVSPEVDGHEMHVEKIVVQVKTLEHLLEKINSDIIPVGTTSMRTLESLYWMAIKLLQGDTSFSVGQWDAYKLNNYKLSNREAIEVLLSYFRENDLSEIHGETRLMIAPGYKFKFATGLITNFHQPKSTLLLLVSALVGDDWKRAYEFALEHEYRFLSYGDSCFFKV

SEQ ID NO: 68113 - protein, 349 aa, Lentimicrobiaceae bacterium
  misc_feature (1)..(349): tr|A0A2E2XWR3|A0A2E2XWR3_9BACT S-adenosylmethionine:tRN A ribosyltransferase-isomerase OS=Lentimicrobiaceae bac terium OX=2026756 GN=queA PE=3 SV=1
MKLSQFKFDLPTELIASHPSKNRDESKLMVLNRKDGTIEHRSFKDILDYFDEGDVFVINNTRVFPARLYGEKEKTGAKIEVFLLRELNQESRLWDVLVDPARKIRIGNKLYFGDDESLVAEVIDNTTSRGRTLRFLFDGSYDEFKQTLQSLGETPLPKIHQRPVEEIDDERYQTIYAKHEGAIAAPTAGLHFSREIMKRLEIQGINFAEVTLHTGLGNFRAIEVEDLSKHKVDSEEMFINQGNANIINGAKTKKKKICAVGTTSMKALETAVSITGLVKPYSGWTNKFINPPYSFRTADAMITNFHLPMSPMMMMASAYMGHDFLKEVYATAIKKKYKFFTYGDAMLII

SEQ ID NO: 68114 - protein, 351 aa, Lentimicrobium saccharophilum
  misc_feature (1)..(351): tr|A0A0S7C459|A0A0S7C459_9BACT S-adenosylmethionine:tRN A ribosyltransferase-isomerase OS=Lentimicrobium saccha rophilum OX=1678841 GN=queA PE=3 SV=1
MKLSQFRYQLPNDLIAKQPVDNRDKSRLMVLNRKTKTIEHRMFTDILEYFGDGDAFIINDTKVFPALLTGEKEKTGAKITVFLLRELNAEARLWDVLVDPARKIRIGNKLYFGDDDSLVAEVIDNTTSRGRTLRFLFDGPYDEFKKTIESLGKTPLPEELQAIREILPEDKDWYQTIYASKEGAVAAPTAGLHFSRELMKRLELKGASFASVTLHAGVGNFRAIDVEDLTKHKMDSEELIIDEEAVRIVNKAKENRKQVCVVGTTTMKAVESSVTISGMLKPYKGWSNKFIFPPYEFSIPTCMVTNFHLPQSPMLMMTAAFADFDFLMKAYKEAINEKYRFFTYGDAMLIL

SEQ ID NO: 68115 - protein, 404 aa, Lentimicrobium saccharophilum
  misc_feature (1)..(404): tr|A0A0S7C396|A0A0S7C396_9BACT S-adenosylmethionine:tRN A ribosyltransferase-isomerase OS=Lentimicrobium saccha rophilum OX=1678841 GN=queA PE=3 SV=1
MLPEYININDYDYPLPGERIARFPLEQRDATRLLVFRDGTPADSLFSLLDQHIPEKSLFVFNNTRVIRARLIFRKVSGSRIEIFCLQPLGGYGQTGGITTWKCLVGNAKRWKSGPLEMTVDTGMGEVTLSAHKGEKAGDAFEITFGWDKPEMPFEQVLEFAGKVPLPPYLNREPVESDTERYQTIYAEFNGSVAAPTAGLHFTPAVLEKLESRHCSFEYLTLHVGAGTFKPVSVEDARQHAMHEEELIIERQSILRLLQHSGGNIIPVGTTSMRSLESLYWLGIQLINGKDPGEEFFIDQWEPYQSEVSIPPAEALQAIYDYLTARRMNSISGFTRIMIAPGYRFRMSDALVTNFHQPRSTLLLLVAAFIGEGWKKAYMFALEHGYRFLSYGDSCLFFPEKEEG

SEQ ID NO: 68116 - protein, 345 aa, Lentisphaera araneosa
  misc_feature (1)..(345): tr|A6DMI8|A6DMI8_9BACT S-adenosylmethionine:tRNA ribosy ltransferase-isomerase OS=Lentisphaera araneosa HTCC215 5 OX=313628 GN=queA PE=3 SV=1
MSTQLSDYNFNLPEELIAQRPPAQRQQSRMMVIDRQKSSREIVPFENFPSFLKPGDLIVRNNTKVIPARLFGTKKDSGGKVQALLCEERKTGLWQAMLKPGRRLRAGTEVLIENSATEYFTVTEKLADGTYLIQFSNPDVLHILDQFGHIPLPPYMNREDDAEDRKRYQTVFADQPGAVAAPTAGLHFTDEVFAECAKNGADFADVTLHTGIGTFQPVSCEDLSEHQMHSEFYELNSVTAEKIRQAKKNGGRIIAIGTTSVRTLETCADPKNFISSGQGKTQIFLYPPKQPQVTDCLLTNFHLPKSTLLMLISTFFPREEVLKAYEQAIEEKMRFFSYGDCMLIV

SEQ ID NO: 68117 - protein, 349 aa, Lentisphaerae bacterium
  misc_feature (1)..(349): tr|A0A1G0Z2H5|A0A1G0Z2H5_9BACT S-adenosylmethionine:tRN A ribosyltransferase-isomerase OS=Lentisphaerae bacteri um GWF2_44_16 OX=1798571 GN=queA PE=3 SV=1
MRTELFDYTLPDELIAQYPKPRRGNSRMLVMDRKSGNCEIHSFSEFPSFLPADACMVFNDTKVINARIYGVKLSSGHAVIEILLISKLAATEWKCLLKPGRRVKQGTVIGMRALDGTVSDKDVFTVKDRTGEGEFIIEFSNPDTDYLLREYGHVPLPPYIKRKDEFSDIQNYQTLFAEKPGAVAAPTAGLHFTRDILDELKTKGILTTNVTLHVGPGTFKPVSVENITEHKMHSESYSLSEKSASLINDTRRKGGKIIAVGTTSVRVLESCADENGLVKASSSETNIFLYPPYKPKSVDMLLTNFHLPQSTLLMLVCTFADREKVLAAYQFAIKEKFMFYSYGDCMLLK

SEQ ID NO: 68118 - protein, 343 aa, Lentisphaerae bacterium
  misc_feature (1)..(343): tr|A0A1V6FP74|A0A1V6FP74_9BACT S-adenosylmethionine:tRN A ribosyltransferase-isomerase OS=Lentisphaerae bacteri um ADurb.Bin082 OX=1852899 GN=queA PE=3 SV=1
MKVSDFYYDLPEELIAQHPASHRSDSEMLVLERRSGAFSRHGFIEFPQYLRSGDCLVINDTRVLCARLWGHRAQTGGRVQAFLLAPTADGTWTCLLRPGRRLPPGARVELEAAAGSFVVTRKNQDGTFQVRFDVEDVFALMERAGQIPLPPYIDREPLPEDRERYQTVYASTPGAVAAPTAGLHFTSEMLAGLEARGVKIARLTLHVGAGTFKPVSVERVEDHLMHAENYCFSAANAELINSTRQEGGRIICVGTTTVRVLETCFDPASGMVKPGSGQTSIFLHPPHRSRVADGLLTNFHLPQSTLLMLVCTFADHAHVMKAYDFAVRSRMRFYSYGDCMLLI

SEQ ID NO: 68119 - protein, 91 aa, Lentisphaerales bacterium
  misc_feature (1)..(91): tr|A0A524N2E1|A0A524N2E1_9BACT S-adenosylmethionine:tRN A ribosyltransferase-isomerase (Fragment) OS=Lentisphae rales bacterium OX=2448604 GN=E4H02_02560 PE=3 SV=1
MEMKTAEFDYNLPANLIAQHPLEDRAAARMMVLRRDTGSIEHRCVRELPCFLQSGDLLVVNDTRVIPARILGKRTDAGGKVALLLLEQCGP

SEQ ID NO: 68120 - protein, 221 aa, Lentisphaerales bacterium
  misc_feature (1)..(221): tr|A0A524MZQ4|A0A524MZQ4_9BACT S-adenosylmethionine:tRN A ribosyltransferase-isomerase (Fragment) OS=Lentisphae rales bacterium OX=2448604 GN=queA PE=3 SV=1
EGRTTVRLECRETLVDVLEEVGLTPLPPYIKRPDGPEPADRERYQTVYATNPGAVAAPTAGLHMTTDLLDQLAARGVARTAITLHVGPGTFRPVTAELVEEHVMESERSEVSPETAEKVNRTREEGGRVIAVGTTTVRTLESAAADGGMVRTFSGRTDLFIRPPYAFKAVDCMLTNFHLPKSTLLMMISAFAGRDLIMKAYHEAVEAGYRFYSYGDCMLIL

SEQ ID NO: 68121 - protein, 342 aa, Lentisphaeria bacterium
  misc_feature (1)..(342): tr|A0A3D3JSW9|A0A3D3JSW9_9BACT S-adenosylmethionine:tRN A ribosyltransferase-isomerase OS=Lentisphaeria bacteri um OX=2053569 GN=queA PE=3 SV=1
MNVSDFDYELPEELIAQVPAPERRASRMLVMSRTTGDCEVRKFAEFAEYLRPGDCLVLNDTRVIPARIFGTKIPTGGAVEALLTTPIRDGVWQAMLKPGSRLPDGSRVAITGSDAEFEVTGRDTAGTFEITFSTTAVPELLQTCGHMPLPPYIRRADAAADATRYQTVYNAVPGAVAAPTAGLHFDETMLEQIEAMGVAITRLTLHVGIGTFQPVTVERLEDHVMHTEQYELGAEAAACINQRRAAGGRVIAVGTTSVRVLETCTADDGDTQPGAGATGIFLYPPYTPRSVDVLLTNFHLPRSTLLMLVSTFAKHEHVWAAYQRAIAERMRFYSYGDCMLLV

SEQ ID NO: 68122 - protein, 350 aa, Lentisphaeria bacterium
  misc_feature (1)..(350): tr|A0A3D1V040|A0A3D1V040_9BACT S-adenosylmethionine:tRN A ribosyltransferase-isomerase OS=Lentisphaeria bacteri um OX=2053569 GN=queA PE=3 SV=1
MRTSDFDYELPEELIAQHPPEHRGDSRMLVLDPATGSMKIVPFREFPDYFNAGDLIAVNNTKVIKARLFAKKESGAKIEIMLLAPVTDTRWSCLLKPAKRVAPGTVLRLLDPALNVSEKSVRLVSKDIDGNCIVEFLESDVERTLAQCGHMPLPPYIRRTADYAPDAERYQTVYAKTPGAVAAPTAGLHFTKEILAALSGKGVKEAELTLHVGQGTFKPVTVENIEEHPMHSEHFILTEATAGLLNDTRRAGGRIAAIGTTSLRALESCVREDGYFEAVETDTSIFIYPPCKVKSIDMLLTNFHLPKSTLLMLVSAFAGHELVMEAYRYAVKERMRFFSYGDCMLILNKI

SEQ ID NO: 68123 - protein, 316 aa, Lentzea sp.
  misc_feature (1)..(316): tr|A0A563F2T5|A0A563F2T5_9PSEU S-adenosylmethionine:tRN A ribosyltransferase-isomerase OS=Lentzea sp. FXJ1.1311 OX=2591470 GN=FKR81_02635 PE=3 SV=1
MITFALPPGSSAIAPTSPRDSVRLLVARPSGLSHHRFRDLPLAPGDLLVVNTSATLPAALGRVHVSTWLDDGSWVVEVRLPDGPDLSCSPGQVISLPDGHFLRLVEPHLGSPRLWRAVVTPSVAPVAFLRAHGRPIRYSYLAGSYPLSEYQTVYADAPGSAEMPSAGRPFTSRLLVRLMTRGVTVAPLVLHTGVSSPESHEPPMPERYSVPLPTTRLLEATRLAGGRVVAVGTTVVRALESTLEYGLSGWTNLVLGPDRPAQLVTGLITGLHAPEASHLGLLEAVAGTSLVAAAYDEAVRERYLWHEFGDSMLFLP

SEQ ID NO: 68124 - protein, 340 aa, Leptolinea tardivitalis
  misc_feature (1)..(340): tr|A0A0P6XQA0|A0A0P6XQA0_9CHLR S-adenosylmethionine:tRN A ribosyltransferase-isomerase OS=Leptolinea tardivital is OX=229920 GN=queA PE=3 SV=1
MKTSDFDYHLPPERIAQTPLEPRHSSRLLVLDRSKPDLTHTTFWNIADYLHPGDLLVVNRTRVIPARIYAQKETGGKVEILLLKRTDDSTWEALVGGKRLIPGKTLYLPNGTTKVDILADLGASRRLVRFSEPVEAYLEKTGEMPLPPYIHERLNDPNRYQTVYADQPGSAAAPTAGLHFTPELLDRLKGMGIGLAEVTLHVGLDTFAPVTEENADEHVIHTEWCEVTPETASQINTAKAAGGRIIAVGTTSVRTLESAAQSAHSGEVVTPYQGSTGLFILPGYTFKAVDAMVTNFHLPRSSLIMLVSAFAGRERILSTYQTAVEMKYRFFSFGDAMLIL

SEQ ID NO: 68125 - protein, 379 aa, Leptolyngbya antarctica
  misc_feature (1)..(379): tr|A0A2W4VKW1|A0A2W4VKW1_9CYAN S-adenosylmethionine:tRN A ribosyltransferase-isomerase OS=Leptolyngbya antarcti ca OX=268115 GN=queA PE=3 SV=1
MREDQRLTPESQPESQPESQPESQPSSPEHSLSAYQYFLPPEKIAQTPVTPRDASRLLVVDGPTTHRHQRFCDLPTLLQPGDLLVLNNTRVIPARLQGHKPGGAQVEVFLLEDQGDHHWLALVRPGRRLKPGTTVHFGPNPDQPDLVAQVLATDPDTNGRVVKFEPQGGESLFALFERLGEVPLPPYITDTAASPDQYQTVYADTPGAVAAPTAGLHFTPELFERLEAMGVRRSHITLHVGVGTFRPVEADNILDHKMHGEWIDVSAETVAQINATQAQGGRVIAVGTTVVRALEGAAQGGELQPWQGKVNLFIYPGYQYRVVDGLITNFHLPGSSLLMLVSALIGRERLLELYEEAIAQDYRFYSFGDAMVILPAASQ

SEQ ID NO: 68126 - protein, 357 aa, Leptolyngbya boryana
  misc_feature (1)..(357): tr|A0A1Z4JJN4|A0A1Z4JJN4_LEPBY S-adenosylmethionine:tRN A ribosyltransferase-isomerase OS=Leptolyngbya boryana NIES-2135 OX=1973484 GN=queA PE=3 SV=1
MEADQLLSAYDYHLPEDRIAQNPAEPRDSARLLVLKTLTEHCHQVFHDLVEILQPGDLLVLNNTQVIPARLHGHKSTGTEVEILLLEEQQQNQWLSLVKPGRRLKPGNQITFTPRSQTDIKLNAQILASDPETRGRILQFEVSDGRSLLEVIDHFGEVPLPPYIHDTEAEADRYQTVYADRLGAVAAPTAGLHFTPELLERLEQKGIDRAFVTLHVGVGTFRPVEVENITEHQMHGEWIEVSPETVEKIRETKAKGGRVIAVGTTVVRSLEGASQSGQLEPYCGKTNLFIYPGYQWRVVDGMITNFHLPKSSLLMLVSALIGRERLLSVYQDAIDNQYRFYSFGDAMLILPEAKLRN

SEQ ID NO: 68127 - protein, 378 aa, Leptolyngbya foveolarum
  misc_feature (1)..(378): tr|A0A2W4W4Y5|A0A2W4W4Y5_9CYAN S-adenosylmethionine:tRN A ribosyltransferase-isomerase OS=Leptolyngbya foveolar um OX=47253 GN=queA PE=3 SV=1
MTSDPLDLKSHSTPQSDSQLSAYQYELPAVLIAQNPVTPRDSARLLVVNRHHHQHRHFYDLSDLLRPHDLLILNNTRVIPARLFGKKQSGGVAEVLLIEPKESEATGERRSQRWLALVKPGRRLQPGSVVIFGSPDNPVMRAYIETRDDATNGRIVRLEAQGEHAETPIEELIDQLGQVPLPPYITKSESLPAQYQTVFAERKGAIAAPTAGLHFTQRLLSELSDKGIQTAEITLHVGIGTFRPVEVKDIKTHQMHEERIEVSPETVEKIRQTKAKGGRVIALGTTSTRALEGAAAACGELQPFNGRTNIFIYPGYQWKVIDGLITNFHLPESSLLMMVSALIGRERLMAIYEDAIAQKYRFYSFGDAMLILPEAAIE

SEQ ID NO: 68128 - protein, 376 aa, Leptolyngbya frigida
  misc_feature (1)..(376): tr|A0A2T1DST2|A0A2T1DST2_9CYAN S-adenosylmethionine:tRN A ribosyltransferase-isomerase OS=Leptolyngbya frigida ULC18 OX=2107698 GN=queA PE=3 SV=1
MSDRLLAAYDYVLPEALIAQTPCVPRDGARLLVVKDQVQHGHAIVRTLPDLLREGDLLVLNNTRVIPARLYGHKLGGMPVEVLLLEPQAGGDRAAGTTHCWLALVKPGKRLKPGATIVFSGQDAKESTSDRVLSATVMAIDAATGGRILQFDVPAGTLLDEWINQLGQMPLPPYITQTEAHPDQYQTVYADRPGAVAAPTAGLHFTPELLQRLQAQGIEQAFVTLHVGVGTFRPVEAETITDHTMHAEWIEVPPETVAKIQQTKAKGGRIIAVGTTVVRSLESAVQSGMIQPFCGKSNLFIYPGYQWQVVDGLMTNFHLPKSSLMMLVSALIGRQRLLALYQIAIAEQYRFYSFGDAMLILPEAREERDERLKDEG

SEQ ID NO: 68129 - protein, 378 aa, Leptolyngbya sp.
  misc_feature (1)..(378): tr|K9F1J8|K9F1J8_9CYAN S-adenosylmethionine:tRNA ribosy ltransferase-isomerase OS=Leptolyngbya sp. PCC 7375 OX= 102129 GN=queA PE=3 SV=1
MSPSNSRQPSHSQDLINQQQANSDYSLMAYQYELPPSLIAQEPVIPRDHSRLMVISSNSDHQHAYFKDLPKFLCSGDLLVINNTRVIPARMYGYKPSGAKVEVLLLEPRTPPHQWLALVKPGRRLKPGSSIYFGPDLENPLLTARVEDCDLDTNGRLLTFETTTDTPIDNLMDAFGEVPLPPYITDSHAEPDQYQTIYAQNPGAVAAPTAGLHFTPEVFQALEEKGVQRAEVTLHVGLGTFRPVESEAITDHKMHAEWVHLPQSTVDLIKETKARGNHVFAVGTTTTRTLEGVVNQEGSLKAYQGAVNLFIYPGYQWQVVDGLITNFHLPGSSLLMLVSALVGRQRLMDLYQDAIKQAYRFYSFGDAMVILPDVYRLT

SEQ ID NO: 68130 - protein, 356 aa, Leptolyngbya sp.
  misc_feature (1)..(356): tr|A0A0S3UDK6|A0A0S3UDK6_9CYAN S-adenosylmethionine:tRN A ribosyltransferase-isomerase OS=Leptolyngbya sp. NIES -3755 OX=1752064 GN=queA PE=3 SV=1
MEADQLLSAYDYHLPPDRIAQNPATPRDSARLLVIETQTQHHHQVFRELDEILRPGDLLVLNNTQVIPARLHGHKTTGTEVEILLLEEHQQNQWLALVKPGRRLKPGNQIVFKPQSETEVELTAAILASDPETRGRILQFEASNGRSLLEVIDHFGEVPLPPYIQETEAEADRYQTVYADRMGAVAAPTAGLHFTPELLDRLEQRGVDRAFITLHVGVGTFRPVEVEDITQHQMHGEWIEVSPETVEKIRETKAKGGRVIAVGTTVVRSLEGASQSGALEPYCGKTNLFIYPGYEWKTVDGMVTNFHLPKSSLLMLVSALIGRERLLALYQEAIENEYRFYSFGDAMLILPEARLN

SEQ ID NO: 68131 - protein, 345 aa, Leptolyngbya valderiana
  misc_feature (1)..(345): tr|A0A166TPN7|A0A166TPN7_9CYAN S-adenosylmethionine:tRN A ribosyltransferase-isomerase OS=Leptolyngbya valderia na BDU 20041 OX=322866 GN=queA PE=3 SV=1
MKVSDFTFDLPEHLIAQEPLPERSASRLLHLIREPAGLVDRVFSELPSLLNPGDLLVFNNTRVIPARLHARKPSGGRVEVMIERLTGPRMATVQLRANRKPAPGTRLLVGEPDGSEGQLELELIEREGEFWRVEVLAGPDWPELLERVGHMPLPPYIQREDTAADRERYQTVYGQVPGAVAAPTAGLHFDEKILSELDDRGVQRGWCTLHVGAGTFQPVRVEDIKDHEMHAEWLQVDQTLVDQIRRTRAEGGRVIAVGTTAVRSLETAAAEGAVAPYTGDSRLFIYPGFEFKVVDGLITNFHLPGSTLMMLVSALAGRDRIMAAYQHAIDQEYRFFSYGDSMFID

SEQ ID NO: 68132 - protein, 382 aa, Leptolyngbya valderiana
  misc_feature (1)..(382): tr|A0A162MPH4|A0A162MPH4_9CYAN S-adenosylmethionine:tRN A ribosyltransferase-isomerase OS=Leptolyngbya valderia na BDU 20041 OX=322866 GN=queA PE=3 SV=1
MMPPRNITALREGDMLRTRDLEYHLPRELIATTPAEPRDSARLLVVRGQAEPEHATFRDLPAFLDRGDRVVVNTSRVIPARLVGRRDDTGGKVEGLFLAFGPKIGQWLCMVKARRFRAGARITLHGRDGSPSPHAIELIERSGEIPGAWVVALAGSDRDDPDQFKAASMAVLADVGHVPLPPYIRSARREGGQADEWGEDVDRYQTVYADPASSGSVAAPTAGLHFTPSVLQALSKLGVVRRDVTLHVGAGTFREVETEIVEDHPMHRELCFASADVISDLGAARRKGSRVIAVGTTAARTLEASAAIAGEWIETDLLITPGFKWQLVNGLITNFHLPRSTLMAMVAALLPGGLEQLQAVYAAAIAARYRFYSYGDAMLVLP

SEQ ID NO: 68133 - protein, 362 aa, Leptonema illini
  misc_feature (1)..(362): tr|H2CLI9|H2CLI9_9LEPT S-adenosylmethionine:tRNA ribosy ltransferase-isomerase OS=Leptonema illini DSM 21528 OX =929563 GN=queA PE=3 SV=1
MDLHPFHFELPDELIARYPVTPPDSARLLHLTAHGAPSHHIFRELPDLLRDGDVLVFNRTKVSRRRLFLKRESGAQIEVLFLEQLEHPSIWRCMARKAGRLKTGEILVQGDVSFEVVGREGPLTVLAARSENQYAWETDEDAEHFFETSGQPPIPPYLNRPAEKIDYDRYQTIFAQKTGSVAAPTAGLHFTPELMRRLEQRYEIAYVDLTIGYGTFAPLQEEHFAAKRLHTERFVIPPETAKLLSSIGVGDTERSDRRHSAEATRRRCVAVGTTTLRALESALRQKGQIQAGSYETDIFLHPPDRIESCQALITNFHLPASSLFLLVCAFGGTERLRQAYAIAIENRYRFYSYGDAMLLEAP

SEQ ID NO: 68134 - protein, 345 aa, Leptospira adleri
  misc_feature (1)..(345): tr|A0A2M9YLJ2|A0A2M9YLJ2_9LEPT S-adenosylmethionine:tRN A ribosyltransferase-isomerase OS=Leptospira adleri OX= 2023186 GN=queA PE=3 SV=1
MLFSDLEEFEFELPEDRIARYPVRNRDESRLMLVEVGSEKIHIEEAFKNIVSYLREGDVLIGNHTKVSKRRVYLKNPLRTHEAMFLESKDGLWRCKIRNSRKLKKGDRLQDVKTGLRFFQVEGKEEEFVFLRSDKELQEEDFQTIGEIPIPPYLKREANSEDEIRYQTLFAKTPGSVAAPTAGLHFSESLFQILKEKKIQICTLELTVGYGTFQPLTEENFQNKKLHREEFFLEEASASILNLAKKEGRRIISIGTTTLRALESTFDPKTKTFRFGRGATELFLQPDDKLQSCEGLITNFHLPGSSLLLLVSAFAGKKLILQAYQKAIQGEFRFYSYGDAMLILK

SEQ ID NO: 68135 - protein, 345 aa, Leptospira adleri
  misc_feature (1)..(345): tr|A0A5F2CNQ3|A0A5F2CNQ3_9LEPT S-adenosylmethionine:tRN A ribosyltransferase-isomerase OS=Leptospira adleri OX= 2023186 GN=queA PE=3 SV=1
MLFSDLEEFEFELPENRIARYPAKNRDESRLMVVEVGSEKIHIEEAFKNIVSYLREGDVLIGNHTKVSKRRVYLKNPLRTHETMFLESKDGLWRCKIRNSRKLKKGDRLQDLKTGLRFFQVEGKEEEFVFLRSDKELQEEDFQTIGEIPIPPYLKREANSEDEIRYQTLFAKTPGSVAAPTAGLHFSESLFQILKEKKIQTCTLELTVGYGTFQPLTEENFQNKKLHREEFFLEEASASILNLAKKEGRRIISIGTTTLRALESTFDPKTKTFRSGRGATELFLQPDDKLQSCEGLITNFHLPGSSLLLLVSAFAGKKLILQAYQKAIQGEFRFYSYGDAMLILK

SEQ ID NO: 68136 - protein, 347 aa, Leptospira alexanderi
  misc_feature (1)..(347): tr|V6HXM6|V6HXM6_9LEPT S-adenosylmethionine:tRNA ribosy ltransferase-isomerase OS=Leptospira alexanderi serovar Manhao 3 str. L 60 OX=1049759 GN=queA PE=3 SV=1
MLFEDLKEFEFTLSEERIARYPAVNRDESRLMILDVNVGNIFSEPSFKNLVSYLKEGDVLVANHTKVSKRRVYLKTQTRTHETMFLEEKELLWKCKVRNSKKLKVGTKLSDEKTQCISFTVEKKEGEFVFLKPERTLQEEDFQRIGEIPIPPYFKRNPDSKDEIRYQTLFAKTPGSVAAPTAGLHFSESIFQTLKEKKIQFCTLELKVGYGTFQPLTEENFQNQKLHREEFFLEESSTEILNLAKKEGRRIFSIGTTTLRALESAYDYATNSFRSGRGATELFIQPEDRLKSCECLITNFHLPGSSLLLLVSAFAGKELISKAYQKAIQEKFRFYSYGDAMLILGKR

SEQ ID NO: 68137 - protein, 349 aa, Leptospira alstonii
  misc_feature (1)..(349): tr|M6CY88|M6CY88_9LEPT S-adenosylmethionine:tRNA ribosy ltransferase-isomerase OS=Leptospira alstonii serovar S ichuan str. 79601 OX=1218565 GN=queA PE=3 SV=1
MLYEDLKEFEFLLPEERIARYPAINRDESRLMILDASTGKIWNEPSFKNLVSYLKEGDVLIANHTKVSKRRVYLKTLERIHEAIFLEEKELLWRCKIRNSRKLKVGEKLSDEKTRTVSFTVEKKEGEFVFLKPEHSLQEKDFQQIGEIPIPPYLKRDADSKDEIRYQTLFAKTPGSVAAPTAGLHFSEIIFETLKEKKIQLCTLELKVGYGTFQPLTEENFQNQKLHREEFFLEESSAEILNLAKKEGRRIFSIGTTTLRALESAYDRTTDSFRSGRGATELFIQPEDRLKSCEGLITNFHLPGSSLLLLVSAFAGKELILNAYQKAIREEFRFYSYGDAMLILGKRST

SEQ ID NO: 68138 - protein, 349 aa, Leptospira alstonii; identical to SEQ ID NO: 68137
  misc_feature (1)..(349): tr|T0FLY2|T0FLY2_9LEPT S-adenosylmethionine:tRNA ribosy ltransferase-isomerase OS=Leptospira alstonii serovar P ingchang str. 80-412 OX=1218564 GN=queA PE=3 SV=1

SEQ ID NO: 68139 - protein, 351 aa, Leptospira andrefontaineae
  misc_feature (1)..(351): tr|A0A4R9H6S6|A0A4R9H6S6_9LEPT S-adenosylmethionine:tRN A ribosyltransferase-isomerase OS=Leptospira andrefonta ineae OX=2484976 GN=queA PE=3 SV=1
MEFQDLSDFDFELSEDQIAKFPAAKRDKSRLLVLGRTQDFLQEETEFSEMLKYLQEGDVLVANATRVSKRRVFLTTKTGRRHEAMFLSELEPGIWKTLTRNSKKLKLGDIVSDEATGRFLFSVGRKEEEFTIFQSETPLDENSFETIGRTPIPPYFKRESTSEDDVRYQTVYSQNLGSVAAPTAGLHFTPELLEELKKRNIEFLKLELKVGYGTFQSLNEDHFANKKLHEEEFDLPLETKNVLDFAKKNGKRIISVGTTTLRALESAYDPNTNTFKSGEGKTRLFLQPEDSILSCEGLITNFHLPQSSLLLLVSAFAEKEKILKAYKFAIKQNFRFFSYGDSMLILDPEKV

SEQ ID NO: 68140 - protein, 348 aa, Leptospira bandrabouensis
  misc_feature (1)..(348): tr|A0A4Z1B0B3|A0A4Z1B0B3_9LEPT S-adenosylmethionine:tRN A ribosyltransferase-isomerase OS=Leptospira bandraboue nsis OX=2484903 GN=queA PE=3 SV=1
MDFLQEYDFHLPDEQIAKFPLENRDESRLLVVNIGQSKFWEAPLFRDILALVRPGDVFVYNETKVSARRVYLQVESGRIHESIFLESLDPSDRSWLCILKNRAKLKLGEKLFPVGFENYQFSYQGPKEELSILFSESPISDSDFGIFGNIPIPPYLKRNVTEEDKVRYQTIFANRSGSVAAPTAGLHFTEELKENVLKNGAEFVPVELQIGYGTFRPLTPEQWETKTLHREKYFVSESTASKLNGARKEGRRIIAVGTTTLRVLETVFDSQLKKYKVGSSQTDIFLSPGDNIQSVQGLITNFHLPKSSLLLLVSAFANTKLVLDAYQYALQNRFRFYSYGDSMFLFQK

SEQ ID NO: 68141 - protein, 348 aa, Leptospira barantonii
  misc_feature (1)..(348): tr|A0A5F2BHQ1|A0A5F2BHQ1_9LEPT S-adenosylmethionine:tRN A ribosyltransferase-isomerase OS=Leptospira barantonii OX=2023184 GN=queA PE=3 SV=1
MLFEDLKEFEFILPEERIARYPAPDRDESRLMVLDVNSGNIVSEPSFKNIVSYLKEGDVLVANHTKVSKRRVYLKTELRIHEAMFLEEHNGIWKCKIRNSKKLKDGTRLSDEKTRRITFAVEKKEEEFVFLKPERPLQEEDFEQIGEIPIPPYLKREANSEDEIRYQTLFAKTPGSIAAPTAGLHFSEKLFATLKEKSITLCTLELKVGYGTFQPLTEENFQNQRLHREEFFLGKESVEILNLAKKEKRRIVSIGTTTLRALESAYDRSTNSFQEGWGATELFIRPDDRLYSCEGLITNFHLPGSSLLLLVSAFAGKDLILKAYQKAIREEFRFYSYGDAMLVLGKKE

SEQ ID NO: 68142 - protein, 348 aa, Leptospira barantonii
  misc_feature (1)..(348): tr|A0A2M9Z0L3|A0A2M9Z0L3_9LEPT S-adenosylmethionine:tRN A ribosyltransferase-isomerase OS=Leptospira barantonii OX=2023184 GN=queA PE=3 SV=1
MLFEDLKEFEFLLPEERIARYPAPDRDESKLMVLDVNSGNIVSEPSFKNIVSYLKEGDVLVANHTKVSKRRVYLKTELRVHEAMFLEEHNGIWKCKIRNSKKLKDGTRLTDEKTRRITFAVEKKEEEFVFLKPERPLQEEDFDQIGEIPIPPYLKREANSEDEIRYQTLFAKTPGSIAAPTAGLHFSENIFATLKEKKIALCTLELKVGYGTFQPLTEENFQNQKLHREEFFLGKESVEILNLAKKEKRRIVSIGTTTLRALESAYDRSTNSFQEGWGATELFIRPEDRLYSCEGLITNFHLPGSSLLLLVSAFAGKDLILKAYQKAIREEFRFYSYGDAMLVLGKKE

SEQ ID NO: 68143 - protein, 346 aa, Leptospira biflexa
  misc_feature (1)..(346): tr|B0SUA1|B0SUA1_LEPBP S-adenosylmethionine:tRNA ribosy ltransferase-isomerase OS=Leptospira biflexa serovar Pa toc (strain Patoc 1 / ATCC 23582 / Paris) OX=456481 GN= queA PE=3 SV=1
MDFLNEFDFHLPEEQIARFPAKNRDESRLLLVDRANETFKEAPFFRDIRNWLKPGDVLVYNETKVSYRRVYLQVESGRIHEAIFLDTLEDNANIWSCILKNRAKLRLGENLWPVGFKEFPFVYESKDNELSLLRSERTITDLDFEVFGTIPIPPYLKRKAIEDDKFRYQTIFAKKSGSVAAPTAGLHFTDSLKLELIQLGIQFVPVNLQVGYGTFRPLTTEQWQTKTLHKERYEITDESASQLNSAKKEGRRIIAVGTTSLRVLETVFDSQQQKFKVGLGQTDIFLSPGDNIESVHGLITNFHLPKSSLLLLVSAFANSRLVMNAYQYALQNQFRFYSYGDSMFLF

SEQ ID NO: 68144 - protein, 346 aa, Leptospira biflexa
  misc_feature (1)..(346): tr|A0A5F2CAF6|A0A5F2CAF6_LEPBI S-adenosylmethionine:tRN A ribosyltransferase-isomerase OS=Leptospira biflexa OX =172 GN=queA PE=3 SV=1
MDFLNEFDFHLPEEQIARFPAKNRDESRLLLVDRANETFKEAPFFRDIRNWLQPGDVLVYNETKVSYRRVYLQVESGRIHEAIFLETLEDNANIWSCILKNRAKLRLGENLWPVGFQEFPFVYEGKDNELSLLRSERTITDLDFEVFGTIPIPPYLKRKAIEDDKFRYQTIFAKKSGSVAAPTAGLHFTDSLKLELIQLGIQFVPVNLQVGYGTFRPLTTEQWQTKTLHKERYEITDESASQLNSAKKEGRRIIAVGTTSLRVLETVFDSQQQKFKVGLSQTDIFLSPGDNIESVHGLITNFHLPKSSLLLLVSAFANSRLVMNAYQYALQNQFRFYSYGDSMFLF

SEQ ID NO: 68145 - protein, 347 aa, Leptospira borgpetersenii
  misc_feature (1)..(347): tr|A0A0E3AYT5|A0A0E3AYT5_LEPBO S-adenosylmethionine:tRN A ribosyltransferase-isomerase OS=Leptospira borgpeters enii serovar Ballum OX=280505 GN=queA PE=3 SV=1
MLFEDLKEFEFTLSEERIARYPAANRDESRLMVLDVNVGNIFSESSFKNLVSYLKEGDVLVANHTKVSKRRVYLKTQIRTHETMFLEEKELLWKCKIRNSKKLKAGTKLSDEKTQRISFTVEKKEGEFVFLKPEQTLQEEDFQQIGEIPIPPYFKRNPDPKDEIRYQTLFAKTPGSVAAPTAGLHFSESIFQTLKEKKIRFCTLELKVGYGTFQPLTEENFQNQKLHREEFFLEKSSTEILNLAKKEGRRIFSIGTTTLRALESAYDYATNSFRSGRGTTELFIQPEDRLKSCECLITNFHLPSSSLLLLVSAFAGKELVLKAYQKAIQEKFRFYSYGDAMLILGKR

SEQ ID NO: 68146 - protein, 164 aa, Leptospira borgpetersenii
  misc_feature (1)..(164): tr|M6W021|M6W021_LEPBO S-adenosylmethionine:tRNA ribosy ltransferase-isomerase OS=Leptospira borgpetersenii ser ovar Pomona str. 200901868 OX=1192866 GN=LEP1GSC133_348 4 PE=3 SV=1
MHFSESIFQTLKEKKVRFCTLELKVGYGTFQPLTEENFQNQKLHREEFFLEKSSTEILNLAKKEGRRIFSIGTTTLRALESAYDYATNSFRSGRGTTELFIQPEDRLKSCECLITNFHLPSSSLLLLVSAFAGKELVLKAYQKAIQEKFRFYSYGDAMLILGKR

SEQ ID NO: 68147 - protein, 346 aa, Leptospira bourretii
  misc_feature (1)..(346): tr|A0A4R9IQF9|A0A4R9IQF9_9LEPT S-adenosylmethionine:tRN A ribosyltransferase-isomerase OS=Leptospira bourretii OX=2484962 GN=queA PE=3 SV=1
MDFLNEFDFHLPEEQIAKFPLENRDESRLLVVDRAQSKFWEAPLFRDITTLVRPGDIFVYNETKVSYRRVFLQVESGRIHESIFLEPQDNQNQTWLCILKNRAKLKLGDRLSPVGFPNYQFVYQGPKEELSFLGSELTISDSDFEIFGNIPIPPYLKRNVTEEDKLRYQTIFANRSGSVAAPTAGLHFTEELKNTFRTLGAEFLPVELQIGYGTFRPLTTEQWQTKTLHSEKYLVSESTATKLNDARKEGRRIIAVGTTTLRVLETVFDSQLQKYKVGSSQTDIFLSPGDKIDSVQGLITNFHLPKSSLLLLVSAFATTQLVLDSYRYALKNGFRFYSYGDSMFLF

SEQ ID NO: 68148 - protein, 346 aa, Leptospira bouyouniensis
  misc_feature (1)..(346): tr|A0A4R9HM55|A0A4R9HM55_9LEPT S-adenosylmethionine:tRN A ribosyltransferase-isomerase OS=Leptospira bouyounien sis OX=2484911 GN=queA PE=3 SV=1
MDFLNQFDFHLPDEQIARFPAKNRDESRLLIVNRANETFLEAPFFRDIRNWLRPGDVLVYNETKVSYRRVYLQVDSGRIHEAIFLETIDNDPSSWACILKNRAKLKLGEILSPVGFAEFQFVYEGKLDELSRLRSIRLVRDEDFEVFGTIPIPPYLKRKVIEEDKNRYQTIFAKKSGSVAAPTAGLHFTDSLRAELVQFGIEFVPVNLQVGYGTFRPLTAEQWHTKTLHKEKYEITEESSIRLNTAKKEGRRIIAIGTTSLRVLETVFDSQQQKYKVGVSQTDIFLSPGDNIQSVQGLITNFHLPKSSLLLLVSAFANSRLVMNSYQYALQNHFRFYSYGDSMFLF

SEQ ID NO: 68149 - protein, 346 aa, Leptospira brenneri
  misc_feature (1)..(346): tr|A0A2M9XYH6|A0A2M9XYH6_9LEPT S-adenosylmethionine:tRN A ribosyltransferase-isomerase OS=Leptospira brenneri O X=2023182 GN=queA PE=3 SV=1
MDFLQEYDFHLPEEQIAKFPLESRDQSRLLLVDRIQSKFWEAPLFRDITALIKPGDVFVYNETKVSYRRVYLQVESGRIHESIFLEPEDKLGKTWLCILKNRAKLKLDGKLFPVGYPEFEFSYQGAREELSILSSNRSISDSDFEIFGNIPIPPYLKRNVTEEDKTRYQTIFANRSGSVAAPTAGLHFTETLKEEIRKKGAEFFPVELQIGYGTFRPLTAEQWQTKTLHKENYLVPGSTATKLNEARTEGRRIIAVGTTSLRVLESVFDSQLKTYKEGVGQTDIFLSPGDRIESAQGLITNFHLPKSSLLLLVSAFANTRLVMSSYQYALENGFRFYSYGDSMFLF

SEQ ID NO: 68150 - protein, 367 aa, Leptospira broomii
  misc_feature (1)..(367): tr|T0FEJ0|T0FEJ0_9LEPT S-adenosylmethionine:tRNA ribosy ltransferase-isomerase OS=Leptospira broomii serovar Hu rstbridge str. 5399 OX=1049789 GN=queA PE=3 SV=1
MPFDPERKIGFLQVSSVFSGTMEIQDLSEFSFDLPEDRIAKHPLSRRDESRLLVLDRKEDTLLEEVSFASIRKHLKKGDVLIANAARVSKRRVYLKTISGRKHEALFLSQGKDNIWKALIRNSKKLKEGTSLRSEESDSFEFIVLNKEEEFTFLKCTSDFHEEDFESIGKIPIPPYFKRESSEEDSIRYQTVYAKNLGSVAAPTAGLHFTPELLSEIGNAGIDFVELELRVGYGTFQPLSREHFFEKKLHEESYFISAEVSEVLNSAKEAGRRIISVGTTTLRALESSYDRQTGQFRAGEGTTRLFLQPGDRISSCDGLITNFHLPESSLLLLVCAFAGKERVLAAYRYAVEKEFRFFSYGDAMLLL

SEQ ID NO: 68151 - protein, 346 aa, Leptospira congkakensis
  misc_feature (1)..(346): tr|A0A4Z1A9Z1|A0A4Z1A9Z1_9LEPT S-adenosylmethionine:tRN A ribosyltransferase-isomerase OS=Leptospira congkakens is OX=2484932 GN=queA PE=3 SV=1
MDFLQEYDFHLPEEQIAKFPLEKRDESRLLVVDRSQSKFWEAPLFRDITNLVRPGDVFVYNETKVSYRRVYLQVESGRIHESIFLEPEDETGNVWLCILKNRAKLKLADKLFPVGFREFEFSYKGAKEELSVLSSERSISDFDFEIFGNIPIPPYLKRNVTEEDKVRYQTIFANRSGSVAAPTAGLHFTDQLKKTLGSRGVEFLPVELQIGYGTFRPLTTEQWQTKTLHKENYSVPASTATKLNEARKENRRVIAVGTTTLRVLESVFDSQLKTYKVGVGQTDIFLSPGDDIQSVQGLITNFHLPKSSLLLLVSAFATTQLVLDSYRYALKNGFRFYSYGDSMFLF

SEQ ID NO: 68152 - protein, 352 aa, Leptospira dzianensis
  misc_feature (1)..(352): tr|A0A5F2BN34|A0A5F2BN34_9LEPT S-adenosylmethionine:tRN A ribosyltransferase-isomerase OS=Leptospira dzianensis OX=2484905 GN=queA PE=3 SV=1
MLFEDLKEFEFDLPEERIARYPAAHRDESKLMILDVDSGEIKSEPSFKNIVSYLREGDVLVANHTKVSKRRVYLKTPLRVHEAMFLEEKEQLWKCKIRNSKKLKLGEELKDNRTQKLGFTVAKKEEEFVFLKPQRSLTEEDFQTIGEIPIPPYLKRDADAQDEIRYQTLFAKTPGSVAAPTAGLHFSEELFETLRQKKIQLCTLELKVGYGTFQPLTEENFQNQKLHREEFFLEETSVELLNAAKQEGRRILSIGTTTLRALESAYEPNTKTFRAGPGATELFIRPDDNLQSCEGLITNFHLPGSSLLLLVSAFAGKKLILDAYQKAIQEKFRFYSYGDAMLILERKKSVSK

SEQ ID NO: 68153 - protein, 352 aa, Leptospira dzianensis
  misc_feature (1)..(352): tr|A0A5F2E6R7|A0A5F2E6R7_9LEPT S-adenosylmethionine:tRN A ribosyltransferase-isomerase OS=Leptospira dzianensis OX=2484905 GN=queA PE=3 SV=1
MLFEDLKEFEFDLPEERIARYPAAHRDESKLMILDVDSGEIKSEPSFKNIVSYLREGDVLVANHTKVSKRRVYLKTPLRVHEAMFLEEKEQLWKCKIRNSKKLKLGEELKDNRTQKLGFTVAKKEEEFVFLKPQRSLTEEDFQTIGEIPIPPYLKRDADAQDEIRYQTLFAKTPGSVAAPTAGLHFSEELFETLRQKKIQLCTLELKVGYGTFQPLTEENFQNQKLHREEFFLEETSVELLNAAKQEGRRILSIGTTTLRALESAYEPNRKTFRAGPGATELFIRPDDNLQSCEGLITNFHLPGSSLLLLVSAFAGKKLILDAYQKAIQEKFRFYSYGDAMLILGRKKSVSK

SEQ ID NO: 68154 - protein, 351 aa, Leptospira dzoumogneensis
  misc_feature (1)..(351): tr|A0A4Z1AP51|A0A4Z1AP51_9LEPT S-adenosylmethionine:tRN A ribosyltransferase-isomerase OS=Leptospira dzoumognee nsis OX=2484904 GN=queA PE=3 SV=1
MEFQDLSDFDFELPEDQIAKFPAEKRDKSRLLVLGRTRGFLKEETEFSKILNYLREGDILVANATRVSKRRVFLVTKTGRRHEAMFLSETEPGIWKTLTRNSKKLKLGDKVSDEATGKFLFTVGRKEEEFTIFQTETTLDENSFEIIGRTPIPPYFKRESTSEDDIRYQTVYSKNLGSVAAPTAGLHFTPELLQELKNRNIEFLKLELKVGYGTFQSLNEDHFADKKLHEEEFDLPSETADLLNSAKKNGKRIISVGTTTLRALESAYDPNSKTFRSGEGKTRLFLQPEDSILSCEGLITNFHLPQSSLLLLVSAFSEKEKILNAYKFAIEHKFRFFSYGDSMLILDPEKV

SEQ ID NO: 68155 - protein, 346 aa, Leptospira ellinghausenii
  misc_feature (1)..(346): tr|A0A2P2DI19|A0A2P2DI19_9LEPT S-adenosylmethionine:tRN A ribosyltransferase-isomerase OS=Leptospira ellinghaus enii OX=1917822 GN=queA PE=3 SV=1
MDFLEEFDFHLPEEQIARFPAKNRDESRLLLVDKSKETFWEAPHFRNIGQWLRPGDVLVFNDTKVSYRRVFLQVESGRIHESIFLETVDDSSLVWTCILKNRAKLKLGDSLWPVGFPNFRFRYDGKEEELSLLVSDKEISDSDFEIFGTIPIPPYLKRKVNEEDKIRYQTIFAKKSGSVAAPTAGLHFTDSLKEELVQQGIEFVPVNLQVGYGTFRPLTAEQWQTKTLHKEKYEITEETASRLNTAKKEGRRIIAIGTTSLRVLETVFDSQQQKYKVGLGQTDIFLSPGDNIKSVQGLITNFHLPKSSLLLLVSAFANSRLVMNVYRYALQNHFRFYSYGDSMFLF

SEQ ID NO: 68156 - protein, 375 aa, Leptospira elllisii
  misc_feature (1)..(375): tr|A0A2N0BD09|A0A2N0BD09_9LEPT S-adenosylmethionine:tRN A ribosyltransferase-isomerase OS=Leptospira elllisii O X=2023197 GN=queA PE=3 SV=1
  misc_feature (369)..(371): Xaa can be any naturally occurring amino acid
MLFSDLNKFEFDLPEDKIARYPAAQRDESRLMVLDSGSNSIRIEPSFKNILGYLREGDVLIANHTKVSKRRVYLSAKDRIHETMFLETENGIWKCKIRNSKKIKTGDVLLDRKTNSYSLTAIDKKEEFVFLKPESPLKEEDFDRIGEIPIPPYLKREANSEDEIRYQTLFAKTPGSIAAPTAGLHFSKRIFDELERKKIELYTLELSVGYGTFQPLTEENFLRKKLHREEFFLEETTAAALTKAKKEKRRIVSIGTTTLRALESSFLPETNSFQEGKGSTELFIQPEDVLRSCEGLITNFHLPGSSLLLLVSAFAGKGLLLDAYRKAISENFRFYSYGDAMLILRAEVIRLITKYDGSRTRPRVQSETXXXEVSD

SEQ ID NO: 68157 - protein, 350 aa, Leptospira elllisii
  misc_feature (1)..(350): tr|A0A2N0BPY9|A0A2N0BPY9_9LEPT S-adenosylmethionine:tRN A ribosyltransferase-isomerase OS=Leptospira elllisii O X=2023197 GN=queA PE=3 SV=1
MLFSDLNKFEFDLPEDKIARYPAAQRDESRLMVLDSGSNSIRIEPSFKNILGYLREGDVLIANHTKVSKRRVYLSAKDRIHETMFLETENGIWKCKIRNSKKIKTGDVLLDRKTNSYSLTAIDKKEEFVFLKPESPLKEEDFDRIGEIPIPPYLKREANSEDEIRYQTLFAKTPGSIAAPTAGLHFSKRIFDELERKKIELYTLELSVGYGTFQPLTEENFLRKKLHREEFFLEETTAAALTKAKKEKRRIVSIGTTTLRALESSFLPETNSFQEGKGSTELFIQPEDVLRSCEGLITNFHLPGSSLLLLVSAFAGKGLLLDAYRKAISENFRFYSYGDAMLILRAEVSD

SEQ ID NO: 68158 - protein, 367 aa, Leptospira fainei
  misc_feature (1)..(367): tr|S3UQR2|S3UQR2_9LEPT S-adenosylmethionine:tRNA ribosy ltransferase-isomerase OS=Leptospira fainei serovar Hur stbridge str. BUT 6 OX=1193011 GN=queA PE=3 SV=1
MRFDPKRKIGFPQVSPVFSGTMEIQDLSEFSFDLPEDQIAKHPSSRRDGSRLLVLDRKRNALLEEVSFTSVRKYLKKGDVLIANAARVSKRRVYLKTISGRRHESLFLSRGEGNIWKTLIRNSKKLREGTSLRSEESDSFEFIVLHKKEEFTFLKCKPDFREEDFEIIGKIPIPPYFKRESSEEDSIRYQTVYAKNLGSVAAPTAGLHFTPELLSEIRNAGIDFVELELRVGYGTFQPLSPEHFREKKLHEESYFISSEVSEVLNSAKKTGRRIISVGTTTLRALESLYDPEAERFRAGEGTTRLFLQPGDRISSCDGLITNFHLPESSLLLLVCAFAGKEQVLSAYRHAVRKGFRFFSYGDAMLLL

SEQ ID NO: 68159 - protein, 350 aa, Leptospira fletcheri
  misc_feature (1)..(350): tr|A0A4R9GB83|A0A4R9GB83_9LEPT S-adenosylmethionine:tRN A ribosyltransferase-isomerase OS=Leptospira fletcheri OX=2484981 GN=queA PE=3 SV=1
MEIGDLSEYSFNLPEDLIAKVPASDRDGSRLLVLSSPDGVLKEEPFFSEILKYLKEGDVLVANSTRVARRRVFLRTPSGRRHEALFLDPSGRPNEWRALVRNSKKLKSGTVLQDEISGRFSFTVTGREEEFTYLTASPDFMEIDFETIGRIPIPPYFKRESSEEDSVRYQTVYSKILGSVAAPTAGLHFTPELLERIRTLGVEFAELELRVGYGTFSTLTATQFREKKLHEEFFSISSEVAETLRLAKKQGRRIISVGTTTLRALEAAYDSKTRSFLSGESSTRLFLQPGDPILSCDCLITNFHLPESSLLLLVCAFAGKDAVLNAYRYALQNGFRFYSYGDAMLLLNRL

SEQ ID NO: 68160 - protein, 350 aa, Leptospira fluminis
  misc_feature (1)..(350): tr|A0A4V3JEN7|A0A4V3JEN7_9LEPT S-adenosylmethionine:tRN A ribosyltransferase-isomerase OS=Leptospira fluminis O X=2484979 GN=queA PE=3 SV=1
MEIGDLSEYSFNLPEESIAKVPAVNRDGSRLLVLSSTDGVLKEEPFFTEILKYLKEGDVLVANSTRVARRRVFLRTLSGRRHEALFLDPSERRNEWKALVRNSKKLKPGTVLQDEMSGRFQFTVTGREEEITLLATPPDFREIDFETIGRIPIPPYFKRESSEEDSVRYQTVYAKTLGSVAAPTAGLHFTPELLEQVRRLGVEFVELELRVGYGTFSTLTAKQFREKKLHEEFFSISSEVAETLNLAKKQGRRIISVGTTTLRALEASFDSGTRSFLSGESSTRLFLQPGDPILSCDCLITNFHLPESSLLLLVCAFAGKDAVLNAYRYALRNGFRFYSYGDAMLLLNRL

SEQ ID NO: 68161 - protein, 350 aa, Leptospira gomenensis
  misc_feature (1)..(350): tr|A0A5F1YAR5|A0A5F1YAR5_9LEPT S-adenosylmethionine:tRN A ribosyltransferase-isomerase OS=Leptospira gomenensis OX=2484974 GN=queA PE=3 SV=1
MLFSDLQEFEFDLPEDNIARFPASQRDESRLMVVDAGSGSIRIEPAFKNILGHLREGDVLVANHTKVSKRRVYLSRNDRIHESMFLEAENGVWKCKIRNSKKIKTGDVLLDHKTKSIRFTTIDKREEFVFVRPESFLSEEDFDRIGEIPIPPYLKREANSEDEIRYQTLFAKTPGSIAAPTAGLHFSERIFEELKLKKIGLYTLELSVGYGTFQPLTEENFLRKKLHREEFFLDDTTAEALTKAKREKRRIVSIGTTTLRALESCFHSEINSFQSGKGNTELFIQPEDVLKSCEGLITNFHLPGSSLLLLVSAFAGKRLLLDAYQKAISENFRFYSYGDAMLILRPEVSD

SEQ ID NO: 68162 - protein, 351 aa, Leptospira haakeii
  misc_feature (1)..(351): tr|A0A2N0BVQ8|A0A2N0BVQ8_9LEPT S-adenosylmethionine:tRN A ribosyltransferase-isomerase OS=Leptospira haakeii OX =2023198 GN=queA PE=3 SV=1
MEFQDLSDFDFELPEDQIAKFPAAKRDKSRLLVLGRTQNFLKEETEFSKILGYLKEGDVLVANATRVSKRRVFLITKTGRRHEAMFLSETEPGVWKTLTRNSKKLKLGDTVSDEETGKYLFSVGRKEEEFTFFQAETPLNENSFEIIGRTPIPPYFKRESTSEDDVRYQTVYSKNLGSVAAPTAGLHFTSELLEELKNRNIEFLKLELKVGYGTFQSLNEDHFTNKKLHEEEFELPLETKNILDSAKKDGKRIISVGTTTLRALESAYDPKTKTFKSGEGKTRLFLQPEDSILSCEGLITNFHLPQSSLLLLVSAFAEKEKILNAYKFAVEQKFRFFSYGDSMLILDPEKI

SEQ ID NO: 68163 - protein, 346 aa, Leptospira harrisiae
  misc_feature (1)..(346): tr|A0A2N0AG71|A0A2N0AG71_9LEPT S-adenosylmethionine:tRN A ribosyltransferase-isomerase OS=Leptospira harrisiae OX=2023189 GN=queA PE=3 SV=1
MDFLNEYDFHLPEERIAKFPLENRDESRLLVVDRTQSKFWEAPLFRDITPLIQAGDVFVYNETKVSYRRVFLQVESGRIHESIFLEPDDDENQRWLCILKNRAKLRLGESLSPVGFPNYQFIYQGPKEELSFLNSNLPISDSDFEIFGNIPIPPYLKRNVTEEDKVRYQTIFANRSGSVAAPTAGLHFTEELKDNLKKLGAEFLPVELQIGYGTFRPLTAEQWQTKTLHREKYLVSESTATKLNDARKEGRRIIAVGTTTLRVLETVFDSQLQKYKVGSSQTDIFLSPGDRIQSVQGLITNFHLPKSSLLLLVSAFATTQLVLDSYQYALKNGFRFYSYGDSMFLF

SEQ ID NO: 68164 - protein, 351 aa, Leptospira hartskeerlii
  misc_feature (1)..(351): tr|A0A2M9XAV0|A0A2M9XAV0_9LEPT S-adenosylmethionine:tRN A ribosyltransferase-isomerase OS=Leptospira hartskeerl ii OX=2023177 GN=queA PE=3 SV=1
MEFQDLSDFDFELPEEQIAKFPAAKRDKSRLLVLGRTQNFLKEESEFSKILNYLREGDVLVANATRVSKRRVFLITKTGRRHEAMFLSESEPGTWKTLTRNSKKLKLGDIVSDEATGKFLFSVERKEEEFTIFRSETQLDENSFEIIGRTPIPPYFKRESTSEDDIRYQTVYSKNLGSVAAPTAGLHFTPELLEELKNRNIEFLKLELKVGYGTFQSLNEDHFTNKKLHEEEFDLPIETKNVLDSAKKNGKRIISVGTTTLRALESAYDPNTKTFQSGEGKTRLFLQPEDSILSCEGLITNFHLPQSSLLLLVSAFAEKEKILRAYKFAIEQNFRFFSYGDSMLILDPEKV

SEQ ID NO: 68165 - protein, 347 aa, Leptospira idonii
  misc_feature (1)..(347): tr|A0A4R9M127|A0A4R9M127_9LEPT S-adenosylmethionine:tRN A ribosyltransferase-isomerase OS=Leptospira idonii OX= 1193500 GN=queA PE=3 SV=1
MLDFLSEYDFPLPESQIAKFPSEKRDESRLLILDRKNDALKEHSRFRDIIDYLHPGDVLVYNETKVSYRRVFLKSEKGRIHESVFLEFLDKEGKDWLCILKNRRKLKLGERLVPEGYDSPVFIYSGSKEDLSILKTNRPVSEDEFFVWGNIPIPPYLKRKAEKSDQERYQTIFANNPGSVAAPTAGLHFTEALKKTLEEKGVIFVPVLLQIGYGTFQPLQEEQIRTKKLHKEKYIMSDVTSAILNQAVREKRRVIAVGTTSLRVLESVFDPQSQIYKSGDGEADIFLSPGDTIHSIQGLITNFHLPQSSLLLLVNCFGGKSLVMRSYRYALEKNFRFYSYGDVMFLF

SEQ ID NO: 68166 - protein, 347 aa, Leptospira ilyithenensis
  misc_feature (1)..(347): tr|A0A4R9LXV5|A0A4R9LXV5_9LEPT S-adenosylmethionine:tRN A ribosyltransferase-isomerase OS=Leptospira ilyithenen sis OX=2484901 GN=queA PE=3 SV=1
MDEFLNDYDFFLPESQIAKYPAENRDESRLLVLNREKDTISEHSQFKEIEDYLKEGDVLVYNETKVSKRRVYLSTESGRIHESVFLETRDYHSKEWICILKNRKKLRLGDILFPEGYKEILFRYQGDSEDLSILVSENSIYDSDFSQWGNIPIPPYLKRKAEKSDEDRYQTIFAANPGSVAAPTAGLHFSLELRKNLESKGIVFVPIILQIGYGTFQPLQQEQFQLKKLHKESYELSEISAKILNQAVAEKRRVISIGTTTLRVLESVFDFKSQIYKAEKGETDIFLSPGDQIHSSQGLITNFHLPKSSLLLLVNCFGGNNLVMRSYHYALERNFRFYSYGDAMFLF

SEQ ID NO: 68167 - protein, 367 aa, Leptospira inadai
  misc_feature (1)..(367): tr|V6HBE3|V6HBE3_9LEPT S-adenosylmethionine:tRNA ribosy ltransferase-isomerase OS=Leptospira inadai serovar Lym e str. 10 OX=1049790 GN=queA PE=3 SV=1
MPSEPERKIGFLQVSSVFFGTMEIQDLSEFSFDLPENQIAKHPSSRRDESRLLVLDRKEDTLLEEVSFASVRNHLKKGDVLIANTARVSKRRVYLKTISGRRHEALFLSGGNDNIWKALIRNSKKLKEGTPLVAEESASLEFIVLNKEEEFTFLKCTSDFREEDFESIGKIPIPPYFKRESSEEDSIRYQTVYAKNLGSVAAPTAGLHFTTELLSEIRNAGIDFVELELRVGYGTFQPLSQEHFREKKLHEESYFISTEVSEILNSAKEAGRRIVSVGTTTLRALESSYDPQTRRFRAGEDTTRLFLQPGDRISSCDGLITNFHLPESSLLLLVCAFAGKERVLSAYRYAVKNGFRFFSYGDAMLLL

SEQ ID NO: 68168 - protein, 193 aa, Leptospira interrogans
  misc_feature (1)..(193): tr|M3DRI3|M3DRI3_LEPIR S-adenosylmethionine:tRNA ribosy ltransferase-isomerase OS=Leptospira interrogans serova r Lora str. TE 1992 OX=1193028 GN=LEP1GSC067_2173 PE=3 SV=1
MSEERIARYPVANRDESRLMVLDVNTGTISSEPSFKNVISYLKEGDLLVANHTKVSKRRVYLRSKTKARIHEAMFLEEKESLWKCKIRNSKKLKMGEQLCDEKTKQILFTIERKEEEFVFLKPKHSLQEEDFQQIGEIPIPPYLKRNADSEDEIRYQTLFAKTPGSVAAPTAGLHFSENIFKTLKEKKYNSAL

SEQ ID NO: 68169 - protein, 222 aa, Leptospira interrogans
  misc_feature (1)..(222): tr|N1ULM8|N1ULM8_LEPIR S-adenosylmethionine:tRNA ribosy ltransferase-isomerase OS=Leptospira interrogans serova r Australis str. 200703203 OX=1085541 GN=LEP1GSC115_180 4 PE=3 SV=1
MSEERIARYPVANRDESRLMVLDVNTGTISSEPSFKNVISYLKEGDLLVANHTKVSKRRVYLRSKTKARIHEAMFLEEKESLWKCKIRNSKKLKMGEQLCDEKTKQILFTIERKEEEFVFLKPKHSLQEEDFQQIGEIPIPPYLKRNADSEDEIRYQTLFAKTPGSVAAPTAGLHFSENIFKTLKEKKIQFCTLELKVGYGTFQPLTEENFQNQKLHREDFF

SEQ ID NO: 68170 - protein, 346 aa, Leptospira jelokensis
  misc_feature (1)..(346): tr|A0A4Z1A4C0|A0A4Z1A4C0_9LEPT S-adenosylmethionine:tRN A ribosyltransferase-isomerase OS=Leptospira jelokensis OX=2484931 GN=queA PE=3 SV=1
MDFLNEFDFHLPEEQIARFPAKNRDESRLVLVDKTTEKFWEAPFFRDIREWVRPGDVFVYNETKVSYRRVYLQVESGRIHESIFLEAEGDGSRIWTCILKNRAKLKLGEVLAPVGFPTFSFRYEGKNEELSILVSDKTVTDSDFEIFGTIPIPPYLKRNVTEEDKVRYQTIFAKKSGSVAAPTAGLHFTESLRAELEKTGAEFLPVELQVGYGTFRPLTAEQWQTKTLHKERYEITEGTASRLDGARREGRRVIAIGTTTLRVLETVFDSQQQKYKVGVGQTDIFLSPGDKIESVQGLITNFHLPKSTLLLLVSAFANSRLVMDVYRYALQNKFRFYSYGDSMFLF

SEQ ID NO: 68171 - protein, 351 aa, Leptospira johnsonii
  misc_feature (1)..(351): tr|A0A2P2D7L4|A0A2P2D7L4_9LEPT S-adenosylmethionine:tRN A ribosyltransferase-isomerase OS=Leptospira johnsonii OX=1917820 GN=queA PE=3 SV=1
MEFQDLSDFDFELPEDQIAKFPAAKRDKSRLLVLGRTQDFLKEETEFSKIIGYLREGDVLVANATRVSKRRVFLITKTGRRHEAMFLSETEPGVWKTLTRNSKKLKLGDIVSDEISGKFQFSVGGKEEEFTIFRSETPLDENSFELIGRTPIPPYFKRESTSEDDVRYQTVYSKNLGSVAAPTAGLHFTPELLEELKNRKIEFLKLELKVGYGTFQSLNEDHFANKKLHEEEFDLPSETKNVLDFAKKNGKRIISVGTTTLRALESAYDPNTKTFRAGEGKTRLFLQPEDSILSCEGLITNFHLPQSSLLLLVSAFAEKEKILKAYKFAIEQKFRFFSYGDSMLILDPEKV

SEQ ID NO: 68172 - protein, 346 aa, Leptospira kanakyensis
  misc_feature (1)..(346): tr|A0A4R9HWX3|A0A4R9HWX3_9LEPT S-adenosylmethionine:tRN A ribosyltransferase-isomerase OS=Leptospira kanakyensi s OX=2484968 GN=queA PE=3 SV=1
MDFLQEYDFHLPEEQIAKFPMENRDESRLLVVDKTESKFWEAPLFKDITTLVRPGDIFVYNETKVSYRRVYLQVESGRIHESIFLEAEDETNHQWLCILKNRAKLKLGDKLFPVGFKEFEFFYQGAKEELSILHSERSISDSDFEIFGNIPIPPYLKRNVTEEDKVRYQTIFANRSGSVAAPTAGLHFTEPLKEKLRSLGAEFLPVELQIGYGTFRPLTTEQWQTKTLHKENYSVSGPTATRLNDARKEGRRIISVGTTTLRVLESVFDSQLKTYKVGVGQTDIFLSPGDNIQSVQGLITNFHLPKSSLLLLVSAFANTRLVMSSYHYALKNGFRFYSYGDSMFLF

SEQ ID NO: 68173 - protein, 346 aa, Leptospira kemamanensis
  misc_feature (1)..(346): tr|A0A4R9JSH4|A0A4R9JSH4_9LEPT S-adenosylmethionine:tRN A ribosyltransferase-isomerase OS=Leptospira kemamanens is OX=2484942 GN=queA PE=3 SV=1
MDFLNEFDFHLPEEQIARFPAKNRDESRLLLVDKTNDRFWEAPFFRDIKEWVKPGDVFVYNETKVSYRRVYLQVPSGRIHESIFLEAEDGESRIWTCILKNRAKLRLGEILSPVGFPNFSFRYEGKKDELSVLVSLESVTDNDFEIFGTIPIPPYLKRKVTEEDKVRYQTIFAKKSGSVAAPTAGLHFTDSLKMELQSIGAEFLPVELQVGYGTFRPLTAEQWQTKTLHKEKYEISEGTANRLNTARKEGRRIIAIGTTSLRVLETVFDSQQQKYKVGLGQTDIFLSPGDTINSVQGLITNFHLPKSSLLLLVSAFAKSRLVMNAYQYALQNQFRFYSYGDSMFLF

SEQ ID NO: 68174 - protein, 350 aa, Leptospira kirschneri
  misc_feature (1)..(350): tr|M6FBP1|M6FBP1_9LEPT S-adenosylmethionine:tRNA ribosy ltransferase-isomerase OS=Leptospira kirschneri serovar Bulgarica str. Nikolaevo OX=1240687 GN=queA PE=3 SV=1
MLFKDLKEFEFVLSEERIARYPVANRDESRLMVLDVNTGEISSEPSFKNVISYLKEGDLLVANHTKVSKRRVYLRSKTRIHEAMFLEEKESLWKCKIRNSKKLKMGERLCDEKTKQVLFTIEKKKEEFVFLKPERPLQEEDFQQIGEIPIPPYLKRNADSEDEIRYQTLFAKTPGSVAAPTAGLHFSENIFKILKEKKIQFCTLELKVGYGTFQPLTEENFQNQKLHREEFFLEESGAQMLNLAKKERRRIFSIGTTTLRALESAYDPVTDTFRSGPGVTELFILPEDRLQSCQGLITNFHLPGSSLLLLVSAFAGKELILKAYQKAIQEKFRFYSYGDAMLILGIELIP

SEQ ID NO: 68175 - protein, 350 aa, Leptospira kirschneri; identical to SEQ ID NO: 68174
  misc_feature (1)..(350): tr|M6IRN9|M6IRN9_9LEPT S-adenosylmethionine:tRNA ribosy ltransferase-isomerase OS=Leptospira kirschneri serovar Bim str. 1051 OX=1049941 GN=queA PE=3 SV=1

SEQ ID NO: 68176 - protein, 348 aa, Leptospira kmetyi
  misc_feature (1)..(348): tr|A0A5F1XMP5|A0A5F1XMP5_9LEPT S-adenosylmethionine:tRN A ribosyltransferase-isomerase OS=Leptospira kmetyi OX= 408139 GN=queA PE=3 SV=1
MLFEDLKEFEFILPEERIARYPAPDRDESRLMVLDVRSGNILSEPSFKNIVSYLKEGDVLVANHTKVSKRRVYLKTELRVHEAMFLEEHNGIWKCKIRNSKKLKDGTRLTDEKTRRITFAVEKKEEEFVFLKPERPLTEEDFEQIGEIPIPPYLKREANSEDEIRYQTLFAKTPGSIAAPTAGLHFSEKLFATLREKKITLCTLELKVGYGTFQPLTEENFQNQKLHREEFFLGKESVEILNRAKQEKRRIVSIGTTTLRALESAYDRSTNSFQEGWGATELFIRPDDLLYSCEGLITNFHLPGSSLLLLVSAFAGKDLILKAYQKAIREEFRFYSYGDAMLILGKKG

SEQ ID NO: 68177 - protein, 348 aa, Leptospira kmetyi
  misc_feature (1)..(348): tr|A0A2M9XR74|A0A2M9XR74_9LEPT S-adenosylmethionine:tRN A ribosyltransferase-isomerase OS=Leptospira kmetyi OX= 408139 GN=queA PE=3 SV=1
MLFEDLKEFEFILPEERIARYPAPDRDESRLMVLDVRSGNILSEPSFKNIVSYLKEGDVLVANHTKVSKRRVYLKTELRVHEAMFLEEHNGIWKCKIRNSKKLKDGTRLTDEKTRRITFAVEKKEEEFVFLKPERPLTEEDFEQIGEIPIPPYLKREANSEDEIRYQTLFAKTPGSIAAPTAGLHFSEKLFATLREKKITLCTLELKVGYGTFQPLTEENFQNQKLHREEFFLGKESVEILNQAKQEQRRIVSIGTTTLRALESAYDRSTNSFQEGWGATELFIRPDDLLYSCEGLITNFHLPGSSLLLLVSAFAGKDLILKAYQKAIREEFRFYSYGDAMLILGKKG

SEQ ID NO: 68178 - protein, 347 aa, Leptospira kobayashii
  misc_feature (1)..(347): tr|A0A2P2DUA4|A0A2P2DUA4_9LEPT S-adenosylmethionine:tRN A ribosyltransferase-isomerase OS=Leptospira kobayashii OX=1917830 GN=queA PE=3 SV=1
MDEFLKDYDFLLPESQIAKYPAENRDESRLLVLNREKDTITEHSRFKEIADYFIEGDVLVYNETKVSKRRVYLSARSGRIHESVFLETRDPDSKEWICILKNRKKLKLGDALHPEGYEDIRFRYQGDSADLSILVADKSLDDSDFSQWGNIPIPPYLKRKAEKSDEDRYQTIFATNPGSVAAPTAGLHFSEKLRQMLEVKGIIFVPIILQIGYGTFQPLQEEQLLKKKLHTESYELSEATAKILNEARAEKRRVISIGTTTLRVLESVFDFKSQIYKAGKGETDIFLSPGDQIHSSQGLVTNFHLPKSSLLLLVNCFGGNNLVMRSYRYALERNFRFYSYGDAMFLF

SEQ ID NO: 68179 - protein, 351 aa, Leptospira koniamboensis
  misc_feature (1)..(351): tr|A0A4R9J475|A0A4R9J475_9LEPT S-adenosylmethionine:tRN A ribosyltransferase-isomerase OS=Leptospira koniamboen sis OX=2484950 GN=queA PE=3 SV=1
MEFQDLSDFDFELPEDQIAKFPAAKRDKSRLLVLGRTQNFLKEETEFSKILNYLQEGDVLVANATRVSKRRVFLTTKTGRRHEAMFLSEIEPGLWKTLTRNSKKLKIGDSISDETTGKFLFSVVRKEEEFTIFQSGIPLDENSFETIGRTPIPPYFKRESTSEDDVRYQTVYSKNLGSVAAPTAGLHFTPELLEELKKRNIEFLNLELKVGYGTFQSLNEDHFTNKKLHEEEFDLPLETKNVLDSAKKNGKRIISVGTTTLRALESAYDPNTKTFRSGEGKTRLFLQPEDSILSCEGLITNFHLPQSSLLLLVSAFSEKEKILKAYKFAIEQNFRFFSYGDSMLILDPEKI

SEQ ID NO: 68180 - protein, 347 aa, Leptospira langatensis
  misc_feature (1)..(347): tr|A0A5F1ZRV2|A0A5F1ZRV2_9LEPT S-adenosylmethionine:tRN A ribosyltransferase-isomerase OS=Leptospira langatensi s OX=2484983 GN=queA PE=3 SV=1
MKFKDLSEFDFELPDEQIAKFPASKRDKSRLLVLGRTKDFLTEEPEFTGILKYLKEGDVLVANHTRVSKRRVFLVTSSGRRHESLFLSELEPGIWKTLLRNSKKLRTGDRIFDEESRSFVFSVVGKQEEFTLLKAESQFDEMSFEKIGRIPIPPYFKRESSFEDDIRYQTVYSKNLGSVAAPTAGLHFTPELIGELQKKGVQFLDLELKVGYGTFQPLTEEHFSQKQLHEEFFLLPERTAQALNQAKKEKRRIISVGTTTLRALEASYQEKKEFKAGEGTTKLFLQPGDPILSCEGLITNFHLPESSLLLLVSAFSEKKRLMDAYRYAVQKGFRFFSYGDSMLILDP

SEQ ID NO: 68181 - protein, 346 aa, Leptospira levettii
  misc_feature (1)..(346): tr|A0A5F2AM25|A0A5F2AM25_9LEPT S-adenosylmethionine:tRN A ribosyltransferase-isomerase OS=Leptospira levettii O X=2023178 GN=queA PE=3 SV=1
MDFLEEFDFHLPEEQIARFPAKNRDESRLLLVDQSKESFWEAPHFRNIGQWLLPGDVLVFNDTKVSYRRVFLQVESGRIHESIFLETVDDSSFVWTCILKNRAKLKLGDILCPVGFPIFQFRYDGKEEELSLLVSDKEISDSDFEIFGTIPIPPYLKRKVIEEDKIRYQTIFAKKSGSVAAPTAGLHFTDTLKEELVKQGIEFLPVNLQVGYGTFRPLTAEQWQTKTLHKEKYEITEETANRLNRAKKEGRRIIAIGTTSLRVLETVFDSQQQKYKVGLGQTDIFLSPGDNIKSVQGLITNFHLPKSSLLLLVSAFANSRLVMNVYRYALQNHFRFYSYGDSMFLF

SEQ ID NO: 68182 - protein, 346 aa, Leptospira levettii
  misc_feature (1)..(346): tr|A0A2N0AV88|A0A2N0AV88_9LEPT S-adenosylmethionine:tRN A ribosyltransferase-isomerase OS=Leptospira levettii O X=2023178 GN=queA PE=3 SV=1
MDFLEEFDFHLPEEQIARFPAKNRDESRLLLVDQSKESFWEAPHFRNIGQWLLPGDVLVFNDTKVSYRRVFLQVESGRIHESIFLETVDDSSFVWTCILKNRAKLKLGDILCPVGFPNFQFRYDGKEEELSLLVSDKEISDSDFEIFGTIPIPPYLKRKVIEEDKIRYQTIFAKKSGSVAAPTAGLHFTDTLKEELVKQGIEFVPVNLQVGYGTFRPLTAEQWQTKTLHKEKYEITEETANRLNRAKKEGRRIIAIGTTSLRVLETVFDSQQQKYKVGLGQTDIFLSPGDNIKSVQGLITNFHLPKSSLLLLVSAFANSRLVMNVYRYALQNHFRFYSYGDSMFLF

SEQ ID NO: 68183 - protein, 356 aa, Leptospira licerasiae
  misc_feature (1)..(356): tr|A0A5F2DU03|A0A5F2DU03_9LEPT S-adenosylmethionine:tRN A ribosyltransferase-isomerase OS=Leptospira licerasiae OX=447106 GN=queA PE=3 SV=1
MEFQDLSDFDFELPEDQIAKFPAAKRDKSRLLVLGRTREFLKEETEFSKILNYLIEGDVLVANATRVSKRRVFLVTETGRRHEAMFLSETEPRVWKTLTRNSKKLKLGDTVSDEATGNFLFTVERKEEEFTFFRAEIQLDENSFELIGRTPIPPYFKRESTTEDDVRYQTVYSKNLGSVAAPTAGLHFTPELLEELKNRNIEFLKLELKVGYGTFQSLNEDHFTNKKLHEEEFDLPSQTAELLNLAKKNGKRIISVGTTTLRALESAYDPNTKTFRSGEGKTRLFLQPEDSILSCEGLITNFHLPKSSLLLLVSAFAEKEKILKAYEFAIARNFRFFSYGDSMLILDPEKFPLLLI

SEQ ID NO: 68184 - protein, 356 aa, Leptospira licerasiae
  misc_feature (1)..(356): tr|I0XQV6|I0XQV6_9LEPT S-adenosylmethionine:tRNA ribosy ltransferase-isomerase OS=Leptospira licerasiae serovar Varillal str. VAR 010 OX=1049972 GN=queA PE=3 SV=1
MEFQDLSDFDFELPEDQIAKFPAAKRDKSRLLVLGRTREFLKEETEFSKILNYLIEGDVLVANATRVSKRRVFLVTETGRRHEAMFLSETEPRVWKTLTRNSKKLKLGDTVSDEATGNFLFTVERKEEEFTFFRAEIQLDENSFELIGRTPIPPYFKRESTTEDDVRYQTVYSKNLGSVAAPTAGLHFTPELLEELKNRNIEFLKLELKVGYGTFQSLSEDHFTNKKLHEEEFDLPSQTAELLNLAKKNGKRIISVGTTTLRALESAYDPDTKTFRSGEGKTRLFLQPEDSILSCEGLITNFHLPKSSLLLLVSAFAEKEKILKAYEFAIARNFRFFSYGDSMLILDPEKFPPLLI

SEQ ID NO: 68185 - protein, 346 aa, Leptospira macculloughii; identical to SEQ ID NO: 68182
  misc_feature (1)..(346): tr|A0A2N0C2L5|A0A2N0C2L5_9LEPT S-adenosylmethionine:tRN A ribosyltransferase-isomerase OS=Leptospira macculloug hii OX=2023202 GN=queA PE=3 SV=1

SEQ ID NO: 68186 - protein, 346 aa, Leptospira macculloughii
  misc_feature (1)..(346): tr|A0A2N0C897|A0A2N0C897_9LEPT S-adenosylmethionine:tRN A ribosyltransferase-isomerase OS=Leptospira macculloug hii OX=2023202 GN=queA PE=3 SV=1
MDFLNEYDFDLPEEQIAKFPLKNRDESRLLVVDRDQSKFWEAPLFRDITSLVRPGDIFVYNETKVSYRRVFLQVESGRIHESIFLEPVDIQNHTWLCILKNRAKLRLGDKLSPVGFPNYQFVYQGPNEELSILKSELSISDSDFEIFGNIPIPPYLKRNVTEEDKVRYQTIFANRSGSVAAPTAGLHFTEDLKDTFRTLGAEFLPVELQIGYGTFRPLTTEQWQTKTLHREKYLVSEFTATKLNDARKEGRRIIAVGTTTLRVLETVFDSQLQKYKVGSSQTDIFLSPGDKIDSVQGLITNFHLPKSSLLLLVSAFATTQLVLDSYRYALKNGFRFYSYGDSMFLF

SEQ ID NO: 68187 - protein, 347 aa, Leptospira mayottensis
  misc_feature (1)..(347): tr|A0A5F2EKC8|A0A5F2EKC8_9LEPT S-adenosylmethionine:tRN A ribosyltransferase-isomerase OS=Leptospira mayottensi s OX=1137606 GN=queA PE=3 SV=1
MLFKDLKEFEFTLSEERIARYPAANRDESRLMVLDVNAGNIFSEPSFKNLVSYLKEGDVLVANHTKVSKRRVYLKTQIRTHETMFLEEKELLWKCKIRNSKKLKVGTKLSDEKTQRISFTVEKKEGEFVFLKSEQTLQEEDFQQIGEIPIPPYFKRNPDSKDEIRYQTLFAKTPGSVAAPTAGLHFSESIFQTLKEKKIQFCTLELKVGYGTFQPLTEENFQNQKLHREEFFLEESSTKILNLAKKEGRRIFSIGTTTLRALESAYNYATNSFRSGRGTTELFIQPEDRLKSCECLITNFHLPGSSLLLLVSAFAGKELILKAYQKAIQEKFRFYSYGDAMLILGKR

SEQ ID NO: 68188 - protein, 347 aa, Leptospira mayottensis; identical to SEQ ID NO: 68187
  misc_feature (1)..(347): tr|A0A3Q9DY95|A0A3Q9DY95_9LEPT S-adenosylmethionine:tRN A ribosyltransferase-isomerase OS=Leptospira mayottensi s 200901116 OX=1192864 GN=queA PE=3 SV=1

SEQ ID NO: 68189 - protein, 346 aa, Leptospira meyeri
  misc_feature (1)..(346): tr|A0A4R8MLQ9|A0A4R8MLQ9_LEPME S-adenosylmethionine:tRN A ribosyltransferase-isomerase OS=Leptospira meyeri OX= 29508 GN=queA PE=3 SV=1
MDFLNEYDFDLPEEQIAKFPLKNRDESRLLVVDRIQSKFWEAPLFRDITSLVRPGDIFVYNETKVSYRRVFLQVESGRIHESIFLEPEDIQNQTWLCILKNRAKLRLGDRLSPVGFPNYQFVYQGPNEELSILKSEISISDSDFEIFGNIPIPPYLKRKVTEEDKVRYQTIFANRSGSVAAPTAGLHFTEDLKDTFRTLGAEFLPVELQIGYGTFRPLTTEQWQTKTLHREKYLVPESTATKLNDARKEGRRIIAVGTTTLRVLETVFDSQLQKYKVGSSQTDIFLSPGDKIDSVQGLITNFHLPKSSLLLLVSAFATTQLVLDSYRYALKNGFRFYSYGDSMFLF

SEQ ID NO: 68190 - protein, 346 aa, Leptospira meyeri; identical to SEQ ID NO: 68186
  misc_feature (1)..(346): tr|A0A5F2CSM9|A0A5F2CSM9_LEPME S-adenosylmethionine:tRN A ribosyltransferase-isomerase OS=Leptospira meyeri OX= 29508 GN=queA PE=3 SV=1

SEQ ID NO: 68191 - protein, 348 aa, Leptospira montravelensis
  misc_feature (1)..(348): tr|A0A4Z0ZQJ8|A0A4Z0ZQJ8_9LEPT S-adenosylmethionine:tRN A ribosyltransferase-isomerase OS=Leptospira montravele nsis OX=2484961 GN=queA PE=3 SV=1
MDFLQEFDFNLPDEQIAKFPLENRDQSRLLVVNIGQSKFWEAPLFRDIQSLVRPGDVFVYNETKVSSRRVYLQVESGRIHESIFLESLDPSEKSWLCILKNRAKLKLGEKLFPVGFNDYQFSYQGPKEELSILFSEIPISDSDFGIFGNIPIPPYLKRNVTEEDKIRYQTIFANRSGSVAAPTAGLHFTEELKENLNKKGAEFVPVELQIGYGTFRPLTPEQWESKTLHREKYFVSESTASKLNGARKEGRRIIAVGTTTLRVLETVFDSQLKKYKVGSSQTDIFLSPGDNIQSVQGLITNFHLPKSSLLLLVSAFANTQLVLDAYQYALQNGFRFYSYGDSMFLFQK

SEQ ID NO: 68192 - protein, 346 aa, Leptospira mtsangambouensis
  misc_feature (1)..(346): tr|A0A5F2DJ78|A0A5F2DJ78_9LEPT S-adenosylmethionine:tRN A ribosyltransferase-isomerase OS=Leptospira mtsangambo uensis OX=2484912 GN=queA PE=3 SV=1
MDFLNEYDFHLPEEQIAKFPLENRDESRLLVVDRAQLKYWEAPLFRDITTLVRPGDIFVYNETKVSYRRVFLQVESGRIHESIFLEPQDTQNQTWLCILKNRAKLKLGDRLSPVGFPNYQFVYHGPEEELSFLGSELSISDSDFEIFGNIPIPPYLKRNVTEEDKVRYQTIFANRSGSVAAPTAGLHFTEELKNTFRTLGAEFLPVELQIGYGTFRPLTTEQWQTKTLHREKYLVSESTATKLNDARKEGRRIIAVGTTTLRVLETVFDSQLQKYKVGSSQTDIFLSPGDKIDSVQGLITNFHLPKSSLLLLVSAFATTQLVLDSYRYALKNGFRFYSYGDSMFLF

SEQ ID NO: 68193 - protein, 351 aa, Leptospira neocaledonica
  misc_feature (1)..(351): tr|A0A2M9ZWH5|A0A2M9ZWH5_9LEPT S-adenosylmethionine:tRN A ribosyltransferase-isomerase OS=Leptospira neocaledon ica OX=2023192 GN=queA PE=3 SV=1
MEFQDLSDFDFELPEDQIAKFPAVQRDKSRLLVLGRTQDFLKEETEFSKILDYLREGDVLVANATRVSKRRVFLVTKTERRHEAMFLSEIEPGVWKTLIRNSKKLKLGDILSDEASGKFQLSVERKEEEFTILRSETPLDENSFETIGRTPIPPYFKRESNSEDDVRYQTVYSKNLGSVAAPTAGLHFTPELLEELKNRKIEFLKLELKVGYGTFQSLSEDHFANKKLHEEEFDLPSETTELLNSAKKNGKRIISVGTTTLRALESAYDPNDKTFRAGEGKTRLFLQPEDSILSCEGLITNFHLPQSSLLLLVSAFAEKEKILKAYKFAIEQKFRFFSYGDSMLILDPEKV

SEQ ID NO: 68194 - protein, 350 aa, Leptospira noguchii
  misc_feature (1)..(350): tr|A0A540UEM9|A0A540UEM9_9LEPT S-adenosylmethionine:tRN A ribosyltransferase-isomerase OS=Leptospira noguchii O X=28182 GN=queA PE=3 SV=1
MLFKDLKEFEFILSEERIARYPVANRDESRLMVLDVNTGEISSEPSFKNVISYLREGDLLVANHTKVSKRRVYLRSKNRIHEAMFLEEKESLWRCKIRNSKKLKMGEQLCDEKTKLVLFTIEKKEEEFVFLKPKHPLQEEDFQQIGEIPIPPYLKRNADSEDEIRYQTLFAKTPGSVAAPTAGLHFSENIFKTLKEKKIQFCTLELKVGYGTFQPLTEENFQNQKLHREEFFLEEPSAQMLNLAKKERRRIFSIGTTTLRALESAYDPVTDSFRSGPGATELFILPENQLQSCQGLITNFHLPSSSLLLLVSAFAGKELILKAYQKAIQEKFRFYSYGDAMLILGIELIP

SEQ ID NO: 68195 - protein, 350 aa, Leptospira noguchii
  misc_feature (1)..(350): tr|T0FEZ8|T0FEZ8_9LEPT S-adenosylmethionine:tRNA ribosy ltransferase-isomerase OS=Leptospira noguchii serovar P anama str. CZ214 OX=1001595 GN=queA PE=3 SV=1
MLFKDLKEFEFILSEERIARYPVANRDESRLMVLDVNTGEISSEPSFKNVISYLREGDLLVANHTKVSKRRVYLRSKNRIHEAMFLEEKESLWRCKIRNSKKLKMGEQLYDEKTKLILFTIEKKEEEFVFLKPKHPLQEEDFQQIGEIPIPPYLKRNADSEDEIRYQTLFAKTPGSVAAPTAGLHFSENIFKTLKEKKIQFCTLELKVGYGTFQPLAEENFQSQKLHREEFFLEEPSAQMLNLAKKERRRIFSIGTTTLRALESAYDPVTDSFRSGPGATELFILPEDRLQSCQGLITNFHLPSSSLLLLVSAFAGKDLILKAYQKAIQEKFRFYSYGDAMLILGIELIP

SEQ ID NO: 68196 - protein, 346 aa, Leptospira noumeaensis
  misc_feature (1)..(346): tr|A0A4R9I9I6|A0A4R9I9I6_9LEPT S-adenosylmethionine:tRN A ribosyltransferase-isomerase OS=Leptospira noumeaensi s OX=2484964 GN=queA PE=3 SV=1
MDFLQDYDFHLPEEQIAKFPLENRDESRLLVVDKTESKFSEAPLFKDITRFVLPGDIFVYNQTKVSYRRVYLQVESGRIHESIFLEAEDESCQVWLCILKNRAKLKLGDKLSPVGFQEFEFFYRGAKEELSILHSERSISEPDFEVFGNIPIPPYLKRNVTEEDKIRYQTIFASRSGSVAAPTAGLHFTESLKENLRSLGVEFLPVELQIGYGTFRPLTAEQWQTKTLHRENYSVSAFTATKLNDARKEGSRIIAVGTTTLRVLETVFDSQLKTYKVGVGQTDIFLSPGDNIQSVQGLITNFHLPKSSLLLLVSAFANARLVMSSYHYALKNGFRFYSYGDSMFLF

SEQ ID NO: 68197 - protein, 349 aa, Leptospira ognonensis
  misc_feature (1)..(349): tr|A0A4R9K866|A0A4R9K866_9LEPT S-adenosylmethionine:tRN A ribosyltransferase-isomerase OS=Leptospira ognonensis OX=2484945 GN=queA PE=3 SV=1
MNLEETLADYDFPLDESRIAKFPVATRDESKLLVLNRNSGQITDIAQFKQIESYLVPGDVLVYNETKVSKRRVFLSTPRGRIHESVFIESRDPEGKEWICILKNRKKLKLGDVLFPSASENHFCIYSGNEGDLSILQFKEKVDEIDFEIWGNIPIPPYLKRMATKEDEERYQTIFAKQLGSVAAPTAGLHFTESLRAKLEGNGVQFLPVQLQIGYGTFQPLNEEQWQEKKLHKETFEVTAETATILNGARKEGRRIISVGTTSLRVLETIFEKENQVYVAGKGETDIFMSPGDIIFSVQGLITNFHLPRSSLLLLVSTFVGKELTMKAYHHALEKNYRFYSYGDAMLLV

SEQ ID NO: 68198 - protein, 346 aa, Leptospira perdikensis
  misc_feature (1)..(346): tr|A0A4R9JIV9|A0A4R9JIV9_9LEPT S-adenosylmethionine:tRN A ribosyltransferase-isomerase OS=Leptospira perdikensi s OX=2484948 GN=queA PE=3 SV=1
MDFLQEYDFLLPEEQIAKFPLENRDESRLLVVDKTESKHWEAPLFRDIINLVRPGDIFVYNETKVSYRRVYLQVGSGRIHESIFLEPQDPTNQTWLCILKNRAKLKFGDKLSPVAFPNFSFSFQGHSEELSILYSETEISDSDFAIFGNIPIPPYLKRNVTEEDKVRYQTIFANRSGSVAAPTAGLHFTEKLKDELRTRGVEFLPVELQIGYGTFRPLTTEQWQTKTLHRENYSVSEATATKLNEARKEGRRVIAIGTTTLRVLESVFDSQLKTYKVGSSQTDIFLSPGDNIQSVQGLITNFHLPKSSLLLLVSAFANTRLVMSSYQYALKNGFRFYSYGDSMFLF

SEQ ID NO: 68199 - protein, 353 aa, Leptospira perolatii
  misc_feature (1)..(353): tr|A0A2M9ZPN7|A0A2M9ZPN7_9LEPT S-adenosylmethionine:tRN A ribosyltransferase-isomerase OS=Leptospira perolatii OX=2023191 GN=queA PE=3 SV=1
MDFQELSDFQFELPEDQIAKNPASSRDQSKLLVLDRSNGEKLEEKSFDCILKYLVSGDVLVVNNTKVSKRRVYLLSSSGRRHEALFLGQDRNANWKALVRNSRKLKIGEILRDEKTGSISFILCGKEKENVLLSAPSEFTEETFDRIGQTPIPPYFKRESTEEDDIRYQTVYARGLGSVAAPTAGLHFTPELIKRCKDSGIQFLELELKVGYGTFQPLTEENFQSKSLHEESYFLPEQTASKLNQARAQNRRIISVGTTTLRVLETAYDPSLKMFRAGEGKSTLFLQPEDRIESSDGLITNFHLPQSSLLLLVCAFAKKEWVLSAYKYAISNHFRFFSYGDAMLILKTIQHPT

SEQ ID NO: 68200 - protein, 345 aa, Leptospira putramalaysiae
  misc_feature (1)..(345): tr|A0A4R9L722|A0A4R9L722_9LEPT S-adenosylmethionine:tRN A ribosyltransferase-isomerase OS=Leptospira putramalay siae OX=2484984 GN=queA PE=3 SV=1
MLFTDLKDFEFELPEDRIARYPAKNRDESRLMVVEVGSEKIQVEDAFKNIVSYLKEGDVLIGNHTKVSKRRVYLKNPLRIHEAMFLETKDGLWRCKIRNSKKLKTGDRLQDAKTGLRFFRVEGKEEEFVFLKPDQELQEEDFQSIGEIPIPPYLKREANSEDEIRYQTLFAKTPGSVAAPTAGLHFSESLFQTLKEKKIQICTLELTVGYGTFQPLTEENFQNKKLHREEFFLEESSASILNLAKKEGRRIVSIGTTTLRALESTYDPITKTFRSGAGATELFLQPNDKLQSCEGLITNFHLPGSSLLLLVSAFAGKELILRAYQRAIQEEFRFYSYGDAMLILR

SEQ ID NO: 68201 - protein, 348 aa, Leptospira ryugenii
  misc_feature (1)..(348): tr|A0A2P2E512|A0A2P2E512_9LEPT S-adenosylmethionine:tRN A ribosyltransferase-isomerase OS=Leptospira ryugenii O X=1917863 GN=queA PE=3 SV=1
MDLLDLEEYDFALPEEQIAKFPAEDRAASRLLCLDRSHAQIQEHSHFREIATYFKPGDILVYNETKVSKRRVFLHSKSERIHEAIFLKPLDELASTWECILKFRRKLKLGDLLFLNSESSLHFRFEGKMGELSILKANRPLTEEDFEVFGNIPIPPYLKRLATEEDEIRYQTVFAKQPGSVAAPTAGLHFTEDLVALLQSAGIEFLPVQLKIGYGTFQGLTEEQLKSKSLHSEEYSLAPLVASRLTNAKRNGQRIIAIGTTSLRVLETVYEKESQIFHPGEGKTDIFLSPGDHILSIDGIITNFHLPKSSLILLVSTFAGKNLIKEAYGYALTNQFRFYSYGDAMFIY

SEQ ID NO: 68202 - protein, 351 aa, Leptospira saintgironsiae
  misc_feature (1)..(351): tr|A0A2M9YAW5|A0A2M9YAW5_9LEPT S-adenosylmethionine:tRN A ribosyltransferase-isomerase OS=Leptospira saintgiron siae OX=2023183 GN=queA PE=3 SV=1
MEFQDLSDFDFELPEDQIAKFPAAKRDKSRLLVLGRTQNFLKEETEFSKILNYLQEGDVLVANATRVSKRRVFLVTKTGRRHEAMFLTETEPGVWKTLTRNSKKLKLGDTISDEATGKFLFSVIRKEEEFTIFQSELPLDENSFETIGRTPIPPYFKRESTSEDDVRYQTVYSKNLGSVAAPTAGLHFTPELLEELKKRNIEFLKLELKVGYGTFQSLNEDHFANKKLHEEEFDLPLETKNVLDLAKKNGKRIISVGTTTLRALESAYDPNTKTFRSGEGKTRLFLQPEDSILSCEGLITNFHLPQSSLLLLVSAFAEKEKILKAYKFAIEQNFRFFSYGDSMLILDPEKV

SEQ ID NO: 68203 - protein, 347 aa, Leptospira santarosai
  misc_feature (1)..(347): tr|A0A0E2BMQ1|A0A0E2BMQ1_9LEPT S-adenosylmethionine:tRN A ribosyltransferase-isomerase OS=Leptospira santarosai str. MOR084 OX=1049984 GN=queA PE=3 SV=1
MLFEDLKEFEFTLSEERIARYPTANRDESKLMVLDVNAGNIFSESSFKNIVSYLKEGDVLVANHTKVSKRRVYLKTQTRIHETMFLEENELLWKCKIRNSKKLKVGTKLSDEKTQRIAFKVEKKEGEFVFLKPDRTLQEEDFQQIGEIPIPPYLKRNPNSEDEIRYQTLFAKTPGSVAAPTAGLHFSEPVFQTLKEKKIQFCTLELKVGYGTFQPLTEKNFQNQKLHREEFFLGESSAEILNLAKKEKRRIVSIGTTTLRALESAFDKTNDSFRSGPGSTELFIQPENRLNSCECLITNFHLPGSSLLLLVSAFAGKELILKAYRKAIQEKFRFYSYGDAMLILGKR

SEQ ID NO: 68204 - protein, 347 aa, Leptospira santarosai; identical to SEQ ID NO: 68203
  misc_feature (1)..(347): tr|A0A1V2EJG9|A0A1V2EJG9_9LEPT S-adenosylmethionine:tRN A ribosyltransferase-isomerase OS=Leptospira santarosai OX=28183 GN=queA PE=3 SV=1

SEQ ID NO: 68205 - protein, 353 aa, Leptospira sarikeiensis
  misc_feature (1)..(353): tr|A0A4R9K1T2|A0A4R9K1T2_9LEPT S-adenosylmethionine:tRN A ribosyltransferase-isomerase OS=Leptospira sarikeiens is OX=2484943 GN=queA PE=3 SV=1
MEFQDLSDFDFDLPEEQIAKFPAAQRDRSRLLVLGRKSEFLKEEPEFARILEYLKPGDLLVANATRVSKRRVFLLSKTERRHEAMFLSETSPGIWKTLIRNSKKLKIGDRLLDEKTGTFGFSVLDKEEEFTILRSGSELDENKFELIGNTPIPPYFKRESTSEDDLRYQTVYSKNLGSVAAPTAGLHFTPELLDKLKTIGIGFLELELKVGYGTFQSLSQDHFSNKKLHEEEYYIPEETAQILNSAKQGKSRIISVGTTTLRALESSYDPDIEKFKAGSGNTNLFLQPEDSILSCDGLITNFHLPQSSLLLLVSAFAEKQKILNAYKYAIDRKFRFFSYGDSMLILDPDPDST

SEQ ID NO: 68206 - protein, 351 aa, Leptospira selangorensis
  misc_feature (1)..(351): tr|A0A4R9GF59|A0A4R9GF59_9LEPT S-adenosylmethionine:tRN A ribosyltransferase-isomerase OS=Leptospira selangoren sis OX=2484982 GN=queA PE=3 SV=1
MEFQDLSDFDFELPEDQIAKFPAAKRDKSRLLVIGRTQNFLKEEVEFSKILGYLKEGDVLVANATRVSKRRVFLITKTGRRHESMFLSETEPGVWKTLTRNSKKLKVGDKVTDEATGKFHFSVGRKEEEFIIFRAETLLDENSFEIIGRTPIPPYFKRESTSEDDVRYQTVYSKNLGSVAAPTAGLHFTPELLEELKNRNIEFLKLELKVGYGTFQSLNEDHFANKKLHEEEFELPLETKNVLDSAKKDGRRIISVGTTTLRALESAYDPNTKTFRSGEGKTRLFLQPEDSILSCEGLITNFHLPQSSLLLLVSAFAEKEKILKAYKFAIEQNFRFFSYGDSMLILDPEKI

SEQ ID NO: 68207 - protein, 351 aa, Leptospira selangorensis
  misc_feature (1)..(351): tr|A0A5F2C2S9|A0A5F2C2S9_9LEPT S-adenosylmethionine:tRN A ribosyltransferase-isomerase OS=Leptospira selangoren sis OX=2484982 GN=queA PE=3 SV=1
MEFQDLSDFDFELPEDQIAKFPAAKRDKSRLLVIGRTQNFLKEEVEFSKILGYLKEGDVLVANATRVSKRRVFLITKTGRRHESMFLSETEPGVWKTLTRNSKKLKVGDKVTDEATGRFLFSVGRKEEEFIIFRAETPLDENSFEIIGRTPIPPYFKRESTSEDDVRYQTVYSKNLGSVAAPTAGLHFTPELLEELKNRNIEFLKLELKVGYGTFQSLNEDHFANKKLHEEEFELPLETKNVLDSAKKDGRRIISVGTTTLRALESAYDPNTKTFRSGGGKTRLFLQPEDSILSCEGLITNFHLPQSSLLLLVSAFAEKEKILKAYKFAIEQNFRFFSYGDSMLILDPEKI

SEQ ID NO: 68208 - protein, 348 aa, Leptospira semungkisensis
  misc_feature (1)..(348): tr|A0A4R9FZR2|A0A4R9FZR2_9LEPT S-adenosylmethionine:tRN A ribosyltransferase-isomerase OS=Leptospira semungkise nsis OX=2484985 GN=queA PE=3 SV=1
MKFTDLSEFDFELPEEQIAKFPASKRDQSRLLVIGRTKDFLTEEAEFTSILKYLKRGDVLVANHTRVSKRRVFLVTSTGRRHESLFLSEVQPGVWKTLLRNSKKLKIGDTLFDEVSRNFSFSVIGKQEEFTLVQAGTEWNEESFEKVGRTPIPPYFKRESSSEDDIRYQTVYSKNLGSVAAPTAGLHFTPELISKLQSNEIEFLDLELRVGYGTFQPLTEEHFSQKKLHEEFFLMPERTTQILNQAKKENRRIIAVGTTTLRALEASYQKEKNEFKVGEGSTTLFLQPGDPIQSCEGLITNFHLPESSLLLLVSAFSEKNRMMDAYRYAVQKGFRFFSYGDSMLILDP

SEQ ID NO: 68209 - protein, 347 aa, Leptospira sp.
  misc_feature (1)..(347): tr|M5UGZ9|M5UGZ9_9LEPT S-adenosylmethionine:tRNA ribosy ltransferase-isomerase OS=Leptospira sp. Fiocruz LV4135 OX=1193013 GN=queA PE=3 SV=1
MLFEDLKEFEFTLSEERIARYPTANRDESKLMVLDVNAGNIFSESSFKNIVSYLKEGDVLVANHTKVSKRRVYLKTQTRIHETMFLEENELLWKCKIRNSKKLKVGTKLSDEKTQRIAFKVEKKEGEFVFLKSDRTLQEEDFQQIGEIPIPPYLKRNPNSEDEIRYQTLFAKTPGSVAAPTAGLHFSEPVFQTLKEKKIQFCTLELKVGYGTFQPLTEKNFQNQKLHREEFFLGESSAEILNLAKKEKRRIVSIGTTTLRALESAFDKTNDSFRSGPGSTELFIQPENRLNSCECLITNFHLPGSSLLLLVSAFAGKELILKAYRKAIQEKFRFYSYGDAMLILGKR

SEQ ID NO: 68210 - protein, 347 aa, Leptospira sp.
  misc_feature (1)..(347): tr|M6EG11|M6EG11_9LEPT S-adenosylmethionine:tRNA ribosy ltransferase-isomerase OS=Leptospira sp. serovar Kenya str. Sh9 OX=1242991 GN=queA PE=3 SV=1
MLFEDLKEFEFTLSEERIARYPAANRDESRLMVLDVNVGNIFSESSFKNLVSYLKEGDVLVANHTKVSKRRVYLKTQIRTHETMFLEEKELLWKCKIRNSKKLKVGTKLSDEKTQRISFTVEKKEGEFVFLKPEQTLQEEDFQQIGEIPIPPYFKRNPDPKDEIRYQTLFAKTPGSVAAPTAGLHFSESIFQTLKEKKIRFCTLELKVGYGTFQPLTEENFQNQKLHREEFFLEKSSTEILNLAKKEGRRIFSIGTTTLRALESAYDYATNSFRSGRGTTELFIQPEDRLKSCECLITNFHLPSSSLLLLVSAFAGKELVLKAYQKAIQEKFRFYSYGDAMLILGKR

SEQ ID NO: 68211 - protein, 345 aa, Leptospira stimsonii; identical to SEQ ID NO: 68200
  misc_feature (1)..(345): tr|A0A5E8TJD8|A0A5E8TJD8_9LEPT S-adenosylmethionine:tRN A ribosyltransferase-isomerase OS=Leptospira stimsonii OX=2202203 GN=queA PE=3 SV=1

SEQ ID NO: 68212 - protein, 345 aa, Leptospira stimsonii
  misc_feature (1)..(345): tr|A0A396Z0W2|A0A396Z0W2_9LEPT S-adenosylmethionine:tRN A ribosyltransferase-isomerase OS=Leptospira stimsonii OX=2202203 GN=queA PE=3 SV=1
MLFTDLKDFEFELPENRIARYPAKNRDESRLMVVEVGSEKIRIEDAFKNIVSYLKEGDVLIGNHTKVSKRRVYLKNQLRTHEAMFLETKDGLWRCKIRNSRKLKTGDRLQDVKTGLRLFQVERKEEEFVFLKPEQELKEEDFQSIGEIPIPPYLKREANSEDEIRYQTLFAKTPGSVAAPTAGLHFSESLFQTLKEKKIQICTLELTVGYGTFQPLTEENFQNKKLHREEFFLEESSASLLNLAKKEGRRIISIGTTTLRALESTYDPKTKTFRSGAGATELFLQPNDELQSCEGLITNFHLPGSSLLLLVSAFAGKELILRAYQRAIQEEFRFYSYGDAMLILR

SEQ ID NO: 68213 - protein, 346 aa, Leptospira terpstrae
  misc_feature (1)..(346): tr|N1VRX9|N1VRX9_9LEPT S-adenosylmethionine:tRNA ribosy ltransferase-isomerase OS=Leptospira terpstrae serovar Hualin str. LT 11-33 = ATCC 700639 OX=1257025 GN=queA P E=3 SV=1
MDFLQEYDFHLPEEQIAKFPLETRDESRLLVVDKTKSKYWEAPLFRDIITLVRSGDVFVYNETKVSYRRVFLQVESGRIHESIFLEPEDSNHQVWLCILKNRAKLKLGDKLFPVGYKNFQFSYYGPKEELSNLFSERSISDADFEIFGNIPIPPYLKRDVTEEDKVRYQTIFAERSGSVAAPTAGLHFTEELKENLRKIGAEFLPVELQIGYGTFRPLTAEQWQTKTLHRENYLVSESTATKLNDARREGRRIIAVGTTTLRVLETVFDSQIQKYKVGASQTDIFLSPGDRIQSVQGLITNFHLPKSSLLLLVSAFATTQLVLDSYRYALKNGFRFYSYGDSMFLF

SEQ ID NO: 68214 - protein, 345 aa, Leptospira tipperaryensis
  misc_feature (1)..(345): tr|A0A1D7V3T7|A0A1D7V3T7_9LEPT S-adenosylmethionine:tRN A ribosyltransferase-isomerase OS=Leptospira tipperarye nsis OX=2564040 GN=queA PE=3 SV=1
MLFSDLEEFEFELPEDRIARYPAKNRDESRLMVVKVGSGEIHTENTFKNIIAYLREGDVLIGNHTKVSKRRVYLKNQLRTHEAMFLETKDGLWRCKIRNSRKLKTGDRLQDVKTGLRLFQVEGKEDEFVFLKSEKELKEEDFQEIGEIPIPPYLKRDADAEDEIRYQTLFAKTPGSVAAPTAGLHFSESLFEILKEKKIRICTLELTVGYGTFQPLTEENFQNKKLHREEFFLEESSASILNLAKKEGRRILSIGTTTLRALESTYDPLTKTFRSGHGATELFLQPEDKLQSCEGLITNFHLPGSSLLLLVSAFAGKELILRSYQKAIQEEFRFYSYGDAMLILS

SEQ ID NO: 68215 - protein, 348 aa, Leptospira vanthielii
  misc_feature (1)..(348): tr|N1W2Z0|N1W2Z0_9LEPT S-adenosylmethionine:tRNA ribosy ltransferase-isomerase OS=Leptospira vanthielii serovar Holland str. Waz Holland = ATCC 700522 OX=1218591 GN=q ueA PE=3 SV=1
MDFLNEYDFHLPDEQIAKFPLENRDESRLLVVDIGQSKFWEAPLFRDITALVRPGDVFVYNETKVSYRRVYLQVESGRIHESIFLESVDQSNQGWLCILKNRAKLKLGEMLSPVGFKNFRFSFQGPKEELSILFSETPISDSDFAIFGNIPIPPYLKRNVTEEDKIRYQTIFANRSGSVAAPTAGLHFTEDLKESLRKLGAEFLPVELQIGYGTFRPLTPEQWQTKTLHKEKYFVSESTASKLNDARKEGRRIIAVGTTTLRVLETVFDSQLQKYKVGSSQTDIFLSPGNRIQSVQGLITNFHLPKSSLLLLVSAFANTQLVLDVYQYALQNRFRFYSYGDSMFLFQK

SEQ ID NO: 68216 - protein, 348 aa, Leptospira vanthielii; identical to SEQ ID NO: 68215
  misc_feature (1)..(348): tr|A0A4V3JVQ2|A0A4V3JVQ2_9LEPT S-adenosylmethionine:tRN A ribosyltransferase-isomerase OS=Leptospira vanthielii OX=293085 GN=queA PE=3 SV=1

SEQ ID NO: 68217 - protein, 347 aa, Leptospira weilii
  misc_feature (1)..(347): tr|M6FGL5|M6FGL5_9LEPT S-adenosylmethionine:tRNA ribosy ltransferase-isomerase OS=Leptospira weilii str. 200600 1855 OX=996804 GN=queA PE=3 SV=1
MLFEDLKEFEFMLSEERIARYPAANRDESRLMVLDVNAGNIFSEPSFKNLVSYLKEGDVLVANHTKVSKRRVYLKTQTRTHETMFLEEKELLWKCKIRNSKKLKVGTKLSDKKTQCISFTVEKKEGEFVFLKPEQILREEDFQRIGEIPIPPYFKRNPDSKDEIRYQTLFAKTPGSVAAPTAGLHFSESIFQTLKEKKIQFCTLELKVGYGTFQPLTEENFQNQKLHREEFFLEESSAEILNLAKKEGRRIFSIGTTTLRALESAYDYATDSFRSGRGATELFIQPEDRLKSCECLITNFHLPGSSLLLLVSAFAGKELISKAYQKAIQEKFRFYSYGDAMLILGKR

SEQ ID NO: 68218 - protein, 232 aa, Leptospira weilii
  misc_feature (1)..(232): tr|M3ETJ5|M3ETJ5_9LEPT S-adenosylmethionine:tRNA ribosy ltransferase-isomerase OS=Leptospira weilii serovar Top az str. LT2116 OX=1088540 GN=LEP1GSC188_3225 PE=3 SV=1
MYLIYSGKKEGEFVFLKSEQILQEEDFQRIGEIPIPPYFKRNPDPKDEIRYQTLFAKTPGSVAAPTAGLHFSESIFQTLKEKKIQFCTLELKVGYGTFQPLTEENFQNQKLHREEFFLEESSTKILNLAKKEGRRIFSIGTTTLRALESAYDYATNSFRSGRGATELFIQPEDRMKSCECLITNFHLPGSSLLLLVSAFAGKELISKAYQKAIQEKFRFYSYGDAMLILGKR

SEQ ID NO: 68219 - protein, 348 aa, Leptospira wolbachii
  misc_feature (1)..(348): tr|R8ZYE8|R8ZYE8_9LEPT S-adenosylmethionine:tRNA ribosy ltransferase-isomerase OS=Leptospira wolbachii serovar Codice str. CDC OX=1218599 GN=queA PE=3 SV=1
MDFLQEYDFHLPDEQIAKFPLENRDESRLLVVDIGQTKFWEAPLFRDITALVRPGDVFVYNETKVSYRRVYLQVESGRIHESIFLESVDKSNQGWLCILKNRAKLKLGDILSPVGFKNFRFFFQGPEEELSILFSETPISDSDFAIFGNIPIPPYLKRNVTEEDKVRYQTIFANRSGSVAAPTAGLHFTEDLKENLRKLGAEFLPVELQIGYGTFRPLTPEQWQTKTLHKEKYFVSESTASKLNDARKEGRRIIAVGTTTLRVLETIFDSQLQKYKVGSSQTDIFLSPGDRIQSVQGLITNFHLPKSSLLLLVSAFANTQLVLDVYQYALQNRFRFYSYGDSMFLFQK

SEQ ID NO: 68220 - protein, 398 aa, Leptospira wolffii
  misc_feature (1)..(398): tr|S3UP67|S3UP67_9LEPT S-adenosylmethionine:tRNA ribosy ltransferase-isomerase OS=Leptospira wolffii serovar Kh orat str. Khorat-H2 OX=1193069 GN=queA PE=3 SV=1
MPFQVDPHSGTLFEKAEKANQINSFLQKGVGRVKIGSRRKARVFIGRMKISDLSEFDFELPEELIAKFPAPERDRSRLLCIGRTHSFLTEEKEFLEIRKYLRKGDVLVANSTRVSKRRVFLRTKTGRRHEALFLSELEPGIWKALVRNSKKLKPEEMLQDEVAAGFSFKLVGRSEEFSLLQAGPEFREESFEQIGRIPIPPYFKRESGPEDEIRYQTVYSKALGSVAAPTAGLHFTSGLISDLKNSGIEFLDLELRVGYGTFQPIGENHFAEKRLHEERFLLPEYTVSRLNLAKKEKRRILSVGTTTLRALESSYDPISDSFRMGEGETTLFLQPGDPVRSCDGLITNFHLPQSSLLLLVSAFAGKENILNAYRFAIEHKFRFFSYGDAMLILDPIPN

SEQ ID NO: 68221 - protein, 398 aa, Leptospira wolffii
  misc_feature (1)..(398): tr|A0A5F1YRD2|A0A5F1YRD2_9LEPT S-adenosylmethionine:tRN A ribosyltransferase-isomerase OS=Leptospira wolffii OX =409998 GN=queA PE=3 SV=1
MPFQVDPHSGTFFEKAEKANQINSFLQKGLGRVKIGSRRNARVFIGRMKISDLSEFDFELPEELIAKFPAPERDRSRLLCIGRTRSFLTEEKEFLEIRKYLRKGDVLVANSTRVSKRRVFLRTKTGRRHEALFLSEVEPGIWKALVRNSKKLKPEEILQDEVVAGFSFKLVGRSEEFSLLQAGPEFREESFEQIGRIPIPPYFKRESGPEDEIRYQTVYSKALGSVAAPTAGLHFTSDLISDLKNSGIEFLDLELRVGYGTFQPIGENHFAEKRLHEERFLLPEHTVFRLNLAKKEKRRILSVGTTTLRALESSYDPISDSFRMGEGETTLFLQPGDPVRSCDGLITNFHLPQSSLLLLVSAFAGKENILNAYRFAIEHKFRFFSYGDAMLILDPIPN

SEQ ID NO: 68222 - protein, 346 aa, Leptospira yanagawae
  misc_feature (1)..(346): tr|A0A5E8H6A7|A0A5E8H6A7_9LEPT S-adenosylmethionine:tRN A ribosyltransferase-isomerase OS=Leptospira yanagawae serovar Saopaulo str. Sao Paulo = ATCC 700523 OX=124948 3 GN=queA PE=3 SV=1
MDFLNEFDFHLPEEQIARFPAKNRDESRLLLVDKTAERFWETPFFRDIREWVKPGDVFVYNETKVSYRRVYLQVTSGRIHESIFLEAEDDGSRIWTCILKNRAKLKLGEVLTPVGFPSFSFRYEGKKEELSTLVSENTVTDSDFEIFGTIPIPPYLKRNVTEEDKLRYQTIFAKKSGSVAAPTAGLHFTESLRKELQNHGAEFLPVELQVGYGTFRPLTAEQWQTKTLHKERYEITEVTASRLNDAKKAGRRVIAIGTTSLRVLETVFDSQQQKYKVGVGQTDIFLSPGDKIESVQGLITNFHLPKSSLLLLVSAFANSRLVMNAYRYALQNKFRFYSYGDSMFLF

SEQ ID NO: 68223 - protein, 346 aa, Leptospira yanagawae
  misc_feature (1)..(346): tr|A0A4R9IYF0|A0A4R9IYF0_9LEPT S-adenosylmethionine:tRN A ribosyltransferase-isomerase OS=Leptospira yanagawae OX=293069 GN=queA PE=3 SV=1
MDFLNEFDFHLPEEQIARFPAKNRDESRLVLVDKTTEKFWEAPFFRDIREWVRPGDVFVYNETKVSYRRVYLQVESGRIHESIFLEAEGDASRIWTCILKNRAKLKLGEVLAPVGFPTFSFRYEGKNEELSILVSDKTVTDSDFEIFGTIPIPPYLKRNVTEEDKVRYQTIFAKKSGSVAAPTAGLHFTESLRAELEKTGAEFLPVELQVGYGTFRPLTAEQWQTKTLHKERYEITEGTASRLDGARREGRRVIAIGTTTLRVLETVFDSQQQKYKVGVGQTDIFLSPGDKIESVQGLITNFHLPKSTLLLLVSAFANSRLVMDVYRYALQNKFRFYSYGDSMFLF

SEQ ID NO: 68224 - protein, 352 aa, Leptospira yasudae
  misc_feature (1)..(352): tr|A0A418A5R1|A0A418A5R1_9LEPT S-adenosylmethionine:tRN A ribosyltransferase-isomerase OS=Leptospira yasudae OX =2202201 GN=queA PE=3 SV=1
MLFEDLKEFEFDLPEERIARYPAAHRDESKLMILDVDSGEIKSEPSFKNIVSYLREGDVLVANHTKVSKRRVYLKTPLRVHEAMFLEEKEQLWKCKIRNSKKLKLGEELKDNRTQKLGFTVAKKEEEFVFLKPQRSLTEEDFQTIGEIPIPPYLKRDADAQDEIRYQTLFAKTPGSVAAPTAGLHFSEELFETLRQKKIQLCTLELKVGYGTFQPLTEENFQNQKLHREKFFLEETSVELLNAAKQEGRRILSIGTTTLRALESAYEPNTKTFRAGPGATELFIRPDDNLQSCEGLITNFHLPGSSLLLLVSAFAGKKLILDAYQKAIQEKFRFYSYGDAMLILGRKKSVSK

SEQ ID NO: 68225 - protein, 151 aa, Leptospiraceae bacterium
  misc_feature (1)..(151): tr|A0A357IYS6|A0A357IYS6_9LEPT S-adenosylmethionine:tRN A ribosyltransferase-isomerase OS=Leptospiraceae bacter ium OX=2026757 GN=DEA96_11635 PE=3 SV=1
MQRLKERRIRIASVRLAVGLGTFAPLSEENWKRKQLHRERFSMPSATASLLNNPQGRIIAVGTTTLRALESNLREHGRFQPGEFETSAFFHPPDTISSIQGLITNFHLPGSSLLMLVAAFSGTDRILPAYKKAIAERYRFYSYGDAMLVFA

SEQ ID NO: 68226 - protein, 268 aa, Leptospiraceae bacterium
  misc_feature (1)..(268): tr|A0A357IY33|A0A357IY33_9LEPT S-adenosylmethionine:tRN A ribosyltransferase-isomerase (Fragment) OS=Leptospira ceae bacterium OX=2026757 GN=DEA96_09955 PE=3 SV=1
MSAIGKTNLTHFMKQLSEIQQEYGFELPDELIARYPAQFRDQSRLMLLPAGSRPGEAEHRSFYELDQLLEPEDILVWNDTLVEPRRLILRRQSGARVEALFLEPAPEIEAASAQPEAPLNHESESIYWSCLIRNASRIKQDEILIEPQSGQGFRFLRMPGNGSESSPGDAFFLCPEPALDIHAFFQAYGQMPIPPYLGRTEDDSDRNRYQTVFAGSQELSSAAAPTAGLHFTADLIQRLKERRIRIASVRLAVGLGTFAPLSEENWKR

SEQ ID NO: 68227 - protein, 385 aa, Leptospirillum ferriphilum
  misc_feature (1)..(385): tr|A0A059XS32|A0A059XS32_9BACT S-adenosylmethionine:tRN A ribosyltransferase-isomerase OS=Leptospirillum ferrip hilum YSK OX=1441628 GN=queA PE=3 SV=1
MTSDENMHHTRLDPGTFYQPETLWTTNEEQLSVSRGNPDEYDYDLPEDRIRLFPPKNRGESRLLVVGRESGGPYFGTMEEFSRFLFPGDLLVLNDSRVLPARVFIRAPTGRKIELLFLNPQDPSPVRFLGKGIGSSSTLSLPGGGRVMDIRYLPEEGCFQGVYEGEETLLSWLESHGEMPLPPYIRKARDHHPSDRERYQTVFSRHAGSVAAPTAGLHFTEALLEHLKDKGVETATVTLHVGIGTFRPLGPGGVGQHVMHAERFLVPDETVQKIEDARRRGSRVFAVGTTVMRTLETWGQHPVRDAVPAWTRLFIRPGFPFRVVDGLLTNFHQPRSTLVVLVDSFLGGNGRWRSLYRQALEEGFMFLSYGDAMLIVPEDRRGGDA

SEQ ID NO: 68228 - protein, 336 aa, Leptospirillum ferriphilum
  misc_feature (1)..(336): tr|A0A1V3SW92|A0A1V3SW92_9BACT S-adenosylmethionine:tRN A ribosyltransferase-isomerase OS=Leptospirillum ferrip hilum OX=178606 GN=BOX24_07320 PE=3 SV=1
MRLFPPKNRGESRLLVVGRESGGPYFGTMEEFSRFLFPGDLLVLNDSRVLPARVFIRAPTGRKIELLFLNPQDPSPVRFLGKGIGSSSTLSLPGGGRVMDIRYLPEEGCFQGVYEGEETLLSWLESHGEMPLPPYIRKARDHHPSDRERYQTVFSRHAGSVAAPTAGLHFTEALLEHLKDKGVETATVTLHVGIGTFRPLGPGGVGQHVMHAERFLVPDETVQKIEDARRRGSRVFAVGTTVMRTLETWGQHPVRDAVPAWTRLFIRPGFPFRVVDGLLTNFHQPRSTLVVLVDSFLGGNGRWRSLYRQALEEGFMFLSYGDAMLIVPEDRRGGDA

SEQ ID NO: 68229 - protein, 356 aa, Leptospirillum ferrodiazotrophum
  misc_feature (1)..(356): tr|C6HYF8|C6HYF8_9BACT S-adenosylmethionine:tRNA ribosy ltransferase-isomerase OS=Leptospirillum ferrodiazotrop hum OX=412449 GN=queA PE=3 SV=1
MDRSSPEARDYDYELPEERIRLVPPPRRDLSRLAVVPRRGDGGRPPFLASSVAHLPSLLAPGDLLVANDSRVVPARTRARTSRGRAIDLLVLGPFDSGTAGTVRFLGKGLKGEKRLALFGGRGVLDGICYDEALECFSGEYRGEEALVALLEAQGEMPLPPYIARRRSADGSDRERYQTVYARVPGSVAAPTAGLHLGEELLDRLREKGVERASVTLHVGVGTFRGLSEGPVEDHRMHEEWYVVPRETAEAIARTRARGGRVVAVGTTSLRALESAFALGEIPPEGRAGWTRLYVRPGYRFLAADALFTNFHTPRSTLLVLVDAFLGGDGRWREIYRRALEEGFFFLSYGDALLIL

SEQ ID NO: 68230 - protein, 366 aa, Leptospirillum ferrooxidans
  misc_feature (1)..(366): tr|I0IKG3|I0IKG3_LEPFC S-adenosylmethionine:tRNA ribosy ltransferase-isomerase OS=Leptospirillum ferrooxidans ( strain C2-3) OX=1162668 GN=queA PE=3 SV=1
MDNPFALTRDSPGKKEEMAVSSYDYELPQSAIRLVPPENRDGSKMMVVPRSFRSREELSLDNILSLHHYLQPGDLLVLNDTRVIPARVYGKTSSGRAIEVLFLSFGSSLDSNVLFLSKSPGKSATEIHFPGGITLSGIRRVEEKDCYAGSLPDGLDVIAWLERAGEMPLPPYIQKHRKADQDDRERYQTVFSRNPGSVAAPTAGLHLSGIILEALEKKGVEKAFVTLHVGMGTFRPLSTPFLKDHQMHEEWYCVPEPTLALLEKTKKRGGRIIGVGTTVVRTLESMAQLGKTSGQTDLFIRPGYSFSYIDGLLTNFHQPRSTLLVLLDAFLGGSGSWKILYGEALSRGLSFLSYGDACLILPDGKG

SEQ ID NO: 68231 - protein, 336 aa, Leptospirillum sp.
  misc_feature (1)..(336): tr|A0A0K0WQI0|A0A0K0WQI0_9BACT S-adenosylmethionine:tRN A ribosyltransferase-isomerase OS=Leptospirillum sp. Gr oup II 'CF-1' OX=1660083 GN=ABH19_00245 PE=3 SV=1
MRLFPPKNRGESRLLVVGRDSGGPYFGTMEEFSRFLFPGDLLVLNDSRVLPARVFIRAPTGRKIELLFLNPQDPSPVRFLGKGIGSSSTLSLPGGGRVRDIRYLPEEGCFQGVYEGEETLLSWLESHGEMPLPPYIRKARDHHPSDRERYQTVFSRHAGSVAAPTAGLHFTEALLEHLKDKGVETATVTLHVGIGTFRPLGPGGVGQHVMHAERFLVPDETVQKIEDARRRGSRVFAVGTTVMRTLETWGQHPVRDAVPAWTRLFIRPGFPFRVVDGLLTNFHQPRSTLVVLVDSFLGGNGRWRSLYRQALEEGFMFLSYGDAMLIVPEDRRGGDA

SEQ ID NO: 68232 - protein, 182 aa, Leptospirillum sp.
  misc_feature (1)..(182): tr|T0XM73|T0XM73_9BACT S-adenosylmethionine:tRNA ribosy ltransferase-isomerase (Fragment) OS=Leptospirillum sp. Group IV 'UBA BS' OX=1260983 GN=D084_Lepto4C00668G0002 PE=3 SV=1
MTGSREASSYDYELPPERIRLVPPKRREESRLAVVPRRPEEDRPLLFRSVSDLPEILRPGDRLVVNDSRVVPARTRGRTSRGREVEILFLGPFGGGSPHKVRFLAKGLGQETRLALFSGRGELRMEGYDENQGCFSGEYRGEKPLDGELEAEGEMPLPPYIAKRRRAEASDRERYQTVYARV

SEQ ID NO: 68233 - protein, 356 aa, Leptothrix cholodnii
  misc_feature (1)..(356): tr|B1XWH6|B1XWH6_LEPCP S-adenosylmethionine:tRNA ribosy ltransferase-isomerase OS=Leptothrix cholodnii (strain ATCC 51168 / LMG 8142 / SP-6) OX=395495 GN=queA PE=3 SV =1
MNTAYTVADFDFDLPPELIAQHPAPERSGSRLLDASAPAQPVDRIFHELPGLLNPGDLLVFNDTQVIRARLFGAKDSGGAVEALVERVLPAAAGGGHEVWAHLRASKSPRAGQSVLFRNDQGEQFSADVLGRCGPEDSLFHLRFPSDAFALLERYGHVPLPPYITHADEADDVRRYQTVFARHPGAVAAPTAALHFDEALLAALEARGVRRASVTLHVGAGTFQPVRVDRLDQHRMHSEWFEVPQATVDAIAATRAAGGKVVAVGTTTLRALESAARGGVLRAGAQETDIFITPGFAFQVVDRLVTNFHLPKSTLLMLVSAFAGHATMHALYRHAISRGYRFFSYGDAMLLTRSSA

SEQ ID NO: 68234 - protein, 366 aa, Leptothrix mobilis
  misc_feature (1)..(366): tr|A0A4Q7LTQ1|A0A4Q7LTQ1_9BURK S-adenosylmethionine:tRN A ribosyltransferase-isomerase OS=Leptothrix mobilis OX =47994 GN=queA PE=3 SV=1
MTDPTLPPSSDLTVSDFDFALPPELIAQHPAAERSASRLLDGRGATPVDRIFRELPGLLSAGDLLVFNDTQVIRARLHGAKDSGGSVEALVERVLPVGPSGTHEVWAHLRASKSPKPGQGVVFRSDAGETFRAEVLGRCGPENGLFHLRFPSDVFALLERCGHIPLPPYITHADDAEDARRYQTVFARTPGAVAAPTAALHFDEAVLAALAERGIERASVTLHVGAGTFQPVRVERIAEHRMHSEWFEVPAATVAAIEATRARGGRVVAVGTTTLRALESAARDSAAQGLPLQAGARETDIFITPGFPFRVVDRLVTNFHLPRSTLLMLVSAFAGHARMHALYDHAIAQRYRFFSYGDAMLLDRQG

SEQ ID NO: 68235 - protein, 340 aa, Leptotrichia buccalis
  misc_feature (1)..(340): tr|C7NC60|C7NC60_LEPBD S-adenosylmethionine:tRNA ribosy ltransferase-isomerase OS=Leptotrichia buccalis (strain ATCC 14201 / DSM 1135 / JCM 12969 / NCTC 10249 / C-101 3-b) OX=523794 GN=queA PE=3 SV=1
MNISDFDFELPEELIAQHAVEPRDHSKLLVLNKDKKTLEHKKFYNIIDYLKKDDVLVINRTKVIPARLFGHKENGVVLECFLLKRYDLYTWEVLLKPAKKLKIGQKLIFSDGILKAELLEIKEDGNRIIKFNFEGRFEEILDKLGEMPLPPYIMEKLEDKNRYQTVYAKEGESVAAPTAGLHFTNELLEKIREKGITIAEVFLDVGLGTFRPVQVENVLDHKMHSEKYRIPEETAKIINEAKKKGNRVIAVGTTSVRTLESSVDENGKLKASEGNTNIFIYGDYKFKIIDAIITNFHLPKSTLIMLISAFGGKEFIFEAYKKAVEEKYRFYSFGDSMFIY

SEQ ID NO: 68236 - protein, 340 aa, Leptotrichia goodfellowii
  misc_feature (1)..(340): tr|D0GKN7|D0GKN7_9FUSO S-adenosylmethionine:tRNA ribosy ltransferase-isomerase OS=Leptotrichia goodfellowii F02 64 OX=596323 GN=queA PE=3 SV=1
MNIAEFDFDLPEELIAQHAVNPRDHSKLLVLNKEKKEIEHKRFYNIIDYLKKDDVLVINRTKVIPARLYGRKDTGTVLECFLLKRYDLYTWEVLLKPAKRLKIGQKIVFSENMLEAELIEIKSDGNRVLKFNYKGNFEEILDKLGEMPLPPYITEKLEDKDRYQTVYAKEGESVAAPTAGLHFTEELLEKIKEKGIIIAEVFLDVGLGTFRPVQTENIHEHIMHSEKYWVPKETAEIVNNAKRKGNRVIAVGTTSVRTLESSVNEKGELIENESETSIFIYGDYKFKIVDAIITNFHLPKSTLIMLISAFGGKEFVFSAYEEAVREKYRFYSFGDSMFIY

SEQ ID NO: 68237 - protein, 340 aa, Leptotrichia goodfellowii; identical to SEQ ID NO: 68236
  misc_feature (1)..(340): tr|A0A510JBV8|A0A510JBV8_9FUSO S-adenosylmethionine:tRN A ribosyltransferase-isomerase OS=Leptotrichia goodfell owii OX=157692 GN=queA PE=3 SV=1

SEQ ID NO: 68238 - protein, 340 aa, Leptotrichia hofstadii
  misc_feature (1)..(340): tr|A0A510JF45|A0A510JF45_9FUSO S-adenosylmethionine:tRN A ribosyltransferase-isomerase OS=Leptotrichia hofstadi i OX=157688 GN=queA PE=3 SV=1
MKISDFDFELPEELIAQHAVNPRDHSKLLVLNKKEKTLEHKKFYNIIDYLKKDDVLVINRTKVIPARLFGHKENGVVLECFLLKRYDLYTWEVLLKPAKKLKIGQKLIFLEGVLEAELMEIKEDGNRIIKFNFEGRFEEILDKLGEMPLPPYIVEKLEDKNRYQTVYAKEGESVAAPTAGLHFTNELLGKIREKGVIITEVFLDVGLGTFRPVQVENVLDHKMHSEKYRIPEETVKIINKAKEKGNRVIAVGTTSVRTLESSVDDNGKLIASEGDTNIFIYGDYNFKITDAIITNFHLPKSTLIMLISAFGGKELIFEAYKKAIEEKYRFYSFGDSMFIY

SEQ ID NO: 68239 - protein, 340 aa, Leptotrichia hofstadii
  misc_feature (1)..(340): tr|C9MYG8|C9MYG8_9FUSO S-adenosylmethionine:tRNA ribosy ltransferase-isomerase OS=Leptotrichia hofstadii F0254 OX=634994 GN=queA PE=3 SV=1
MKISDFDFELPEELIAQHAVNPRDHSKLLVLNKKEKTLEHKKFYNIIDYLKKDDVLVINRTKVIPARLFGHKENGVVLECFLLKRYDLYTWEVLLKPAKKLKIGQKLIFLEGVLEAELMEIKEDGNRIIKFNFEGRFEEILDKLGEMPLPPYIVEKLEDKNRYQTVYAKEGESVAAPTAGLHFTNELLGKIREKGVIITEVFLDVGLGTFRPVQVENVLDHKMHSEKYRIPEETVKIINKAKEKGNRVIAVGTTSVRTLESSVDDNGKLIASEGDTNIFIYGDYNFKIVDAIITNFHLPKSTLIMLISAFGGKEFIFEAYKKAIEEKYRFYSFGDSMFIY

SEQ ID NO: 68240 - protein, 340 aa, Leptotrichia hongkongensis
  misc_feature (1)..(340): tr|A0A510L9C5|A0A510L9C5_9FUSO S-adenosylmethionine:tRN A ribosyltransferase-isomerase OS=Leptotrichia hongkong ensis OX=554406 GN=queA PE=3 SV=1
MKISDFDFELPEELIAQHAVNPRDHSKLLVLNKKEKTLEHKKFYNIIDYLKKDDVLVINRTKVIPARLFGHKENGVVLECFLLKRYDMYTWEVLLKPAKKLKIGQKLIFLEGVLEAELLEIKEDGNRVIKFDFEGRFEEILDKLGEMPLPPYIMEKLEDKNRYQTVYAKEGESVAAPTAGLHFTNELLEKIRKKGVIITEVFLDVGLGTFRPVQVENVLDHKMHSEKYRIPEETAKIINEAKKNGNRVIAVGTTSVRTLESSVDENGELIASEGDTNIFIYGDYKFKIVDAIITNFHLPKSTLIMLISAFGGKEFVFDAYKKAVEEKYRFYSFGDSMFIY

SEQ ID NO: 68241 - protein, 331 aa, Leptotrichia shahii
  misc_feature (1)..(331): tr|A0A510JPH1|A0A510JPH1_9FUSO S-adenosylmethionine:tRN A ribosyltransferase-isomerase OS=Leptotrichia shahii O X=157691 GN=queA PE=3 SV=1
MKISDFDFELPEELIAQHAVNPRDHSRLLVLNKKEKILEYKKFYDIIDYLKKGDVLVINRTKVIPARLLGHKENGVVLECFLLKRYDLYTWEVLLKPAKKLKIGQKIIFLEGILEAELLEIKDDGNRVVKFSFEGRFEEILDRLGEMPLPPYITEKLEDKNRYQTVYAKEGESVAAPTAGLHFTKELLEKIRQKGIIIAEVFLDVGLGTFRPVKVENVLDHKMHSEKYRVPDETAKIVNEAKKNGNRVIAVGTTSVRTLESAAYENGKLMADEGNTSIFIYGNYKFKIVDAIITNFHLPKSTLIMLISAFGGKEFIFEAYKKAIEEKYRFY

SEQ ID NO: 68242 - protein, 340 aa, Leptotrichia sp.
  misc_feature (1)..(340): tr|A0A3P1W1K3|A0A3P1W1K3_9FUSO S-adenosylmethionine:tRN A ribosyltransferase-isomerase OS=Leptotrichia sp. OH36 20_COT-345 OX=2491048 GN=queA PE=3 SV=1
MNIAEFDFDLPEELIAQSAVNPRDHSKLLVLNRKKQKIEHKKFYNIIDYLKKDDILVINRTKVIPARLYGKKNTGTVLECFLLKRYDLNTWEVLLKPAKRLKIGQKIIFSDNLLEAELIEIKEDGNRVLKFSYDGNFEEILDKLGEMPLPPYITEKLKDKDRYQTVYAKEGESVAAPTAGLHFTEELLEQIKEKGVTVTEVFLDVGLGTFRPVQTENINEHKMHSEKYRIPEKTAEIINEAKKRGQRIIAVGTTSVRTLESSVDEKGNLVNSEGETDIFIYGDYKFKIIDGIITNFHLPKSTLIMLVSAFGGKDFIFKAYKEAVKEKYRFYSFGDSMFIY

SEQ ID NO: 68243 - protein, 340 aa, Leptotrichia sp.
  misc_feature (1)..(340): tr|U2R1V9|U2R1V9_9FUSO S-adenosylmethionine:tRNA ribosy ltransferase-isomerase OS=Leptotrichia sp. oral taxon 8 79 str. F0557 OX=1227268 GN=queA PE=3 SV=1
MKISDFDFELPEELIAQHAVNPRDHSKLLVLNKKEKTLEHKKFYNIIDYLKKDDVLVINRTKVIPARLFGHKENGVVLECFLLKRYDLYTWEVLLKPAKKLKIGQKLIFLEGVLEAELLEIKEDGNRIIKFNFEGRFEEILDKLGEMPLPPYIMEKLEDKNRYQTVYAKEGESVAAPTAGLHFTNELLDKIRKKGVIITEVFLDVGLGTFRPVQVENVLDHKMHSEKYRIPEETAKIINEAKKNGNRVIAVGTTSVRTLESSVDENGKLIASKGDTNIFIYGDYEFKIVDAIITNFHLPKSTLIMLISAFGGKEFVFEAYKKAVEEKYRFYSFGDSMFIY

SEQ ID NO: 68244 - protein, 340 aa, Leptotrichia trevisanii
  misc_feature (1)..(340): tr|A0A510KIY5|A0A510KIY5_9FUSO S-adenosylmethionine:tRN A ribosyltransferase-isomerase OS=Leptotrichia trevisan ii OX=109328 GN=queA PE=3 SV=1
MKISDFDFELPEELIAQHAVNPRDHSKLLVLNKKEKTLEHKKFYNIIDYLKKDDILVINRTKVIPARLFGHKENGVVLECFLLKRYDMYTWEVLLKPAKKLKIGQKLIFMEGVLEAELLEIKEDGNRIIKFSFEGRFEEILDKLGEMPLPPYIMEKLEDKNRYQTVYAKEGESVAAPTAGLHFTNELLEKIREKGVIIAEVFLDVGLGTFRPVQVENVLDHKMHSEKYRIPEETVEIINKAKEKGNRIIAVGTTSVRTLESSVDDNGKLIASEGDTNIFIYGDYNFKIVDAIITNFHLPKSTLIMLISSFGGKEFVFEAYKKAIEEKYRFYSFGDSMFIY

SEQ ID NO: 68245 - protein, 340 aa, Leptotrichia trevisanii
  misc_feature (1)..(340): tr|A0A510JZ48|A0A510JZ48_9FUSO S-adenosylmethionine:tRN A ribosyltransferase-isomerase OS=Leptotrichia trevisan ii OX=109328 GN=queA PE=3 SV=1
MKISDFDFELPEELIAQHAVNPRDHSKLLVLNKKEKTLEHKKFYNIIDYLKKDDILVINRTKVIPARLFGHKENGVVLECFLLKRYDMYTWEVLLKPAKKLKIGQKLIFLEEVLEAELLEIKEDGNRIIKFSFEGRFEEILDKLGEMPLPPYIMEKLEDKNRYQTVYAKEGESVAAPTAGLHFTNELLEKIREKGVIIAEVFLDVGLGTFRPVQVENVLDHKMHSEKYRIPEETAKIINEAKEKGNRVIAVGTTSVRTLESSVDENGKLIASEGDTNIFIYGDYNFKIVDAIITNFHLPKSTLIMLISSFGGKEFVFEAYKKAIEEKYRFYSFGDSMFIY

SEQ ID NO: 68246 - protein, 340 aa, Leptotrichia wadei
  misc_feature (1)..(340): tr|A0A134AQ68|A0A134AQ68_9FUSO S-adenosylmethionine:tRN A ribosyltransferase-isomerase OS=Leptotrichia wadei OX =157687 GN=queA PE=3 SV=1
MKISDFDFELPEELIAQHAVNPRDHSRLLVLNKTEKTLEHKKFYNIIDYLKKDDVLVINRTKVIPARLFGHKENGVVLECFLLKRYDLYTWEVLLKPAKKLKIGQKIIFLEGVLEAELLEIKEDGNRVVKFNFEGRFEEILDKLGEMPLPPYIMEKLEDKNRYQTVYAKEGESVAAPTAGLHFTNQLLEKIRKKGVIIAEVFLDVGLGTFRPVQVENILDHKMHSEKYRVPEETAKIVNEAKEKGNRVIAVGTTSVRTLESAVDESGKLMAVEGNTSIFIYGDYKFKIADAIITNFHLPKSTLIMLISAFGGKEFIFEAYKKAIEEKYRFYSFGDSMFIY

SEQ ID NO: 68247 - protein, 340 aa, Leptotrichia wadei
  misc_feature (1)..(340): tr|U2RBE2|U2RBE2_LEPWF S-adenosylmethionine:tRNA ribosy ltransferase-isomerase OS=Leptotrichia wadei (strain F0 279) OX=888055 GN=queA PE=3 SV=1
MKISDFDFELPEELIAQHAVNPRDHSRLLVLNKTEKTLEHKKFYNIIDYLKKDDVLVINRTKVIPARLFGHKENGVVLECFLLKRYDLYTWEVLLKPAKKLKIGQKIIFLEGVLEAELLEIKEDGNRVVKFNFEGRFEEILDKLGEMPLPPYIMEKLEDKNRYQTVYAKEGESVAAPTAGLHFTNELLEKIREKGVIIAEVFLDVGLGTFRPVQVENILDHKMHSEKYRVPEETAKIVNEAKEKGNRVIAVGTTSVRTLESAVDESGKLMADEGNTSIFIYGNYKFKIADAIITNFHLPKSTLIMLISAFGGKEFIFEAYKKAIEEKYRFYSFGDSMFIY

SEQ ID NO: 68248 - protein, 355 aa, Leuconostoc carnosum
  misc_feature (1)..(355): tr|K0D9C8|K0D9C8_LEUCJ S-adenosylmethionine:tRNA ribosy ltransferase-isomerase OS=Leuconostoc carnosum (strain JB16) OX=1229758 GN=queA PE=3 SV=1
MTEEQHYQLSDFDYDLPESLIAQTPLKQRDSSRLLVLDADTGSYEDKHFYDILDYVAPGDAIVMNNSRVLPARLHGARPETGGHAEVLLLRQDHGDVWETLVKPAKKSPVGSTIVFGDDIDNPIMTATIVGELEHGGRYIEFHYEGIFMELLEQLGEMPLPPYIKEKLADQERYQTVYSKVEGSAAAPTAGLHWTPELLDKIRQKGVKTVELTLHVGLGTFRPVEEENIEDHKMHSEFYQLSQEAADTLNEVHEYGGRIIATGTTSIRTLETIGSKFDGHLQADSGWTDIFIKPGYHWTMVDAFITNFHLPKSTLVMLVAAFTGRENILNAYQHAVNDKYRFFSFGDAMFIKRER

SEQ ID NO: 68249 - protein, 355 aa, Leuconostoc carnosum; identical to SEQ ID NO: 68248
  misc_feature (1)..(355): tr|A0A2U3MT15|A0A2U3MT15_LEUCA S-adenosylmethionine:tRN A ribosyltransferase-isomerase OS=Leuconostoc carnosum OX=1252 GN=queA PE=3 SV=1

SEQ ID NO: 68250 - protein, 355 aa, Leuconostoc citreum
  misc_feature (1)..(355): tr|A0A5A5TXP7|A0A5A5TXP7_LEUCI S-adenosylmethionine:tRN A ribosyltransferase-isomerase OS=Leuconostoc citreum O X=33964 GN=queA PE=3 SV=1
MTDEKHYQLADFDYDLPEALIAQTPLKQRDASRLLVLDADTGAYQDKHFYDILDYVNPGDAIVMNNSRVLPARLHGVRPETGGHAEVLLLRQDHGDVWETLVRPAKKSPVGSTIVFGDDVTQPIMTATVVGELEHGGRYVEFHYDGIFMALLDKLGEMPLPPYIKEKLADQERYQTVYSKVDGSAAAPTAGLHWTPELLNQVRAKGVKTVELTLHVGLGTFRPVEEENIEDHKMHSEFYQLSQDAADTLNQVRENGGRIIATGTTSIRTLETIGSKFEGKLQADSGWTDIFIKPGYKWTTVDAFITNFHLPKSTLVMLVAAFTGRDNILNAYQHAVAEQYRFFSFGDAMFIKRDK

SEQ ID NO: 68251 - protein, 355 aa, Leuconostoc citreum
  misc_feature (1)..(355): tr|B1MZV2|B1MZV2_LEUCK S-adenosylmethionine:tRNA ribosy ltransferase-isomerase OS=Leuconostoc citreum (strain K M20) OX=349519 GN=queA PE=3 SV=1
MTDEKHYQLADFDYDLPEALIAQTPLKQRDTSRLLVLDADTGAYQDKHFYDILDYVNPGDAIVMNNSRVLPARLHGVRPETGGHAEVLLLRQDHGDVWETLVRPAKKSPVGSTIVFGDDVTQPIMTATVVGELEHGGRYVEFHYDGIFMALLDKLGEMPLPPYIKEKLADQERYQTVYSKVDGSAAAPTAGLHWTPELLNQVRAKGVKTVELTLHVGLGTFRPVEEENIEDHKMHSEFYQLSQDAADTLNQVRENGGRIIATGTTSIRTLETIGSKFEGKLQADSGWTDIFIKPGYKWTTVDAFITNFHLPKSTLVMLVAAFTGRDNILNAYQHAVAEQYRFFSFGDAMFIKRDK

SEQ ID NO: 68252 - protein, 352 aa, Leuconostoc fallax
  misc_feature (1)..(352): tr|A0A4R5N8E1|A0A4R5N8E1_9LACT S-adenosylmethionine:tRN A ribosyltransferase-isomerase OS=Leuconostoc fallax OX =1251 GN=queA PE=3 SV=1
MTQEHYTLSDFDYDLPEALIAQTPLKQRDASRLLALNAISGEYEDRHFYDILDYVKAGDAIVMNNSRVLPARLHGARPETGGHAEVLLLRQDHGDVWEVLMKPAKKSPIGSEVVFGDDMQHPIMTATVLEDLEHGGKMIEFHYDGIFMELLDKLGEMPLPPYIKEKLADQERYQTVYSKVDGSAAAPTAGLHWTPELLDKVRAKGVKTVELTLHVGLGTFRPVEEENIEDHKMHSEFYQLTADAAQDLNEVRQNGGRIIATGTTSIRTLETIGSKFSGELKADSGWTDIFIKPGYQWTVVDAFITNFHLPKSTLVMLVAAFTGREHIMNAYHHAVAQQYRFFSFGDAMFIYK

SEQ ID NO: 68253 - protein, 353 aa, Leuconostoc gelidum
  misc_feature (1)..(353): tr|J9YJA2|J9YJA2_LEUGJ S-adenosylmethionine:tRNA ribosy ltransferase-isomerase OS=Leuconostoc gelidum (strain J B7) OX=1229756 GN=queA PE=3 SV=1
MTEEQHYQLADFDYDLPETLIAQTPLKQRDSSRLLVLDADTGLYEDKHFYDILDYVNPGDAIVMNNSRVLPARLHGVRPETGGHAEVLLLRQDHGDVWETLVKPAKKSPVGSTIFFGNDIDNPVMTATVVGELEHGGRYIEFHYEGIFMELLEKLGEMPLPPYIKEKLADQERYQTVYSKVDGSAAAPTAGLHWTPELLDKVRAKGVQTIELTLHVGLGTFRPVEEENIEDHKMHSEFYQLSSEAADALNKVHATGGRIIATGTTSIRTLETIGSKFNGQLQADSGWTDIFIKPGYQWTTVDAFITNFHLPKSTLVMLVAAFTGRDNILNAYQHAVNDKYRFFSFGDAMFIKR

SEQ ID NO: 68254 - protein, 353 aa, Leuconostoc gelidum
  misc_feature (1)..(353): tr|A0A175CJX4|A0A175CJX4_LEUGE S-adenosylmethionine:tRN A ribosyltransferase-isomerase OS=Leuconostoc gelidum s ubsp. gasicomitatum OX=115778 GN=queA PE=3 SV=1
MTEEQHYQLADFDYDLPETLIAQTPLKQRDSSRLLVLDADTGLYEDKHFYDILDYVNPGDAIVMNNSRVLPARLHGVRPETWGHAEVLLLRQDHGDVWETLVKPAKKSPVGSTIFFGNDIDNPVMTATVVGELEHGGRYIEFHYEGIFMELLEKLGEMPLPPYIKEKLVDQERYQTVYSKVDGSAAAPTAGLHWTPELLDKVRAKGVQTIELTLHVGLGTFRPVEEENIEDHKMHSEFYQLSSEAADALNKVHATGGRIIATGTTSIRTLETIGSKFNGQLQVDSGWTDIFIKPGYQWTTVDAFITNFHLPKSTLVMLVAAFTGRDNILNAYQHAVNDKYRFFSFGDAMFIKR

SEQ ID NO: 68255 - protein, 353 aa, Leuconostoc kimchii
  misc_feature (1)..(353): tr|D5T5A2|D5T5A2_LEUKI S-adenosylmethionine:tRNA ribosy ltransferase-isomerase OS=Leuconostoc kimchii (strain I MSNU 11154 / KCTC 2386 / IH25) OX=762051 GN=queA PE=3 S V=1
MTEETRYQLTDFDYNLPEELIAQTPLKQRDSSRLLVLDADSGDYEDKHFYDILSYVNPGDAIVMNNSRVLPARLHGARPETGGHAEVLLLRQDHGDVWETLVKPAKKSPIGSTIVFGDDMNHPIMTATVVGELEHGGRYIEFHYDGIFMELLDKLGEMPLPPYIKEKLADQERYQTVYSKVDGSAAAPTAGLHWTPELLDKVRAKGVQTVELTLHVGLGTFRPVEEENIEDHKMHSEFYQLSQEAADALNQVHANGGRIIATGTTSIRTLETIGSKFNGHLQADSGWTDIFIKPGYHWTTVDAFITNFHLPKSTLVMLVAAFTGRDNILNAYQHAVDDKYRFFSFGDAMFIKR

SEQ ID NO: 68256 - protein, 353 aa, Leuconostoc lactis
  misc_feature (1)..(353): tr|A0A5B8T6S4|A0A5B8T6S4_LEULA S-adenosylmethionine:tRN A ribosyltransferase-isomerase OS=Leuconostoc lactis OX =1246 GN=queA PE=3 SV=1
MTAQPYQLSDFDYDLPEALIAQTPLKQRDASRLLVLDADTGAYEDKHFYDILDYVEPGDAIVMNNSRVLPARLHGARPETGGHAEVLLLRQDHGDVWETLVKPAKKSPVGSTIVFGDDINNPIMTATIVGELEHGGRYIEFHYDGIFMELLEKLGEMPLPPYIKEKLDDQERYQTVYSKVDGSAAAPTAGLHWTPELLDKVRAKGVKTVELTLHVGLGTFRPVEEENIEDHKMHSEFYQLTQEAADTLNDVHANGGRIIATGTTSIRTLETIGSKFDGKLQADSGWTDIFIKPGYQWTTVDAFITNFHLPKSTLVMLVAAFTGRDNILKAYEHAVADQYRFFSFGDAMFVKRG

SEQ ID NO: 68257 - protein, 353 aa, Leuconostoc lactis
  misc_feature (1)..(353): tr|A0A1B2A229|A0A1B2A229_LEULA S-adenosylmethionine:tRN A ribosyltransferase-isomerase OS=Leuconostoc lactis OX =1246 GN=queA PE=3 SV=1
MTAQPYQLSDFDYDLPEALIAQTPLKQRDASRLLVLDADTGAYDDKHFYDILDYVEPGDAIVMNNSRVLPARLHGARPETGGHAEVLLLRQDHGDVWETLVKPAKKSPVGSTIVFGDDINNPIMTATVVGELEHGGRYIEFHYDGIFMELLEKLGEMPLPPYIKEKLDDQERYQTVYSKVDGSAAAPTAGLHWTPELLDKVRAKGVKTVELTLHVGLGTFRPVEEENIEDHKMHSEFYQLTQEAADTLNDVHANGGRIIATGTTSIRTLETIGSKFDGHLQADSGWTDIFIKPGYQWTTVDAFITNFHLPKSTLVMLVAAFTGRDNILKAYEHAVADQYRFFSFGDAMFVKRG

SEQ ID NO: 68258 - protein, 377 aa, Leuconostoc mesenteroides
  misc_feature (1)..(377): tr|Q03YJ4|Q03YJ4_LEUMM S-adenosylmethionine:tRNA ribosy ltransferase-isomerase OS=Leuconostoc mesenteroides sub sp. mesenteroides (strain ATCC 8293 / NCDO 523) OX=2031 20 GN=queA PE=3 SV=1
MAFFFANKYVTMEIRLFLKGFDIIMAEEKKYTLSDFDYDLPEALIAQTPLKQRDASRLLALNAKTGGYEDKHFYDILDYLNPGDAIVMNNSRVLPARLHGARPETGGHAEVLLLRQDHGDVWETLVKPAKKSPVGSTIVFGDDIENPIMTATVVGELEHGGRYIEFHYDGIFMELLNQLGEMPLPPYIKEKLDDQERYQTVYSKVDGSAAAPTAGLHWTPELLDRVRAKGVKTVELTLHVGLGTFRPVDEENIEDHKMHSEFYQLSQEAADELNSVRKHGGRIIATGTTSIRTLETIGTKFNGDLTADSGWTDIFIKPGYNWTVVDAFITNFHLPKSTLVMLVAAFTGRDNILNAYKHAVDDQYRFFSFGDAMFIHK

SEQ ID NO: 68259 - protein, 353 aa, Leuconostoc mesenteroides
  misc_feature (1)..(353): tr|A0A1X0VAD9|A0A1X0VAD9_LEUME S-adenosylmethionine:tRN A ribosyltransferase-isomerase OS=Leuconostoc mesentero ides subsp. mesenteroides OX=33967 GN=queA PE=3 SV=1
MAEEKKYTLSDFDYDLPEALIAQTPLKQRDASRLLALNAKTGGYEDKHFYDILDYLNPGDAIVMNNSRVLPARLHGARPETGGHAEVLLLRQDHGDVWETLVKPAKKSPVGSTIVFGDDIENPIMTATVVGELEHGGRYIEFHYDGIFMELLDQLGEMPLPPYIKEKLDDQERYQTVYSKVDGSAAAPTAGLHWTPELLDRVRAKGVKTVELTLHVGLGTFRPVDEENIEDHKMHSEFYQLSQEAADELNSVRKHGGRIIATGTTSIRTLETIGTKFNGDLTADSGWTDIFIKPGYNWTVVDAFITNFHLPKSTLVMLVAAFTGRDNILNAYKHAVDDQYRFFSFGDAMFIHK

SEQ ID NO: 68260 - protein, 353 aa, Leuconostoc pseudomesenteroides
  misc_feature (1)..(353): tr|A0A062XME1|A0A062XME1_LEUPS S-adenosylmethionine:tRN A ribosyltransferase-isomerase OS=Leuconostoc pseudomes enteroides PS12 OX=1339247 GN=queA PE=3 SV=1
MTTEKHYTLSDFDYDLPEELIAQTPLKQRDASRLLVLNAETGQYEDKHFYNILDYVNAGDAIVMNNSRVLPARLHGARPETGGHAEVLLLRQDHGDVWETLVKPAKKSPIGSTIVFGDDLDNPIMTATVVGELEHGGRYIEFHYDGIFMELLEQLGEMPLPPYIKEKLADQERYQTVYSKVDGSAAAPTAGLHWTPELLDKVRAKGVKTVELTLHVGLGTFRPVDEENIDDHKMHSEFYQLSQEAADQLNEVRANGGRIIATGTTSIRTLETIGSKFDGELKADSGWTDIFIKPGYHWTVVDAFITNFHLPKSTLVMLVAAFTGRDNILNAYAHAVEDKYRFFSFGDAMFIHK

SEQ ID NO: 68261 - protein, 353 aa, Leuconostoc pseudomesenteroides
  misc_feature (1)..(353): tr|A0A5B8SYH6|A0A5B8SYH6_LEUPS S-adenosylmethionine:tRN A ribosyltransferase-isomerase OS=Leuconostoc pseudomes enteroides OX=33968 GN=queA PE=3 SV=1
MTTEKHYTLSDFDYDLPEELIAQTPLKQRDASRLLVLNAETGQYEDKHFYDILDYVNAGDAIVMNNSRVLPARLHGARPETGGHAEVLLLRQDHGDVWETLVKPAKKSPVGSTIVFGDDLDNPIMTATVVGELEHGGRYVEFHYDGIFMELLEQLGEMPLPPYIKEKLDDQERYQTVYSKVDGSAAAPTAGLHWTPELLDKVRAKGVKTVELTLHVGLGTFRPVDEENIDDHKMHSEFYQLSQEAADQLNEVRANGGRIIATGTTSIRTLETIGSKFDGDLKADSGWTDIFIKPGYHWTVVDAFITNFHLPKSTLVMLVAAFTGRDNILNAYSHAVADKYRFFSFGDAMFIHK

SEQ ID NO: 68262 - protein, 353 aa, Leuconostoc suionicum
  misc_feature (1)..(353): tr|A0A2N9K9Z6|A0A2N9K9Z6_9LACT S-adenosylmethionine:tRN A ribosyltransferase-isomerase OS=Leuconostoc suionicum OX=1511761 GN=queA PE=3 SV=1
MAEEKKYTLSDFDYDLPEALIAQTPLKQRDASRLLALNAKTGVYEDKHFYDILDYLNPGDAIVMNNSRVLPARLHGARPETGGHAEVLLLRQDHGDVWETLVKPAKKSPVGSTIVFGDDIENPIMTATVVGELEHGGRYIEFHYDGIFMELLDQLGEMPLPPYIKEKLDDQERYQTVYSKVDGSAAAPTAGLHWTPELLDKVRAKGVKTIELTLHVGLGTFRPVDEENIEDHKMHSEFYQLSQEAADELNSVRKHGGRIIATGTTSIRTLETIGTKFNGDLTADSGWTDIFIKPGYNWTVVDAFITNFHLPKSTLVMLVAAFTGRDNILNAYKHAVDDRYRFFSFGDAMFIHK

SEQ ID NO: 68263 - protein, 353 aa, Leuconostocaceae bacterium; identical to SEQ ID NO: 65562
  misc_feature (1)..(353): tr|A0A1G6H959|A0A1G6H959_9LACT S-adenosylmethionine:tRN A ribosyltransferase-isomerase OS=Leuconostocaceae bact erium R-53105 OX=1855370 GN=queA PE=3 SV=1

SEQ ID NO: 68264 - protein, 344 aa, Leucothrix pacifica
  misc_feature (1)..(344): tr|A0A317CLX4|A0A317CLX4_9GAMM S-adenosylmethionine:tRN A ribosyltransferase-isomerase OS=Leucothrix pacifica O X=1247513 GN=queA PE=3 SV=1
MKLSDFDYELPNELIAQQALSDRAASRLLVVKSEGVCEDKTFRDIVDLIQPEDLLVFNNTKVLPARLFGQKSTGGQIEVLVERLLDEHSLLAHVRSSKSPKAGARLTLEGGFEAEVMGRQGALFELRFESDDHKTAIELLEAHGHMPLPPYIERSDTEDDRERYQTVFAERPGAVAAPTAGLHFNEELLNALKAKGVATAEVTLHVGAGTFQPVRVEDLSEHVMHSEWIDVPQSVCDAVAACRARGGKVVAVGTTTVRSLESAAMTGELKPFQGDTDIFITPGYEFQVIDRLITNFHLPKSTLLMLVSAFSGYETMMQAYKHAVEQRYRFFSYGDAMYLSRLEE

SEQ ID NO: 68265 - protein, 344 aa, Leucothrix sp.
  misc_feature (1)..(344): tr|A0A317C8J0|A0A317C8J0_9GAMM S-adenosylmethionine:tRN A ribosyltransferase-isomerase OS=Leucothrix sp. IMCC97 19 OX=1481894 GN=queA PE=3 SV=1
MKLSDFDYELPPELIAQQALSDRAASRLLVVADDGECKDQTFRDIVDLIEPNDLLVFNNTKVLPARLFGEKATGGKLEVLVERLLDDNNLLAHVRCSKSPKPGAFIQLEGAFDAEVVRRHDTLFELRFISGDERNAIDLLEQYGHMPLPPYIERDDTQDDRTRYQTVFAEKPGAVAAPTAGLHFNEALFKAILAKGVETAEVTLHVGAGTFQPVRVEELSEHVMHSEWIDVPQSVCDAVADCRARGGRVIAVGTTTVRSLETAAQSGELKPFQGDTNIFITPGYQYQVVDRLITNFHLPKSTLLMLVSAFSGYDTMKKAYAHAVEQKYRFFSYGDAMFLKRKSD

SEQ ID NO: 68266 - protein, 339 aa, Levilinea saccharolytica
  misc_feature (1)..(339): tr|A0A0M9U315|A0A0M9U315_9CHLR S-adenosylmethionine:tRN A ribosyltransferase-isomerase OS=Levilinea saccharolyt ica OX=229921 GN=queA PE=3 SV=1
MRTDDFDYFLPPERIAQTPVEPRHASRLLVVNRATDQLEHRHFWEVGDYLRPGDLLVVNHTRVLPARIFARKPTGGKVEILLLRQEEDQVWEALVGGKRVTAGLSLQLEDGASVKVEAVLDGSRRRLRFEGPVQAYLERHGQMPLPPYIHTPLSNPERYQTVYAAQPGSAAAPTAGLHFTPELMDALRAKGVNFAAVTLHVGLDTFAPVTEDDPQEHVIHTEWCQLSAETAAQIEAARQAGGRVIAVGTTSVRTLESAARAAGPGQSVAAYSGPTDLFILPGYKFRAVDAMITNFHLPRSTLLMLVSAFAGRERMLAAYAEAVRLEYRFFSFGDAMLIV

SEQ ID NO: 68267 - protein, 354 aa, Lewinella agarilytica
  misc_feature (1)..(354): tr|A0A1H9NXE6|A0A1H9NXE6_9BACT S-adenosylmethionine:tRN A ribosyltransferase-isomerase OS=Lewinella agarilytica OX=478744 GN=queA PE=3 SV=1
MRTKLSQFKFELNEKLIARTPSKRRDDSRLMVVNRATGEIEHKMFSDLLDFYDEGDSLVFNNTKVFPARLYGLKEKTQARIEVFLLRELNAQARLWDVLVDPARKIRVGNKLYFNDKRGVTKLVAEVVDNTTSRGRTIRFLYDGPNDQFLNELHSLGNTPLPKLLEREADSRDAERYQTVFASEIGAVAAPTAGLHFSRETLMRMELKGIKKAEITLHLGLGTFRDIEVEDLSKHKMDAEYFRVEQPAVDIVNATKREGGLICAVGTTSVRACENSVSAERLLATNEGWTNKFIFPPYDFHIPDHLLTNFHLPKSSLFITTCAFGGIDLILEAYKIAQKEKYRFFAYGDAMLII

SEQ ID NO: 68268 - protein, 410 aa, Lewinella agarilytica
  misc_feature (1)..(410): tr|A0A1H9NVM4|A0A1H9NVM4_9BACT S-adenosylmethionine:tRN A ribosyltransferase-isomerase OS=Lewinella agarilytica OX=478744 GN=SAMN05444359_1406 PE=3 SV=1
MPRSARDLSIADFTYDLPDERIARHPVARREEARQLVYRDGKITEGIFRDLPERLPAGTLLIGNRTRVIHARLHFPIGEGKRPVEIFCLDPLQPVEYAMSLGAQTQVQWKCLIGGNRRWKSGVADLEVEVNGQQITLTAERGKQRGNSFDVYFSWTPEGELTFGEVLAAAGSIPLPPYLGRQTEAADQDRYQTVFAKTEGSVAAPTAGLHFTPETLAALQKRGIDWEEVTLHVGAGTFKPVSSPTLGGHEMHREYFEINLPLVDRICQQLAAGKPIVCVGTTSLRCVESLFYVANGADQPDGFNTHIGQWAAEEADFPEKTALARLECLRDLMVLSGNHELNGYTSILLSPASDIRIADGLITNFHQPNSTLLLLVAAFVGDDWKRIYDYALENDFRFLSYGDSSLLWKR

SEQ ID NO: 68269 - protein, 354 aa, Lewinella marina
  misc_feature (1)..(354): tr|A0A2G0CD29|A0A2G0CD29_9BACT S-adenosylmethionine:tRN A ribosyltransferase-isomerase OS=Lewinella marina OX=4 38751 GN=queA PE=3 SV=1
MRTKLSQFKFELNDKLIARTPSKRRDDSRLMVVNRATGEIEHKQFSDLLEYYSEGDTLVFNNTKVFPARLYGLKEKTQARIEVFLLRELNSQARLWDVLVDPARKIRVGNKLYFNDKRGNNRLVAEVVDNTTSRGRTIRFLYDGPNDEFTKELHGLGNTPLPKLLEREADSRDAERYQTVFASEVGAVAAPAAGLHFSRETLMRMELAGVKKAEVTLHLGLGTFRDIEVEDLSKHKMDAEYYRIEQPAVDTVNATKKDGGLVCAVGTTSLRALENSVSAERLLATSEGWTNKFIFPPYDFHIPDHLLTNFHLPKSSLFITTCAFGGIDLILEAYAQAQKEKYKFFAYGDAMLIV

SEQ ID NO: 68270 - protein, 414 aa, Lewinella marina
  misc_feature (1)..(414): tr|A0A2G0CDF7|A0A2G0CDF7_9BACT S-adenosylmethionine:tRN A ribosyltransferase-isomerase OS=Lewinella marina OX=4 38751 GN=CGL56_12510 PE=3 SV=1
MTPDARALRIDDYDYALPDERIARYPLPDRARAKLLHYRAGEMESLHFADLPDLLPAGTLVIGNQTRVIHARLHFTLADERPLEIFCLEPLEPADYALSLGSTTGVSWKCLVGGNRRWKSGEIDARVNVGGTDCRLTARRGKRLDNAFRIEFSWQADRPLSFGEVLEAAGSIPLPPYLGRPAEAEDRDRYQTVFAEREGSVAAPTAGLHFTPGVMERLRERGSDFRTLTLHVGAGTFKPVTSDTLGDHVMHREYFSVDRELVRALHAQKAAGRPVVSVGTTSMRCLESLYYFGARLLAGDPAGDSLDQWVGSDPRLTSATVAPALAALLQWMEVEGRENFSGYTQLLLTPAVRPRVVDGLITNFHQPRSTLLLLVASLVGEDWRRIYDFALGGDFRFLSYGDSSLLWRRGAGAE

SEQ ID NO: 68271 - protein, 352 aa, Lewinella nigricans
  misc_feature (1)..(352): tr|A0A2D0MY44|A0A2D0MY44_9BACT S-adenosylmethionine:tRN A ribosyltransferase-isomerase OS=Lewinella nigricans D SM 23189 = NBRC 102662 OX=1122177 GN=CRP01_39275 PE=3 S V=1
MQSPTISALDFELPVHLSRPLPTESRGLERDAVKLLVSKMNTDSVFHTTFAEIDRFLQAGDVLVVNTSATVPAALDIVLPTGRRGKIHLSNQISDTTWRGELREIVQGRPKRYFLGQAGAVFPLPGGGTATLLDLHSGSTTDTRHLQLWEIRLDLPLVPLPYLHRYGKPIRYDEQQFPLEYYQTAFSTEAGSAEMPSAGRAFTHPLITRLLIKGVQFAPITLHTGVSSLETDEEPFPEFFRVPAITASLINTARQQGRRIIAVGTTAGRAVESAVDRHGQVREKEGWTELYIKAESGMQIITGLITGFHEPRASHLHMLEALAGRHHLEIAYRAALERDYLWHEFGDLHLIV

SEQ ID NO: 68272 - protein, 354 aa, Lewinella nigricans
  misc_feature (1)..(354): tr|A0A2D0NGC7|A0A2D0NGC7_9BACT S-adenosylmethionine:tRN A ribosyltransferase-isomerase OS=Lewinella nigricans D SM 23189 = NBRC 102662 OX=1122177 GN=queA PE=3 SV=1
MRTKLSHFAFDLPQKLIAKYPEKNRDESRLMVVHKDTGKIEHRIFKDILDYFDDGDVMVFNNTKVFPARLYGRKEKTGAKIEVFLLRELNNEARLWDVLVDPARKIRVGNKLYFSDEHDNDILVAEVVDNTTSRGRTIRFLYDGTDEEFQKELHTLGNTPLPKEIGRPAEESDKERYQTIFAKELGAVAAPTAGLHYSRELMKRLEIKGLEFAELTLHIGLGTFRSIDVEDLSKHKMDAEYYKITQPAVDVVNKGKEGKKRVCGVGTTTMRAVESSVSAESLLKPSEGWTNKFIYPPYDFHIADSMVSNFHLPKSSLLIMVCAFGGFDLIMEAYQEAIKEEYRFFSYGDAMLII

SEQ ID NO: 68273 - protein, 414 aa, Lewinella sp.
  misc_feature (1)..(414): tr|A0A5C7FBQ8|A0A5C7FBQ8_9BACT S-adenosylmethionine:tRN A ribosyltransferase-isomerase OS=Lewinella sp. SSH13 O X=2602767 GN=FUA23_21300 PE=3 SV=1
MANNARDLSIDVFDYSLPDERIARYPAKERAGAKQLVYRNGEISHGVFSELPDRLPAGTLLIGNRTRVIHARLFFPLAEGKRPIEVFCLDPLLPVDYAQNLGARTQVQWKVLIGGNRRWKRGPLSLELEVSGQKTSLTAERGERMDNTFALTFSWETEGAPLTFGEILAAAGTIPLPPYLGRESEPDDSARYQTVFAKTEGSVAAPTAGLHFTPEVMNNLQKNGVDWEEVTLHVGAGTFKPVDADTLGGHTMHREFFTVSISFIERLRNQLKAGKPVVSVGTTSLRCLESLFYLGAGFAVGELMVVDGPVEVGQWVAEDPQLVGTDPLAAVNGLMELMKTNSLTELSGYTQLLLTPFAELKLADGLITNFHQPRSTLLLLVAAIVGDDWRRIYDYALEHDFRFLSYGDSSLLWK

SEQ ID NO: 68274 - protein, 354 aa, Lewinella sp.
  misc_feature (1)..(354): tr|A0A180ELL3|A0A180ELL3_9BACT S-adenosylmethionine:tRN A ribosyltransferase-isomerase OS=Lewinella sp. 4G2 OX= 1803372 GN=queA PE=3 SV=1
MRTKLSQFKFELNDKLIAKTPTKRRDDSRLMVVNRETGTIEHKMFSDLLDYYEEGDSLVFNNTKVFPARMYGLKEKTQARIEVFLLRELNAQARLWDVLVDPARKIRVGNKLYFNDKKGNNRLVAEVVDNTTSRGRTIRFLYDGPNDEFRKILHSLGNTPLPKVLEREPDSRDAERYQTVFAKEIGAVAAPTAGLNFSRETLMRMELKGIKKAEITLHLGLGTFRDIEVEDLSKHKMDAEYFKVTQEAADIVNATKKDGGLVCAVGTTALRACEDSVSAERLLATNEGWTNRFIFPPYKFHIPDHLLTSFHLPKSSLFIVTCAFGGIDLILEAYAQAQKEKYKFFAYGDAMLII

SEQ ID NO: 68275 - protein, 414 aa, Lewinella xylanilytica
  misc_feature (1)..(414): tr|A0A2S6I295|A0A2S6I295_9BACT S-adenosylmethionine:tRN A ribosyltransferase-isomerase OS=Lewinella xylanilytic a OX=1514080 GN=CLV84_2191 PE=3 SV=1
MMMDPRELRIDDFDYSLPDDRIARYPLPDRAAAKLLHYREGTVTDRHFRELPDLLPAGTLLVGNSTRVIHARLYFPLPTGRTVEIFCLEPLRPVDYALSLSATQGAVEWKCLIGGNRRWKSGSISLPVHQADDTFTLVAERLERTDDTFTVRFTWSGPRELSFGELLEAAGTIPLPPYLGRAAEGEDHHRYQTVFAEREGSVAAPTAGLHFTPQVMEGLVDREVDFRTLTLHVGAGTFKPVSAPNLGGHVMHREYFSVSIELLHRLEAQLRAGRPIVSIGTTSMRCLESLFYLGARGMTEGNWENELGQWVATEASVSRTDAAPALAALIHHLEMTNSESFTGYTQLMLTPAARPRIVDGLITNFHQPRSTLLLLVAAMVGDAWKDIYQHARETDYRFLSYGDSSLLWRRSAGA

SEQ ID NO: 68276 - protein, 354 aa, Lewinella xylanilytica
  misc_feature (1)..(354): tr|A0A2S6I1D5|A0A2S6I1D5_9BACT S-adenosylmethionine:tRN A ribosyltransferase-isomerase OS=Lewinella xylanilytic a OX=1514080 GN=queA PE=3 SV=1
MRTKLSQFKFELNDKLIARTPSKRRDDSRLMVVNRATGAIEHKQFTDLLDYYSEGDTLVFNNTKVFPARLYGLKEKTQARIEVFLLRELNSQARLWDVLVDPARKIRVGNKLYFNDKRGNNRLVAEVVDNTTSRGRTIRFLYDGPNDEFTKELHGLGNTPLPKLLEREADSRDAERYQTVFAKELGAVAAPTAGLHFSRETLMRMELAGVKNAEVTLHLGLGTFRDIEVEDLSKHKMDAEYYKIEQPAVKTVNATKKDGGLVCAVGTTTLRALENSVSAERLLATSEGWTNKFIFPPYDFHIPDHLLTNFHLPKSSLFITTCAFGGIELILEAYAQAQKEKYKFFAYGDAMLII

SEQ ID NO: 68277 - protein, 354 aa, Lewinellaceae bacterium
  misc_feature (1)..(354): tr|A0A2C6CXN0|A0A2C6CXN0_9BACT S-adenosylmethionine:tRN A ribosyltransferase-isomerase OS=Lewinellaceae bacteri um SD302 OX=2014804 GN=queA PE=3 SV=1
MRTKLSQFKFELPEKLIAKYPLRHRDDSRLMVVDRKTGTFEHKQFKDILDYYDDGDTFIFNNTKVFPARLYGRKEKTGARIEVFLLRELNSHSRLWDVLVDPARKIRVGNKLYFSNNDDDDRLVAEVVDNTTSRGRTIRFLYDGPDDVFMKELYALGNTPLPRIMEREAEAIDAERFQTVVAKTMGSVAAPAAGLHFSEETLLRMQIQGIQRAEVTLHLGLGTFRDIEVEDLSKHKMEAEYFKIEQPAVDIVNKSKRARKQVCAVGTTVIRSIETSVSAEDLLKTSEGWTNKFIFPPFEFRIADSMLTNFHLPKSSLFIMACAFGGIDLMLEAYAEAIKEKYRFYTYGDAMLIL

SEQ ID NO: 68278 - protein, 416 aa, Lewinellaceae bacterium
  misc_feature (1)..(416): tr|A0A2C6CNL0|A0A2C6CNL0_9BACT S-adenosylmethionine:tRN A ribosyltransferase-isomerase OS=Lewinellaceae bacteri um SD302 OX=2014804 GN=CEQ90_17570 PE=3 SV=1
MSGTSAREFRIEDFTYELPDDRIARHPLAERDAAKLLHYHDGMIDDHHFWELPELLPPGTLLVGNATRVIHARLHFELPNGRQIEIFCLDPLEPVDYQRNFSASGSVVWKCLVGGNRRWKDGVTATLNVPHQGDSLQLRAERLGRTDNTFEIRFSWEGAEVAFGPLLDAAGEIPLPPYLGRDAEEDDKDRYQTVFAEIEGSVAAPTAGLHLSERLMAKMRDRNLNWGEVILHVGAGTFKPVTSDTLGGHEMHREYFEVDLLFLERLLAQLRSGQPIVSVGTTTTRCMESIYYFGSKLAYEADFSLPASIDIGQWVATERSYELSPAEAVQALIDRMQVSGRKKIQGNTQLIITPDLSLRMVDGIITNFHQPNSTLLLIVAATVGQENWKSIYRHALTGDYRFLSYGDGSLLWKHKG

SEQ ID NO: 68279 - protein, 360 aa, Liberibacter asiaticus
  misc_feature (1)..(360): tr|C6XHB0|C6XHB0_LIBAP S-adenosylmethionine:tRNA ribosy ltransferase-isomerase OS=Liberibacter asiaticus (strai n psy62) OX=537021 GN=queA PE=3 SV=1
MMVKEFDFDLPPSRIALRPVFPRDSARLMVVHPNLSCPLVISDHLVSDLPAFLNSNDAIVFNNTKVITAQLNGVRFCHINRREKEISCTLHMRVSPNSWSVYARPSKVIKKGDILHFFSQDGQSRLEATVIDKWNTGEILLVFSISGIELERQISLVGTIPLPPYIARKRPIDARDYVDYQTTYAKIQGSVAAPTAGLHFTSNLLSRLISIGIKVYFVTLHVGAGTFMPVKVEDTDDHIMHSEIGFIDAPTAQALNSVKSRGGRIVSVGTTSLRLLETATTEDGIINPWSGFTNIFITPGYRFRAVDILMSNFHLPKSTLLMLVSAFCGIEETKKMYQHAISHAYRFYSYGDTSLLFQKR

SEQ ID NO: 68280 - protein, 358 aa, Liberibacter crescens
  misc_feature (1)..(358): tr|L0EVN4|L0EVN4_LIBCB S-adenosylmethionine:tRNA ribosy ltransferase-isomerase OS=Liberibacter crescens (strain BT-1) OX=1215343 GN=queA PE=3 SV=1
MRIELFDFDLPDHSIALRPTYPRDFSRLMVAYSHPSVHFSHHRMCDLLTFLKPNDVIIFNNTKVIPAQLQGFRVRQGYAEVRLSILLHVRISDDSWRAFPSSGKKIRQGDTIYFSSEDKKIQLSALVLEKHETGEITLVFSKSGEELDAQINIIGKIPLPPYIIRKRSVDEHDVVDYQTIYGCVQGAVAAPTAGLHFTSDLLDNLDVLGVEKHFVTLHVGAGTFIPVRVDNTDNHVMHGEIGYIDVKTVQAVNAAKAEGRRIIAVGTTTLRLLESAAIRDGVIKPWSGSTEIFITPGYRFRIVDMLITNFHLPRSTLFMLVAAFYGLEEIKKAYEHAIMQGYRFYSYGDASLLFRKEQ

SEQ ID NO: 68281 - protein, 359 aa, Liberibacter solanacearum
  misc_feature (1)..(359): tr|E4UDV1|E4UDV1_LIBSC S-adenosylmethionine:tRNA ribosy ltransferase-isomerase OS=Liberibacter solanacearum (st rain CLso-ZC1) OX=658172 GN=queA PE=3 SV=1
MMVKEFDFHLPSSRIALRPVSPRDSARLMVVYPNLSCSQMISDYSVRDLPIFLNSNDAIVFNNTKVIAAQLRGRRLRRTNDSEHWISCTLHMRISSNSWSAYVRPGKIIRQGDTIYFFSQDGQSKLEANVIEKRDTGEILLVFPLSGTELDRQIALIGTMPLPPYIAKKRPIDERDYVDYQTTYASIQGSVAAPTAGLHFTSDLLSKLVSMGVAVYFITLHVGAGTFMPVRVEDTDDHIMHSEIGFIDAQTAQDLNAVKLRGGRIVAVGTTSLRLLETATTEDGIIMPLSGYTNIFITPGYRFRAVDVLLSNFHLPKSTLLMLVSAFCGVEETKTMYQHAIANSYRFYSYGDASLIFKK

SEQ ID NO: 68282 - protein, 344 aa, Lihuaxuella thermophila
  misc_feature (1)..(344): tr|A0A1H8FU79|A0A1H8FU79_9BACL S-adenosylmethionine:tRN A ribosyltransferase-isomerase OS=Lihuaxuella thermophi la OX=1173111 GN=queA PE=3 SV=1
MEVSLYDFDLPKELIAQTPITDRAASRLMVLNRRTGEVVHTRFSQILEHLKPGDVLVLNDSRVRPARLIGMKEGTGANIELLLLKPLGEDRWEALVKPAKRVKEGTVILFGDGQLKAVAEEQTEVAGGRVFRLEYEADDVEKLFEQLGQMPLPPYIHEQLDDPERYQTVFSRVVGSAAAPTAGLHFTEELLERIRQKGVETAFITLHVGLGTFRPVTVEHVEEHQMHAEYYEVGEETAGIIRRAKERGGRVIAVGTTSVRTLETVANQFDGEIRASSGWTDIFIYPGYTFRAVDGLITNFHLPKSTLLMLVSAFASREHILAAYQEAVRERYRFFSFGDAMLII

SEQ ID NO: 68283 - protein, 345 aa, Lihuaxuella thermophila
  misc_feature (1)..(345): tr|A0A1H8C2F2|A0A1H8C2F2_9BACL S-adenosylmethionine:tRN A ribosyltransferase-isomerase OS=Lihuaxuella thermophi la OX=1173111 GN=SAMN05444955_1035 PE=3 SV=1
MAAPIDFVLPEMLNATAPPERRGIRRDHVRLMISDRRTGESQHTKFYCLPQYLRPGDVIALNVSRTLPAVLKASWRRGERWVDPSVEIRLASRIDEQSWEALVVGEGVKAGDIFQFSPSLFAVVTVVRAENPLVRLRFSLQGAELLEQFYKFGEPIRYEYIDQPWDLDYYQTVYASVPGSVEIPSAGRAFSWELLIQLRKKGVQVVSLTLHTGLSDLLDDRYRLEPEKNCEYYSIPEQTARVINEAKKSGGRVIAVGTTVVRALESAALSGGVCVAKEGRTCLRIHEQTPLQVVDGLMTGFHEPEASHLDLLSAFVPPPILSGMYDEAVRERYLWHEFGDIHLIL

SEQ ID NO: 68284 - protein, 352 aa, Limimaricola cinnabarinus
  misc_feature (1)..(352): tr|A0A2G1MF51|A0A2G1MF51_9RHOB S-adenosylmethionine:tRN A ribosyltransferase-isomerase OS=Limimaricola cinnabar inus OX=1125964 GN=queA PE=3 SV=1
MKLSDFDFDLPEDLIATRPARPRSSARLLLAQGETIADRVVTDLVEILRPGDRLVLNDTKVIPARLSGTRTRPGAAGEGIARIEVTLLAPRADGCWTALVKPLRKLREGESIVFSEKLSAELVGREADQAVLRFDLEGEDFDAAIAEVGAMPLPPYIAAKREADEADRADYQTVWAARPGAVAAPTASLHFDEPLMAALAERGVSITHVTLHVGAGTFLPVKVDDIRDHKMHAEWGQVSERAAAEIAATRATGGRVIPVGTTALRLIESAARGGQIEPWVGETDIFITPGFEFRVAHGLMTNFHLPKSTLMMLVSALMGVEEIRRIYDHAIANRYRFFSYGDASLLLPQRGR

SEQ ID NO: 68285 - protein, 352 aa, Limimaricola cinnabarinus
  misc_feature (1)..(352): tr|U2Z745|U2Z745_9RHOB S-adenosylmethionine:tRNA ribosy ltransferase-isomerase OS=Limimaricola cinnabarinus LL- 001 OX=1337093 GN=queA PE=3 SV=1
MKLSDFDFDLPDELIATRPARPRSSARLLLAQGGEIADRVVTDLVEILRPGDRLVLNDTKVIPARLTGIRTRPGASGEGTARIEVTLLGPRPDGSWSALIKPLRKLREGEVIEFSDRLSAELVSREEGQGVLRFDLEGDAFDRALQMVGAMPLPPYIAARRAADESDREDYQTVWAARPGAVAAPTASLHFDEPLMAALAARGVDVTHVTLHVGAGTFLPVKVDDIRDHKMHAEWGEVSAGAAAEIAATRAAGGRVIPVGTTALRLIESAARDGEVAPWSGETDIFITPGFAFRVADGLMTNFHLPKSTLMMLVSALMGVEEIRRIYEHAIANRYRFFSYGDASLLLPRADS

SEQ ID NO: 68286 - protein, 352 aa, Limimaricola hongkongensis
  misc_feature (1)..(352): tr|A0A017HDM2|A0A017HDM2_9RHOB S-adenosylmethionine:tRN A ribosyltransferase-isomerase OS=Limimaricola hongkong ensis DSM 17492 OX=1122180 GN=queA PE=3 SV=1
MKLSDFDFDLPEELIATRPARPRSSARLLLAQGDEIADRVVSDLASILRPGDRLVLNDTKVIPARLSGVRTRPGAAGEGAAKIEVTLLAPRADGAWSALVKPLRKLREGEVVVFSDRLSAELVGREADQAVLRFDLEGEDFDAAIAEVGAMPLPPYIAAKRAADDSDREDYQTVWAARPGAVAAPTASLHFDAPLMAALDARGVSFTHVTLHVGAGTFLPVKVDDIRDHKMHAEWGEVSEKAAAEIAATRATGGRVIPVGTTALRLIESAARGGRIMPWVGETDIFITPGFEFRVAHGLMTNFHLPKSTLMMLVSALMGVEEIRRIYDHAIANRYRFFSYGDASLLLPRGAR

SEQ ID NO: 68287 - protein, 350 aa, Limimaricola pyoseonensis
  misc_feature (1)..(350): tr|A0A1G7H056|A0A1G7H056_9RHOB S-adenosylmethionine:tRN A ribosyltransferase-isomerase OS=Limimaricola pyoseone nsis OX=521013 GN=queA PE=3 SV=1
MKLSDFDFDLPEELIATRPAKPRSSARLLLARGDAIDDRHVYDLPEILRPGDRLVLNDTKVIPARLSGLRTRPGAEGEGQARIEVTLLTPRPDGTWTALIKPLRKLREGEVIEFSDRLSAELVARDEGQGVLRFDLEGDAFDRALQQVGAMPLPPYIAAKRPADEADREDYQTVWAARPGAVAAPTASLHFDAALMAALEARGVSFTHVTLHVGAGTFLPVKVDDISEHRMHAEWGEVTEAAAAEIAATRAAGGRIIPVGTTALRLIESAAQGGQIGPWRGETDIFITPGFEFRVAHGLMTNFHLPKSTLMMLVSAMMGMDRIRAIYGHAIAERYRFFSYGDASLLLPRG

SEQ ID NO: 68288 - protein, 352 aa, Limimaricola soesokkakensis
  misc_feature (1)..(352): tr|A0A1X6YXF0|A0A1X6YXF0_9RHOB S-adenosylmethionine:tRN A ribosyltransferase-isomerase OS=Limimaricola soesokka kensis OX=1343159 GN=queA PE=3 SV=1
MKLSDFDFDLPEELIATRPAKPRSSARLLLAQGQEIADQVVTDLVRILRPGDRLVLNDTKVIPARLSGTRTRPGAAGEGTARIEVTLLGPRADGCWSALVKPLRKLREGEVVVFSERLSAELVGREADQAVLRFDLEGDDFDAAIAEVGAMPLPPYIAAKRAADESDREDYQTVWAARPGAVAAPTASLHFDEPLMAALAARGVSFTHVTLHVGAGTFLPVKVDDIRDHKMHAEWGEVSEKAAAEIAATRATGGRVIPVGTTALRLIESAARGGQIAPWSGETDIFITPGFEFRVAHGLMTNFHLPKSTLMMLVSALMGVEEIRRIYDHAIANRYRFFSYGDASLLLPRNGR

SEQ ID NO: 68289 - protein, 348 aa, Limimonas halophila
  misc_feature (1)..(348): tr|A0A1G7SJA1|A0A1G7SJA1_9PROT S-adenosylmethionine:tRN A ribosyltransferase-isomerase OS=Limimonas halophila O X=1082479 GN=queA PE=3 SV=1
MQTSDFDFELPEHFIAQRPARPRDSARLLEVRADGLNDRTVRALPELLGPDDLLVFNDTRVIPAQLTVRRGEARVGLTLHKPDPEDDAVWHVFARPAKRLRPGNTVHAGDTLSAEVLARDGGEVTLRFDRGGAALREALEEVGQTPLPPYIDRPEGPDEADRDDYQTVFAREPGAVAAPTAGLHFTDRLLAELDARGVRRAGVTLHVGAGTFLPVKSDDPREHPMHAEHGHLDAGTAEAVNATRAAGGRVVAVGTTALRLLETAAADDGTVHPFAGESDLFILPGYRFKAVDCLMTNFHLPRSTLFMLVCAFAGTARMQAAYAHAKAAGYRFYSYGDACFLHRQEAAA

SEQ ID NO: 68290 - protein, 358 aa, Limnobacter sp.
  misc_feature (1)..(358): tr|A0A151QIV8|A0A151QIV8_9BURK S-adenosylmethionine:tRN A ribosyltransferase-isomerase OS=Limnobacter sp. CACIA M 66H1 OX=1813033 GN=queA PE=3 SV=1
MKLSEFDFDLPEQLIAQHPPEHRGESRLLVCQNNKPIEDHLFEQVLNLLQPNDVLVVNDTKVLKARLEGYKASGGKIEVMLERILDDRRFTAMIRASKSPKPGSDIVLAGIATARVLSKHDMMYELELLESSLSLPELLEKHGALPLPPYIEHSANAQDDDRYQTVFAREPGAVAAPTAGLHFTERLLQEVQARGVKLLNLTLHVGAGTFLPVKTDNVDEHVMHSERYAISGSLIEAMIRAKQNGGKVVAVGTTSLRALEAWATETGCNLSTTEGLNKAAEFAHSGHAGDTQIFIKPGYTFKVVDRLITNFHLPKSTLLMLVSAFAGKTNILNAYAHAIAQQYRFFSYGDAMWLERSE

SEQ ID NO: 68291 - protein, 358 aa, Limnobacter sp.
  misc_feature (1)..(358): tr|A0A520TBP6|A0A520TBP6_9BURK S-adenosylmethionine:tRN A ribosyltransferase-isomerase OS=Limnobacter sp. OX=20 03368 GN=queA PE=3 SV=1
MKLSEFDFDLPEQLIAQHPPEHRGESRLLVCQSNKAIEDRLFAHVLNLLQPNDVLVVNDTKVLKARLEGHKASGGKIEVMLERILDDRRFTAMIRASKSPKPGSEIVLAGAATARVLNKHDMMYELELLESSLSLPDLLDTYGALPLPPYIEHSANAQDDERYQTVFAREPGAVAAPTAGLHFTEKLLQEVQTRGVQLLNLTLHVGAGTFLPVKTDNVDEHVMHSERYAISGSLIEAMIKAKQNGGKVVAVGTTSLRALEAWATETGCNLSTTEGLNKAAEFAHRGYGGDTQIFIKPGYSFKVVDRLITNFHLPKSTLLMLVSAFAGKTNILNAYAHAIAQQYRFFSYGDAMWLERSE

SEQ ID NO: 68292 - protein, 358 aa, Limnobaculum parvum
  misc_feature (1)..(358): tr|A0A2Y9U1B2|A0A2Y9U1B2_9ENTR S-adenosylmethionine:tRN A ribosyltransferase-isomerase OS=Limnobaculum parvum O X=2172103 GN=queA PE=3 SV=1
MRVTDFSFELPESLIARYPQAERSACRMLSLDGVSGTLIDDTFTDVLDKLNAGDLLVFNNTRVIPARLFGKKASGGKIEVLVERVLDDRRVLAHVRASKAPKPGAELLLGDDESIPAIMAARHDALFELHFTDGRDVLTILNAAGHMPLPPYIDRPDEEADRELYQTVYSQRPGAVAAPTAGLHFDQPLLEALRAKGINMEFVTLHVGAGTFQPVRVDDIKQHVMHAEYAEVPQQVVDAVLACKARGNKVVAVGTTSVRSLESAAQAAKQDLIEPFFGDTRIFIYPGYQFRVIDTLITNFHLPESTLIMLVSAFAGYSNIMRAYQQAVEKQYRFFSYGDAMFITRNPEAINEIPDGKS

SEQ ID NO: 68293 - protein, 366 aa, Limnochorda pilosa
  misc_feature (1)..(366): tr|A0A0K2SN93|A0A0K2SN93_9FIRM S-adenosylmethionine:tRN A ribosyltransferase-isomerase OS=Limnochorda pilosa OX =1555112 GN=queA PE=3 SV=1
MRMDAFDYHLPPGAIAQEPVEPRDASRLLVLRREDGRLEHRIFRDLPEYLAPGDVLVVNESRVRPARLIGEKEGTGGAVELLLLRPDAEGAWECLARPGRRLRAGQRLVFGGGRLRGQVVDPRVPRSPGGEGPSRAAGVRRVRFEHRGPLEQVLEELGRVPLPPYIHRELADPERYQTVYARETGSAAAPTAGLHFTPELLDRIRSMGVVVAPVVLHVGLDTFRPVTEQEAEEHPMHREYYAIPAETAAAVEGARARGGRVVAVGTTSVRALEAAAIRAEGLDPAGDRGAAAGRVPAGSGWTDLYIYPGYRFRAVDALVTNFHLPRSTLLLLVSAFAGRERVLEAYRVAVEAGYRFFSFGDAMVIL

SEQ ID NO: 68294 - protein, 371 aa, Limnochorda pilosa
  misc_feature (1)..(371): tr|A0A0K2SN96|A0A0K2SN96_9FIRM S-adenosylmethionine:tRN A ribosyltransferase-isomerase OS=Limnochorda pilosa OX =1555112 GN=LIP_2755 PE=3 SV=1
MTVLTARLDFHLPESLFAARPPEARGLARDQVQLLVLDAGRRSWQHARFTDLPAFLHPGDLLVVNASQAIAASLPARHGSGPHTGLPFRIHLSTPLPPWEAQTHGLPSREAWIVEPRTARGIPGEPIAPGEEVDIPGPKGGALARVRFVAPYRSFARLWVAGAGAQEALLEVAARVGEPIRYPYLEGRYPIRTYQTVYGDVPGSAEMPSAGRPFSRRTLQRLRAQGVEVARIVLHTGVSSHEIETPLVDEQPTYPEPFEVPPATAAAVNSARQRGGRVIAVGTTVVRALESCASADSSVRPARGFTDLFVSPARPVRSVDGLLTGVHAPRSSHLAMLSALVDPELLLASYEDAKSRGYLWHEFGDSNLILR

SEQ ID NO: 68295 - protein, 369 aa, Limnohabitans curvus
  misc_feature (1)..(369): tr|A0A315ESP6|A0A315ESP6_9BURK S-adenosylmethionine:tRN A ribosyltransferase-isomerase OS=Limnohabitans curvus OX=323423 GN=queA PE=3 SV=1
MSHIYTLSDFDFELPESLIAQHPASERSASRLLDGRHAEFANRTFKDLPSLLKAGDLLVFNDTQVVKARLFGEKPTGGKLELLVERVLTNHEVVAHMKVSKKPPVGTELLMVGGKNNGGFNATLLGRWPNEDGQLFRFKFSDEPHTLMQRHGHMPLPPYIERHQNTTDAQHETEADKAEDERRYQTVFAKHPGAAAAPTAALHFDEGVLQGLEAQGVARASVTLHVGAGTFQPVKTENLAEHRMHSEWYNIPPETVQAIADCRARGGRVVAVGTTSVRTLESWAQSGQASGDTQIFITPGFAFQVVDVLITNFHLPKSTLLMLVSAFAGFEHMHALYRHAIANHYRFFSYGDAMLLERNSERKAAHVEV

SEQ ID NO: 68296 - protein, 363 aa, Limnohabitans parvus
  misc_feature (1)..(363): tr|A0A315EB81|A0A315EB81_9BURK S-adenosylmethionine:tRN A ribosyltransferase-isomerase OS=Limnohabitans parvus II-B4 OX=1293052 GN=queA PE=3 SV=1
MTASVSSLREFTLSDFDFELPTELIAQHPATERSSSRLLDGSAATVVDRIFHELPSLLQAGDLLVFNDTKVVKARIFGEKASGGKLELLIERVLPGHQVVAHMKVSKKPLVGGKMFMAGGARNGGFDAVLLGRWPDEKGQLFHLQLSDEPHALMEKHGVVPLPPYIERPAGAIEHQDTEEDARRYQTVFARAPGAVAAPTAALHFDEALLAQLEARGVQRASVTLHVGAGTFQPVKTENIADHTMHREWYEVPEATQQAIADCKARGGQVVAVGTTTVRTLESWAKFSQASGDTQIFITPGFEFHLVDRLITNFHLPKSTLMMLVSAFAGYEHIMGLYRHAIANQYRFFSYGDAMLLTRTQPR

SEQ ID NO: 68297 - protein, 354 aa, Limnohabitans planktonicus
  misc_feature (1)..(354): tr|A0A2T7U8G7|A0A2T7U8G7_9BURK S-adenosylmethionine:tRN A ribosyltransferase-isomerase OS=Limnohabitans plankto nicus II-D5 OX=1293045 GN=queA PE=3 SV=1
MTSSAPSSRPFTLSDFDFELPPELIAQHPAAERSGSRLLDGSSPAVVDRIFRELPGLLRADDLLVFNDTKVIKARIFGEKATGGKLELLIERVLPGHQVVAHMKVSKKPLPGGKMFMMGGAQNGGFDATLLGRWPDENGQLFHLQLSDEPHALMEKHGHVPLPPYITHTDTEEDAQRYQTVFARTPGAVAAPTAALHFDEALLAALDAQGVQRASVTLHVGAGTFQPVKTENITEHTMHSEWYEVPEATQQAIAECKARGGQVVAVGTTTVRTLESWAQFGQASGDTQIFITPGFEFQVVDRLITNFHLPKSTLMMLVSAFAGYEHIMGLYRHAIAQKYRFFSYGDAMLLSRAS

SEQ ID NO: 68298 - protein, 360 aa, Limnohabitans sp.
  misc_feature (1)..(360): tr|A0A315AZW3|A0A315AZW3_9BURK S-adenosylmethionine:tRN A ribosyltransferase-isomerase OS=Limnohabitans sp. MMS -10A-192 OX=1835769 GN=queA PE=3 SV=1
MTTLSASPREFTLRDFDFELPPALIAQHPAAERSGSRLLDGSSSTVVDRIFRELPDLLHAGDLLVFNDTKVVKARIFGEKASGGKLELLIERVLPGDQVVAHMKVSKKPLVGGKMFMMGGAHNGGFDATLLGRWPDENGQLFHLQLSDEPHALMEKHGHVPLPPYIAHTDTAEDAQRYQTVFARAPGAVAAPTAALHFDEALLAALQARGVQRASVTLHVGAGTFQPVKTENIADHTMHREWYEVPEATQQAIAACKARGGKVVAVGTTTVRTLESWAKFKQVSGDTQIFITPGFEFQVVDRLITNFHLPKSTLMMLVSAFAGYEHIMGLYRHAIANQYRFFSYGDAMLLTHTPPASQAS

SEQ ID NO: 68299 - protein, 375 aa, Limnohabitans sp.
  misc_feature (1)..(375): tr|A0A2M6V0Z9|A0A2M6V0Z9_9BURK S-adenosylmethionine:tRN A ribosyltransferase-isomerase OS=Limnohabitans sp. G3- 2 OX=1100711 GN=queA PE=3 SV=1
MSSSAAPRDFTLSDFDFELPTPLIAQHPATERSASRLLDGSSPAVVDRIFHELPGLLNAGDLLVFNDTKVVKARIFGEKASGGKLELLIERVLPGHQVVAHMRVSKKPLLGGKMHLAGGARHGGFDAVLLGRWPDENGQLFHLQLSDEPHALMEKHGVMPLPPYIERPAGTGEHADTAEDAQRYQTVFARAPGAVAAPTAALHFDEGVLTALKARGVQTASVTLHVGAGTFQPVKTENIAEHTMHSEWYEVPEATQQAIAECKARGGQVVAVGTTTVRTLESWAQFGQASGDTQIFITPGFDFQVVDRLITNFHLPKSTLMMLVSAFAGYEHIMGLYRHAIANQYRFFSYGDAMLLKRTALDLSPAEGTPDRLRV

SEQ ID NO: 68300 - protein, 371 aa, Limnoraphis robusta
  misc_feature (1)..(371): tr|A0A0F5YK79|A0A0F5YK79_9CYAN S-adenosylmethionine:tRN A ribosyltransferase-isomerase OS=Limnoraphis robusta C S-951 OX=1637645 GN=queA PE=3 SV=1
METDRLDWTTEGYDYELPEERIAQNPVIPRDQSRLLVVDSLTSHHHRIFQDLPNYLKSGDLLIFNDTRVIPARLYGNKSSGAAVEILLIEERKPNCWLALVKPGRRFKIGVRVEFESLNSTDQEVLQPLSATVVETDAATGGRLLQFDLPAGQSLIEQLDQFGHIPFPPYVTQSDALPQQYQTIYAQRPGAVAAPTAGLHFTEELFERLHHQGINKAFVTLHVGVGTFRPVEVKDITTHQMHAEWIEVSAETVEQIEKTKANGGRIIAVGTTVVRTLEGVAMAEGKLTPYCGKTEAFIYPGYQFRVIDGLITNFHLPRSSLMMLVAALIGRQRLLDLYQDAIAQKAEGFAHPYRFYSFGDGMLILPEAVIS

SEQ ID NO: 68301 - protein, 375 aa, Limnospira indica; identical to SEQ ID NO: 63555
  misc_feature (1)..(375): tr|H1WBK2|H1WBK2_9CYAN S-adenosylmethionine:tRNA ribosy ltransferase-isomerase OS=Limnospira indica PCC 8005 OX =376219 GN=queA PE=3 SV=1

SEQ ID NO: 68302 - protein, 360 aa, Limnothrix rosea
  misc_feature (1)..(360): tr|A0A1Q4R7S4|A0A1Q4R7S4_9CYAN S-adenosylmethionine:tRN A ribosyltransferase-isomerase OS=Limnothrix rosea IAM M-220 OX=454133 GN=queA PE=3 SV=1
MSTVDQNLASYDYILPPECIAQTPVTPRDHSRLLVLDSPTTHHHQHFYQLGDWLQPNDLLIMNNTKVIPARLHGRKVTGAPVEVLLLEEKSVNTWLALVKPGKRFTLGAEIAFTSPRDLDQVLRATVIDRDPETGGRVLAFDLPATTNLWSVLDDFGEIPFPPYVTDSEAKPDQYQTIYAEQPGAVAAPTAGLHFTPELLDKLGAKGIARAFITLHVGVGTFRPVEVDDITTHDMHYEWIDVPDSTVQKIKETKAKGGRVIAIGTTAVRSLEGMAAASDGELRGFQGKTNLFIYPGYEWQVVDGLITNFHLPKSSLMMLVSALIGRERLLALYGEAIAEGYRFYSFGDAMAILPQAKGMM

SEQ ID NO: 68303 - protein, 381 aa, Limnothrix sp.
  misc_feature (1)..(381): tr|A0A372DU01|A0A372DU01_9CYAN S-adenosylmethionine:tRN A ribosyltransferase-isomerase OS=Limnothrix sp. CACIAM 69d OX=1890733 GN=queA PE=3 SV=1
MGYINDPDRSLDGYHYELPSDRIAQNPREPRDRSRLLVATSPHEIVHRQFRDLLEFLRPGDLLVMNDSSVIPARLHGHKASGAAVEVLLLEARSPDHWLALVRPGKRLLVGTQIEFDPPPGAAQANPAAPKLSAEVVAVDRNTGGRLLRFQLPPGANSLLEILDAWGEMPLPPYITDSAAPPDRYQTVYARDPGSAAAPTAGLHFTPELLDRLSAAGVGRAFVTLHVGVGTFRPVASPDITAHKMHEEWALLSEEVAEKIRTTRANGGRVFAVGTTAVRTLESAARHGQVEAFCGKTDLFIYPGYQWRVVDGLITNFHLPRSSLMMLVGAFVGRARLLELYQAALDAPADPYPDRYRFYSFGDAMLLLPDACIAPRFERKE

SEQ ID NO: 68304 - protein, 389 aa, Limnothrix sp.
  misc_feature (1)..(389): tr|A0A1C0V7D0|A0A1C0V7D0_9CYAN S-adenosylmethionine:tRN A ribosyltransferase-isomerase OS=Limnothrix sp. P13C2 OX=1880902 GN=queA PE=3 SV=1
MGYINDPDRSLDGYHYELPNDRIAQNPREPRDRSRLLVATSPHEIVHRQFRDLLEFLRPGDLLVMNDSSVIPARLHGHKASGAAVEVLLLEARSPDSWLALVRPGKRLLVGTQIEFDPPPGMAQTNPTADPTAVPTVAKLSAEVVAVDRNTGGRLLRFQLPPGVNSLLEILDAWGEMPLPPYITDSAAPPDRYQTVYARDPGSAAAPTAGLHFTPELLDRLSAAGVGRAFVTLHVGVGTFRPVASPDITAHKMHEEWALLSEEVAEKIRTTRANGGRVFAVGTTAVRTLESAARHGQVEAFCGKTDLFIYPGYQWRVVDGLITNFHLPRSSLMMLVGAFVGRARLLELYQAALDAPADPYPDRYRFYSFGDAMLLLPDACIAPRFETED

SEQ ID NO: 68305 - protein, 349 aa, Lishizhenia tianjinensis
  misc_feature (1)..(349): tr|A0A1I7B5C3|A0A1I7B5C3_9FLAO S-adenosylmethionine:tRN A ribosyltransferase-isomerase OS=Lishizhenia tianjinen sis OX=477690 GN=queA PE=3 SV=1
MKLSEFNFELPEELIAEYPSKNRDESRLMVVHRDTGKIEHKLFKDVIDYFDEGDVMIRNNTKVFPARMYGNKEKTGAKIEVFLLRELNRESLLWDVLVDPARKIRIGNKLYFGDDESLVAEVIDNTTSRGRTLRFLFDGTYEEFKAKITELGETPLPKYIKREVEEEDEERYQTIYASEEGAVAAPTAGLHFSKNLLKRLEIKGIDFAEITLHVGLGTFRPVEVEDLTKHKMDSEQVTITQKCADKVNEAKKNKKKVIAIGTTSMRAIESSVSTENLLKPFDGWTNKFIFPPYDFSIADAMITNLHTPSSTLLMMVSAYMGHDLMMEAYQEAIKEKYKFYSYGDAMLIL

SEQ ID NO: 68306 - protein, 342 aa, Listeria aquatica
  misc_feature (1)..(342): tr|W7B4D6|W7B4D6_9LIST S-adenosylmethionine:tRNA ribosy ltransferase-isomerase OS=Listeria aquatica FSL S10-118 8 OX=1265818 GN=queA PE=3 SV=1
MKVEDFDFDLPEELIAQTPLLDRTASRLMLVDKETGELKDDTFKAIVSELHTGDALVLNDTRVLPARLHGIKEETGAHIEVLLLKQQEGNAWETLVKPAKRIRKGAKIRFGDGELEAVCLEELEHGGRILEFHYQGIFYEILEQLGEMPLPPYIKEQLEDGDRYQTVYAKENGSAAAPTAGLHFTEELLDEIKAKGVKVCFLTLHVGLGTFRPVDVEDTENHKMHSEFYRLTEETAAILNEVKQNGGRIVAVGTTSIRTLETIASKFDGRLQADSGWTDIFISPGYTFKAVDALITNFHLPKSTLIMLVSALASREIILKAYAHAVSERYRFFSFGDAMFIH

SEQ ID NO: 68307 - protein, 343 aa, Listeria booriae
  misc_feature (1)..(343): tr|A0A099VY74|A0A099VY74_9LIST S-adenosylmethionine:tRN A ribosyltransferase-isomerase OS=Listeria booriae OX=1 552123 GN=queA PE=3 SV=1
MRVEDFDFELPEELIAQTPLLDRTSSRLMLVNKETGAIEDAHFPAILEQLHAGDALVLNDTRVLPARLHGEKAETGAHIEVLLLKQKEGDAWETLVKPAKRIRKGMRIQFGDGELSAVCLEELEHGGRILQFEYSGIFYEILERLGEMPLPPYIKEQLEDQDRYQTVFARENGSAAAPTAGLHFTQDLLEEVRAKGVKVVFLTLHVGLGTFRPVDVEDTANHKMHSEFYRLTREAAQELNAVKAAGGKIVAVGTTSIRTLETIATKFDGQLQEDSGWTDIFISPGYTFKAVDALITNFHLPKSTLIMLVSALASRENIMVAYEHAVAERYRFFSFGDAMFIYA

SEQ ID NO: 68308 - protein, 343 aa, Listeria cornellensis
  misc_feature (1)..(343): tr|W7BUG1|W7BUG1_9LIST S-adenosylmethionine:tRNA ribosy ltransferase-isomerase OS=Listeria cornellensis FSL F6- 0969 OX=1265820 GN=queA PE=3 SV=1
MRVEDFDFELPEELIAQTPLLDRTSSRLMLLNKETGAIKDKHFPAILEHLHAGDALVLNDTRVLPARLHGEKAETGAHIEVLLLKQTEGDAWETLVKPAKRIRKGMRIVFGDGELSAVCLEELEHGGRILQFEYSGIFYEILERLGEMPLPPYIKEQLADQDRYQTVFARENGSAAAPTAGLHFTEELLDQVRAKGVRVVFLTLHVGLGTFRPVDVEDTANHKMHSEFYRLTAEAARELNDVKAAGGKVVAVGTTSIRTLETIASKFDGKLQEDSGWTEIFIAPGYTFKAVDALITNFHLPKSTLIMLVSALSDREKIMAAYEHAVAQEYRFFSFGDAMFIYA

SEQ ID NO: 68309 - protein, 342 aa, Listeria fleischmannii
  misc_feature (1)..(342): tr|W7DGY5|W7DGY5_9LIST S-adenosylmethionine:tRNA ribosy ltransferase-isomerase OS=Listeria fleischmannii FSL S1 0-1203 OX=1265822 GN=queA PE=3 SV=1
MKVEDFDFDLPESLIAQTPLLDRTSSRLMVLDKTTGDISDEKFTTIIDYLNEGDALVLNDTRVLPARLHGIKEETGAHIEVLLLKQKEGNKWETLVKPAKRIRVGAKISFGEGELTAICTEELEHGGRILEFHYTGIFYEILENLGEMPLPPYIKEQLSDQDRYQTVYAKENGSAAAPTAGLHFTEELLETIRKKGIHICFVTLHVGLGTFRPVDVSDTENHKMHSEFYRLNAETAATLNEVKANGKKIVAVGTTSIRTLETIATKFDGELQADSGWTDIFIFPGYTFKAVDALITNFHLPKSTLIMLVSALSTRENILNAYHHAVEAKYRFFSFGDAMFIH

SEQ ID NO: 68310 - protein, 342 aa, Listeria fleischmannii
  misc_feature (1)..(342): tr|A0A2X3HD88|A0A2X3HD88_9LIST S-adenosylmethionine:tRN A ribosyltransferase-isomerase OS=Listeria fleischmanni i subsp. fleischmannii OX=1671902 GN=queA PE=3 SV=1
MKVEDFDFDLPESLIAQTPLLDRTSSRLMVLDKTTGDISDEKFTNIIDYLNEGDALVLNDTRVLPARLHGIKEETGAHIEVLLLKQKEGNKWETLVKPAKRIRVGAKISFGEGELTAICTEELEHGGRILEFHYTGIFYEILENLGEMPLPPYIKEQLSDQDRYQTVYAKENGSAAAPTAGLHFTEELLETIRKKGIHICFVTLHVGLGTFRPVDVSDTENHKMHSEFYRLNAETAAILNEVKANGKKIVAVGTTSIRTLETIATKFDGELQADSGWTDIFIFPGYTFKAVDALITNFHLPKSTLIMLVSALSTRENILNAYHHAVEAKYRFFSFGDAMFIH

SEQ ID NO: 68311 - protein, 343 aa, Listeria floridensis
  misc_feature (1)..(343): tr|W7C428|W7C428_9LIST S-adenosylmethionine:tRNA ribosy ltransferase-isomerase OS=Listeria floridensis FSL S10- 1187 OX=1265817 GN=queA PE=3 SV=1
MRVEDFNFDLPEELIAQTPLLDRTASRLMLVDKKTGALKDETFKAIVDELHAGDALVLNDTRVLPARLHGVKEETGAHIEVLLLKQKEGNTWETLVKPAKRIREGAKIRFGENGELEAVCLEELEHGGRILEFHYEGIFYEVLEQLGEMPLPPYIKEQLADQDRYQTVYARENGSAAAPTAGLHFTEELLEEIKQKGVKVCFLTLHVGLGTFRPVDVEDTDNHKMHSEFYRLTEETALTLREVKASGGKVIAVGTTSIRTLETIASKFDGEIVADSGWTDIFISPGYTFKAVDALITNFHLPKSTLIMLVSALASREIILNAYEHAVSERYRFFSFGDAMFIH

SEQ ID NO: 68312 - protein, 342 aa, Listeria grayi
  misc_feature (1)..(342): tr|D7UZ08|D7UZ08_LISGR S-adenosylmethionine:tRNA ribosy ltransferase-isomerase OS=Listeria grayi DSM 20601 OX=5 25367 GN=queA PE=3 SV=1
MKVEDFDFDLPEELIAQTPLLDRTASRLMVLNKETGAIDDKHFASIVDYLEPGDALVLNNTRVLPARLHGLKDETGAHIEVLLLKQKADNEWETLVKPAKRIRVGQTITFGNGELKAVCKEELEHGGRILEFHYEGIFYEVLENLGEMPLPPYIKEQLEDQGRYQTVYAKENGSAAAPTAGLHFTEALLDQIREKGVKVIFLTLHVGLGTFRPVDVADTDNHKMHSEFYRLTKEAAAELSEVKAAGKRIIAVGTTSIRTLETIASRNNGALVEESGWTDIFISPGFTFQAVDALITNFHLPKSTLIMLVSALSNRDIILHAYRHAVENRYRFFSFGDAMFIH

SEQ ID NO: 68313 - protein, 342 aa, Listeria grayi
  misc_feature (1)..(342): tr|A0A378MAJ4|A0A378MAJ4_LISGR S-adenosylmethionine:tRN A ribosyltransferase-isomerase OS=Listeria grayi OX=164 1 GN=queA PE=3 SV=1
MKVEDFDFDLPEELIAQTPLLDRTASRLMVLNKETGAIDDKHFASIVDYLEPGDALVLNNTRVLPARLHGLKDETGAHIEVLLLKQKADNEWETLVKPAKRIRVGQTITFGNGELKAVCKEELEHGGRILEFHYEGIFYEVLESLGEMPLPPYIKEQLEDQGRYQTVYAKENGSAAAPTAGLHFTEALLDQIREKGVKVIFLTLHVGLGTFRPVDVADTDNHKMHSEFYRLTKEAAAELSEVKAAGKRIIAVGTTSIRTLETIASRNNGALVEESGWTDIFISPGFTFQAVDALITNFHLPKSTLIMLVSALSNRDIILHAYRHAVENRYRFFSFGDAMFIH

SEQ ID NO: 68314 - protein, 342 aa, Listeria innocua
  misc_feature (1)..(342): sp|Q92BI3|QUEA_LISIN S-adenosylmethionine:tRNA ribosylt ransferase-isomerase OS=Listeria innocua serovar 6a (st rain ATCC BAA-680 / CLIP 11262) OX=272626 GN=queA PE=3 SV=1
MKVEDFDFDLPEELIAQTPLLDRTSSRLMVLDKESGEIKDQHFTDIISYLNKGDALVLNDTRVLPARLHGIKDETGAHIEVLLLKQKEGNAWETLVKPAKRIRKGATITFGDGALKATCLEELEHGGRILEFSYEGIFYEVLEQLGEMPLPPYIKEQLADQDRYQTVYAKENGSAAAPTAGLHFTEELLAQISAKGVEIIFVTLHVGLGTFRPVDVEDTQNHKMHSEFYRLTEESADRINKIKSAGGKVVAVGTTSIRTLETIASRHDGKLIAESGWTDIFISPGYEFQAVDALITNFHLPKSTLIMLVSALSDRTKILAAYNHAVEQQYRFFSFGDAMFIH

SEQ ID NO: 68315 - protein, 342 aa, Listeria innocua; identical to SEQ ID NO: 68314
  misc_feature (1)..(342): tr|A0A5H5ASQ3|A0A5H5ASQ3_LISIO tRNA preQ1(34) S-adenosy lmethionine ribosyltransferase-isomerase QueA OS=Lister ia innocua OX=1642 GN=queA PE=4 SV=1

SEQ ID NO: 68316 - protein, 342 aa, Listeria ivanovii
  misc_feature (1)..(342): tr|A0A097B5I6|A0A097B5I6_LISIV S-adenosylmethionine:tRN A ribosyltransferase-isomerase OS=Listeria ivanovii sub sp. londoniensis OX=202752 GN=queA PE=3 SV=1
MKVEDFDFDLPEELIAQTPLLDRTSSRLMVLDKATGEIKDQHFTDILSYLHEGDALVLNDTRVLPARLHGIKDETGAHIEVLLLKQKEGNTWEALVKPAKRIRQGATITFGDGALQATCLEELEHGGRILEFSYEGIFYEVLEQLGEMPLPPYIKEQLADQDRYQTVYAKENGSAAAPTAGLHFTEDLLAKIKEKGVEIIFVTLHVGLGTFRPVDVEDTTNHKMHSEFYRLTEEAAERINRVKETGGKVIAVGTTSIRTLETIASRHEGNIVAESGWTDIFISPGYTFRAVDALITNFHLPKSTLIMLVSALSDRNKILTAYNHAVEEQYRFFSFGDAMFIH

SEQ ID NO: 68317 - protein, 342 aa, Listeria ivanovii
  misc_feature (1)..(342): tr|G2Z9N0|G2Z9N0_LISIP S-adenosylmethionine:tRNA ribosy ltransferase-isomerase OS=Listeria ivanovii (strain ATC C BAA-678 / PAM 55) OX=881621 GN=queA PE=3 SV=1
MKVEDFDFDLPEKLIAQTPLIDRTSSRLMVLDKTSGEIKDQHFTDILGYLNEGDALVLNDTRVLPARLHGIKDETGAHIEVLLLKQKEGNAWETLVKPAKRIRQGATITFGDGALKAICLEELEHGGRILEFSYEGIFYEVLEQLGEMPLPPYIKEQLADQNRYQTVYAKENGSAAAPTAGLHFTEELLGKMKAKGVEIIFVTLHVGLGTFRPVDVEDTANHKMHSEFYRLTEEAAERINQVKETGGKVVAVGTTSIRTLETIASRHEGNLVAESGWTDIFISPGYTFRAVDALITNFHLPKSTLIMLVSALSDRNKILTAYNHAVEEQYRFFSFGDAMFIH

SEQ ID NO: 68318 - protein, 342 aa, Listeria kieliensis
  misc_feature (1)..(342): tr|A0A3D8TV17|A0A3D8TV17_9LIST S-adenosylmethionine:tRN A ribosyltransferase-isomerase OS=Listeria kieliensis O X=1621700 GN=queA PE=3 SV=1
MRVEDFDFDLPEELIAQTPLLDRTASRLMLVDKQTGELKDDTFKSIVSELHAGDALVLNDTRVLPARLHGIKEETGAHIEVLLLKQQEGNTWETLVKPAKRIRKGAKIKFGDGELEAVCLEELEHGGRILEFHYQGIFYEILEQLGEMPLPPYIKEQLEDGDRYQTVYAKENGSAAAPTAGLHFTEELLDEIKAKGVKVCFLTLHVGLGTFRPVDVEDTENHKMHSEFYRLTEETAVVLNDVKQNGGKIVAVGTTSIRTLETIATKFDGRIQADAGWTDIFISPGYTFKAVDALITNFHLPKSTLIMLVSALASRDIILHAYAHAVREEYRFFSFGDAMFIH

SEQ ID NO: 68319 - protein, 342 aa, Listeria marthii
  misc_feature (1)..(342): tr|E3YQH9|E3YQH9_9LIST S-adenosylmethionine:tRNA ribosy ltransferase-isomerase OS=Listeria marthii FSL S4-120 O X=702457 GN=queA PE=3 SV=1
MKVEDFDFDLPEELIAQTPLLDRTSSRLMVLDKESGEIKDQHFTDIISYLNEGDALVLNDTRVLPARLHGIKDETGAHIEVLLLKQKEGNAWETLVKPAKRIRKGATITFGDGALKATCLEELEHGGRILEFTYEGIFYEVLEQLGEMPLPPYIKEQLADQDRYQTVYAKENGSAAAPTAGLHFTEDLLAKISAKGVEIIFVTLHVGLGTFRPVDVEDTTNHKMHSEFYRLTEESAARINQIKAQGGKVVAVGTTSIRTLETIASRHDGKLVAESGWTEIFISPGYTFQAVDALITNFHLPKSTLIMLVSALSDRTKILAAYNHAVEEQYRFFSFGDAMFIH

SEQ ID NO: 68320 - protein, 342 aa, Listeria monocytogenes
  misc_feature (1)..(342): sp|Q8Y6Z9|QUEA_LISMO S-adenosylmethionine:tRNA ribosylt ransferase-isomerase OS=Listeria monocytogenes serovar 1/2a (strain ATCC BAA-679 / EGD-e) OX=169963 GN=queA PE =3 SV=1
MKVEDFDFDLPEELIAQTPLLDRTSSRLMVLDKESGDIKDQHFTDIISYLNEGDALVLNDTRVLPARLHGIKDETGAHIEVLLLKQKEGNAWETLVKPAKRIRKGATITFGDGALKATCLEELEHGGRILEFSYEGIFYEVLEQLGEMPLPPYIKEQLADQDRYQTVYAKENGSAAAPTAGLHFTEDLLEQISAKGVEIIFVTLHVGLGTFRPVDVEDTTNHKMHSEFYRLTEESAERINKIKAQGGKVVAVGTTSIRTLETIASRHDGKLVAESGWTEIFISPGYTFQAVDALITNFHLPKSTLIMLVSALSDRTKILAAYNHAVEEQYRFFSFGDAMFIH

SEQ ID NO: 68321 - protein, 342 aa, Listeria monocytogenes
  misc_feature (1)..(342): sp|B8DHL7|QUEA_LISMH S-adenosylmethionine:tRNA ribosylt ransferase-isomerase OS=Listeria monocytogenes serotype 4a (strain HCC23) OX=552536 GN=queA PE=3 SV=1
MKVEDFDFDLPEELIAQTPLLDRTSSRLMVLDKESGDIKDQHFTDIISYLNEGDALVLNDTRVLPARLHGIKDETGAHIEVLLLKQKEGNAWETLVKPAKRIRKGATITFGDGALKATCLEELEHGGRILEFSYEGIFYEVLEQLGEMPLPPYIKEQLADQDRYQTVYAKENGSAAAPTAGLHFTEDLLAKISAKGVEIIFVTLHVGLGTFRPVDVEDTANHKMHSEFYRLTEESAERINKIKVQGGKVVAVGTTSIRTLETIASRHDGKLVAESGWTEIFISPGYTFQAVDALITNFHLPKSTLIMLVSALSDRTKILAAYNHAVEQQYRFFSFGDAMFIH

SEQ ID NO: 68322 - protein, 343 aa, Listeria riparia
  misc_feature (1)..(343): tr|W7D573|W7D573_9LIST S-adenosylmethionine:tRNA ribosy ltransferase-isomerase OS=Listeria riparia FSL S10-1204 OX=1265816 GN=queA PE=3 SV=1
MRVEDFDFELPEELIAQTPLLDRTSSRLMLVNKETGAIEDAHFPAILEQLHAGDALVLNDTRVLPARLHGEKAETGAHIEVLLLKQKEGDAWETLVKPAKRIRKGMRIEFGDGELSAVCLEELEHGGRILQFEYSGIFYEILERLGEMPLPPYIKEQLEDQNRYQTVFARENGSAAAPTAGLHFTQDLLQKVRAKGVKVIFLTLHVGLGTFRPVDVEDTANHKMHSEFYRLTREAAQELNAVKAAGGKIVAVGTTSIRTLETIATKFDGELQEDSGWTDIFISPGYIFKAVDALITNFHLPKSTLIMLVSALAGREYIMAAYEHAVAERYRFFSFGDAMFIYA

SEQ ID NO: 68323 - protein, 343 aa, Listeria rocourtiae
  misc_feature (1)..(343): tr|A0A4V3DPT7|A0A4V3DPT7_9LIST S-adenosylmethionine:tRN A ribosyltransferase-isomerase OS=Listeria rocourtiae O X=647910 GN=queA PE=3 SV=1
MRVEDFDFELPEELIAQTPLLDRTSSRLMLLNKETGAIEDKHFPAILEHLHAGDALVLNDTRVLPARLHGEKAETGAHIEVLLLKQTEGDAWETLVKPAKRIRKGMRIQFGDGELSAVCLEELEHGGRILQFEYSGIFYEILERLGEMPLPPYIKEQLADQDRYQTVFARENGSAAAPTAGLHFTQDLLEQVRKKGVKVVFLTLHVGLGTFRPVDAEDTANHKMHSEFYRLTAEAAHELQDVKASGGKIVAVGTTSIRTLETIATKFDGKLQEDSGWTEIFISPGYTFKAVDALITNFHLPKSTLIMLVSALSDREKIMVAYEHAVAQEYRFFSFGDAMFIYA

SEQ ID NO: 68324 - protein, 342 aa, Listeria seeligeri
  misc_feature (1)..(342): tr|A0A5B8AAK9|A0A5B8AAK9_LISSE S-adenosylmethionine:tRN A ribosyltransferase-isomerase OS=Listeria seeligeri OX =1640 GN=queA PE=3 SV=1
MKVEDFDFDLPEELIAQTPLLDRTSSRLMVLDKATGEIKDQHFTDILSYLHEGDALVLNDTRVLPARLHGTKDETGAHIEVLLLKQKEGNAWETLVKPAKRIRQGATITFGDGALKATCLEELEHGGRILEFSYEGIFYEVLEQLGEMPLPPYIKEQLADQDRYQTVYAKENGSAAAPTAGLHFTEDLLAKIKAKGVEIIFVTLHVGLGTFRPVDVEDTANHKMHSEFYRLTEEAAERINKVKETGGKVVAVGTTSIRTLETIASRHEGELVAESGWTEIFISPGYTFQAVDALITNFHLPKSTLIMLVSALSDRNKILTAYNHAVEQQYRFFSFGDAMFIH

SEQ ID NO: 68325 - protein, 342 aa, Listeria seeligeri; identical to SEQ ID NO: 68324
  misc_feature (1)..(342): tr|E3ZQR7|E3ZQR7_LISSE S-adenosylmethionine:tRNA ribosy ltransferase-isomerase OS=Listeria seeligeri FSL N1-067 OX=702453 GN=queA PE=3 SV=1

SEQ ID NO: 68326 - protein, 343 aa, Listeria sp.
  misc_feature (1)..(343): tr|A0A3N9TTU9|A0A3N9TTU9_9LIST S-adenosylmethionine:tRN A ribosyltransferase-isomerase OS=Listeria sp. SHR_NRA_ 18 OX=2269046 GN=queA PE=3 SV=1
MRVEDFDFELPEELIAQTPLLDRTSSRLMLLNKETGAIEDKHFPAILEHLHAGDALVLNDTRVLPARLHGEKAETGAHIEVLLLKQTEGDAWETLVKPAKRIRKGMRIVFGDGELSAVCLEELEHGGRILQFEYSGIFYEILERLGEMPLPPYIKEQLADQDRYQTVFARENGSAAAPTAGLHFTEDLLNQVRAKGVKVVFLTLHVGLGTFRPVDVEDTANHKMHSEFYRLTAEAARELNDVKAADGKVVAVGTTSIRTLETIASKFDGKLQEDSGWTEIFISPGYAFKAVDALITNFHLPKSTLIMLVSALADREKIMAAYEHAVAQEYRFFSFGDAMFIYA

SEQ ID NO: 68327 - protein, 343 aa, Listeria weihenstephanensis
  misc_feature (1)..(343): tr|A0A1S7FUY6|A0A1S7FUY6_9LIST S-adenosylmethionine:tRN A ribosyltransferase-isomerase OS=Listeria weihenstepha nensis OX=1006155 GN=queA PE=3 SV=1
MRVEDFDFELPEELIAQTPLLDRTSSRLLLLNKETGAMEDKHFPAILEHLKDGDALVLNDTRVLPARLHGEKAETGAHIEVLLLKQMEGDAWETLVKPAKRIRKGMRIVFGNGELSAVCLEELEHGGRILQFEYSGIFYEILERLGEMPLPPYIKEQLEDQDRYQTVFARENGSAAAPTAGLHFTQDLLEQVRAKGVKVVFLTLHVGLGTFRPVDVEDTENHKMHSEFYRLTAEAAHELNVVKAAGGKIVAVGTTSIRTLETIASKFDGKLQEDSGWTEIFISPGYTFKAVDALITNFHLPKSTLIMLVSALADREKIMAAYEHAVAEKYRFFSFGDAMFIYA

SEQ ID NO: 68328 - protein, 343 aa, Listeria weihenstephanensis; identical to SEQ ID NO: 68327
  misc_feature (1)..(343): tr|W7CMD8|W7CMD8_9LIST S-adenosylmethionine:tRNA ribosy ltransferase-isomerase OS=Listeria weihenstephanensis F SL R9-0317 OX=1265845 GN=queA PE=3 SV=1

SEQ ID NO: 68329 - protein, 342 aa, Listeria welshimeri
  misc_feature (1)..(342): sp|A0AIY0|QUEA_LISW6 S-adenosylmethionine:tRNA ribosylt ransferase-isomerase OS=Listeria welshimeri serovar 6b (strain ATCC 35897 / DSM 20650 / SLCC5334) OX=386043 GN =queA PE=3 SV=1
MKVEDFDFDLPEELIAQTPLLDRTSSRLMVLDKKSGEIKDQHFTDILSYLNEGDALVLNDTRVLPARLHGTKDETGAHIEVLLLKQKEGNAWETLVKPAKRIRKGGTITFGNGALKATCLEELEHGGRILEFSYEGIFYEVLEQLGEMPLPPYIKEQLADQDRYQTVYAKENGSAAAPTAGLHFTEDLLAQISAKGVEIIFVTLHVGLGTFRPVDVEDTANHKMHSEFYRLTEDAANRINKIKATGGKVVAVGTTSIRTLETIASHNEGKLVAESGWTDIFISPGYTFQAVDALITNLHLPKSTLIMLVSALSNRTNILAAYNHAVEQQYRFFSFGDAMFIH

SEQ ID NO: 68330 - protein, 343 aa, Listeriaceae bacterium; identical to SEQ ID NO: 68326
  misc_feature (1)..(343): tr|A0A099W1F1|A0A099W1F1_9LIST S-adenosylmethionine:tRN A ribosyltransferase-isomerase OS=Listeriaceae bacteriu m FSL A5-0209 OX=1497679 GN=queA PE=3 SV=1

SEQ ID NO: 68331 - protein, 345 aa, Litoreibacter albidus
  misc_feature (1)..(345): tr|A0A1H2XIN0|A0A1H2XIN0_9RHOB S-adenosylmethionine:tRN A ribosyltransferase-isomerase OS=Litoreibacter albidus OX=670155 GN=queA PE=3 SV=1
MKLSDFDFELPEQLIATRPAVPRSASRLLVATPDTLEDKAVTDLGDYLRAGDVLVLNDTKVIPARLFGHRARDGNLSKMEVTLLSPTVDGAWRALVKPLRKVRDGEVITFAAGLEAEVISRADGQATMVFNREGQAFDDALAEAGQMPLPPYIAAKRAADAQDKTDYQTVFAKTTGAVAAPTASLHFDEALLAKLAAKGVEFADVTLHVGAGTFLPVKVDDVKTHKMHAEWGNVSAEAAKIIATAKAEGRRVIPVGTTALRLIESAATGAGQIAPWQGETEIFIYPGYAFQIADALMTNFHLPKSTLMMLVSALMGQQRVCEIYDHAIAHEYRFFSYGDSSLLLP

SEQ ID NO: 68332 - protein, 345 aa, Litoreibacter arenae
  misc_feature (1)..(345): tr|S9QCL5|S9QCL5_9RHOB S-adenosylmethionine:tRNA ribosy ltransferase-isomerase OS=Litoreibacter arenae DSM 1959 3 OX=1123360 GN=queA PE=3 SV=1
MKLSDFDFDLPERLIATRPAVPRSASRLLVASPTKIDDRTVTDLPDLLQDGDLLVLNDTKVIPARLFGHRERDGNVSKIEVTLLSPTPDGTWRALVKPLRKVRDGEAITFAAGLEASLLSRDDGQAVLSFNRQGKAFDDALAEAGQMPLPPYIAAKRAADEQDKTDYQTVFAKTTGAVAAPTASLHFDEPLLDKLKAKGVQFAHVTLHVGAGTFLPVKVDDVKTHKMHAEWGQVSQEAASQIKAAKEQGRRVVPVGTTALRLIESAASAQGEIAPWEGETDIFIYPGFEFKITDALMTNFHLPKSTLMMLVSALMGQQRVREIYTHAIDSDYRFFSYGDSSLLLP

SEQ ID NO: 68333 - protein, 345 aa, Litoreibacter ascidiaceicola
  misc_feature (1)..(345): tr|A0A1M4VMZ5|A0A1M4VMZ5_9RHOB S-adenosylmethionine:tRN A ribosyltransferase-isomerase OS=Litoreibacter ascidia ceicola OX=1486859 GN=queA PE=3 SV=1
MKLSDFDFDLPEQLIATRPAVPRSASKLLVATPDRIEDRVVTDLVDYLNAGDVLVLNDTKVIPARLFGHRERAGNISKMEVTLLSPTTDGRWRALVKPLRKVRDGEAITFAAGLEAEVLSRTDGQAVLGFNLEGQAFDDALAIAGQMPLPPYIAAKRAADAQDKTDYQTVFAKTSGAVAAPTASLHFDDDLLSRLTEIGVEFVHVTLHVGAGTFLPVKVDDVKTHKMHAEWGQVSKHAAERINAAKAEGRRVIPVGTTALRLIESAATSNRVIAPWQGETEIFIYPGYAFRIADALMTNFHLPKSTLMMLVSALMGQERVRQIYDHAISQEYRFFSYGDSSLLLP

SEQ ID NO: 68334 - protein, 345 aa, Litoreibacter halocynthiae
  misc_feature (1)..(345): tr|A0A4R7LS16|A0A4R7LS16_9RHOB S-adenosylmethionine:tRN A ribosyltransferase-isomerase OS=Litoreibacter halocyn thiae OX=1242689 GN=queA PE=3 SV=1
MKLSDFDFDLPEQLIATRPAVPRSASKLLVATPDRIEDRVVTDLVDYLHAGDVLVLNDTKVIPARLFGHRERDGNISKMEVTLLSPTTDGTWRALIKPLRKVRDGEAITFAAGLVAEVLSRTDGQAVLGFNLEGQAFDDALAIAGQMPLPPYIAAKRAADAQDKTDYQTVFAKTSGAVAAPTASLHFDAELLDRLSKVGVEFVHVTLHVGAGTFLPVKVDDVETHKMHAEWGQVSKHAAERISAAKAEGRRVIPVGTTALRLIESAAKSNGVIAPWQGETDIFIYPGYAFQIADALMTNFHLPKSTLMMLVSALMGQERVRQIYDHAISQEYRFFSYGDSSLLLP

SEQ ID NO: 68335 - protein, 345 aa, Litoreibacter janthinus
  misc_feature (1)..(345): tr|A0A1I6H195|A0A1I6H195_9RHOB S-adenosylmethionine:tRN A ribosyltransferase-isomerase OS=Litoreibacter janthin us OX=670154 GN=queA PE=3 SV=1
MKLSDFDFDLPERLIATRPVVPRSASRLLVATPDQLSDKSVFDLPDLLGAGDLLVLNDTKVIPARLFGHRERDGNVSKIEVTLLSPTPDGTWRALVKPLRKVRDGESITFAAGLEATLLGRDDGQATLAFNLQGQAFDDALAEAGQMPLPPYIAAKRAADAQDKTDYQTVFAKTTGAVAAPTASLHFDQALLERLAANGVEFAHVTLHVGAGTFLPVKVEDVQTHKMHAEWGRVPEAAAAQISAAKTEGRRVIPVGTTALRLIESAATGDGQIGPWQGETDIFIYPGFTFQIADALMTNFHLPKSTLMMLVSALMGQQRVREIYDHAIAHDYRFFSYGDSSLLLP

SEQ ID NO: 68336 - protein, 345 aa, Litoreibacter meonggei
  misc_feature (1)..(345): tr|A0A497VH96|A0A497VH96_9RHOB S-adenosylmethionine:tRN A ribosyltransferase-isomerase OS=Litoreibacter meongge i OX=1049199 GN=queA PE=3 SV=1
MKLSDFDFALPEHLIATRPAVPRSASKLLVATPDRIEDRVVTDLVDYLRAGDVLVLNDTKVIPARLFGHRDRDGNVSKMEVTLLSPTSNGTWRALVKPLRKVRDGEVITFAAGLEAELLSRDDGQAVLGFNLEGQAFDDALAVAGQMPLPPYIAAKRVADTQDKTDYQTVFARTTGAVAAPTASLHFDTELLLRLTESGIELAHVTLHVGAGTFLPVKVDDVKTHKMHAEWGQVSEDAVARINAAKAEGRRVIPVGTTALRLIESAATKAGQIVPWQGETDIFIYPGFKFQIADALMTNFHLPKSTLMMLVSALMGQERVRQIYDHAIEHEYRFFSYGDSSLLLP

SEQ ID NO: 68337 - protein, 349 aa, Litoreibacter ponti
  misc_feature (1)..(349): tr|A0A2T6BI63|A0A2T6BI63_9RHOB S-adenosylmethionine:tRN A ribosyltransferase-isomerase OS=Litoreibacter ponti O X=1510457 GN=queA PE=3 SV=1
MKLDEFDFALPEQLIATRPAVPRSSARLLVAGPEAIEDRVVTDLPDYLRRGDLLVLNDTKVIPARLFGHRERDGNVSKMEVTLLSPTPSGDWRALIKPLRKVRDGERITFAVGLDATVLGREDGQAELSFNLQGADFDAALEIAGQMPLPPYIAAKRAADARDKTDYQTVWARETGAVAAPTASLHFDAPLLEALAAKGVQFAHVTLHVGAGTFLPVKVEDVTTHKMHAEWGHVSAAAAAQINATKDAGGRVIPVGTTALRLIESAATGPGQIAPWQGETDIFIYPGFEFQVADGLMTNFHLPKSTLMMLVSALMGQDRIREIYDHAVAQAYRFFSYGDSSLLLPNDAR

SEQ ID NO: 68338 - protein, 351 aa, Litoreibacter sp.
  misc_feature (1)..(351): tr|A0A5B8ITU0|A0A5B8ITU0_9RHOB S-adenosylmethionine:tRN A ribosyltransferase-isomerase OS=Litoreibacter sp. LN3 S51 OX=2599296 GN=queA PE=3 SV=1
MHLSDFDFDLPEDLIATRPAKPRSSARMLVAQGGGIQDRIVNELPGILRPGDRLVLNDTKVLPARLSGVRRRAGPDGEGIARIEVTLLDPQSDGRWTALIKPLRKLRDGEEIEFSNTLRAEMLSRDDQGVALLRLSEDGDALEKALDESGMMPLPPYIASKRAADDQDKLDYQTVFAKRTGAVAAPTASLHFDEPLLAALAARGVEFTNVTLHVGAGTFLPVKVDDPRHHKMHAEWGEVSAQAADEIAQTKANGGRVIPVGTTALRLIETAARDSGQVEPWSAPTDIFIYPGFNFHVADALMTNFHLPKSTLMMLVSAFMGTERIREIYAHALQQKYRFFSYGDASLLIPD

SEQ ID NO: 68339 - protein, 349 aa, Litoricolaceae bacterium
  misc_feature (1)..(349): tr|A0A520S3F1|A0A520S3F1_9GAMM S-adenosylmethionine:tRN A ribosyltransferase-isomerase OS=Litoricolaceae bacter ium OX=2510333 GN=queA PE=3 SV=1
MKRHDFSYQLPEDLVASAPLDNRTDSRLMVIHPAQPIMHQHVSDLPSMIRPGDVVVANNTRVFPARLFGAKESGGRAEVMIERLISDNRARAFVKASKSPKIGSVLSMDGGFELTITGRDGDLFLLDSDPSVCILDMAEAYGHVPLPPYIKRDDTATDKERYQTVFAKDAGAVAAPTAGLHLDQSLIEEIKVRGAHWCEITLHVGAGTFTPVRVDDLSEHQMHGEWYHISDDAESIIQSAKAEGRRIFAIGTTTMRCLEGSAAVNGGQIRAGSSETSIFITPGYKFNVIDVLFTNFHLPESTLLMLVSAFGGFDRVLAAYQEAVQARYRFFSYGDACLIIRDPEAGGAS

SEQ ID NO: 68340 - protein, 353 aa, Litoricolaceae bacterium
  misc_feature (1)..(353): tr|A0A520S777|A0A520S777_9GAMM S-adenosylmethionine:tRN A ribosyltransferase-isomerase OS=Litoricolaceae bacter ium OX=2510333 GN=queA PE=3 SV=1
MRSPLKRQDFAYQLPEDLIASQPLDNRTDSRLMVIHPGQPFAHRQVSDLPSLIRAGDVVVANNTRVFPARLFGAKASGGRIEVMIERLLSEHAVRAFVKASKSPKDGAVLHMDGGFELTITGRDGDLFLLESDPSLRILEMAEAHGHIPLPPYIKRDDTASDRERYQTVFAKDSGAVAAPTAGLHIDESMIQAIKEQGATWCEVTLHVGAGTFNPVRVDDLSEHQMHGEWYNISPEVCETIQEARATGRRIIAIGTTTMRCLEGSAAANGGQIKAGSDETSIFITPGYQFNVIDMLFTNFHLPESTLLMLVSAFGGYERMMAAYQEAVREGYRFFSYGDACLMMRDPEASHAS

SEQ ID NO: 68341 - protein, 371 aa, Litorilinea aerophila
  misc_feature (1)..(371): tr|A0A540VGS8|A0A540VGS8_9CHLR S-adenosylmethionine:tRN A ribosyltransferase-isomerase OS=Litorilinea aerophila OX=1204385 GN=queA PE=3 SV=1
MKTALFDYDLPPELIAQEPAEPRDSSRLMVLHRADGRIEHRRFRDIGDYLRAGDLLVANDSRVIPARLHGHKSTGGKVEIFLLRKLDQAGSEWECLTRGRNLVAGVQVQVEPLASGEEEPAPPVEATIVAVNPSGTRVVRFAQPISPYLHQLGEIPLPPYITAYQGDRERYQTVYSRPEGSVAAPTAGLHFTPELLVALRKQGVGFETVTLHVGLDTFKPVEAEEVEKHTIHTEWAELSADTARRINQVSLQGGRIVAVGTTTVRTLEWAATGAQGIDPYDPQACPWQRTAAFAGPVDLYIYPGYRFRAVDGLITNFHLPRSSLLMLVSAFVGQHHPEDLDWGRRTLLAAYEVAKQEGYRFYSFGDAMLIL

SEQ ID NO: 68342 - protein, 353 aa, Litorilituus sediminis
  misc_feature (1)..(353): tr|A0A4P6P5M0|A0A4P6P5M0_9GAMM S-adenosylmethionine:tRN A ribosyltransferase-isomerase OS=Litorilituus sedimini s OX=718192 GN=queA PE=3 SV=1
MRVSDFSFNLPEELIARYPKADRTGSRLMTLDGNSGRIQDLGFVDIIEQLNAGDLLVFNNTRVIPARMFGQKSTGGKIEVLVERMLDQHSVLAHIRSSKSPKVDAELLFAGKENAEIKATMVARHGALFELKFHGEQGVLNILEDIGHMPLPPYIDRPDEDSDKERYQTVYNEKPGAVAAPTAGLHFDEAILEKIKAKGVELAFVTLHVGAGTFQPVKVDEIADHIMHAEYVEVPDEVVQQIQNTKARGGRIVAVGTTSVRSLESAAKAASDKGEALSAFYGDTDIFITPGYQFKLVDALLTNFHLSESTLLMLVSAFAGYEHIMPAYQHAIKEKYRFFSYGDAMFLTKQTSA

SEQ ID NO: 68343 - protein, 352 aa, Litorilituus sp.
  misc_feature (1)..(352): tr|A0A502LA85|A0A502LA85_9GAMM S-adenosylmethionine:tRN A ribosyltransferase-isomerase OS=Litorilituus sp. RZ04 OX=2491017 GN=queA PE=3 SV=1
MRVSDFSFDLPEELIARYPMANRTGSRLMTLNGDTGERNDLNFTDIIEQLNAGDLLVFNNTRVIPARMYGQKSTGGKIEVLVERIVDQHTALAHIRASKSPKVGAELVLQNESGASVNATMVGRQGALFELKFHGDESVLTVLENIGHMPLPPYIDRPDEDSDKERYQTVYNEKPGAVAAPTAGLHFDEAILEKIKAKGVELAFVTLHVGAGTFQPVKVDEISDHIMHAEYVEVPADVVEQIRTTKASGGRVVAVGTTSVRSLESAAKTAKEQNQPLTEFYGDTDIFITPGYEFLVVDALLTNFHLSESTLLMLVSAFAGYEHIMPAYQHAIEQKYRFFSYGDAMFLTKKSI

SEQ ID NO: 68344 - protein, 350 aa, Litorimicrobium taeanense
  misc_feature (1)..(350): tr|A0A1H8YW50|A0A1H8YW50_9RHOB S-adenosylmethionine:tRN A ribosyltransferase-isomerase OS=Litorimicrobium taean ense OX=657014 GN=queA PE=3 SV=1
MNLSDFDFDLPEALIATRPVSPRSSARLLVAEGDQITDAQVFNLPDWLRPGDRLVLNDTKVIPARLSGTRRRMGPEGETEARIEATLLEPRAGGAWAALLKPLKKVREGEVIRFSDALSATLLAKEDGQAVLEFNLLGDDFDAALAQAGAMPLPPYIAAKRAADEQDKTDYQTIFARHSGAVAAPTASLHFDDALLAALRAKGVAFTHVTLHVGAGTFLPVKVDDVTTHKMHAEWGEVSATAAAEIAATKAAGGRVIPVGTTALRLIETAARGGQIAPWQGDTDIFIYPGFTFNVADALMTNFHLPKSTLMMLVSALMGQDTVRHIYAHAIAEGYRFFSYGDASLLIPAR

SEQ ID NO: 68345 - protein, 352 aa, Litorimonas taeanensis
  misc_feature (1)..(352): tr|A0A420WKR2|A0A420WKR2_9RHOB S-adenosylmethionine:tRN A ribosyltransferase-isomerase OS=Litorimonas taeanensi s OX=568099 GN=queA PE=3 SV=1
MDVSLFDFTLPEAAIALRPSVPRDSAKLLHVSAAGEFSDHRVSDLATLLNAGDVLVLNETKVFSAALKGVRPARSHGGGGAVTVDVNLHTPETDMTWRAFVRPAKRVREGDVLTFSDELKGVISDKREGGDVAITFECEGDLMASIDAAGEPPLPPYIARKRKPDAQDVEDYQTVYAQEAGSVAAPTAGLHFTPEVFQSLSDKGVELARLILHVGAGTFLPVKSEDTSAHKMHSERYTISDSTAAQINKAKAEGRRIVAVGTTSLRALESSVDEVGKVQSGSAETEIFLTPGSDFKVIDGLMTNFHLPKSTLFMLVSAIAGLDRMQSAYAYAIENNYRFYSYGDSSLIWKAD

SEQ ID NO: 68346 - protein, 352 aa, Loktanella atrilutea
  misc_feature (1)..(352): tr|A0A1M4T4E6|A0A1M4T4E6_9RHOB S-adenosylmethionine:tRN A ribosyltransferase-isomerase OS=Loktanella atrilutea OX=366533 GN=queA PE=3 SV=1
MKLSDFDFDLPDGLIATRPARPRTAARLLVATPDTMTDATVSDLGDWLRPGDRLVLNDTRVIPARLDGLRHRSGEAGETVARIEVTLLQPTPEGHWSALLKPLKKVRDGEEIVFGDALRATVTGRAEGQAILSFNLTGDAFDATLNSVGAMPLPPYIAALRPADEADRTDYQTAWAKHTGAVAAPTASLHFDAALLDRLAAKGVQFTHVTLHVGAGTFLPVKVDDIAEHRMHSEWGQVTPQAAEEINATRAAGGRIIPVGTTALRLIETAATERGVQPWEGPTDIFITPGFRFRAADALMTNFHLPKSTLMMLVSALMGRQRIRDIYEHAISSRYRFFSYGDASLLLPQGAD

SEQ ID NO: 68347 - protein, 353 aa, Loktanella fryxellensis
  misc_feature (1)..(353): tr|A0A1H7YS70|A0A1H7YS70_9RHOB S-adenosylmethionine:tRN A ribosyltransferase-isomerase OS=Loktanella fryxellens is OX=245187 GN=queA PE=3 SV=1
MKLSDFDFDLPDGLIATRPARPRTAARLLVATPDTLTDATVADLGLWLRPGDRLVLNDTKVIPARLDGVRHRSGEAGDTVARIEVTLLEPTPAGHWMALVKPLKKVRDGEEIVFGDALSARVVGRADGQAELAFDLTGDAFDAALAQVGAMPLPPYIAALRPADDADRDDYQTAWARTPGAVAAPTASLHFDADLLAALAGSGVTFTHVTLHVGAGTFLPVKVDDVTQHKMHSEWGQVTPQAAAEIAATKAAGGRIIPVGTTALRLIETAARSGTIAAWEGPTDIFITPGFRFRVADALMTNFHLPKSTLMMLVSALMGQDRIRAVYDHAIAERYRFFSYGDASLLLPHRDAS

SEQ ID NO: 68348 - protein, 352 aa, Loktanella salsilacus
  misc_feature (1)..(352): tr|A0A1I4BPJ1|A0A1I4BPJ1_9RHOB S-adenosylmethionine:tRN A ribosyltransferase-isomerase OS=Loktanella salsilacus OX=195913 GN=queA PE=3 SV=1
MKLSDFDFDLPEGLIATRPARPRTSARLLVATPDSITDAVVSDLGDWLRPGDRMILNDTKVIPARLEGLRHRSGEAGDTAARIEVTLLQPTPDAHWMALLKPLKKVRDGEEIVFGDDLRATVVGRSDGQAELQFNLTGDDFDAALLQVGAMPLPPYIAALRPADAADKEDYQTAWARHTGAVAAPTASLHFDAALLDQLAAKGVQFTHVTLHVGAGTFLPVKVDDVSEHKMHSEWGQVTQAAADQINATRAAGGRIIPVGTTALRLIETAATDDGVQAWEGPTDIFITPGFKFRAADALMTNFHLPKSTLMMLVSALMGQSRIRDVYKHAISSRYRFFSYGDASLLLPQGDA

SEQ ID NO: 68349 - protein, 351 aa, Loktanella sp.
  misc_feature (1)..(351): tr|A0A4Q3Y8T6|A0A4Q3Y8T6_9RHOB S-adenosylmethionine:tRN A ribosyltransferase-isomerase OS=Loktanella sp. IMCC34 160 OX=2510646 GN=queA PE=3 SV=1
MKLSDFDFDLSEDLIATRPARPRSSARLLLAVGDGIDDRHVFDLPDILRPGDRLVLNDTKVIPARLTGLRRRSGPEGETEARIEATLLEPRADGTWGALLKPLKKVRDGEVIVFSPDLSATVEGRADGQGHLRFNLTGEDFDTALAEAGAMPLPPYIAALRAPDEQDKQDYQTVWARNSGAVAAPTASLHFDEPLMAALAVRGVDLTHVTLHVGAGTFLPVKVDDIRDHKMHAEWGEVTEKAVADIMATKAAGGRVIPVGTTALRLIESAAVGGTLTPWRGETDIFITPGFTFNVADGLMTNFHLPKSTLMMLVSAFMGVDRIRRIYDHAVAGKYRFFSYGDASLLLPGGQ

SEQ ID NO: 68350 - protein, 354 aa, Loktanella sp.
  misc_feature (1)..(354): tr|A0A0F4RMH9|A0A0F4RMH9_9RHOB S-adenosylmethionine:tRN A ribosyltransferase-isomerase OS=Loktanella sp. S4079 OX=579483 GN=queA PE=3 SV=1
MKLSDFDFDLPEELIATRPARPRSSAKLLFARGQDISDRIVSDLVDILQPGDRLVLNDTKVIPARLSGQRFRNGENGLTHSKIEVTLLEPRANGDWAALIKPLRKIRDGEDIVFSDELSANVTGRADGQAFLRFNLTGDDFDVALAAVGAMPLPPYIAAKRPADEADKEDYQTYWARHSGAVAAPTASLHFDGPLLDALAERGVSFTHVTLHVGAGTFLPVKVDDVRDHKMHSEWGEVTPQAAAEINATKAAGGRVIPVGTTALRLIETAARDGAIAPWTGPTDIFIMPGFTFQVADGLMTNFHLPKSTLMMLVSALMGQDKIKQIYAHAIAAGYRFFSYGDASLLFPADTKSP

SEQ ID NO: 68351 - protein, 359 aa, Lonepinella koalarum
  misc_feature (1)..(359): tr|A0A5D1ZSI1|A0A5D1ZSI1_9PAST S-adenosylmethionine:tRN A ribosyltransferase-isomerase OS=Lonepinella koalarum OX=53417 GN=queA PE=3 SV=1
MLVSDFYFDLPDELIARYPKPDRTSSRLLQLNGQNGEIFHRTFADVLDLVNAGDLLVFNNTRVIPARMFGRKVSGGKVEVLVERVLSESTFLAHIRSSKAPKNEAVLVLGEDKLGENNGIAVTMLGRQGALFELEIADKNTAVLDVLNKIGHIPLPPYIDRPDEEADQERYQTVYNKIPGAVAAPTAGLHFDDELLAKLKAKGVNFAFVTLHVGAGTFQPVRVEKIEDHQMHAEYVEVPQDVVDAVLATKSAGKRVIAVGTTSVRSLESAALFAEEKGCSQIIEPYFSDTSIFIYPGKKFRVVDCLITNFHLPESTLIMLVSAFAGYENVMKSYRSAVENRYRFFSYGDAMFISKKVDV

SEQ ID NO: 68352 - protein, 359 aa, Lonepinella koalarum
  misc_feature (1)..(359): tr|A0A4R1KUR3|A0A4R1KUR3_9PAST S-adenosylmethionine:tRN A ribosyltransferase-isomerase OS=Lonepinella koalarum OX=53417 GN=queA PE=3 SV=1
MLVSDFYFDLPDELIARYPKPDRTSSRLLQLNGQNGEIFHRTFADVLDLVNAGDLLVFNNTRVIPARMFGRKVSGGKVEVLVERVLSESTFLAHIRSSKAPKNGAILVLGEDKLGENNGIAVTMLGRQGALFELEIADKNTAVLDVLNKIGHIPLPPYIDRPDEEADQERYQTVYNKIPGAVAAPTAGLHFDDELLAKLKAKGVNFAFVTLHVGAGTFQPVRVEKIEDHQMHAEYVEVSQDVVDAVLATKSAGKRVIAVGTTSVRSLESAALFAEEKGSSQIIEPYFSDTSIFIYPGKKFRVVDCLITNFHLPESTLIMLVSAFAGYENVMAAYKSAVENRYRFFSYGDAMFISKKVDV

SEQ ID NO: 68353 - protein, 348 aa, Longibacter salinarum
  misc_feature (1)..(348): tr|A0A2A8CWB7|A0A2A8CWB7_9BACT S-adenosylmethionine:tRN A ribosyltransferase-isomerase OS=Longibacter salinarum OX=1850348 GN=queA PE=3 SV=1
MKRSEFTYEFPEELTAEYPAEPRDSCRLMVLNREKERVEHHHFHELPDFYNPGDVIVVNNTKVYPARIYGKKKKTGAKIEVFLLRELNPESRLWDVMVDPARKIRIGNKLWFDDELSAEVIDNTTSRGRTIRLNFDGRNDDLYEKIRELGETPLPPYIKRDVESEDEDRYQTIFAEERGAVAAPTAGLHFTPELIERLKEKGVHICNITLHVGRGTFRPVGVEDLTKHRMDSEEFTIPKDTADKVNKALQSEENSVTAVGTTVVRTLESSLSASQLLKADHSWTDLFVYPPFEFKITERLITNFHRPESTLLMMTSAFAGYDFLFEAYEEAFEEGYQLFSFGDAMLIV

SEQ ID NO: 68354 - protein, 347 aa, Longibaculum muris; identical to SEQ ID NO: 64949
  misc_feature (1)..(347): tr|A0A4R3Z2P1|A0A4R3Z2P1_9FIRM S-adenosylmethionine:tRN A ribosyltransferase-isomerase OS=Longibaculum muris OX =1796628 GN=queA PE=3 SV=1

SEQ ID NO: 68355 - protein, 339 aa, Longilinea arvoryzae
  misc_feature (1)..(339): tr|A0A0S7BJ42|A0A0S7BJ42_9CHLR S-adenosylmethionine:tRN A ribosyltransferase-isomerase OS=Longilinea arvoryzae OX=360412 GN=queA PE=3 SV=1
MKTSDFDYPLPLERIAQTPVEPRHNSRLMVLRRDRTEIEHTVFYRVGEYLNPGDLLVINRTRVIPARIYALKTTGGRVELLLLRREDETTWEALVGGKGLLAGKRVTIPNGPQAEVIEVLEGSRRRIRFSAPVEGYLPSIGQMPLPPYIHTHLENQERYQTVYADRPGSAAAPTAGLHFTPELMGQLREQGVRFAEVTLHVGLDTFAPVTEDDPGEHKIHTEWCELNPETADLINATRKAGRRIIAVGTTSVRTLESAAQKAASGDAVAPFCGPTSIFILPGYTFGAVDGMITNFHLPKSTLIMLVSAFAGRERILAAYQEAIRLEYRFFSFGDAMLLL

SEQ ID NO: 68356 - protein, 348 aa, Longimonas halophila
  misc_feature (1)..(348): tr|A0A2H3P8M1|A0A2H3P8M1_9BACT S-adenosylmethionine:tRN A ribosyltransferase-isomerase OS=Longimonas halophila OX=1469170 GN=queA PE=3 SV=1
MKRSEFSYDYPKELIAEYPAEPRDSCRLMVVNRDDQTVEHTVFNQLPKYFNEGDVIVVNNTKVYPARLFGKKKKTGASIEVFLLRELNPESRLWDVMVDPARKIRIGNKLYFDRELSAEVIDNTTSRGRTLRLHFTGTNEELYAKIRELGQTPLPPYIDREVEEEDRDRYQTIFAEHRGAVAAPTAGLHFTPELIQALRDKGVHVAEVTLHVGRGTFRPVGVEDLTKHRMDSEQYTIPEETAEAVNRALRSEDNTVTAIGTTVVRTIESSLSANQMLKADSSWTDLFIYPPYDFQITDQLVTNFHRPESTLIMMVSAFAGYDFVMEFYQEAFDEEYRLFSFGDAMLIR

SEQ ID NO: 68357 - protein, 356 aa, Lonsdalea britannica
  misc_feature (1)..(356): tr|A0A1X3RYX4|A0A1X3RYX4_9GAMM S-adenosylmethionine:tRN A ribosyltransferase-isomerase OS=Lonsdalea britannica OX=1082704 GN=queA PE=3 SV=1
MRVADFSFELPESLIAHYPQAQRSGCRLLSLDGPSGETSLGIFSDLLDKLEPGDLLVFNNTRVIPARLFGRKASGGKLEVLVERVLDEHRVLAHVRASKAPKPGAELVLGEDESVAATMLSRQDALFEIRFDDPRDVLTILNDIGHIPLPPYIDRPDEDADRELYQTVYSQRPGAVAAPTAGLHFDEPLLAALRDKGIEMAFVTLHVGAGTFQPVRVDSIEDHVMHAEYAEVPQDVVDAVLACKARGNRVIAVGTTSVRSLESAAQASSEAMIAPFFGDTRIFIYPGYHYRVIDALVTNFHLPESTLIMLVSAFAGYRHTMNAYRQAVAEQLRFFSYGDAMFITRNPEAEQEHVGE

SEQ ID NO: 68358 - protein, 356 aa, Lonsdalea iberica
  misc_feature (1)..(356): tr|A0A1X3RX76|A0A1X3RX76_9GAMM S-adenosylmethionine:tRN A ribosyltransferase-isomerase OS=Lonsdalea iberica OX= 1082703 GN=queA PE=3 SV=1
MRVADFSFELPESLIAHYPQAQRSGCRLLSLDGPSGETSLGIFSDLLDKLEPGDLLVFNNTRVIPARLFGRKASGGKLEVLVERVLDEHRVLAHVRASKAPKPGAELVLGEDESVVATMLSRQDALFEIRFDDPRDVLTILNDIGHIPLPPYIDRPDEDADRELYQTVYSQRPGAVAAPTAGLHFDEPLLAALRDKGIEMAFVTLHVGAGTFQPVRVDSIEDHVMHAEYAEVPQDVVDAVLACKARGNRVIAVGTTSVRSLESAAQASSDAIIAPFFGDTRIFIYPGYHYRVIDALVTNFHLPESTLIMLVSAFAGYRHTMNAYRRAVAEQLRFFSYGDAMFITRNPEAEQEHVGE

SEQ ID NO: 68359 - protein, 356 aa, Lonsdalea populi
  misc_feature (1)..(356): tr|A0A3N0UHT4|A0A3N0UHT4_9GAMM S-adenosylmethionine:tRN A ribosyltransferase-isomerase OS=Lonsdalea populi OX=1 172565 GN=queA PE=3 SV=1
MRVADFSFELPESLIAHYPQAQRSACRLLSVDGPSGETSLGIFSDLLDKLEPGDLLVFNNTRVIPARLFGRKASGGKLEVLVERVLDEHRVLAHVRASKAPKPGAELVLGEDESVAATMLSRQDALFEIRFDDPRDVLTILNDIGHIPLPPYIGRPDEEADRELYQTVYSQRPGAVAAPTAGLHFDEPLLAALRKKGIEMAFVTLHVGAGTFQPVRVDSIEDHVMHAEYAEVPQDVVDAVLACKARGNRVIAVGTTSVRSLESAAQTCSDAVIAPFFGDTRIFIYPGYHYRVIDALVTNFHLPESTLIMLVSAFAGYRHTMNAYRQAVAEQLRFFSYGDAMFITRNPKAEQEHVGE

SEQ ID NO: 68360 - protein, 356 aa, Lonsdalea quercina
  misc_feature (1)..(356): tr|A0A1H3WBE5|A0A1H3WBE5_9GAMM S-adenosylmethionine:tRN A ribosyltransferase-isomerase OS=Lonsdalea quercina OX =71657 GN=queA PE=3 SV=1
MRVADFSFELPESLIAHYPQAQRSGCRLLSLDGPSGETSLGIFSDLLDKLEPGDLLVFNNTRVIPARLFGRKASGGKLEVLVERVLDAHRVLAHVRASKAPKPGAELVLGEDESVAATMLSRQDALFEIRFDDPRDVLTILNDIGHIPLPPYIDRPDEDADRELYQTVYSQRPGAVAAPTAGLHFDEPLLAALRDKGIEMAFVTLHVGAGTFQPVRVDSIEDHVMHAEYAEVPQDVVDAVLACKARGNRVIAVGTTSVRSLESAAQASSEAIIAPFFGDTRIFIYPGYHYRVIDALVTNFHLPESTLIMLVSAFAGYRHTMNAYRLAVAEQLRFFSYGDAMFITRNPGAEQESVGE

SEQ ID NO: 68361 - protein, 339 aa, Lucifera butyrica
  misc_feature (1)..(339): tr|A0A498R0L5|A0A498R0L5_9FIRM S-adenosylmethionine:tRN A ribosyltransferase-isomerase OS=Lucifera butyrica OX= 1351585 GN=queA PE=3 SV=1
MQLSDFDYFLPQDLIAQRPCEPRDHSRLLVLDRQTGRIEHKSFYNLKQYLLPGDTLVFNDTRVIPARLIGSRLDSGGKVEVFLLNRHSGNEWETLVKPGKKARPGTVVQFSEELSCEILAATDYGGRIVRFVFEGIFEEILDRLGETPLPPYIKEKLSDKERYQTVYARERGSAAAPTAGLHFTRELMQELATQGINLAFITLHVGLGTFRPVKVADIEQHVMHKEYYSVSAQTAALINETRQKGRKVIAVGTTAVRTLETAGSSGTLESKSGWTDIFIYPGYPFKIVDRMITNFHLPQSTLLMLVSAFAGRDAVLAAYEEAVRQKYRFFSFGDAMLIL

SEQ ID NO: 68362 - protein, 387 aa, Lujinxingia litoralis
  misc_feature (1)..(387): tr|A0A328C8I4|A0A328C8I4_9DELT S-adenosylmethionine:tRN A ribosyltransferase-isomerase OS=Lujinxingia litoralis OX=2211119 GN=queA PE=3 SV=1
MSEDAKITDQGDDIWTHQTDTIDLNSVHAYDYALPPELIAATPAPRREEARLLVSRRGEKDIEHTRFKHLTEHLRAGDLLIFNDTRVVPARLEAFKDTGGRVELFVLDVEEPSEQERWTRPATGLLRLRCMTRSSKALRPGMVLTVTRGSDTWPVTLSEAGGGRALVELSWEANALAFLERFGRIPLPPYIEQRRREADDAIEVDDAVRYQTVLASEPGAVAAPTAGLHFSEELLARLEAMGVGRATLTLTVGAGTFKPVTSERLEDHPMHAEAYRIPEGLRERIAACKAAGGRVIAVGTTSARALEAEARRETPLSPGWRETSIFIRPGDSFQMCDGLITNFHLPRSTLLALVATFVGYPTLRRIYSQAVARGYRFYSYGDSSLLL

SEQ ID NO: 68363 - protein, 358 aa, Luminiphilus syltensis
  misc_feature (1)..(358): tr|B8KXC3|B8KXC3_9GAMM S-adenosylmethionine:tRNA ribosy ltransferase-isomerase OS=Luminiphilus syltensis NOR5-1 B OX=565045 GN=queA PE=3 SV=1
MLRQDFQFDLPGELIAQEPLAERSSSRLLVLEGASGDLFHKQFTDIVDLINPEDLLVFNNTKVLPARLFGVKQTGGRVEILIERLRADGSAVAQVRASKTPRDGAAIYITSDEESDKSEFYVRVVGREGSMYLLEPEVGDWREIMRRFGHMPLPPYIDRPDNESDQDRYQTVYASKEGAVAAPTAGLHFDRNLLRDLSAKGVASVEVTLHVGAGTFQPVRAERIEDHHMHAETIDVGLTVCEAVDACRDGGGRVVAVGTTAVRSLEAAAAAGSLVPFHGDTDIFLYPGRPFRVVDAMITNFHLPESTLIMLVSAFAGREHVLAAYRAAVSQRYRFFSYGDAMFITAHPEARREGLLEI

SEQ ID NO: 68364 - protein, 349 aa, Lunatimonas lonarensis
  misc_feature (1)..(349): tr|R7ZPA7|R7ZPA7_9BACT S-adenosylmethionine:tRNA ribosy ltransferase-isomerase OS=Lunatimonas lonarensis OX=123 2681 GN=queA PE=3 SV=1
MKLSDFKFEVPKKLISLYPTENRDESRLMVVHKATGKIDHRVFKEVIEYFNDGDVFVTNNTKVFPARLYGNKEKTGAKIEVFLLRELNRELRLWDVLVDPARKIRVGNKLYFGDSDLVAEVIDNTTSRGRTIRFLFDGTDEEFFKTIDVLGETPILKEYIEREVDSSDRDRYQTIYAEHVGAVAAPTAGLHFTPHLLKRLEIKGVSVSPITLHIGLGTFRQVDVEDLTKHKMDSENYDIPERTVELVNRALDGKKRVVAVGTTSLKTIESSVTANGRLKASAGWTDKFIIPPYDFKIANSLITNFHLPESTLLMTTAAFGGYDLVMKAYQEAIKEKYRFFSYGDAMLII

SEQ ID NO: 68365 - protein, 403 aa, Lunatimonas lonarensis
  misc_feature (1)..(403): tr|R7ZQV7|R7ZQV7_9BACT S-adenosylmethionine:tRNA ribosy ltransferase-isomerase OS=Lunatimonas lonarensis OX=123 2681 GN=queA PE=3 SV=1
MADRPNLPKSSFWYELPEDRIAKYPLERRDASNLLWYKDQTIRHHRFSDLPDLLPPDSLMVFNNTKVIPARLLFQRETGSWIEIFLLKPIEPSTVIQTAMEETASTTWETMIGNLKRWKDGERLVQTVRLAEKNVQLTATLRSREERLVQLEWDSPFPFASIVEAAGKVPLPPYLNREATDADKETYQTVYSAVKGAVAAPTAGLHFTPQILDSIKSKGIEMDYLTLHVGAGTFQPISVENATEHAMHGEQMVFTADNLRALIHTKGKIVAVGTTSIRSLESLYWFGIKLMREKETTFVIPQDYPYRNHPNLPPYKEVFSFVLGWMEKNNKKKLDGETAIYIYPGYTFRVVSGLVTNFHQPGSTLILLIAAFTGENWREIYRQALENRYRFLSYGDSSLLWRE

SEQ ID NO: 68366 - protein, 344 aa, Luteibacter pinisoli
  misc_feature (1)..(344): tr|A0A4Y5Z350|A0A4Y5Z350_9GAMM S-adenosylmethionine:tRN A ribosyltransferase-isomerase OS=Luteibacter pinisoli OX=2589080 GN=queA PE=3 SV=1
MKKSDFDFDLPPDLIAQMPLERRSGSRLLVLDVAGRSKANRKFYDLPDLVQPGDLMVFNDTRVLPARLYGRKDSGGAVEILIERVTGAHEARAQLGVSKKPKEGGIIELADGTRITVMGRDGEFFNLRFDIEEPLERLLSRLGEMPLPPYIERSVDDTDMERYQTVFAREPGAVAAPTAGLHFDEALLEKLRAKGVDFGYVTLHVGAGTFQPMRAENVQDHVMHREWLNVGAELVEKIRATRAAGHRVIAVGTTVVRALESATVEGVLRPFAGETQIFIFPGYKITSVDALVTNFHLPQSTLLMLVSALAGKEVILDAYRYAVLQRYRFFSYGDAMLILPPKAP

SEQ ID NO: 68367 - protein, 344 aa, Luteibacter rhizovicinus
  misc_feature (1)..(344): tr|A0A0G9HA26|A0A0G9HA26_9GAMM S-adenosylmethionine:tRN A ribosyltransferase-isomerase OS=Luteibacter rhizovici nus DSM 16549 OX=1440763 GN=queA PE=3 SV=1
MKKSDFDFDLPPDLIAQAPLARRSGSRLLVVDVGAHTKKDRKFYELPEMLQPGDLLIFNDTRVLPARLYGRKDTGGEVEILIERVTGPHEARAQLGVSKKPKEGGRIELADGSMITVLGREGEFFLLRFESEEPLERLLSRLGEMPLPPYIERGAEEADNERYQTVFAREPGAVAAPTAGLHFDEELLAKLRARGVEMGYVTLHVGAGTFQPMRAEDVRDHVMHREWLNVGAGLVEKIRETRAAGGRVVAVGTTVVRALESATVEGVLRPFAGETQIFIFPGYKITSVDALITNFHLPQSTLLMLVSALAGKEAILESYRYAVLQRYRFFSYGDAMLIVPSKTS

SEQ ID NO: 68368 - protein, 360 aa, Luteibacter rhizovicinus
  misc_feature (1)..(360): tr|A0A4R3YU52|A0A4R3YU52_9GAMM S-adenosylmethionine:tRN A ribosyltransferase-isomerase OS=Luteibacter rhizovici nus OX=242606 GN=queA PE=3 SV=1
MSDNAAPFVSPGFSVKKSDFDFDLPPELIAQAPLAERSGSRLLLLDVATGTRENRLFRDLPDLLQPGDLLVFNDTRVLPARLYGHKESGGAVEILIERVTGTHEARAQLGVSKKPKAGGRIVLADGSIATVLGRDGEFFMLRFETQEPLEKVLLRLGEMPLPPYIERSADQNDTERYQTVFAREPGAVAAPTAGLHFDESLLERIRALGVDMGYVTLHVGAGTFQPMRADDVRDHVMHREWLNVGAGLVEQIRATRAAGGRVIAVGTTVVRALESATVDGVLRPFAGETQIFIFPGYRITSVDGLVTNFHLPQSTLLMLVSALAGKETILDAYRFAVAERYRFFSYGDAMLILPRRPLSA

SEQ ID NO: 68369 - protein, 359 aa, Luteibacter sp.
  misc_feature (1)..(359): tr|A0A1T5BAW3|A0A1T5BAW3_9GAMM S-adenosylmethionine:tRN A ribosyltransferase-isomerase OS=Luteibacter sp. 22Cru b2.1 OX=1283288 GN=queA PE=3 SV=1
MGDNPHPLPDVALAVKKSDFDFELPPDLIAQAPLARRSGSRLLVVDVAARSKKDRKFDELPEMVRPGDLLVFNDTRVLPARLYGRKESGGAVEILIERVTGPHEARAQLGVSKKPKEGGRIELADGSMITVLGREGEFFLLRFESEEPLERLLSRLGEMPLPPYIERTADQSDMERYQTVFAREPGAVAAPTAGLHFDEHLLQRLRDVGVDMGYVTLHVGAGTFQPMRADDVRDHVMHREWLNVGAALVEKIRATRAAGGRVIAVGTTVVRALESATVEGVLRPFAGETQIFIFPGYKITSVDALITNFHLPQSTLLMLVSALAGKETILDAYRYAVLQRYRFFSYGDAMLIYPAATPA

SEQ ID NO: 68370 - protein, 347 aa, Luteibacter sp.
  misc_feature (1)..(347): tr|A0A1I0NHG4|A0A1I0NHG4_9GAMM S-adenosylmethionine:tRN A ribosyltransferase-isomerase OS=Luteibacter sp. 329MF Sha OX=1798239 GN=queA PE=3 SV=1
MKRSDFDFDLPPELIAQAPLARRSGSRLLVVDVEAHTKKDRRFTDLPEMLRPGDLLVFNDTRVLPARLYGRKESGGAVEILIERVTGAHEARAQLGVSKKPKEGGRIELADGSMVTVLGREGEFFLLRFEGDEPLERLLSRLGEMPLPPYIERGAEEADKERYQTVFAREPGAVAAPTAGLHFDEELLERLRARGVETGYVTLHVGAGTFQPMRADDIRDHVMHREWLNVGAALVEKIRATRAAGGRVVAVGTTVVRALESATVEGVLRPFAGETQIFIFPGYRITSVDALITNFHLPQSTLLMLVSALAGKEAIFDAYRYAVLQRYRFFSYGDAMLILPKPATPAA

SEQ ID NO: 68371 - protein, 342 aa, Luteibacter yeojuensis
  misc_feature (1)..(342): tr|A0A0F3KAT6|A0A0F3KAT6_9GAMM S-adenosylmethionine:tRN A ribosyltransferase-isomerase OS=Luteibacter yeojuensi s OX=345309 GN=queA PE=3 SV=1
MKKSDFDFDLPPDLIAQAPLERRSGSRLLVVDVGARSKANRKFYELPDLINPGDLLVFNDTRVLPARLYGRKDSGGAVEILIERVTGAREARAQLGVSKKPKEGGIIELADGTRITVLGRDGEFFNLRFEIDEPLERLLGRLGEMPLPPYIERSADDTDMERYQTVFAREPGAVAAPTAGLHFDEALLEKLRARGVDFGYVTLHVGAGTFQPMRAENVHDHVMHREWLNVGAELVEKIRATRAAGGRVIAVGTTVVRALESATVEGVLRPFAGETQIFIFPGYKITSIDALVTNFHLPQSTLLMLVSALAGKEAILDAYRYAVLQRYRFFSYGDAMLIIPPR

SEQ ID NO: 68372 - protein, 345 aa, Luteibacter yeojuensis
  misc_feature (1)..(345): tr|A0A561HEK5|A0A561HEK5_9GAMM S-adenosylmethionine:tRN A ribosyltransferase-isomerase OS=Luteibacter yeojuensi s OX=345309 GN=queA PE=3 SV=1
MKKSDFDFDLPPELIAQAPLARRSGSRLLVVDVEARSKANRKFHELPDLVRPGDLLVFNDTRVLPARLYGNKESGGAVEILIERVTGAHEARAQLGVSKKPKEGGRIVLADGSLITVLGREGEFFKLRFEGDEPLERTLSRLGEMPLPPYIERGAGEEDKERYQTVFAREPGAVAAPTAGLHFDEALLAQLREKGVDFGYVTLHVGAGTFQPMRADDVRDHVMHREWLNVGASLVEKIRATREAGGRVIAVGTTVVRALESATVDGVLRPFAGETQIFIFPGYRITSIDALITNFHLPQSTLLMLVSALAGKEAILDAYRYAVLQRYRFFSYGDAMLILPPKAPA

SEQ ID NO: 68373 - protein, 349 aa, Luteibaculum oceani
  misc_feature (1)..(349): tr|A0A5C6VJR7|A0A5C6VJR7_9FLAO S-adenosylmethionine:tRN A ribosyltransferase-isomerase OS=Luteibaculum oceani O X=1294296 GN=queA PE=3 SV=1
MKLSQFKLDLPKELIATHPTIDREDSRLMVVDRKSGKIEHKTFKDIINYFDDKDVFILNNTKVFPARLYGNKEKTGAKIEVFLLRELNRESLLWDVLVDPARKIRIGNKLYFGEDDSLVAEVIDNTTSRGRTLRFLYDGPHEEFKKTIMALGETPIPKYIDREVEPEDAERYQTVYAKHEGAVAAPTAGLHFSKNLLKRLEIKGINFAEVTLHVGLGTFRPVEVEDLTKHKMDSEQVIIPSATSNMVNEAIENRRKVCAVGTTVMRAIESSVSSNGRLNPINDWTNKFIFPPYEFSIADSMVTNFHMPESTLLMMVAAFAGYDLTMEAYQEAIKEKYRFFSYGDAMLIL

SEQ ID NO: 68374 - protein, 385 aa, Luteibaculum oceani
  misc_feature (1)..(385): tr|A0A5C6VBL0|A0A5C6VBL0_9FLAO S-adenosylmethionine:tRN A ribosyltransferase-isomerase OS=Luteibaculum oceani O X=1294296 GN=queA PE=3 SV=1
MLNLKDYHFTLPDSRIAKHPPKERGNSKLLSYNKGIIEHLAFRDLVGQISSDATLFFNDTKVIPARIFLRKPTGALIEIFLLEPLKPSKAHEEVMSTTNTCTWKCLIGNAKKWALNTSLKHESINFTSTRTGDNEVTFTWEGCTFSEILTEIGKIPLPPYIQREVEENDKNRYQTVYSKIDGAVAAPTAGLHFTEEILEELKGKGVKIEYLTLHVSAGTFQPIKTDDISEHPMHNEQVLISKSSIENLLNSKQIIAVGTTSMRTLESLYWFGVKLHNGENDFFIKKDDPYRLKPIYKEEAINKVLAYMEEKQIEKLTGQTEIFLYPGYNFHICDGLVTNFHMPGSTLILLVAAFIGEDWRKVYQEALDHDYRMLSYGDSSLLLPG

SEQ ID NO: 68375 - protein, 345 aa, Luteimonas aestuarii
  misc_feature (1)..(345): tr|A0A4R5TYB7|A0A4R5TYB7_9GAMM S-adenosylmethionine:tRN A ribosyltransferase-isomerase OS=Luteimonas aestuarii OX=453837 GN=queA PE=3 SV=1
MKKSDFNYELPPELIAQAPLPERSASRMLVVPPGDEAFVDAHVRDLVEWLRPGDLLVFNDTRVIPARLFGQKDTGGRVEILIERLLPGNEVRAQVGASKSPKPGGRIALDGGGEAEVLGRDGEFYHLRFHVEGALESWLLKVGRLPLPPYIRREPGRDDDERYQTVFARNVGAVAAPTAGLHFDDALLAALRERGVQSGHVTLHVGAGTFQPVRVDDVREHAMHSEWLNVGAELVAQVRRTREAGGRVVAVGTTVVRALESAMHAGELHPFAGETRIFIFPGYRVRSVDALLTNFHLPESTLLMLVSAFAGKDRIFAAYAHAVRERYRFFSYGDAMLLFPQASTG

SEQ ID NO: 68376 - protein, 344 aa, Luteimonas cucumeris
  misc_feature (1)..(344): tr|A0A562LBJ7|A0A562LBJ7_9GAMM S-adenosylmethionine:tRN A ribosyltransferase-isomerase OS=Luteimonas cucumeris OX=985012 GN=queA PE=3 SV=1
MKKTDFHYDLPAELIAQTPLPERSASRLLCVPPAPEPLADQHVRDLPQWLQPGDLLVFNDTRVIPARLLGTKSSGGRVEILIERLLPGNEARAQIGASKSPKPGGRIALDAGGEVEVLGRDGEFYLLRFHVDDPLESWLLRAGRLPLPPYIQREPDADDAERYQTVFARAVGAVAAPTAGLHFDEALLQALRERGVQFGHVTLHVGAGTFQPMRVDDVREHRMHSEWLNVGAELVEQARRTRAAGGRIIAVGTTVVRALESAMHDGALLPFAGETRIFIFPGYRIRSVDALLTNFHLPESTLLMLVSAFAGRERVFAAYAHAVRERYRFFSYGDAMLLFPETSK

SEQ ID NO: 68377 - protein, 342 aa, Luteimonas marina
  misc_feature (1)..(342): tr|A0A5C5TW84|A0A5C5TW84_9GAMM S-adenosylmethionine:tRN A ribosyltransferase-isomerase OS=Luteimonas marina OX= 488485 GN=queA PE=3 SV=1
MKKSDFHYELPPELIAQAPLPERSASRLLVVPPGDAPFVDAQVRALGDWLRPGDLLVFNDTRVIPARLFGQKESGGRVEILIERLLANNEARAQVGASKAPKPGSRIVLDGGGEAEVLGRDGEFYHLRFRVEGALESWLLKAGRLPLPPYIRREPGQDDAERYQTVFAREVGAVAAPTAGLHFDDALLAALRERGVAFGHVTLHVGAGTFQPVRVDDLREHAMHGEWLNVGPELVAQVRRTREAGGRVVAVGTTVVRALESAMKDGELHAFAGETRIFIFPGYRIRSVDALLTNFHLPESTLLMLVSAFAGKDRIFAAYAHAVRERYRFFSYGDAMLLFPQP

SEQ ID NO: 68378 - protein, 344 aa, Luteimonas sp.
  misc_feature (1)..(344): tr|A0A344J5V4|A0A344J5V4_9GAMM S-adenosylmethionine:tRN A ribosyltransferase-isomerase OS=Luteimonas sp. 83-4 O X=2172536 GN=queA PE=3 SV=1
MKKSDFHFDLPPALIAQAPLPERSASRLLLVPPGDAPFEDRGIRDLPDLLREGDLLVFNDTRVIPARLFGTKETGGRVEILIERVLPGNEARAQVGASKTPKPGSRITLDAGGEVEVLGRDEAFHHLRFHVDAPLDKWLVDAGRLPLPPYIERVPDAADAERYQTVFAREPGAVAAPTAGLHFDEALLEALRAKGVEFGHVTLHVGAGTFQPMRVDDVGDHVMHSEWLNVGAELVQQVRRTRARGGRVIAVGTTVVRSLESAMRDGELQPFAGETRIFIFPGYRIESVDAMVTNFHLPESTLLMLVSAFAGRERILDAYAHAVDARYRFFSYGDAMLLWGAPDA

SEQ ID NO: 68379 - protein, 350 aa, Luteimonas sp.
  misc_feature (1)..(350): tr|A0A0H1AR11|A0A0H1AR11_9GAMM S-adenosylmethionine:tRN A ribosyltransferase-isomerase OS=Luteimonas sp. FCS-9 OX=1547516 GN=queA PE=3 SV=1
MKKSDFHFDLPEELIAQAPLAERSASRLLVVPPADAAFDDRHVRDLPDLLQPGDLLVFNDTRVIPARLFGHKDSGGRVEILIERLLPGNEARAQIGASKAPRPGGRIVLDGGGHAEVLARDEGFYHLRFEVDGALESWLLQAGRMPLPPYIRREPGVDDAERYQTVFAREVGAVAAPTAGLHFDDALLSRLRARGVDFGHVTLHVGAGTFQPMRVDDIREHRMHSEWLNVGAELVAQIRRTRASGGRVVAVGTTVVRALESASVDGELHPFAGETRIFIFPGYRIRSVDAMVTNFHLPESTLLMLVSAFAGRDRILAAYDHAVRARYRFFSYGDAMLLWSRDSGFGSGDS

SEQ ID NO: 68380 - protein, 346 aa, Luteimonas terrae
  misc_feature (1)..(346): tr|A0A4R5UC88|A0A4R5UC88_9GAMM S-adenosylmethionine:tRN A ribosyltransferase-isomerase OS=Luteimonas terrae OX= 1530191 GN=queA PE=3 SV=1
MKKSDFHFDLPEHLIAQAPLAERSASRLLVVPPGQGSFDDRQVRDLPDLLQPGDLLIFNDTRVIPARLFGQKDSGGRVEILIERLLPDNEARAQIGASKSPRPGGRIQLDAGGSAEVISRDEGFYHLRFELDDTLESWLLKAGRMPLPPYIRREPGQDDAERYQTVFAREVGAVAAPTAGLHFDDALLARLRERGVQFGHVTLHVGAGTFLPMRVEDVREHRMHSEWLNVGAELVAQIRRTREAGGRVIAVGTTVVRALESASVDGELHPFAGETQIFIFPGYRIRSVDAMVTNFHLSESTLLMLVSAFAGKDRVFAAYDHAVQAEYRFFSYGDAMLLWGAHAPAA

SEQ ID NO: 68381 - protein, 352 aa, Luteipulveratus halotolerans
  misc_feature (1)..(352): tr|A0A0L6CMC1|A0A0L6CMC1_9MICO S-adenosylmethionine:tRN A ribosyltransferase-isomerase OS=Luteipulveratus halot olerans OX=1631356 GN=VV01_19960 PE=3 SV=1
MTLLDTHPTTRFRAPDDTTAPAPAEARGLTRDGVRLLVASADGIHHGRFRDLPDELGPGDLVVVNNSATTAAEIDGWRTAHGRVVVHAATPLDDGTWVIELRTAPDAAAPVLDAVAGEHIEVSTLVLTLLEPYPRADSSPTGEGNRLWRVSVDGDLDDALTRHGRPIAYGYLDRAYPLSAYQAVFSTVPGSAEMPSAGRPFTDQIITRLIARGVGVAPITLHTGVSSQDAGEAPQAERFEVPDATARLVNATRATGGRVIAVGTTVTRALESAVAPGGRVVAARGWTERVISPADPARVVDGLITGWHNPEASHLLLVESIAGAELTQAAYDAAVAEGYLWHEFGDSALLLP

SEQ ID NO: 68382 - protein, 352 aa, Luteipulveratus mongoliensis
  misc_feature (1)..(352): tr|A0A0K1JDM6|A0A0K1JDM6_9MICO S-adenosylmethionine:tRN A ribosyltransferase-isomerase OS=Luteipulveratus mongo liensis OX=571913 GN=VV02_01200 PE=3 SV=1
MTLLTDHPTTHFRAPDDTTAPAPAEARGVARDGVRLMVAGAHGIDHVRFRDLPDHLAPGDLVVVNNSATIAGEVDGWRAGHGPVVVHAATPLDDGTWVIELRTAPDAASPVLDGISGEHVEVGHLVLTLIAPYPYEGSSPTGSGNRLWRVAVDGDLHDVLARHGRAIAYGYLDHAYPLSAYQSVFSTVPGSAEMPSAGRPFTDSIITRLVAGGIGVAPITLHTGVSSQDAGEAPQTERFDVPEVTARLVNATRATGGRVIAVGTTVTRALESAVASDGRVVAARGWTDRVISPTDPARVVDGLITGWHNPEASHLLLVESIAGAELTQAAYDAAVDEGYLWHEFGDSALLLP

SEQ ID NO: 68383 - protein, 350 aa, Luteitalea pratensis
  misc_feature (1)..(350): tr|A0A143PUG6|A0A143PUG6_9BACT S-adenosylmethionine:tRN A ribosyltransferase-isomerase OS=Luteitalea pratensis OX=1855912 GN=queA_2 PE=3 SV=1
MIPATAPIQRPADARLFGVDRFGQPRHMMRSRLIDLLKPTDVVIANDAATLPASLRGTHAPSGREIEVRLAARTSLSPSTIGRVLAVVFGEGDFRVPTEDRPQPPALNRGDRLLLGPLRAAVVSRVNHRRLVLLQFDGTADEIWRGLARHGHPVQYAHLQEPLAIWDTWTPIAGLPVAFEPPSASFALSWGLLESLAARGIGFATVTHAAGLSSTGDPVLDAMLPFDEPYVIPRYTARLVNRARARGSRVVAVGTSVVRALEHAGAEGRVRPGEGLATGRLGPGSALRIVDAILTGTHEPGTSHHELLRAFATSSTLALVDEELTRVGYRTHEFGDSVFLERQDRNTRGG

SEQ ID NO: 68384 - protein, 347 aa, Luteitalea pratensis
  misc_feature (1)..(347): tr|A0A143PFT0|A0A143PFT0_9BACT S-adenosylmethionine:tRN A ribosyltransferase-isomerase OS=Luteitalea pratensis OX=1855912 GN=queA_1 PE=3 SV=1
MRVDEFDFHLPESQIAQHPPAERGTSRLMVLDRASGETTIGHVSDLTAWLRAGDVLVLNDTRVFPARLLGRRLPGGGRLECLLVASHGAGAWDALVHPGQRLKIGSRFVCEGEGGAIHGEIVGRSDYGRRTVHLRAEGFADVDEAIEAIGHMPLPPYIRRPDASEDRDRYQTVFGTHRGSVAAPTAGLHFTPDLLAQLRAIGVEIVTITLHVGYGTFKPVRVDIVEEHIVDPERYDVSTTAADAINRAKAEGRRVVVVGTTSTRALESAAGADGRVRAGAATTTLYIRPGHRFQVVDALMTNFHVPRSSLLFLVCAFGGREHVLGAYARAIDEGLRFYSYGDAMLIT

SEQ ID NO: 68385 - protein, 349 aa, Lutibacter agarilyticus
  misc_feature (1)..(349): tr|A0A238XTQ0|A0A238XTQ0_9FLAO S-adenosylmethionine:tRN A ribosyltransferase-isomerase OS=Lutibacter agarilytic us OX=1109740 GN=queA PE=3 SV=1
MKLSHFKFELPEDLLAEYPAEHRDESRLMVLNRKEKTIEHKQFKDLINYFDEGDLMVLNNTKVFPARMYGEKEKTGARIEVFLLRELNAESRLWDVLVDPARKIRIGNKLFFGDDESLVAEVIDNTTSRGRTLRFLYDGSYEEFRKKLEELGETPLPKYIKREVEASDEERYQTIYAKEEGAVAAPTAGLHFSKHLMKRLEIKGVDFAEVTLHVGLGTFSAVEVEDLSKHKMDSEQCVVSQETADVVNNAIDAKKRVCAVGTTVMRAVESSVSSNHRLNSYDAWTNKFIFPPYDFSIANCMITNFHTPKSTLMMMVAAFAGYDFLMEAYDEAVKEGYKFYSYGDAMLII

SEQ ID NO: 68386 - protein, 349 aa, Lutibacter flavus
  misc_feature (1)..(349): tr|A0A238ZE89|A0A238ZE89_9FLAO S-adenosylmethionine:tRN A ribosyltransferase-isomerase OS=Lutibacter flavus OX= 691689 GN=queA PE=3 SV=1
MKLSHFKFELPEELYAEYPAEHRDESRLMVLNRKEKTIEHKQFKDIINYFDEGDLMLLNNTKVFPARMYGEKEKTGARIEVFLLRELNAESRLWDVLVDPARKIRIGNKLFFGEDESLVAEVIDNTTSRGRTLRFLYDGSYEEFRVKLEQLGETPLPKYIKREVEESDEERYQTIYAKHEGAVAAPTAGLHFSKHLMKRLEIKGVDFAEVTLHVGLGTFSPVEVEDLSKHKMDSEQAKISQETADKVNKAIDSKRRVCAVGTTAMRAIESAVSSNSRLNSYDGWTNKFIFPPYEFSIANCMITNFHTPKSTLMMMAAAFAGYDFLMEAYEVAVKEKYKFYSYGDAMLII

SEQ ID NO: 68387 - protein, 349 aa, Lutibacter maritimus
  misc_feature (1)..(349): tr|A0A1I6QQ77|A0A1I6QQ77_9FLAO S-adenosylmethionine:tRN A ribosyltransferase-isomerase OS=Lutibacter maritimus OX=593133 GN=queA PE=3 SV=1
MKLSHFKFDLPEELLAVRPAEHRDESRLMVLNRKEKTIEHKLFKDIIDYFDEGDLMIVNNTKVFPARMYGEKEKTGARIEVFLLRELNAESRLWDVLVDPARKIRIGNKLFFGDDESLVAEVIDNTTSRGRTLRFLYDGSYEEFRKKLEELGETPLPKYINRPVEPEDEERYQTIYAKHEGAVAAPTAGLHFSKHLMKRLEIKGVDFAEVTLHVGLGTFSPVEVEDLSKHKMDSEQAIITEETTEIVNNAIDKKRRVCAVGTTVMRAVESSVSSNNRLNSFNGWTNKFIFPPYDFSIANCMITNFHTPKSTLMMMVAAFADYDFLMKAYEEAVKEKYKFYSYGDAMLII

SEQ ID NO: 68388 - protein, 349 aa, Lutibacter oceani
  misc_feature (1)..(349): tr|A0A3D9RLJ9|A0A3D9RLJ9_9FLAO S-adenosylmethionine:tRN A ribosyltransferase-isomerase OS=Lutibacter oceani OX= 1853311 GN=queA PE=3 SV=1
MKLSHFKFELPEDLLAEYPAEHRDESRLMVLNRKEKTIEHKQFKDLINYFDEGDLMILNNTKVFPARMYGEKEKTGARIEVFLLRELNAESRLWDVLVDPARKIRIGNKLFFGDDESLVAEVIDNTTSRGRTLRFLYDGSYEEFRKKLEELGETPLPKYIKREVNEDDEERYQTIYAKHEGAVAAPTAGLHFSKHLMKRLEIKGVDFAEVTLHVGLGTFSAVEVEDLSKHKMDSEQAIIPDETVEIVNKAIDSKRRVCAVGTTVMRAVESSVSSDNHLNSFNGWTNKFIFPPYDFSIANCMITNFHTPKSTLMMMAAAFAGYDFLMEAYDEAVKEGYKFYSYGDAMLII

SEQ ID NO: 68389 - protein, 349 aa, Lutibacter oricola
  misc_feature (1)..(349): tr|A0A1H3EDR5|A0A1H3EDR5_9FLAO S-adenosylmethionine:tRN A ribosyltransferase-isomerase OS=Lutibacter oricola OX =762486 GN=queA PE=3 SV=1
MKLSHFKFDLPVDLLAEYPAEHRDEARLMVLNRKEQTIEHKMFKDLIDYFDEGDLMVLNNTKVFPARMYGEKEKTGARIEVFLLRELNAESRLWDVLVDPARKIRIGNKLFFGDDESLVAEVIDNTTSRGRTLRFLYDGSYEEFRKKLEELGETPLPKYIQREVEPSDEERYQTIYAKHEGAVAAPTAGLHFSKHLMKRLEIKGIDFGEVTLHVGLGTFSAVEVEDLSKHKMDSEQAIIDADTTKIVNAAIDNKKRICAVGTTVMRAMESSVSSNQHLNEFNGWTNKFIFPPYDFSIANSMITNFHTPKSTLMMMVAAFAGYDFLMEAYEEAVKEGYKFYSYGDAMLII

SEQ ID NO: 68390 - protein, 349 aa, Lutibacter profundi
  misc_feature (1)..(349): tr|A0A0X8G821|A0A0X8G821_9FLAO S-adenosylmethionine:tRN A ribosyltransferase-isomerase OS=Lutibacter profundi O X=1622118 GN=queA PE=3 SV=1
MKLSKFKFELPEGLLAEYPAEHRDESRLMVLDRKKQTIEHHTFKDLINYFDEGDLMILNNTKVFPARMYGEKEKTGARIEVFLLRELNAESRLWDVLVDPARKIRIGNKLFFGDDESLVAEVIDNTTSRGRTLRFLYDGSYEEFRKKLQELGETPLPKYIQRKVEPSDAERYQTIYAKHEGAVAAPTAGLHFSKHLMKRLEIKGIDFSEVTLHVGLGTFSPVEVEDLSKHKMDSEKAIVTSETIKIVNNAIDNKKRICAVGTTVMRALESAVSSNGHLNTFDRWTNKFIFPPYDFSIANSMITNFHTPKSTLMMMAAAFAGYDFLMEAYEEAVKEKYKFYSYGDAMLII

SEQ ID NO: 68391 - protein, 349 aa, Lutibacter sp.
  misc_feature (1)..(349): tr|A0A2G1XYW3|A0A2G1XYW3_9FLAO S-adenosylmethionine:tRN A ribosyltransferase-isomerase OS=Lutibacter sp. OX=192 5666 GN=queA PE=3 SV=1
MKLSKFKFELPEDLLAEYPAEHRDESRLMVLNRKEQTIEHHQFKDLINYFDEGDLFILNNTKVFPARMYGEKEKTGARIEVFLLRELNAESRLWDVLVDPARKIRIGNKLFFGDDESLVAEVIDNTTSRGRTLRFLYDGSYEEFRKKLQVLGETPLPKYIQREVEASDAERYQTIYAKHEGAVAAPTAGLHFSKHLMKRLEIKGIDFSEVTLHVGLGTFSPVEVEDLSKHKMDSEKALVTPETIKTVNSAMNRKKRVCAVGTTVMRALESSVSSNGRLNTFDGWTNKFIFPPYDFSIANCMITNFHTPKSTLMMMAAAFAGYDFLMEAYEEAVKEKYKFYSYGDAMLII

SEQ ID NO: 68392 - protein, 349 aa, Lutibacter sp.
  misc_feature (1)..(349): tr|A0A559S367|A0A559S367_9FLAO S-adenosylmethionine:tRN A ribosyltransferase-isomerase OS=Lutibacter sp. Hel_I_ 33_5 OX=1566289 GN=queA PE=3 SV=1
MKLSNFHFELPEELMAEYPAEHRDESRLMVLHRDTQKIEHKLFKDVINYFNEGDVMILNNTKVFPARMFGNKEKTGARIEVFLLRELNAENRLWDVLVDPARKIRIGNKLFFGEDDSLVAEVIDNTTSRGRTLRFLYDGPYDEFRKKLLELGETPLPKLIKRDVEASDEERYQTIFAKHEGAVAAPTAGLHFSKHLLKRLEIKGIDFAETTLHVGLGTFSPVEVEDLSKHKMDSEQIRIPETSADMINNAIETKKRICAVGTTVMRTVESCVSASQRLNSFEGWTNKFIFPPFEFSIANSMITNFHTPKSTLLMQAAAFGGYDFVMEAYQVAIKEKYKFHTYGDAMLII

SEQ ID NO: 68393 - protein, 362 aa, Lutibaculum baratangense
  misc_feature (1)..(362): tr|V4TL70|V4TL70_9RHIZ S-adenosylmethionine:tRNA ribosy ltransferase-isomerase OS=Lutibaculum baratangense AMV1 OX=631454 GN=queA PE=3 SV=1
MRVDLFDFELPEELIALRPAEPRGASRLLVVRPGATPETEDRAFADLPKLLVSGDVLVFNDTRVIPARLFGRRTGRGETEPRIEVTLHKRAGEDGWHAFARPARKLELGDCVDFGDGNGACLLGALAATVEAKGEGGEILLRFELSGAALDEVIEAVGEIPLPPYIASRRPADMRDRQDYQTVYAREAGAVAAPTAGLHFTPEVMGELSSRGIGSETLTLHVGAGTFLPVKADDTADHRMHAETGRIDAEVAARLNDARARGGRIVAVGTTALRLLESAATPEGLIEPFAGDTDIFITPGYRFRGADLLVTNFHLPRSTLFMLVSAFSGLETMRGAYAHAVAARYRFYSYGDSCLLFPSEAR

SEQ ID NO: 68394 - protein, 350 aa, Lutimaribacter litoralis
  misc_feature (1)..(350): tr|A0A521EUS1|A0A521EUS1_9RHOB S-adenosylmethionine:tRN A ribosyltransferase-isomerase OS=Lutimaribacter litora lis OX=1010611 GN=queA PE=3 SV=1
MKLSDFDFDLPEELIATRPAKPRSSARLLVAEEDQITDARVTDILHWLRPGDRLVLNDTKVIPARLSGTRERDGAEGRTKARIEATLLEPRAGGHWAALVKPLKKIREGEEIVFSDALSATLIAKEDGQAVLAFNLTGDDFDVALAQAGAMPLPPYIAAKRAADEQDKQDYQTVWARAAGAVAAPTASLHFDEPLLAQIRDLEVQISFVTLHVGAGTFLPVKVDDVTSHKMHAEWGEVSEAAAAQIAATKAAGGRVIPVGTTALRLIESAARSGDIQPWRGETDIFIYPGFSFHVADALMTNFHLPKSTLMMLVSALMGQDRIRAIYDHAVAQGYRFFSYGDASLLIPKG

SEQ ID NO: 68395 - protein, 352 aa, Lutimaribacter pacificus
  misc_feature (1)..(352): tr|A0A1H0EY73|A0A1H0EY73_9RHOB S-adenosylmethionine:tRN A ribosyltransferase-isomerase OS=Lutimaribacter pacifi cus OX=391948 GN=queA PE=3 SV=1
MKLADFDFDLPERLIATRPARPRSSARLLVAEGDAIRDAHVFDLPGILRPGDRLVLNDTRVIPARLTGQRHRDSGQGPVSARIEVTLLEPRADGTWAALLKPLRKMDIGEDIVFSPELSATLEAREDGQGLLRFNLAGEDFDAALAQAGAMPLPPYIAARRPADAQDKDDYQTVWAARSGAVAAPTASLHFDEPLLAALRARGIAFTHVTLHVGAGTFLPVKVEDVTTHRMHAEWGEVSATAAAEIAATRSAGGRVIPVGTTALRLIETAARDTGAIRAWEGETDIFIYPGFEFRVTDALMTNFHLPKSTLMMLVSALMGRERVRRIYDHAIANDYRFFSYGDASLLIPPGA

SEQ ID NO: 68396 - protein, 353 aa, Lutimaribacter saemankumensis
  misc_feature (1)..(353): tr|A0A1G8GQX1|A0A1G8GQX1_9RHOB S-adenosylmethionine:tRN A ribosyltransferase-isomerase OS=Lutimaribacter saeman kumensis OX=490829 GN=queA PE=3 SV=1
MKLADFDFDLPENLIATRPARPRSSARLLVAEGDTIRDAHVFDLPDILRPGDRLVLNDTRVIPARLTGQRHRDSAQGQVSAKIEVTLLEPRADGGWTALLKPLRKVEPGEEIVFSPDLSARLEARQDGQGVLRFNLTGDDFDAALAQAGAMPLPPYIAAKRPADAQDKNDYQTVWAARSGAVAAPTASLHFDEPLLHALQARGVDFTFVTLHVGAGTFLPVKVDDVTTHKMHSEWGQVSPEAASEIAATKSAGGRVIPVGTTALRLIETAARDTGAIRAWEGDTDIFIYPGFTFRVTDALMTNFHLPKSTLMMLVSALMGQDRISRIYDHAIREEYRFFSYGDASLLFPHPQA

SEQ ID NO: 68397 - protein, 341 aa, Lutispora thermophila
  misc_feature (1)..(341): tr|A0A1M6HPU7|A0A1M6HPU7_9CLOT S-adenosylmethionine:tRN A ribosyltransferase-isomerase OS=Lutispora thermophila DSM 19022 OX=1122184 GN=queA PE=3 SV=1
MNTSDFYYKLPEELIAQEPIYPRDMSRLMILNKESGCIEHKIFKDIINYLNPGDCLVLNDTRVIPARLFGSKEGTQSTIEILLLTRKSKDTWEVMVRPGKKAKLGAKIIFGDGQLVAEIIEISDGGNRIIKFSYDGIFETILENLGHMPLPPYIKKELEDKERYQTVYSKHEGSAAAPTAGLHFTDTLLQDIENKGIKLAYITLHVGLGTFRPVKVKNIEEHKMHSEYYDINQESADKINSSRKEGKRIICVGTTSTRTLESVADENGMVSAKKGWTDIFIYPGYKFKCTDGLITNFHLPESTLLMLVSALAGKENILRAYEEAIKNKYRFFSFGDAMLII

SEQ ID NO: 68398 - protein, 373 aa, Lyngbya aestuarii
  misc_feature (1)..(373): tr|U7QKQ7|U7QKQ7_9CYAN S-adenosylmethionine:tRNA ribosy ltransferase-isomerase OS=Lyngbya aestuarii BL J OX=134 8334 GN=queA PE=3 SV=1
MEINKLDWTTEGYDYKLPEERIAQNPVVPRDQSRLLVIDSLTSHHHRIFRDLPHWLKSDDLLVFNNTQVIPARLYGHKSSGGSVEILLLEEQKPNFWLALVKPGKRFKPGVRIEFEPLHPAPDSILQPLSATVVDTDETTGGRLLEFNLPQGQSLIEQLDQFGHIPFPPYVNQSQAFPQQYQTIYAQRPGAVAAPTAGLHFTEELFERLHHQGIHKAFVTLHVGVGTFRPVEVQDITTHQMHAEWIEVSSETVKQIQKTKANGGRVIAVGTTVVRTLEGVAMAEGKLTPYSGKTDAFIYPGYQFQVIDGLITNFHLPRSSLMMLVAAFIGRQRLLDLYQDAIAQSAEGFTHPYRFYSFGDAMLILPEARISRS

SEQ ID NO: 68399 - protein, 358 aa, Lyngbya confervoides
  misc_feature (1)..(358): tr|A0A0C1Y3P3|A0A0C1Y3P3_9CYAN S-adenosylmethionine:tRN A ribosyltransferase-isomerase OS=Lyngbya confervoides BDU141951 OX=1574623 GN=queA PE=3 SV=1
MGIPDNSDFQLSAYNYELPPDRIAQNPVEPRDHARLLTITSARGHEHRHVYDLPSLLQPGDLLVLNDTKVLPARLFGQKVGGAAVEILLLEERASLEWLALVKPGKRLKPGAQIHFGENLDQPALIADVVASDPETNGRILKFTIPGPESFYEVCDRLGKMPLPPYITESTAPDDRYQTIYAEKLGAVAAPTAGLHFTPELFAQLDDRGIDRTFITLHVGVGTFRPVEAATITDHTMHAEWLDVPAATVEKIRQTKANGGRVIAVGTTVTRALEGAAQSGELQPLQGKTNLFIYPGYQWQVLDGLMTNFHLPESSLMMLVSAMIGRQRLLDLYAEAVRQDYRFYSFGDAMLILPTARR

SEQ ID NO: 68400 - protein, 371 aa, Lyngbya sp.
  misc_feature (1)..(371): tr|A0YUJ9|A0YUJ9_LYNSP S-adenosylmethionine:tRNA ribosy ltransferase-isomerase OS=Lyngbya sp. (strain PCC 8106) OX=313612 GN=queA PE=3 SV=1
METDRLDWTTEGYDYELPEERIAQNPVVPRDQSRLLVIDSLTSHHHRVFRDLPHWLKSDDLLVFNNTQVIPARLYGHKSSGGSVEILLLEEQKPNCWLALVKPGKYFKPGVKIEFEPLHPAPDSILQPLSAIVVDTDETTGGRLLQFYLPQGQSLIEQLDQFGHIPFPPYVNQSQAFPQQYQTIYAQRPGAVAAPTAGLHFTEELFERLHHQGINKAFVTLHVGVGTFRPVEVQDITTHQMHAEWIEVSPETVEQIQKTKANGGRVIAVGTTVVRTLEGVAMAEGKLTSYRGKTDAFIYPGYQFQVIDGLITNFHLPRSSLMMLVAAFIGRPRLLDLYQDAIAQSAEGFTHPYRFYSFGDGMLILPEARIS

SEQ ID NO: 68401 - protein, 346 aa, Lysinibacillus acetophenoni
  misc_feature (1)..(346): tr|A0A285U374|A0A285U374_9BACI S-adenosylmethionine:tRN A ribosyltransferase-isomerase OS=Lysinibacillus acetop henoni OX=614649 GN=queA PE=3 SV=1
MKVEDFDFELPEELIAQTPLEDRTASRLMVVDRQTGEVEHHQFPHILDEIHEGDCLVLNDTRVMPARLFGTKEGTGAHIELLLLKQGQDDEWETLVKPAKRVKIGTEITFGNGLLKATCTGELDHGGRMFKFSYDGIFYEILDQLGEMPLPPYIHEKLDDRERYQTVYSKAIGSAAAPTAGLHFTNEILDKIKAKGVEIVFITLHVGLGTFRPVSVDSIESHDMHSEFYSVTEEAANTINHTKVNGGKVIAVGTTSTRTLETIAQKYDGEIRAEQGWTNIFIYPGFEYKAIDGLITNFHLPKSTLVMLVSALTSRDIILSAYRKAVEERYRFFSFGDAMFIRPIRD

SEQ ID NO: 68402 - protein, 346 aa, Lysinibacillus boronitolerans
  misc_feature (1)..(346): tr|A0A0A3IUN8|A0A0A3IUN8_9BACI S-adenosylmethionine:tRN A ribosyltransferase-isomerase OS=Lysinibacillus boroni tolerans JCM 21713 = 10a = NBRC 103108 OX=1294264 GN=qu eA PE=3 SV=1
MRVEDFDFELPEELIAQTPLVDRTASRLMVVTPGSNKVEHHHFAHVLEELHAGDCLVLNDTRVLPARLMGVKEETGAHIEVLLLKQLAGTDEWETLVKPAKRVKVGTVITFGDGLLTATCTGELEHGGRTFEFQYDGIFYEILEQLGEMPLPPYIREKLEDKDRYQTVYAKERGSAAAPTAGLHFTEELLAQVKAKGVDVVFITLHVGLGTFRPVSVDSIENHEMHAEFYSVTEQAADTINRVKRNGGKVIAVGTTSTRTLETIGSKYGGEVRAEQGWTSIFIYPGYNFTVVDGLITNFHLPKSTLVMLVSTLATRETILSAYQQAVEERYRFFSFGDAMFIRPKK

SEQ ID NO: 68403 - protein, 352 aa, Lysinibacillus chungkukjangi
  misc_feature (1)..(352): tr|A0A318TVF0|A0A318TVF0_9BACI S-adenosylmethionine:tRN A ribosyltransferase-isomerase OS=Lysinibacillus chungk ukjangi OX=1202712 GN=queA PE=3 SV=1
MKEVVKMKVEDFDFHLPEELIAQTPLEDRTASRLMIVDRKTGEVEHSHFPQIVDELQKGDCLVLNDTRVMPARLFGVKEETGAHIEVLLLKQGNDDEWETLVKPAKRVKVGTEVTFGDGLLKAICTGELDHGGRLFKFSYDGIFYEILDQLGEMPLPPYIHEKLENRERYQTVYSKEIGSAAAPTAGLHFTNEILEQIKEKGVEIVFITLHVGLGTFRPVSVESIESHDMHSEFYSVTEEAAKTINRTKANGGKVVAVGTTSTRTLETIAQKYEGEIRAEQGWTNIFIYPGFEYKAIDGLITNFHLPKSTLVMLVSALTSRDIILNAYNRAVEEKYRFFSFGDAMFIRPARS

SEQ ID NO: 68404 - protein, 345 aa, Lysinibacillus composti
  misc_feature (1)..(345): tr|A0A3N9UX51|A0A3N9UX51_9BACI S-adenosylmethionine:tRN A ribosyltransferase-isomerase OS=Lysinibacillus compos ti OX=720633 GN=queA PE=3 SV=1
MKVEDFDFHLPEELIAQTPLEDRTASRLMIVDRGTGEVEHSYFKHIVDQLQKGDCLVLNDTRVMPARLFGTKEETGAHIEVLLLKQGKDDEWETLVKPAKRVKVGTEITFGDGLLKATCTEELDHGGRLFKFSYDGIFYEILDKLGEMPLPPYIHEKLDDRERYQTVYSKEIGSAAAPTAGLHFTNEILEQIKEKGIEIVFITLHVGLGTFRPVSVDSIENHDMHSEFYSVSEEAAEVINRTKANGGKVIAVGTTSTRTLETIAQKYDGEIRAEQGWTNIFIYPGFEYKAIDGLITNFHLPKSTLVMLVSALTSREIILNAYNKAVEEKYRFFSFGDAMFIRPSR

SEQ ID NO: 68405 - protein, 346 aa, Lysinibacillus contaminans
  misc_feature (1)..(346): tr|A0A0M8Q4T5|A0A0M8Q4T5_9BACI S-adenosylmethionine:tRN A ribosyltransferase-isomerase OS=Lysinibacillus contam inans OX=1293441 GN=queA PE=3 SV=1
MRVEDFDFELPEELIAQTPLMDRTASRLMVVTPGSEKVEHHQFAHILDELHAGDCLVLNDTRVLPARLMGVKEETGAHIEVLLLKQTAGTDEWETLVKPAKRVKIGTVVTFGDGLLTATCTGELEHGGRLFEFKYDGIFYEILEQLGEMPLPPYIREKLDDQERYQTVYAKERGSAAAPTAGLHFTEELLEQVKAKGVEIVFITLHVGLGTFRPVSVDSIENHAMHSEFYSVTEEAAEAINRVKANGGNIVAVGTTSTRTLETIGSKYDGEVRAEQGWTSIFIYPGYEFTVVDGLITNFHLPKSTLVMLVSTLATQETILSAYNQAVEEKYRFFSFGDAMFIRPKK

SEQ ID NO: 68406 - protein, 345 aa, Lysinibacillus endophyticus
  misc_feature (1)..(345): tr|A0A494ZBL0|A0A494ZBL0_9BACI S-adenosylmethionine:tRN A ribosyltransferase-isomerase OS=Lysinibacillus endoph yticus OX=1978490 GN=queA PE=3 SV=1
MKVEDFDFHLPEELIAQTPLEDRTSSRLMIVDRKTGEVEHSYFKHIVDELHEGDCLVLNDTRVMPARLMGVKEETGAHIELLLLKQGEGDVWETLAKPAKRVKVGTVISFGEGLLKATCIGELDHGGRLFEFSYDGIFYEILDKLGEMPLPPYIHEKLDDRERYQTVYSKEIGSAAAPTAGLHFTNEILEQIKQKGVEIVFITLHVGLGTFRPVSVDSIENHDMHSEFYSVSESAAETINRTKANGGKVIAVGTTSTRTLETIAQKYDGEIRAEQGWTNIFIYPGFEYKAIDGLITNFHLPKSTLVMLVSALTSREIILNAYNKAVEEKYRFFSFGDAMFIRPIR

SEQ ID NO: 68407 - protein, 346 aa, Lysinibacillus fusiformis
  misc_feature (1)..(346): tr|A0A4Y4ICY0|A0A4Y4ICY0_9BACI S-adenosylmethionine:tRN A ribosyltransferase-isomerase OS=Lysinibacillus fusifo rmis OX=28031 GN=queA PE=3 SV=1
MRVEDFDFELPEELIAQTPLVDRTASRLMVVTPGSIEVEHHHFAHVLDELRAGDCLVLNDTRVLPARLMGVKEETGAHIEVLLLKQLAGSDEWETLVKPAKRVKVGTVITFGDGLLTATCTGELDHGGRTFEFHYDGIFYEILEQLGEMPLPPYIREKLEDKDRYQTVYAKERGSAAAPTAGLHFTEELLEQVKAKGVEVVFITLHVGLGTFRPVSVDSIENHEMHAEFYSVTDEAADTINRVKRNGGKVIAVGTTSTRTLETIGSKYGGEVRPEQGWTSIFIYPGYTFSVVDGLITNFHLPKSTLVMLVSTLATRETILSAYQQAVEEKYRFFSFGDAMFIRPKE

SEQ ID NO: 68408 - protein, 346 aa, Lysinibacillus fusiformis
  misc_feature (1)..(346): tr|A0A2I0V1J5|A0A2I0V1J5_9BACI S-adenosylmethionine:tRN A ribosyltransferase-isomerase OS=Lysinibacillus fusifo rmis OX=28031 GN=queA PE=3 SV=1
MRVEDFDFELPEELIAQTPLIDRTASRLMVVTPGATKVEHHHFAHVLDELHAGDCLVLNDTRVLPARLMGVKEETGAHIEVLLLKQLAGTDEWETLVKPAKRVKVGTVITFGEGLLTATCTGELEHGGRTFDFHYDGIFYEILEQLGEMPLPPYIREKLEDKDRYQTVYAKERGSAAAPTAGLHFTEQLLEQVKAKGVEVVFITLHVGLGTFRPVSVDSIENHEMHAEFYSVTEQAADTINRVKQNGGKVIAVGTTSTRTLETIGSKYEGEVRAEQGWTSIFIYPGYNFTVVDGLITNFHLPKSTLVMLVSTLATRETILSAYQQAVEEKYRFFSFGDAMFIRPKK

SEQ ID NO: 68409 - protein, 346 aa, Lysinibacillus halotolerans
  misc_feature (1)..(346): tr|A0A3M8H4X3|A0A3M8H4X3_9BACI S-adenosylmethionine:tRN A ribosyltransferase-isomerase OS=Lysinibacillus haloto lerans OX=1368476 GN=queA PE=3 SV=1
MKVEDFDFYLPEELIAQTPLEDRTASRLMIVDRKTGEVEHSQFKHIVDELQKGDCLVLNNTRVMPARLLGVKEETGAHIEVLLLKQGNNDEWETLVKPAKRVKVGTEISFGDGLLKATCIGELDHGGRLFKFNYEGIFYEILDQLGEMPLPPYIHEKLDDRERYQTVYSKEIGSAAAPTAGLHFTNEILDQIKEKGVEVVFITLHVGLGTFRPVSVDSIENHDMHSEFYSVSEEAAEVINRTKANGGKVIAVGTTSTRTLETVAHKYNGEIRAEQGWTNIFIYPGFEYKAIDGLITNFHLPKSTLVMLVSALTTREIILNAYNKAVEEKYRFFSFGDAMFIRPNRS

SEQ ID NO: 68410 - protein, 346 aa, Lysinibacillus macroides
  misc_feature (1)..(346): tr|A0A0N0CV02|A0A0N0CV02_9BACI S-adenosylmethionine:tRN A ribosyltransferase-isomerase OS=Lysinibacillus macroi des OX=33935 GN=queA PE=3 SV=1
MRVEDFDFALPEELIAQTPLVDRTASRLMVVTPGSHKVEHHHFAHIVDELQAGDCLVLNDTKVLPARLMGVKEGTGAHIEVLLLKQLAGTDEWETLVKPAKRVKVGTVITFGDGLLTATCTGELEHGGRTFEFQYEGIFYEILEQLGEMPLPPYIREKLEDKDRYQTVYAKERGSAAAPTAGLHFTEQLLAQVKAKGVEVAFITLHVGLGTFRPVSVDSIENHEMHAEFYSVTEEAAATINQVKRNGGKVIAVGTTSTRTLETIGSKYSGEVRAEQGWTSIFIYPGYNFTVVDGLITNFHLPKSTLVMLVSTLATRETILSAYQQAVEEKYRFFSFGDAMFIRPKR

SEQ ID NO: 68411 - protein, 346 aa, Lysinibacillus manganicus
  misc_feature (1)..(346): tr|A0A0A3I1C6|A0A0A3I1C6_9BACI S-adenosylmethionine:tRN A ribosyltransferase-isomerase OS=Lysinibacillus mangan icus DSM 26584 OX=1384049 GN=queA PE=3 SV=1
MRVEDFDFELPEELIAQTPLEDRTASRLMVVDRKTGDVEHNHFPQIVAELQQGDCLVLNDTRVMPARLFGVKEETGAHIELLLLKQGQDDEWETLVKPAKRVKVGTELTFGEGLLKATCTGELDHGGRMFKFSYEGIFYEILDQLGEMPLPPYIHEKLDDSERYQTVYSKEIGSAAAPTAGLHFTTEILEKIKENGVEIVFITLHVGLGTFRPVSVDSIENHDMHSEFYSVSEDAAKVINRTKANGGKVIAVGTTSTRTLETIAQKYNGEIRAEQGWTNIFIYPGFDYKAIDGLITNFHLPKSTLVMLVSALTSRDIILNAYRQAVEKKYRFFSFGDAMFIRPDRD

SEQ ID NO: 68412 - protein, 347 aa, Lysinibacillus mangiferihumi
  misc_feature (1)..(347): tr|A0A4U2ZEJ8|A0A4U2ZEJ8_9BACI S-adenosylmethionine:tRN A ribosyltransferase-isomerase OS=Lysinibacillus mangif erihumi OX=1130819 GN=queA PE=3 SV=1
MRVEDFDFELPEELIAQTPLVDRTASRLMVVTPGSEKVEHHHFAHILEELHAGDCLVLNDTRVLPARLMGVKEETGAHIEVLLLKQTAGTDEWETLVKPAKRVKVGTVVTFGDGLLTATCTAELDHGGRMFKFKYDGIFYEILEQLGEMPLPPYIREKLDDSERYQTVYAKERGSAAAPTAGLHFTQELLEQVRAKGVEIVFITLHVGLGTFRPVSVDSIENHEMHAEFYSVTEEAAATINRVKANGGHVIAVGTTSTRTLETIGSKYGEVRAEQGWTSIFIYPGYQFTVVDGLITNFHLPKSTLVMLVSTLATKDTILSAYHQAVEEKYRFFSFGDAMFIRPSLQK

SEQ ID NO: 68413 - protein, 346 aa, Lysinibacillus massiliensis
  misc_feature (1)..(346): tr|A0A0A3J0F1|A0A0A3J0F1_9BACI S-adenosylmethionine:tRN A ribosyltransferase-isomerase OS=Lysinibacillus massil iensis 4400831 = CIP 108448 = CCUG 49529 OX=1211035 GN= queA PE=3 SV=1
MKVEDFDFDLPEELIAQTPLEDRTASRLMIVDRKTGEVEHHHFPRIVEELQKGDCLVLNDTRVMPARLFGVKEETGAHIEILLLKQGNADEWETLVKPAKRVKIGTEITFGDGLLKATCTGELDHGGRLFKFSYDGIFYEILDQLGDMPLPPYIHEKLEDRERYQTVYSKEIGSAAAPTAGLHFTNEILELIKEKGVEVVFITLHVGLGTFRPVSVDSIENHDMHSEFYSVTEEAAEVINRTKKHGGKVIAVGTTSTRTLETIAQKYNGEIRAEQGWTNIFIYPGFEYKAIDGLITNFHLPKSTLVMLVSALTSREIILNAYRKAVEEKYRFFSFGDAMFIRPSRD

SEQ ID NO: 68414 - protein, 347 aa, Lysinibacillus odysseyi
  misc_feature (1)..(347): tr|A0A0A3IKS9|A0A0A3IKS9_9BACI S-adenosylmethionine:tRN A ribosyltransferase-isomerase OS=Lysinibacillus odysse yi 34hs-1 = NBRC 100172 OX=1220589 GN=queA PE=3 SV=1
MKVEDFDFHLPEELIAQTPLLDRASSRLMVVNPFTMEIEHHQFGHILDELQAGDCLVLNDTKVLPARLMGTKEDTGAGIELLLLKQTGNDEWETLVKPAKRVKIGTVITFGGGLLKATCTGMLEHGGRSFKFSYDGIFYEILEKLGEMPLPPYIREKLEDQDRYQTVYARERGSAAAPTAGLHFTQELLEQIKNKGVHVVFVTLHVGLGTFRPVSVDSIEDHDMHSEFYSVTEEAAEVINRTKQSGGKVVSVGTTSTRTLETIASKYNGEIRAEQGWTNIFIYPGYEYKAIDGLITNFHLPKSTLVMLVSALAGKETILHAYNEAVKEKYRFFSFGDAMYIRPRNNR

SEQ ID NO: 68415 - protein, 347 aa, Lysinibacillus saudimassiliensis
  misc_feature (1)..(347): tr|A0A078M3L0|A0A078M3L0_9BACI S-adenosylmethionine:tRN A ribosyltransferase-isomerase OS=Lysinibacillus saudim assiliensis OX=1461583 GN=queA PE=3 SV=1
MRVEDFDFELPEQLIAQTPLLDRTASRLLVVTPDTTVLQHEKFPAIVDELEAGDCLVLNDTRVLPARLMGEKDTGAHIEVLLLKQHETDVWETLVKPAKRVKVGTVVTFGNLLTATCTEILAHGGRKFKFSYDGIFYEILDQLGEMPLPPYIREKLDDQDRYQTVFARERGSAAAPTAGLHFTDEILDAIRAKGVTITFITLHVGLGTFRPVSVDSIDDHEMHSEFYSMSEETAALINQTKANGGKVIAVGTTSTRTLETIGAKYNGEMRAEQGWTSIFIYPGYKWTVVDGLLTNFHLPKSTLVMLVSSLASKETIMHAYETAVQQQYRFFSFGDAMFIRPNRKDTK

SEQ ID NO: 68416 - protein, 346 aa, Lysinibacillus sinduriensis
  misc_feature (1)..(346): tr|A0A0A3HPX9|A0A0A3HPX9_9BACI S-adenosylmethionine:tRN A ribosyltransferase-isomerase OS=Lysinibacillus sindur iensis BLB-1 = JCM 15800 OX=1384057 GN=queA PE=3 SV=1
MKVEDFDFHLPEELIAQTPLEDRTASRLMIVDRKTGKVENSHFPQIVDELQKGDCLVLNDTRVMPARLFGVKEETGAHIEVLLLKQGSGDEWETLVKPAKRVKVGTEITFGDGLLKATCIGELDHGGRVFKFDYDGIFYEILDQLGEMPLPPYIHEKLENRERYQTVYSKEIGSAAAPTAGLHFTNEILEQIKKKGVEIVFITLHVGLGTFRPVSVDSIESHDMHSEFYSVNEEAATTINRVKANGGKVVAVGTTSTRTLETIAQKYDGEIRAEQGWTNIFIYPGFEYKAIDGLITNFHLPKSTLVMLVSALTSREIILNAYNRAVEEQYRFFSFGDAMFIRPIRP

SEQ ID NO: 68417 - protein, 342 aa, Lysinibacillus sp.
  misc_feature (1)..(342): tr|A0A544UZG6|A0A544UZG6_9BACI S-adenosylmethionine:tRN A ribosyltransferase-isomerase OS=Lysinibacillus sp. SD F0063 OX=2133753 GN=queA PE=3 SV=1
MDVQQFDFDLPEHLIAQHPLEDRTSSRLLVLEKQTGNIVHQQFTHLIDHLQAGDVLVMNDSRVLPARLIGEKADTGAKIEILLLKSLGDDRWETLVKPGKRMKPGTEVIFGNGLLRCVCEDVTETGGRIVRFLYEGIFYEILDQLGSMPLPPYIHAQLEDSERYQTVYAKERGSAAAPTAGLHFTKPYLEQIAAKGVQLAYVTLHVGLGTFRPVSADSVEEHVMHAEYYEIPEETAELVNQAKAEGRRVIAVGTTSCRTLETVGRANGGKLVATSGWTDIFIYPGYTFSILDGLLTNFHLPKSTLVMLVSALAGKENVMRAYKTAVEEEYRFFSFGDAMLIL

SEQ ID NO: 68418 - protein, 347 aa, Lysinibacillus sp.
  misc_feature (1)..(347): tr|A0A4R7UD96|A0A4R7UD96_9BACI S-adenosylmethionine:tRN A ribosyltransferase-isomerase OS=Lysinibacillus sp. YR 326 OX=1855296 GN=queA PE=3 SV=1
MRVEDFDFELPEELIAQTPLLDRTASRLMVVTPGSKNVEHHHFAHILDELQAGDCLVLNDTRVLPARLMGVKEETGAHIEVLLLKQMAGTDEWETLVKPAKRVKVGTVVTFGDGLLTATCTGELDHGGRTFEFKYNGIFYEILEQLGEMPLPPYIREKLEDKDRYQTVYAKERGSAAAPTAGLHFTEELLEQVKAKGVEVVFITLHVGLGTFRPVSVDSIENHEMHSEFYSVTEETASIINRVKSNGGKVIAVGTTSTRTLETIGSKYGGEVRAEQGWTSIFIYPGYEFTIVDGLITNFHLPKSTLVMLVSTLATRETILSAYHQAVEEKYRFFSFGDAMFIRPKGE

SEQ ID NO: 68419 - protein, 346 aa, Lysinibacillus sphaericus; identical to SEQ ID NO: 68407
  misc_feature (1)..(346): tr|A0A410MQ52|A0A410MQ52_LYSSH S-adenosylmethionine:tRN A ribosyltransferase-isomerase OS=Lysinibacillus sphaer icus OX=1421 GN=queA PE=3 SV=1

SEQ ID NO: 68420 - protein, 346 aa, Lysinibacillus sphaericus
  misc_feature (1)..(346): sp|B1HVA2|QUEA_LYSSC S-adenosylmethionine:tRNA ribosylt ransferase-isomerase OS=Lysinibacillus sphaericus (stra in C3-41) OX=444177 GN=queA PE=3 SV=1
MRVEDFDFELPEELIAQTPLVDRTASRLMVVTPGSNEVEHQHFAHVLEELRTGDCLVLNDTRVLPARLMGVKEETGAHIEVLLLKQLPGTDEWETLVKPAKRVKVGTVITFGDGLLTATCTGELDHGGRTFEFHYDGIFFEILEQLGEMPLPPYIREKLEDKDRYQTVYAKERGSAAAPTAGLHFTEELLEQVKAKGVEVVFITLHVGLGTFRPVSVDSIENHEMHAEFYSVTEEAADTINRVKRNGGKIIAVGTTSTRTLETIGSKYDGEVRAEQGWTSIFIYPGYTFTVVDGLITNFHLPKSTLVMLVSTLATRETILSAYQQAVEEKYRFFSFGDAMFIRPKE

SEQ ID NO: 68421 - protein, 347 aa, Lysinibacillus tabacifolii
  misc_feature (1)..(347): tr|A0A4U2XQI8|A0A4U2XQI8_9BACI S-adenosylmethionine:tRN A ribosyltransferase-isomerase OS=Lysinibacillus tabaci folii OX=1173107 GN=queA PE=3 SV=1
MRVEDFDFELPEELIAQTPLVDRTASRLMVVTPGSEKVEHHHFAHILEELHAGDCLVLNDTRVLPARLMGVKEETGAHIEVLLLKQTAGTDEWETLVKPAKRVKVGTVVTFGDGLLTATCTAELDHGGRMFEFKYEGIFYEILEQLGEMPLPPYIREKLDDSERYQTVYAKERGSAAAPTAGLHFTQELLEQVRAKGVEIVFITLHVGLGTFRPVSVDSIENHEMHAEFYSVTEEAAATINRVKANGGHVIAVGTTSTRTLETIGSKYGEVRAEQGWTSIFIYPGYQFTVVDGLITNFHLPKSTLVMLVSTLATKDTILSAYHQAVEEKYRFFSFGDAMFIRPSLQK

SEQ ID NO: 68422 - protein, 345 aa, Lysinibacillus telephonicus
  misc_feature (1)..(345): tr|A0A431UWZ2|A0A431UWZ2_9BACI S-adenosylmethionine:tRN A ribosyltransferase-isomerase OS=Lysinibacillus teleph onicus OX=1714840 GN=queA PE=3 SV=1
MKVEDFDFHLPEELIAQTPLEDRTASRLMIVDRKTGEVEHSLFKHIVEELHEGDCLVLNDTRVMPARLFGEKEETGAHIELLLLKQGSDDEWETLVKPAKRVKVGTVITFGDGLLKATCTGELDHGGRMFKFSYDGIFYEILDKLGEMPLPPYIHEKLDNRERYQTVYSKEIGSAAAPTAGLHFTNELLDEIKAKGVEIVFITLHVGLGTFRPVSVDSIENHDMHSEFYSVTEEAAQTINRIKANGGKVIAVGTTSTRTLETIAHKYDGEIRAEQGWTNIFIYPGFEYKAIDGLITNFHLPKSTLVMLVSALTSREIILNAYNIAVEEKYRFFSFGDAMFIRPIR

SEQ ID NO: 68423 - protein, 347 aa, Lysinibacillus varians
  misc_feature (1)..(347): tr|X2GVD8|X2GVD8_9BACI S-adenosylmethionine:tRNA ribosy ltransferase-isomerase OS=Lysinibacillus varians OX=114 5276 GN=queA PE=3 SV=1
MRVEDFDFELPEELIAQTPLVDRTASRLMVVTPGSEKVEHHHFAHILEELHAGDCLVLNDTRVLPARLMGVKEETGAHIEVLLLKQTAGTDEWETLVKPAKRVKVGTVVTFGDGLLTATCTAELDHGGRMFEFKYEGIFYEILEQLGEMPLPPYIREKLDDSERYQTVYAKERGSAAAPTAGLHFTQELLEQVRVKGVEIVFITLHVGLGTFRPVSVDSIENHEMHAEFYSVTEEAAATINRVKANGGHVIAVGTTSTRTLETIGSKYGEVRAEQGWTSIFIYPGYQFTVVDGLITNFHLPKSTLVMLVSTLATKDTILSAYHQAVEEKYRFFSFGDAMFIRPSLQK

SEQ ID NO: 68424 - protein, 347 aa, Lysinibacillus xylanilyticus
  misc_feature (1)..(347): tr|A0A2M9PWZ8|A0A2M9PWZ8_9BACI S-adenosylmethionine:tRN A ribosyltransferase-isomerase OS=Lysinibacillus xylani lyticus OX=582475 GN=queA PE=3 SV=1
MRVEDFDFELPEELIAQTPLLDRTASRLMVVTPGSKNVEHHHFAHILNELQAGDCLVLNDTRVLPARLMGVKEETGAHIEVLLLKQMAGTDEWETLVKPAKRVKVGTVVTFGDGLLTATCTGELDHGGRTFEFKYNGIFYEILEQLGEMPLPPYIREKLEDKDRYQTVYAKERGSAAAPTAGLHFTEELLEQVKAKGVEVVFITLHVGLGTFRPVSVDSIENHEMHSEFYSVTEETASIINRVKSNGGKVIAVGTTSTRTLETIGSKYGGEVRAEQGWTSIFIYPGYEFTIVDGLITNFHLPKSTLVMLVSTLATRETILSAYHQAVEEKYRFFSFGDAMFIRPKGE

SEQ ID NO: 68425 - protein, 347 aa, Lysinibacillus xylanilyticus; identical to SEQ ID NO: 68418
  misc_feature (1)..(347): tr|A0A0K9F6Y1|A0A0K9F6Y1_9BACI S-adenosylmethionine:tRN A ribosyltransferase-isomerase OS=Lysinibacillus xylani lyticus OX=582475 GN=queA PE=3 SV=1

SEQ ID NO: 68426 - protein, 345 aa, Lysinibacillus xyleni
  misc_feature (1)..(345): tr|A0A285S5A5|A0A285S5A5_9BACI S-adenosylmethionine:tRN A ribosyltransferase-isomerase OS=Lysinibacillus xyleni OX=614648 GN=queA PE=3 SV=1
MKVEDFDFHLPEELIAQTPLEDRTSSRLMIVDRKTGEVDHSNFKHIVDELHGGDCLVLNDTRVMPARLMGVKEETGAHIELLLLKQGEEDIWETLAKPAKRVKVGTVISFGEGLLKATCIGELDHGGRLFKFSYDGIFYEILDKLGEMPLPPYIHEKLDDRERYQTVYSKEIGSAAAPTAGLHFTNEILEQIKQKGVEIVFITLHVGLGTFRPVSVDSIENHDMHSEFYSVSDVAAETINRTKANGGKVIAVGTTSTRTLETIAQKYDGEIRAEQGWTNIFIYPGFVYKAIDGLITNFHLPKSTLVMLVSALTSREIILNAYNKAVEEKYRFFSFGDAMFIRPIR

SEQ ID NO: 68427 - protein, 350 aa, Lysobacter aestuarii
  misc_feature (1)..(350): tr|A0A508A2J2|A0A508A2J2_9GAMM S-adenosylmethionine:tRN A ribosyltransferase-isomerase OS=Lysobacter aestuarii OX=1706195 GN=queA PE=3 SV=1
MRKSDFHYELPAELIAQAPLAERSASRLLVVPPEPGVLGDRAFRELPALLEPGDLLVFNDTRVIPARLFGRKSTGGRVEILIERLLGGADARAQLGVSKSPKPGAVIVLDAGGEAEVLGRDGEFYRLRFHLSESLESWLVKAGRLPLPPYIEREPGADDAERYQTVFAREAGAVAAPTAGLHFDDALLDALRERGVSMGHVTLHVGAGTFQPVRVEQLDQHVMHSEWLNVGAELVDQVRRTRAAGGRVIGVGTTVVRALESAMQGNASGERELRPFAGETRLFILPGYRIRSVDAMITNFHLPESTLLMMISAFAGKARVFEAYAHAIRERYRFFSYGDAMLLWPGGDAR

SEQ ID NO: 68428 - protein, 352 aa, Lysobacter antibioticus
  misc_feature (1)..(352): tr|A0A0S2E0S3|A0A0S2E0S3_9GAMM S-adenosylmethionine:tRN A ribosyltransferase-isomerase OS=Lysobacter antibiotic us OX=84531 GN=queA PE=3 SV=1
MKKNDFHYELPPELIAQAPLAERSASRLLVVPPAPAPREDRVFRELPQLLQPGDLLVFNDTRVIPARLFGQKSTGGRVEILIERLLGGMEARAQIGVSKSPKAGARIALDAGGEAEVLDREGEFYRLRFHVPESLEQWLLHAGRLPLPPYIQREPGSDDQERYQTVFAREVGAVAAPTAGLHFDDALLAQLRERGVEFGHVTLHVGAGTFQPVRAESLDQHVMHSEWLNVGAGLVEQIRRTRAAGGRVIAVGTTVVRALESAIRHHSGVAGEESELQPFAGETRLFILPGYRIRSVDGLITNFHLPESTLLMLVSAFAGKDAVFAAYEHAIRERYRFFSYGDAMLLWPTAEV

SEQ ID NO: 68429 - protein, 350 aa, Lysobacter arseniciresistens
  misc_feature (1)..(350): tr|A0A0A0F4X4|A0A0A0F4X4_9GAMM S-adenosylmethionine:tRN A ribosyltransferase-isomerase OS=Lysobacter arsenicire sistens ZS79 OX=913325 GN=queA PE=3 SV=1
MKKSDFTYDLPPGLIAQAPLPQRSASRLLQVPPAPAPFSDHVFSDLPGLLRAGDLLVFNDTRVIPARLFGTKATGGRVEILIERLLGGADARAQLGVSKSPKAGARITLDAGGVAEVLGRDGEFYHLRFHVAEGLEQWLLHAGRLPLPPYIQREPGADDAERYQTVFARNTGAVAAPTAGLHFDQPLLDTLAAMGVQSGHVTLHVGAGTFQPVRVDDLSEHVMHSEWINVGAALVEQVRRTRAAGGRVIAVGTTVVRALETAIQRTDANPDGELQPFAGESRLFILPGYRIRSVDALVTNFHLPESTLLMMVSAFAGKERVFAAYRHAIDAGYRFFSYGDAMLLWPEARA

SEQ ID NO: 68430 - protein, 349 aa, Lysobacter capsici
  misc_feature (1)..(349): tr|A0A120AG08|A0A120AG08_9GAMM S-adenosylmethionine:tRN A ribosyltransferase-isomerase OS=Lysobacter capsici AZ 78 OX=1444315 GN=queA PE=3 SV=1
MKKSDFNYELPPELIAQAPLAERSASRLLVVPPAPAPREDRVFSDLPQLLQPGDLLVFNDTRVIPARLFGQKSTGGRVEILIERLLGGSEARAQLGVSKSPKQGARIALDAGGEAEVLGRDGEFYRLRFHVPESLEQWLLHAGRLPLPPYIQREPGRDDDERYQTVFAREIGAVAAPTAGLHFDEALLAQLRERGIEFGHVTLHVGAGTFQPVRADSLDQHVMHSEWLNVGAGLIEQIRRCRARGGRVIAVGTTVVRALESAIRLNPADDGELLPFAGETRLFILPGYRITSVAGLITNFHLPESTLLMLVSAFSGKEQVFAAYEHAIAQRYRFFSYGDAMLLWPLAAD

SEQ ID NO: 68431 - protein, 349 aa, Lysobacter capsici
  misc_feature (1)..(349): tr|A0A290ZZ53|A0A290ZZ53_9GAMM S-adenosylmethionine:tRN A ribosyltransferase-isomerase OS=Lysobacter capsici OX =435897 GN=queA PE=3 SV=1
MKKSDFNYELPPELIAQAPLAERSASRLLVVPPAPAPREDRVFSDLPQLLQPGDLLVFNDTRVIPARLFGQKSTGGRVEILIERLLGGSEARAQLGVSKSPKQGARIALDAGGEAEVLGRDGEFYRLRFHVPESLEQWLLHAGRLPLPPYIQREPGQDDDERYQTVFAREIGAVAAPTAGLHFDEALLAQLRERGIEFGHVTLHVGAGTFQPVRADSLDQHVMHSEWLNVGAGLIEQIRRCRARGGRVIAVGTTVVRALESAIRLNPADDGELLPFAGETRLFILPGYRITSVDGLITNFHLPESTLLMLVSAFSGKEQVFAAYEHAIAQRYRFFSYGDAMLLWPLAAD

SEQ ID NO: 68432 - protein, 350 aa, Lysobacter concretionis
  misc_feature (1)..(350): tr|A0A0A0EP39|A0A0A0EP39_9GAMM S-adenosylmethionine:tRN A ribosyltransferase-isomerase OS=Lysobacter concretion is Ko07 = DSM 16239 OX=1122185 GN=queA PE=3 SV=1
MKKSDFHYLLPPRLIAQAPLAARSSSRLLLVPPIPGAFEDHVFSELPDLLAPGDLLVFNDTRVIPARLFGQKATGGRVEILIERLLGGDEARAQLGVSKSPRSGSRIALDAGGEVEVLGRDGEFYRLRFHVAESLEAWLLHAGQLPLPPYIQRAPGADDAERYQTVFARETGAVAAPTAGLHFDEPLLERLAARGVGFGHVTLHVGAGTFQPVRVDDLDQHVMHSEWLNVGAALVEQVRRTRAAGGRVIAVGTTVVRALETAMRPTPENPAGELLPYAGESRLFILPGYRIRSVDAMVTNFHLPESTLLMMVSAFAGRDRVFAAYAHAIAREYRFFSYGDAMLLFPESMQ

SEQ ID NO: 68433 - protein, 353 aa, Lysobacter daejeonensis
  misc_feature (1)..(353): tr|A0A0A0F3N4|A0A0A0F3N4_9GAMM S-adenosylmethionine:tRN A ribosyltransferase-isomerase OS=Lysobacter daejeonens is GH1-9 OX=1385517 GN=queA PE=3 SV=1
MKKSDFHYDLPPELIAQAPLAERSASRLLVVPPAPASLQDRHFRDLLDLLAPGDLLVFNDTRVIPARLFGQKATGGRVEILIERLLGGNQARAQLGVSKSPKAGARIALDAGGEAEVLGRDGEFYVLQFHVPESLEQWLLHAGRLPLPPYIQRAPGQDDTERYQTVFAREVGAVAAPTAGLHFDEALLAALKAKGVEFGHVTLHVGAGTFQPVRVDDLDQHVMHSEWLNVGAELVEAVRRTRDAGGRVVGVGTTVVRALESATRTNDTGQRELQPYAGETRLFILPGYRITAVDALVTNFHLPESTLLMMVSAFAGQDRVFEAYAHAIREGYRFFSYGDAMLLFPEAAPEFRA

SEQ ID NO: 68434 - protein, 350 aa, Lysobacter defluvii
  misc_feature (1)..(350): tr|A0A0A0M7H3|A0A0A0M7H3_9GAMM S-adenosylmethionine:tRN A ribosyltransferase-isomerase OS=Lysobacter defluvii I MMIB APB-9 = DSM 18482 OX=1385515 GN=queA PE=3 SV=1
MKKSDFTYELPAELIAQAPLAERSASRLLVVPPAPGALLDRQVRELPRLLEPGDLLVFNDTRVIPARLFGHKQTGGRVEILVERLLGEGRARVQLGVSKSPKAGALIELDAGGIAEVAGRDGEFYLLDFRVDGPLQEYLERAGRLPLPPYIQREPGTDDAERYQTVFARVAGAVAAPTAGLHFDAPLLDELAARGVRTAHVTLHVGAGTFQPVRVEDLSGHVMHAERIEVGQAVVDEVARTRAAGGRVIAVGTTVVRALETAMQVGPDNPDGALRPFAGESRLFILPGYRIRSVDAMLTNFHLPESTLLMMVSAFAGRERIRQAYRHAVESRYRFFSYGDAMLLFPEASS

SEQ ID NO: 68435 - protein, 346 aa, Lysobacter dokdonensis
  misc_feature (1)..(346): tr|A0A0A2WIJ3|A0A0A2WIJ3_9GAMM S-adenosylmethionine:tRN A ribosyltransferase-isomerase OS=Lysobacter dokdonensi s DS-58 OX=1300345 GN=queA PE=3 SV=1
MKRSDFHYDLPQDLIAQAPLPERSASRLLVVQPAPAPLGDRGVRDLPDLLRAGDLMVFNDTRVIPARLFGQKASGGRVEILIERLLPGDEARAQVGASKSPKAGSRIALDAGGEAEVLGREGEFYRLRFHVDGPFAEWLQHAGRLPLPPYIHRDADINDDARYQTVFAKQTGAVAAPTAGLHFDEALLDALRAKGVAFGHVTLHVGAGTFQPVRVDELSEHRMHSEWLNVDASLVEQVRATRARGGRVIAVGTTVVRALESALVDGQLQPFAGETAIFILPGYRIRSVDALLTNFHLPESTLLMLVSAFAGKARIFEAYAHAIAQGYRFFSYGDAMLLWPSDGDTQ

SEQ ID NO: 68436 - protein, 346 aa, Lysobacter enzymogenes
  misc_feature (1)..(346): tr|A0A0S2DJZ4|A0A0S2DJZ4_LYSEN S-adenosylmethionine:tRN A ribosyltransferase-isomerase OS=Lysobacter enzymogene s OX=69 GN=queA PE=3 SV=1
MKKSDFHYDLPPELIAQAPLPERSASRLLRVPPAPAALEDRNVRDLPQLLQPGDLLVFNDTRVIPARLFGQKSTGGRVEILIERLLGGNEARAQLGVSKSPKEGARIAMDAGGEAEVLGRDGEFYRLRFHVSESLEQWLLHAGRLPLPPYIQREPGRDDAERYQTVFAREVGAVAAPTAGLHFDESLLQALRERGVQFGHVTLHVGAGTFQPVRADDLSQHVMHSEWLNVGAGLVEQIRRTRAAGGRVIGVGTTVVRALESATRQGGGELQPYAGETRLFILPGYRIRSVDAMVTNFHLPESTLLMMISAFAGKQRVFDAYAHAIAQRYRFFSYGDAMLLSASDAE

SEQ ID NO: 68437 - protein, 382 aa, Lysobacter enzymogenes
  misc_feature (1)..(382): tr|A0A3N2RHU9|A0A3N2RHU9_LYSEN S-adenosylmethionine:tRN A ribosyltransferase-isomerase OS=Lysobacter enzymogene s OX=69 GN=queA PE=3 SV=1
MARSPSRSEPAPRPGSRPIGRASDGAAPGAQSLRFPLKKSDFHYDLPPELIAQAPLPERSASRLLQVPPAPAALEDRNVRDLPQLLQPGDLLVFNDTRVIPARLFGQKSTGGRVEILIERLLGANEARAQLGVSKSPKEGARIALDAGGEAEVLGRDGEFYRLRFHVSESLEQWLLHAGRLPLPPYIQREPGRDDAERYQTVFAREVGAVAAPTAGLHFDEYLLQALRERGVQFGHVTLHVGAGTFQPVRADDLSQHVMHSEWLNVGAELVEQIRRTRAAGGRVIGVGTTVVRALESATRQGGGELRPYAGETRLFILPGYRIRSVDAMVTNFHLPESTLLMMISAFAGKQRVFDAYAHAIAQRYRFFSYGDAMLLWASEET

SEQ ID NO: 68438 - protein, 348 aa, Lysobacter gummosus
  misc_feature (1)..(348): tr|A0A0S2G998|A0A0S2G998_9GAMM S-adenosylmethionine:tRN A ribosyltransferase-isomerase OS=Lysobacter gummosus O X=262324 GN=queA PE=3 SV=1
MKKSDFHYELPPELIAQAPLAQRSASRLLVVPPLPAAREDRVFSDLPQMLQPGDLLVFNDTRVIPARLFGQKSTGGRVEILIERLLGGSEARAQLGVSKSPKEGARIALDAGGEAEVLGREGEFYRLRFHVPESLEQWLLHAGRLPLPPYIQREPGHDDAERYQTVFAREVGAVAAPTAGLHFDEELLARLRERGVQFGHVTLHVGAGTFQPVRADHLDQHVMHSEWLNVGAGLVEQIRRTRAAGGRVIAVGTTVVRALESAIRLNQDADGELRPFAGETRLFILPGYQIRSVDALITNFHLPESTLLMLVSAFAGKEQVFSAYEHAIAERYRFFSYGDAMLLWPQAS

SEQ ID NO: 68439 - protein, 381 aa, Lysobacter lycopersici
  misc_feature (1)..(381): tr|A0A516V4A7|A0A516V4A7_9GAMM S-adenosylmethionine:tRN A ribosyltransferase-isomerase OS=Lysobacter lycopersic i OX=1324796 GN=queA PE=3 SV=1
MKKSDFHYELPPELIAQAPLPQRSASRLLVVPPGEGAFEDRHVRDLPSLLRAGDLLVFNDTRVIPARLFGQKASGGRVEILIERLLPGNEARAQLGVSKPPQVGSRIALDAGGETEVLAREEGGFWHLRFHVPESLENWLLHAGRMPLPPYIQREPGADDAERYQTVFARAVGAVAAPTAGLHFDEALLDALRERGVHFGHVTLHVGAGTFQPVRVDDIREHRMHSEWLNVGAELVQQVRRTREAGGRVVAIGTTVVRALESAMQGDELQPFAGETSIFLFPGVRIRSVDALLTNFHLPESTLLMLVSAFAGKERIFAAYEHAVRERYRFFSYGDAMLLWPEADGVPPFEKGGQGGFATVRENAEERILPDPPFPKEGGEQ

SEQ ID NO: 68440 - protein, 353 aa, Lysobacter maris
  misc_feature (1)..(353): tr|A0A2U9T730|A0A2U9T730_9GAMM S-adenosylmethionine:tRN A ribosyltransferase-isomerase OS=Lysobacter maris OX=1 605891 GN=queA PE=3 SV=1
MKKSDFHYELPPELIAQAPLAERSASRLLLVPPAPQPFADRVFRDLPGLLQPGDLLVFNDTRVIPARLFGQKSTGGRVEILIERLLGSAEARAQLGVSKSPRPGARIALDAGGEAEVLGRDGEFYHLRFHVDTPLESWLSRAGQLPLPPYIERRPGAEDAERYQTVFARETGAVAAPTAGLHFDDALLDALKARGVHTGHVTLHVGAGTFQPVRVEHLDQHLMHSEWLNVGAELVEQVRRTRAAGGRVIAVGTTVVRALESAMRDDGEGGRELRPFAGETRLFILPGYRIRSVDAMVTNFHLPESTLLMMISAFAGKERVFEAYAHAIRERYRFFSYGDAMLLWPRHDSGFPA

SEQ ID NO: 68441 - protein, 341 aa, Lysobacter pythonis
  misc_feature (1)..(341): tr|A0A3M2HWZ6|A0A3M2HWZ6_9GAMM S-adenosylmethionine:tRN A ribosyltransferase-isomerase OS=Lysobacter pythonis O X=2483112 GN=queA PE=3 SV=1
MKKSDFRFDLPPELIAQAPLPERSASRLLVVPAGECGFADRGIRELPALLREGDLLVFNDTRVIPARLFGRKTSGGRVEILIERLLPENEARVQIGASKAPKPGSRIELDAGGEVEVLGRDDAFYHLRFHIGQPLEKWLVDAGRLPLPPYIERMPDAADAERYQTVFARHTGAVAAPTAGLHFDQPLLDALRSKGVEFGHVTLHVGAGTFQPMRAENAHEHVMHSEWLNVGAELVRQVRETRARGGRVIAVGTTVVRALESAMRDGQLQPFAGETRIFIFPGYRIESVDAMLTNFHLPESTLLMLVSAFAGRERILVAYAHAVARRYRFFSYGDAMLLWGR

SEQ ID NO: 68442 - protein, 353 aa, Lysobacter ruishenii
  misc_feature (1)..(353): tr|A0A562LSZ4|A0A562LSZ4_9GAMM S-adenosylmethionine:tRN A ribosyltransferase-isomerase OS=Lysobacter ruishenii OX=686800 GN=queA PE=3 SV=1
MKKSDFHYDLPPELIAQAPLAERSASRLLLVPPAPAPLEDRHFRDLVDLLAPGDLLVFNDTRVIPARLFGQKATGGRVEILIERLLGGNQARAQLGVSKSPKTGARIALDAGGEAEVLGRDGEFYVLQFHVPESLEQWLLHAGRLPLPPYIQRAPGQDDAERYQTVFAREVGAVAAPTAGLHFDESLLAALKAKGVQFGHVTLHVGAGTFQPVRVDDLGQHVMHSEWLNVGAELVDAIRQTRAAGGRVIGVGTTVVRALESATRTSETGERELQPYAGETRLFILPGYRITAVDALVTNFHLPESTLLMMVSAFSGQDRIFQAYAHAIAERYRFFSYGDAMLLFPSDTTREAP

SEQ ID NO: 68443 - protein, 359 aa, Lysobacter silvestris
  misc_feature (1)..(359): tr|A0A2K1PXZ7|A0A2K1PXZ7_9GAMM S-adenosylmethionine:tRN A ribosyltransferase-isomerase OS=Lysobacter silvestris OX=1645665 GN=queA PE=3 SV=1
MPIRATAAASILKTSDFRFDLPPELIAQQPLPERSASRLLVVPPGDAAFEDRGIRDLPGLLRAGDLLVFNDTRVIPARLFGQKATGGRVEILIERLLGDGVAKAQIGASKTPKPGSSIELDGGGSAEVIDRDDRGFFTLRFHVDGEFIDWLQRVGQLPLPPYIEHTPDAVDAERYQTVFAERAGAVAAPTAGLHFDDALLQSLRDRGIDDARITLHVGAGTFQPVRVENLDEHRMHSEWIDVPQKLVDKVRATRAAGGRVIAVGTTVLRALESAMTPDGLQAFSGETSIFIYPGIEVRSVDGLVTNFHLPESTLLMLVSAFAGRERILAAYEHAVRERYRFFSYGDAMLLWPQDGVSRK

SEQ ID NO: 68444 - protein, 360 aa, Lysobacter soli
  misc_feature (1)..(360): tr|A0A3D8VD79|A0A3D8VD79_9GAMM S-adenosylmethionine:tRN A ribosyltransferase-isomerase OS=Lysobacter soli OX=45 3783 GN=queA PE=3 SV=1
MKKSDFHYDLPPELIAQAPLPERSASRLLVVPPTRGNAFDSGFQDRVFRDLPDLLQPGDLLVFNDTRVIPARLYGQKTTGGRVEILIERMLGGFEVRAQLGVSKSPKEGARIALDAGGEAEVLGRDGEFYRLRFHIDESLEKYLLHAGRLPLPPYIQREAGTDDDTRYQTVFAREVGAVAAPTAGLHFDEALLDALKARGVEFGHVTLHVGAGTFQPVRVDELDQHVMHSEWLNVGAALIEQIRRTRAAGGRVIAVGTTVVRALESAMRRNDDGEGELQPYAGETRLFILPGYRIRSVDALITNFHLPESTLLMLVSAFAGKARVFAAYDHAIAERYRFFSYGDAMLLFPQSHDEREQAE

SEQ ID NO: 68445 - protein, 348 aa, Lysobacter sp.
  misc_feature (1)..(348): tr|A0A4R4F393|A0A4R4F393_9GAMM S-adenosylmethionine:tRN A ribosyltransferase-isomerase OS=Lysobacter sp. N42 OX =2545719 GN=queA PE=3 SV=1
MKRSDFDYDLPPELIAQAPLPERSASRLLVVRPDGDLEDRTFRDLPALLRKGDLLVFNDTRVIPARLFGRKSTGGRVEIMIERLLGADRARVQLGVSKSPKEGAVIELDAGGTAHVLGREEGFYVLRFDVPEPLESWLLHAGRLPLPPYIQREPGADDAERYQTVFAREVGAVAAPTAGLHFDEALLERLRAMGVDFGHVTLHVGAGTFQPVREDDVSRHVMHSEWINVGAALVEQVRRTREAGGRVIAVGTTVVRALESATRRDEAGDAELAPFAGETRLFILPGYRTTTVDALVTNFHLPQSTLLMLVSAFAGRDRVFQAYRHAVNARYRFFSYGDAMLLFPRPGP

SEQ ID NO: 68446 - protein, 347 aa, Lysobacter sp.
  misc_feature (1)..(347): tr|A0A345ZP69|A0A345ZP69_9GAMM S-adenosylmethionine:tRN A ribosyltransferase-isomerase OS=Lysobacter sp. TY2-98 OX=2290922 GN=queA PE=3 SV=1
MKKSDFDYELPPELIAQAPLPERSASRLLVVPPGDVPFEDRVFRDLPNLLRVGDLLVFNDTRVIPARLFGQKATGGRVEIMIERLLGGDRARAQLGVSKSPKAGAEIELDAGGVARVLGREGGFYDLQFEVNEPLESWLLHAGRLPLPPYIQREPGQDDAERYQTVFAKEVGAVAAPTAGLHFDEALLDQLRAMGVEFGHVTLHVGAGTFQPVRVDDLSEHVMHSEWINVGASLVEQIRRTREAGGRVIGVGTTVVRALESATRRDENGMAEIVPFAGETQLFILPGYRITSVDAMVTNFHLPQSTLLMMVSAFVGRTRIFDAYRHAIHARYRFFSYGDAMLLWGRD

SEQ ID NO: 68447 - protein, 361 aa, Lysobacter spongiicola
  misc_feature (1)..(361): tr|A0A1T4N6E6|A0A1T4N6E6_9GAMM S-adenosylmethionine:tRN A ribosyltransferase-isomerase OS=Lysobacter spongiicol a DSM 21749 OX=1122188 GN=queA PE=3 SV=1
MFPGPPAKPLILKKSDFSYELPPDLIAQAPLPERSSSRLLVVPPAPASLSDRVFRDLPDLLEAGDLLVFNDTRVIPARLFGRKQTGGRVEILIERMLGGQEARAQLGVSKSPKAGARIELDAGGEAEVIGRDGEFYHLRFHVQTGLEQYLLHAGRLPLPPYIQREPGADDAERYQTVFARQAGAVAAPTAGLHFDQPLLDALAARGVEFGHVTLHVGAGTFQPVRADDLSEHVMHSEWLNVGAGLVEQVRRTRAAGRRVVAVGTTVVRALESAMQRTDRHPEGELQPFAGESRLFILPGYRIRSIDALVTNFHLPESTLLMMVSAFAGKARISEAYRHAIEQRYRFFSYGDAMLLLPEERS

SEQ ID NO: 68448 - protein, 344 aa, Lysobacter tolerans
  misc_feature (1)..(344): tr|A0A1N6NXZ5|A0A1N6NXZ5_9GAMM S-adenosylmethionine:tRN A ribosyltransferase-isomerase OS=Lysobacter tolerans O X=1604334 GN=queA PE=3 SV=1
MKKSDFHFDLPPELIAQAPLPERSASRLLVVPPGNAPFEDRGIRDLPSLLREGDLLIFNDTRVIPARLFGNKATGGRVEILIERLLPDNEARAQIGASKTPKPGSRITLDAGGEVEVMGRDDAFHQLRFHVDAPLEKWLVDAGRLPLPPYIERAPDAADSERYQTVFARHTGAVAAPTAGLHFDEALLDELRAGGIEFGHVTLHVGAGTFQPMRVESVYEHVMHSEWLNVGAELVQQVRRTRERGGRVIAVGTTVVRALESAMREGALQPFAGETQIFIFPGYRIQSVDAMVTNFHLPESTLLMLVSAFVGRERILAAYQYAVAQRYRFFSYGDAMLLFSKDAG

SEQ ID NO: 68449 - protein, 405 aa, Macellibacteroides sp.
  misc_feature (1)..(405): tr|A0A1C2BVB4|A0A1C2BVB4_9PORP S-adenosylmethionine:tRN A ribosyltransferase-isomerase OS=Macellibacteroides sp . HH-ZS OX=1857568 GN=A9168_07930 PE=3 SV=1
MTAKTEQIRIEEFNYPLLDERIAKFPLTKRDESKLLVYRNGKIDEAVFKQLSDYLPQGSMLVYNNTRVIQARMLFQKETGAQIEVFCLEPVIPHDYALVFQQTESCSWLCLVGNLKKWKEGALHKTIRMDDKEVVLSAERIKTTGDSHLVRFSWNNPQVTFAELLDAAGILPIPPYLHRETRESDLQTYQTVYSKIKGSVAAPTAGLHFTPEVLAGLDAKGFTREEVTLHVGAGTFKPVKSEVIGDHEMHTEFISVRRSAIENIRTNLGRIIAVGTTSVRTLESLYYMGRTLVNNPDATSEELVVTQWTPYHDTEEVTAHEALTALLDYLDRNQTDTLLSATQIMIAPGYEFKIVKGIITNFHQPKSTLLLLISAFVNGNWKSIYNYALDNDFRFLSYGDSSLLL

SEQ ID NO: 68450 - protein, 349 aa, Macellibacteroides sp.
  misc_feature (1)..(349): tr|A0A1C2BTE6|A0A1C2BTE6_9PORP S-adenosylmethionine:tRN A ribosyltransferase-isomerase OS=Macellibacteroides sp . HH-ZS OX=1857568 GN=queA PE=3 SV=1
MKLSKFKFNLPSELIALQPAKNRDESRLMVVHRKTGEIEHRVFKDILEYFGPQDVFIFNNTKVFPARLYGNKEKTGARIEVFLLRELNEELRLWDVLVDPARKIRIGNKLYFGEDDSMVAEVIDNTTSRGRTLRFLFDGNHDEFKKALYALGETPLPKYIEREVDEDDEQRYQNIYASEEGAVVAPAAGLHFSRELMKRLEIKDCRFAFLTVHSGLGNFREIDVEDLTKHKMDSEQMVVNAEVVKTVNEAKDSNNQICAVGTSVMRAVETAVSTDGHLKEFEGWTNKFIFPPYDFSVATSMVTNFHMPLSTLLMMTASFGGYDLIMDAYEVAIKEKYRFGAYGDAMLII

SEQ ID NO: 68451 - protein, 340 aa, Macrococcus bohemicus
  misc_feature (1)..(340): tr|A0A4R5YBU6|A0A4R5YBU6_9STAP S-adenosylmethionine:tRN A ribosyltransferase-isomerase OS=Macrococcus bohemicus OX=1903056 GN=queA PE=3 SV=1
MDVNEFNFELPERLIAQTPLLDRTASRLLALNKMTGEITHTHFKSIIDYLNEGDTLVLNDTKVMPARLFGVKSDTGAKIEMLMLTEHDNGWEVLIKPAKRVQIGTEVSFGDGKIIATCVDMLEQGGRIMQLKYDGILQERLDELGLMPLPPYIKETLDDQDRYQTVYAKAVGSAAAPTAGLHFTKELLAAIEEKGVNITYITLHVGLGTFRPVSVDSVEDHDMHSEYYEMTAETAQLLNRTKASGKRIISVGTTSTRTLETIADEKGQFEAQSGWTDIFIYPGYKFKAIDAMITNFHLPKSTLVMLVSSLATKEIILNAYHEAVKEEYRFFSFGDAMLIY

SEQ ID NO: 68452 - protein, 340 aa, Macrococcus bohemicus
  misc_feature (1)..(340): tr|A0A328A6Y3|A0A328A6Y3_9STAP S-adenosylmethionine:tRN A ribosyltransferase-isomerase OS=Macrococcus bohemicus OX=1903056 GN=queA PE=3 SV=1
MDVNEFNFELPERLIAQTPLLDRTASRLLALNKTTGEITHTHFKSIIDYLNEGDTLVLNDTKVMPARLFGVKSDTGAKIEMLMLTEHDNGWEVLIKPAKRVQIGTEVSFGDGKIIATCVDMLEQGGRIMQLKYDGILQERLDELGLMPLPPYIKETLDDQDRYQTVYAKAVGSAAAPTAGLHFTKELLAAIEEKGVNITYITLHVGLGTFRPVSVDSVEDHDMHSEYYEMTAETAQLLNRTKASGKRIISVGTTSTRTLETIADEKGHFEAQSGWTDIFIYPGYKFKAIDAMITNFHLPKSTLVMLVSSLATKEIILNAYHEAVKEEYRFFSFGDAMLIY

SEQ ID NO: 68453 - protein, 341 aa, Macrococcus bovicus
  misc_feature (1)..(341): tr|A0A4R6C2S1|A0A4R6C2S1_9STAP S-adenosylmethionine:tRN A ribosyltransferase-isomerase OS=Macrococcus bovicus O X=69968 GN=queA PE=3 SV=1
MNVNDFDFELPEELIAQTPLLDRTSSRLMTLNKETGAVSHEHFSDIISHLNAGDTLVLNDTKVMPARLYGIKEETGAKVEMLLLKQMTDNDWEVLIKPAKRVTVGTVVSFGDGKLTAVCKELLPQGGRIMTLQYNGILQERLEELGEMPLPPYIKEQLEDQSRYQTVYAKAVGSAAAPTAGLHFTEDLLEKIAAKGVNIAYITLHVGLGTFRPVSVEEIEDHDMHSEYYEMSQQTADILNETRENGGRIITVGTTSTRTLETIASLHADFTETSGWTDIFIYPGYEFKGIDAMITNFHLPKSTLMMLISSLATREYVLNAYAEAVKEKYRFFSFGDAMFIY

SEQ ID NO: 68454 - protein, 341 aa, Macrococcus brunensis
  misc_feature (1)..(341): tr|A0A4V3BDH2|A0A4V3BDH2_9STAP S-adenosylmethionine:tRN A ribosyltransferase-isomerase OS=Macrococcus brunensis OX=198483 GN=queA PE=3 SV=1
MNVNDFDFELPEELIAQTPLLDRTSSRLMTLNKDTGAVSHEHFSDIVSHLNAGDTLVLNDTKVMPARLYGIKEETGAKVEMLLLKQMADNDWEVLIKPAKRVTVGTVVSFGEGKLKAVCKELLPQGGRIMTLQFSGILQERLEELGEMPLPPYIKEQLEDQSRYQTVYAKAVGSAAAPTAGLHFTEALLEEIAAKGVNIAYITLHVGLGTFRPVSVEEIEEHDMHSEYYEMSQATADILNRTRQQGGRIITVGTTSTRTLETIASMHPEFTETSGWTDIFIYPGYEFKGIDAMITNFHLPKSTLMMLISSLTTREHVLNAYAQAVKEKYRFFSFGDAMFIY

SEQ ID NO: 68455 - protein, 340 aa, Macrococcus canis
  misc_feature (1)..(340): tr|A0A4P9CIY1|A0A4P9CIY1_9STAP S-adenosylmethionine:tRN A ribosyltransferase-isomerase OS=Macrococcus canis OX= 1855823 GN=queA PE=3 SV=1
MDVNEFDFYLPESLIAQTPLQDRTASRLLTLNKLTGEIKHTTFKSIIDYLNAGDTLVLNDTKVMPARLFGVKEDTGAKIEMLMLTEHDNGWEVLIKPAKRVTVGTRVSFGEGKIVATCVEELDQGGRIMQLHYDGILQERLDELGLMPLPPYIKETLDDQSRYQTVYARATGSAAAPTAGLHFTESLLEAIKAKGVNIAYITLHVGLGTFRPVSVDDVESHKMHSEYYEMTEETAELLNDTRNRGNRIITVGTTSTRTLETIADDSGHFTAQSGWTDIFIYPGYSFKAVDAMITNFHLPKSTLVMLVSSLATKEFIMNAYHEAVNEKYRFFSFGDAMFIY

SEQ ID NO: 68456 - protein, 340 aa, Macrococcus canis
  misc_feature (1)..(340): tr|A0A1W7ACB6|A0A1W7ACB6_9STAP S-adenosylmethionine:tRN A ribosyltransferase-isomerase OS=Macrococcus canis OX= 1855823 GN=queA PE=3 SV=1
MDVNEFDFNLPESLIAQTPLQDRTASRLLTLNKLTGEIKHTTFKSIIDYLNAGDTLVLNDTKVMPARLFGVKEDTGAKIEMLMLTEHDNGWEVLIKPAKRVTVGTRVSFGEGKIVATCVEELDQGGRIMQLHYDGILQERLDELGLMPLPPYIKETLDDQSRYQTVYARATGSAAAPTAGLHFTESLLETIKAKGVNIAYITLHVGLGTFRPVSVDDVESHKMHSEYYEMTEETAELLNDTRNRGNRIITVGTTSTRTLETIADDSGHFTAQSGWTDIFIYPGYSFKAVDAMITNFHLPKSTLVMLVSSLATKEFIMNAYHEAVNEKYRFFSFGDAMFIY

SEQ ID NO: 68457 - protein, 341 aa, Macrococcus carouselicus
  misc_feature (1)..(341): tr|A0A4R6BR75|A0A4R6BR75_9STAP S-adenosylmethionine:tRN A ribosyltransferase-isomerase OS=Macrococcus carouseli cus OX=69969 GN=queA PE=3 SV=1
MNVNDFDFELPEELIAQTPLLDRASSRLMTLNKETGDISHTHFSDIVSYLNPGDTLVLNDTKVMPARLYGIKEETGAKVEMLLLTQLEDNDWEVLIKPAKRVAVGTVVSFGDGRLQAVCKELLPQGGRVMTLQYTGILQERLEELGEMPLPPYIKEQLEDQSRYQTVYAKAVGSAAAPTAGLHFTEKLLEEISAKGVNVTYITLHVGLGTFRPVSVDKIEDHDMHSEYYEMSQKTADILNQTRKNGKRIITVGTTSTRTLETIASRDGEFTETSGWTDIFIYPGYEFKGIDAMITNFHLPKSTLMMLISSLASREIILNAYAEAVKEKYRFFSFGDAMFIY

SEQ ID NO: 68458 - protein, 340 aa, Macrococcus caseolyticus
  misc_feature (1)..(340): sp|B9E717|QUEA_MACCJ S-adenosylmethionine:tRNA ribosylt ransferase-isomerase OS=Macrococcus caseolyticus (strai n JCSC5402) OX=458233 GN=queA PE=3 SV=1
MDVNEFDFNLPESLIAQTPLQDRTASRLLTLNKHTGEIKHTNFKSIIDYLNTGDTLVLNDTKVMPARLFGVKEDTGAKIEMLMLTEHDNGWEVLIKPAKRVTIGTRISFGEGKIVAICVEELDQGGRIMQLNYEGILQERLDELGLMPLPPYIKETLEDQSRYQTVYARATGSAAAPTAGLHFTESLLEDIKAKGINIAYITLHVGLGTFRPVSVDDVESHKMHSEYYEMSEETAKLLNDTRDSGNRIITVGTTSTRTLETIADDSGHFTAQSGWTDIFIYPGYSFKAVDAMITNFHLPKSTLVMLVSSLATKEFIMNAYNEAVNEKYRFFSFGDAMFIY

SEQ ID NO: 68459 - protein, 340 aa, Macrococcus caseolyticus
  misc_feature (1)..(340): tr|A0A3B0FFC8|A0A3B0FFC8_9STAP S-adenosylmethionine:tRN A ribosyltransferase-isomerase OS=Macrococcus caseolyti cus OX=69966 GN=queA PE=3 SV=1
MDVNEFDFNLPESLIAQTPLQDRTASRLLTLNKHTGEIKHTNFKSIIDYLDTGDTLVLNDTKVMPARLFGVKEDTGAKIEMLMLTEHDNGWEVLIKPAKRVTIGTRISFGEGKIVAICVEELDQGGRIMQLNYEGILQERLDELGLMPLPPYIKETLEDQSRYQTVYARATGSAAAPTAGLHFTESLLEDIKAKGINIAYITLHVGLGTFRPVSVDDVESHKMHSEYYEMSEETAKLLNDTRDSGNRIITVGTTSTRTLETIADDSGHFTAQSGWTDIFIYPGYSFKAVDAMITNFHLPKSTLVMLVSSLATKEFIMNAYNEAVNEKYRFFSFGDAMFIY

SEQ ID NO: 68460 - protein, 340 aa, Macrococcus epidermidis
  misc_feature (1)..(340): tr|A0A327ZXM2|A0A327ZXM2_9STAP S-adenosylmethionine:tRN A ribosyltransferase-isomerase OS=Macrococcus epidermid is OX=1902580 GN=queA PE=3 SV=1
MDVNEFDFELPERLIAQTPLLDRTASRLLALNKLTGEITHTHFKSIIDYLNEGDTLVLNDTKVMPARLFGVKSDTGAKIEMLMLTEHDNGWEVLIKPAKRVQIGTKVSFGDGKIIATCVDMLEQGGRIMQLKYDGILQERLDELGLMPLPPYIKETLDDQDRYQTVYAKAVGSAAAPTAGLHFTKELLAAIEEKGVNIAYITLHVGLGTFRPVSVDSIEDHDMHSEYYEMTAETAQLLNRTKASGKRIISVGTTSTRTLETIADENGHFEAQSGWTDIFIYPGYKFKAIDAMVTNFHLPKSTLVMLVSSLATREIILDAYHEAVKEEYRFFSFGDAMFIY

SEQ ID NO: 68461 - protein, 340 aa, Macrococcus goetzii
  misc_feature (1)..(340): tr|A0A4R6CC57|A0A4R6CC57_9STAP S-adenosylmethionine:tRN A ribosyltransferase-isomerase OS=Macrococcus goetzii O X=1891097 GN=queA PE=3 SV=1
MDVNEFDFELPEKLIAQTPLLDRTASRLLALNKVTGEITHTHFKSIIDYLNEDDTLVLNDTKVMPARLFGVKSDTGAKIEMLMLTEHDNGWEVLIKPAKRVQIGTEVSFGDGKIIATCVDILEQGGRIMQLKYDGILQERLDELGLMPLPPYIKETLDDQDRYQTVYAKAIGSAAAPTAGLHFTKELLAAIEEKGVNIAYITLHVGLGTFRPVSVDSIEDHDMHSEYYEMTTETAQLLNRTKASGKRIISVGTTSTRTLETIADENGHFEAQSGWTDIFIYPGYKFKAIDAMVTNFHLPKSTLVMLVSSLATREIILDAYHEAVKEEYRFFSFGDAMFIY

SEQ ID NO: 68462 - protein, 340 aa, Macrococcus goetzii
  misc_feature (1)..(340): tr|A0A2G5NQS4|A0A2G5NQS4_9STAP S-adenosylmethionine:tRN A ribosyltransferase-isomerase OS=Macrococcus goetzii O X=1891097 GN=queA PE=3 SV=1
MDINEFDFALPEKLIAQTPLLDRTASRLLALNKVTGEITHTHFKSIIDYLNEGDTLVLNDTKVMPARLFGVKSDTGAKIEMLMLTEHDNGWEVLIKPAKRVQKGTEVYFGDGKIIATCVDILEQGGRIMQLKYDGILQERLDELGLMPLPPYIKETLDDQDRYQTVYAKAVGSAAAPTAGLHFTKELLAAIEEKGVNIAYITLHVGLGTFRPVSVDSIEDHDMHSEYYEMTTETAQLLNRTKASGKRIISVGTTSTRTLETIADENGHFEAQSGWTDIFIYPGYKFKAIDAMITNFHLPKSTLVMLVSSLATREFILDAYHEAVKEEYRFFSFGDAMFIY

SEQ ID NO: 68463 - protein, 341 aa, Macrococcus hajekii
  misc_feature (1)..(341): tr|A0A4R6BMC8|A0A4R6BMC8_9STAP S-adenosylmethionine:tRN A ribosyltransferase-isomerase OS=Macrococcus hajekii O X=198482 GN=queA PE=3 SV=1
MNVNDFDFELPEELIAQTPLLDRTSSRLMTLNKETGDIHHAHFSDIVDYLETGDTLVLNDTKVMPARLYGVKQETGAKVEMLLLKQLEGNDWEVLIKPAKRVQVGTVVSFGEGKLQADCKELLPQGGRIMTLKYTGILQERLEEMGEMPLPPYIKEQLKDQSRYQTVYAKAMGSAAAPTAGLHFTEALLEKIAAKGVNITYITLHVGLGTFRPVSVDNIEEHDMHSEYYEMSQQTADVLNQTRKKGGRIITVGTTSTRTLETIASLHDDFIETSGWTDIFIYPGYEFKGIDAMITNFHLPKSTLMMLISSLASRERVLNAYAEAVKERYRFFSFGDAMFIY

SEQ ID NO: 68464 - protein, 341 aa, Macrococcus lamae
  misc_feature (1)..(341): tr|A0A4R6BXF2|A0A4R6BXF2_9STAP S-adenosylmethionine:tRN A ribosyltransferase-isomerase OS=Macrococcus lamae OX= 198484 GN=queA PE=3 SV=1
MNVNDFDFELPEELIAQTPLLDRTSSRLMLLNKATGEVAHSHFKNIIDYLLPGDTLVLNDTKVMPARLFGVKEETGAKVEMLMLKQLEGNDWEVLIKPAKRINPGAVVTFGEGKLKAVCKENLPQGGRVMTLEFDGILQERLEELGEMPLPPYIKEKLEDQSRYQTVYAKAVGSAAAPTAGLHFTEELLKAIKAKGVNVTYITLHVGLGTFRPVSVDNIEEHDMHSEYYEMTAETAGLLNATRAAGHRIITVGTTSTRTLETIASHNEQFQEESGWTDIFIYPGYEFKGIDAMITNFHLPKSTLMMLISSLSTREHVLNAYQQAVEERYRFFSFGDAMFIY

SEQ ID NO: 68465 - protein, 340 aa, Macrococcus sp.
  misc_feature (1)..(340): tr|A0A4Q1BAQ5|A0A4Q1BAQ5_9STAP S-adenosylmethionine:tRN A ribosyltransferase-isomerase OS=Macrococcus sp. DPC71 61 OX=2507060 GN=queA PE=3 SV=1
MEVNEFDFELPERLIAQTPLLDRTSSRLLALNKETGDIQHQTFKDVVSYLNPGDTLVLNDTKVMPARLFGVKVDTGAKVEMLMLTEHEDGWEVLIKPAKRVQIGTKVSFGDGKIIAECVNLLEQGGRIMKLEFEGILQERLDELGLMPLPPYIKETLEDQDRYQTVYAREVGSAAAPTAGLHFTTELLDEIKSKGVNIAYITLHVGLGTFRPVSVETIEAHEMHSEYYEMSSETASLLNQTRTNGHRIITVGTTSTRTLETIADNDGKFKAASGWTDIFIYPGYTFRGIDGMITNFHLPKSTLVMLVSTLAGKENIMKAYNEAIKEEYRFFSFGDAMLIY

SEQ ID NO: 68466 - protein, 349 aa, Mageeibacillus indolicus
  misc_feature (1)..(349): tr|D3R1X0|D3R1X0_MAGIU S-adenosylmethionine:tRNA ribosy ltransferase-isomerase OS=Mageeibacillus indolicus (str ain UPII9-5) OX=699246 GN=queA PE=3 SV=1
MKTSDFYYELPKELIAQHPTAKRDNSRLMLVNPATQSIGHTHFSEIINYIDAGDCLVLNNTKVIPARLLGVKRDTGVHVEFLLLNRRADDEWEVIVRPGRRLRQGSVVDFMPGELSAEITEVLPTGNRVVKFFFNGIWEEILDKAGTMPLPPYIKEKLADPSRYNTVYAKYDGSAAAPTAGLHFTPELLAALQAKGVKLAYVTLHVGLGTFRPVKAENIAEHHMHSEYYELPPETAQLINEVKASGHKIIAVGTTSTRTVESVYHNNGKVVPETGWTDIFIYPGFKFGVIDGLITNFHLPESTLMMLVSAIAGKDFIFSAYAEAVKEKYRFFSFGDAMFIQNCIPEGKI

SEQ ID NO: 68467 - protein, 349 aa, Mageeibacillus indolicus; identical to SEQ ID NO: 68466
  misc_feature (1)..(349): tr|A0A2J8B4G1|A0A2J8B4G1_9FIRM S-adenosylmethionine:tRN A ribosyltransferase-isomerase OS=Mageeibacillus indoli cus OX=884684 GN=queA PE=3 SV=1

SEQ ID NO: 68468 - protein, 374 aa, Magnetococcales bacterium
  misc_feature (1)..(374): tr|A0A2E3C1W8|A0A2E3C1W8_9PROT S-adenosylmethionine:tRN A ribosyltransferase-isomerase OS=Magnetococcales bacte rium OX=2026759 GN=queA PE=3 SV=1
MSYTLSDYDYTLPPELIAQQPATPRDSARLLVSGASGAKGGINAKDYTFADLPSLLKAGDILVTNNTRVLPARLYGYREKVEIVSDGANLPYEVKGKLDVEVLLHRYTGNDNEWLAFCKPAKKLKPGHTIFFGDEETLGEADVVGRDGDQLILNFKNFGSNDAVGFESFLKQAGELPLPPYIERPDGNEDDDNERYQTVYAKRQGAVAAPTAGLHFTPELLRELEQKGVETAQVTLHVGAGTFQPVRSEDLSEHIMHKEWGEITAETVAQIEAAKARGGRVICVGTTSMRIIETASQSGTLKPFKGDTDIFIQPGYTFKTVDGLITNFHLPKSTLLMLVAAFVGHDEMHQIYKTAIAEKYRFYSYGDSSLLWSK

SEQ ID NO: 68469 - protein, 363 aa, Magnetococcus marinus
  misc_feature (1)..(363): sp|A0L579|QUEA_MAGMM S-adenosylmethionine:tRNA ribosylt ransferase-isomerase OS=Magnetococcus marinus (strain A TCC BAA-1437 / JCM 17883 / MC-1) OX=156889 GN=queA PE=3 SV=1
MNGTSFFGGDGTRLSHYDYDLPAAHIAQRPMEPRDHARLLVSRAQGVEDSRFDQLVEHLQAGDLLVLNDTKVIPARLLGHKPSGGRVEIFLLKPDPQHPPLWRAMTRSNKPLKVGQRVEFGEDFYAELVERQAEGHVLVALHAVGMGLDEAMQHYGQMPLPPYISGSDAQQDKSRYQTVFARRDGAVAAPTAGLHFTDALFERLAAKGVTWCHVTLHVGLGTFQPVRVEDLDAHPMHGEWRQLEADAVAKIQRTKAAGGRVVAVGTTAVRTLESSVDDQGVLQASCGETRLFIRPGYRFKVVDLMLTNFHLPKSTLLMLVAAFVGRSRLRRDYAHAMGKNYRFYSYGDTTLLYPQLEEERGLS

SEQ ID NO: 68470 - protein, 355 aa, Magnetococcus massalia
  misc_feature (1)..(355): tr|A0A1S7LMT6|A0A1S7LMT6_MAGMO S-adenosylmethionine:tRN A ribosyltransferase-isomerase OS=Magnetococcus massali a (strain MO-1) OX=451514 GN=queA PE=3 SV=1
MFQSDQAGDHLEDWDFHLPEQLIAQRPVEPRDHSRLLVSLPDRIENHRFDALPSFLRPGDLLVLNDTRVIPARLLGRKPSGGRVEIFLLKPLPGDGALWRAMGRSSKPIKPGLQVLIGDGFHCEVVERLDEGQLSVRLVAEAGQTIEQALAQYGQMPLPPYITDSDAEEDKARYQTVFAKRDGAVAAPTAGLHFTPELLAQLEAMGVGTVHVTLHVGLGTFQPVRVSKLDEHTMHAEWREISEEAAERIRATRAAGGRVIAVGTTAVRSLESSVNEAGELIANMGETRLFIRPGYRFRVVDLMITNFHLPKSTLLMLVAAFAGKDRLARDYRYAMEQALRFFSYGDAQLIYPKSL

SEQ ID NO: 68471 - protein, 344 aa, Magnetofaba australis
  misc_feature (1)..(344): tr|A0A1Y2K2T6|A0A1Y2K2T6_9PROT S-adenosylmethionine:tRN A ribosyltransferase-isomerase OS=Magnetofaba australis IT-1 OX=1434232 GN=queA PE=3 SV=1
MTDRLEDYDYPLPPERIAQAPAEPRDASRLLVSLPDSIEDRRFGDIKAYLRAGDLLVVNDTRVIPARLMGRKASGGKVELFLVKPLDNAGTWEALTKTSKPLKPGTEIHFSPTFRAIFEARQEDGSARARLVCDDASIDAAVEQHGQMPLPPYIQSDDPQRDKQRYQTVYADQPGAVAAPTAGLHFTPELLSELCDMGVKRAHVTLHVGLGTFQPVRESDLDKHVMHAEWFSVTPETADLINQTRAAGGRIVAVGTTSARTLESAADEAGVVHPGSGETRLFIRPGYRFRAVDLLITNFHLPKSTLLMLVSALIGKQRLDRDYVHAMTEQYRFYSYGDAMLAVP

SEQ ID NO: 68472 - protein, 343 aa, Magnetospira sp.
  misc_feature (1)..(343): tr|W6KDH4|W6KDH4_MAGSQ S-adenosylmethionine:tRNA ribosy ltransferase-isomerase OS=Magnetospira sp. (strain QH-2 ) OX=1288970 GN=queA PE=3 SV=1
MDVDLFDFELPRELIAQRPAVPRDSARLLHVGAMLADRGMTDLVEQLRPGDLLLSNDTRVIPARLAGKRGEAKVEVTLHKQAGPDAWHAFARPARKLRPGDELRFNDRFAAQVTEKGDMGEVLLTFDRSGGDLIAALEQWGIMPLPPYIRQGHGDARDRDDYQTLFAARDGAVAAPTAGLHFTPDLLRKLDDRGVKNQRLTLHVGAGTFLPVKVERVEEHKMHAEWGEISEEVAAAVNHTRAQGGRIVAVGTTSLRLLESAVDDQGIVQPFQGETDIFIYPGFQFRAVDLLMTNFHLPRSTLFMLVCAFAGTERMKAAYAHAVAQQYRFYSYGDGCLLERGES

SEQ ID NO: 68473 - protein, 343 aa, Magnetospirillum caucaseum
  misc_feature (1)..(343): tr|M3A6H2|M3A6H2_9PROT S-adenosylmethionine:tRNA ribosy ltransferase-isomerase OS=Magnetospirillum caucaseum OX =1244869 GN=queA PE=3 SV=1
MDDFDFDLPREMIAERPATPRDASRLLHVPASGGLADLGVRDLPALLAPGDILVFNDTRVIPARLAGRRGLAGIEVTLHQRTGLARWKAFARPAKKLKPGDRVDFAEGFSAQVAEKGEMGEVILDFDRAGEDLMLALEAFGKLPLPPYIRQGEADERDTGDYQTVFAREKGAVAAPTAGLHFTPDLLAALEARGVKRATITLHVGAGTFLPVKVDDTDDHRMHQEIGVVTPEAAAAVNAARAAGGRVVAVGTTSLRLLESAADPLGTLQPFDDATDIFITPGHSFRLADMLLTNFHLPRSTLFMLVSAFSGLERMRAAYEHAKAAGYRFYSYGDCCLLERTPT

SEQ ID NO: 68474 - protein, 345 aa, Magnetospirillum gryphiswaldense
  misc_feature (1)..(345): tr|V6F777|V6F777_MAGGM S-adenosylmethionine:tRNA ribosy ltransferase-isomerase OS=Magnetospirillum gryphiswalde nse (strain DSM 6361 / JCM 21280 / NBRC 15271 / MSR-1) OX=431944 GN=queA PE=3 SV=1
MDVNLFDFDLPRTLIAERPVSPRDAARLLHVQAGGLTDGVVGDLPRWLRPGDLLISNDTRVIPARLFGRKGEGGVELTLHERTSLDEWKAFARPAKKLRPGDKVRFADDFSATVAAKGEAGEVLMRFDRGGDDLMLALDAYGRLPLPPYIRKGEADERDRADYQTVFAREKGAVAAPTAGLHFTDSLLAALESAGVTRTTVTLHVGAGTFLPVKVDDTKDHRMHAERGVVTAEVADLVNRTKAARGRVVAVGTTSLRLLESAADDDGVLHPFDGPTDIFITPGYRFRLVDVLMTNFHLPKSTLFMLVSAFAGLDRMHQAYAYAMNRGYRFYSYGDACLLERENPC

SEQ ID NO: 68475 - protein, 345 aa, Magnetospirillum gryphiswaldense
  misc_feature (1)..(345): tr|A4U390|A4U390_9PROT S-adenosylmethionine:tRNA ribosy ltransferase-isomerase OS=Magnetospirillum gryphiswalde nse OX=55518 GN=queA PE=3 SV=1
MDVNLFDFDLPRTLIAERPVSPRDAARLLHVQAGGLTDGVVGDLPRWLRPGDLLISNDTRVIPARLFGRKGEGGIELTLHERTSLDEWKAFARPAKKLRPGDEVRFADDFSATVAAKGEAGEVLMRFDRGGDDLMLALDAYGRLPLPPYIRKGEADERDRADYQTVFAREKGAVAAPTAGLHFTDALLTALESAGVTRTTITLHVGAGTFLPVKVDDTKDHRMHAERGVVTAEVADLVNRTKAAGGRVVAVGTTSLRLLESAADDDGVLHPFDGPTDIFITPGYRFRLVDVLMTNFHLPKSTLFMLVSAFAGLDRMHQAYAYAMNRGYRFYSYGDACLLERENPC

SEQ ID NO: 68476 - protein, 345 aa, Magnetospirillum kuznetsovii
  misc_feature (1)..(345): tr|A0A364NX73|A0A364NX73_9PROT S-adenosylmethionine:tRN A ribosyltransferase-isomerase OS=Magnetospirillum kuzn etsovii OX=2053833 GN=queA PE=3 SV=1
MKVDDFDFDLPRELIAERPAEPRGSARLLHVGAQGLIDGRVAELAGMLKPGDVMVFNDTRVIPARLFGRRGEAGVEVTLHQRVALDSWKAFARPAKKLRPGDRVDFGHGFSAAVVEKGEAGEVTLRFDQSGEALLAALEEFGRMPLPPYIRKGQADERDKGDYQTVFARAKGAVAAPTAGLHFTPDLLAELDARGVRRVTVTLHVGAGTFLPVKVDDTADHRMHSEIGVISADAAAAVNAAKSAGGRVVAVGTTSARLLESAADETGCLHPFDAATDIFITPGYRFRLVDVLMTNFHLPRSTLFMLVSAFMGLDRMKSAYEHAKASGYRFYSYGDACLLERKASP

SEQ ID NO: 68477 - protein, 291 aa, Magnetospirillum magneticum
  misc_feature (1)..(291): tr|Q2W9S3|Q2W9S3_MAGSA S-adenosylmethionine:tRNA ribosy ltransferase-isomerase OS=Magnetospirillum magneticum ( strain AMB-1 / ATCC 700264) OX=342108 GN=amb0598 PE=3 S V=1
MVFNDTKVIPARLLGRRGLAGVELTLHQRTGLSQWKAFARPAKKLKPGDRVDFAEGFSAVVAEKGEMGEVTLDFDRSGEDLMVALETHGHLPLPPYIRQGTADERDKGDYQTVFAREKGAVAAPTAGLHFTPELLAALDARGVKRVTVTLHVGAGTFLPVKVDDTDDHRMHQEIGVVTPETAAAVNAARAAGGRVVAVGTTSARLLESAADPLGTLHPFDGATDIFITPGHVFRQVDVLLTNFHLPRSTLFMLISAFAGLERMKAAYEHAKAAGYRFYSYGDCCLLERTPI

SEQ ID NO: 68478 - protein, 345 aa, Magnetospirillum magnetotacticum
  misc_feature (1)..(345): tr|A0A0C2UWU1|A0A0C2UWU1_MAGMG S-adenosylmethionine:tRN A ribosyltransferase-isomerase OS=Magnetospirillum magn etotacticum MS-1 OX=272627 GN=queA PE=3 SV=1
MRVDDFDFELPRELIAERPVCPRDSARLLHVPIIGGLSDRGVRDLPDLLMPGDILVFNDTKVIPARLFGRRGTAGVEVTLHQRTGLAQWKAFARPAKKLRPGDRVDFAEGFFATVAEKGEMGEVTLDFDRSGEDLMVALEAFGSLPLPPYIRKGEADERDRGDYQTVFARQKGAVAAPTAGLHFTPDLLAALDARGVKRATVTLHVGAGTFLPVKADDTNDHRMHQEIGVITPETAAAINAAKAAGGRVVAVGTTSARLLESAADPLGILHPFDGATDIFITPGHSFRLADVLLTNFHLPRSTLFMLVSAFSGLSRMKEAYEHAKAAGYRFYSYGDCCLLERTPT

SEQ ID NO: 68479 - protein, 342 aa, Magnetospirillum marisnigri
  misc_feature (1)..(342): tr|A0A178MU40|A0A178MU40_9PROT S-adenosylmethionine:tRN A ribosyltransferase-isomerase OS=Magnetospirillum mari snigri OX=1285242 GN=queA PE=3 SV=1
MKVDDFDFDLPRELIAERPAEPRGSSRLLRVTPAGRADAMVADLPRLLRPGDVMVFNDTRVIPARLFGRRGEAGVEVTLHQRVALDAWKAFARPAKKLRPGDRVTFGEGFSALVADKGEAGEVTLAFDQSGEALLAVLEDFGRMPLPPYIRKGVADQRDHDDYQTVFAREKGAVAAPTAGLHFTPDLLAALDARGIERVCVTLHVGAGTFLPVKVDDTSDHRMHSEIGVITGQAAAAINAARARGGRVVAVGTTAARLLESAADETGILHPFDAATDIFITPGYRFRLVDVLMTNFHLPRSTLFMLVSAFMGLDAMKAAYEHAKAAGYRFYSYGDSSLLERG

SEQ ID NO: 68480 - protein, 345 aa, Magnetospirillum moscoviense
  misc_feature (1)..(345): tr|A0A178MMZ9|A0A178MMZ9_9PROT S-adenosylmethionine:tRN A ribosyltransferase-isomerase OS=Magnetospirillum mosc oviense OX=1437059 GN=queA PE=3 SV=1
MKVDLFDFDLPRERIAERPVNPRDSARLLHVTTSGLADHVVADLPRFLRPGDVVVSNDTRVIPARLFGHRGEAGIEVTLHQRLGLAQWKAFARPAKKLKPGDTVRFGPDFTATVAEKGEAGEVTLAFDRAGPELMAALEEFGRMPLPPYIRKGVADQQDRADYQTLFAKEQGAVAAPTAGLHFTPALLAAIDAAGATRLTVTLHVGAGTFLPVKVDDTDDHRMHAESGVVTAEMADAINRARANGGRVVAIGTTSLRLLESAADPDGLIRPFDGSTDIFITPGYRFRAVDVLMTNFHLPRSTLFMLVSAFSGLDRMRTAYAHAIAGSYRFYSYGDACLLHRETFA

SEQ ID NO: 68481 - protein, 344 aa, Magnetospirillum sp.
  misc_feature (1)..(344): tr|A0A0U5MCR4|A0A0U5MCR4_9PROT S-adenosylmethionine:tRN A ribosyltransferase-isomerase OS=Magnetospirillum sp. XM-1 OX=1663591 GN=queA PE=3 SV=1
MKVDDFDFDLPREMIAERPACPRDAARLLHVPANGGLVDLGIRDLPSLLAPGDILVFNDTRVIPARLFGKRGLAGVEVTLHQRTGLAQWKAFARPAKKLRPGDRVDFAEGFFASVAEKGEMGEVTLDFDRSGEDLMAALEAHGRLPLPPYIRQGEADERDRGDYQTVFARQKGAVAAPTAGLHFTPELLAALDARGIRRVTVTLHVGAGTFLPVKVDDTDDHRMHQEIGVVTPEAAAAINAAKTAGGRVVAVGTTSARLLESAADPLGTLRPFDGATDIFITPGHAFRLVDVLLTNFHLPRSTLFMLVSALCGLPRMKAAYEHAKAAGYRFYSYGDCCLLERKT

SEQ ID NO: 68482 - protein, 136 aa, Magnetospirillum sp.
  misc_feature (1)..(136): tr|A0A522W263|A0A522W263_9PROT S-adenosylmethionine:tRN A ribosyltransferase-isomerase (Fragment) OS=Magnetospi rillum sp. OX=31872 GN=EPN20_18290 PE=3 SV=1
SVSPSNGCRVPSGSVALSSRRSAEAAAAINTARAEGGRVVAVGTTALRLLESATDPLGTLHPFDGDTDIFITPGYRFRLVDVLMTNFHLPRSTLFMLVSAFCGLDRMRTAYAHAKESGYRFYSYGDSCLLDRSTSS

SEQ ID NO: 68483 - protein, 348 aa, Magnetovibrio blakemorei
  misc_feature (1)..(348): tr|A0A1E5QCH3|A0A1E5QCH3_9PROT S-adenosylmethionine:tRN A ribosyltransferase-isomerase OS=Magnetovibrio blakemo rei OX=28181 GN=queA PE=3 SV=1
MKVDLFDFELPQTSIAQHPASPKDTARLLVVGDQAFEDTCVLELAAHLRANDILVFNDTKVIPARLVGKRGEAGVEVTLHKRVSADTWYVFARPAKKLKIGDTVHFADDLSADVCEKTDSGEVLLHFSRTDDPLMETLQRVGVMPLPPYIKRPKTGEAQDGNDYQTLFATHLGAVAAPTAGLHFTERMMASLTDRGIKTARVTLHVGAGTFLPVKVEDTRDHKMHSEWGEISAETAAAINQARRNGGRVVAVGTTSLRLLESAAQDNGTLAAFSGDTDIFITPGYRFKIVDVLMSNFHLPKSTLFMLVSAFAGLKRMKAAYNHAIQSGYRFYSYGDACLLARDEDTSL

SEQ ID NO: 68484 - protein, 360 aa, Magnetovibrio sp.
  misc_feature (1)..(360): tr|A0A2E8U2H5|A0A2E8U2H5_9PROT S-adenosylmethionine:tRN A ribosyltransferase-isomerase OS=Magnetovibrio sp. OX= 2024836 GN=queA PE=3 SV=1
  misc_feature (138)..(138): Xaa can be any naturally occurring amino acid
  misc_feature (142)..(142): Xaa can be any naturally occurring amino acid
  misc_feature (148)..(148): Xaa can be any naturally occurring amino acid
  misc_feature (156)..(156): Xaa can be any naturally occurring amino acid
  misc_feature (181)..(181): Xaa can be any naturally occurring amino acid
  misc_feature (188)..(188): Xaa can be any naturally occurring amino acid
  misc_feature (190)..(190): Xaa can be any naturally occurring amino acid
  misc_feature (197)..(197): Xaa can be any naturally occurring amino acid
  misc_feature (200)..(200): Xaa can be any naturally occurring amino acid
  misc_feature (210)..(211): Xaa can be any naturally occurring amino acid
  misc_feature (227)..(227): Xaa can be any naturally occurring amino acid
  misc_feature (268)..(268): Xaa can be any naturally occurring amino acid
  misc_feature (270)..(270): Xaa can be any naturally occurring amino acid
  misc_feature (277)..(277): Xaa can be any naturally occurring amino acid
  misc_feature (288)..(288): Xaa can be any naturally occurring amino acid
  misc_feature (298)..(298): Xaa can be any naturally occurring amino acid
  misc_feature (321)..(321): Xaa can be any naturally occurring amino acid
  misc_feature (344)..(344): Xaa can be any naturally occurring amino acid
  misc_feature (352)..(353): Xaa can be any naturally occurring amino acid
  misc_feature (360)..(360): Xaa can be any naturally occurring amino acid
MHVSHFDFDLPHERIAQAPIEPRDAARLLHVGTTIADLGVRDLPSLLQFGDALVVNDTKVLPCRLTGKRREAKIDITLHKPFDGASWLAFARPARKLKTEDVIIFADGFEARVTEKRNAGEVALTFNHTGLDLMHALXAYGXMPLPPXIKRDTGGXDADKSHYQTLFAAKPGAVAAPTAGXHFTPDLXEXIKARGVXVIXVTLHVGAGTXXPIKVNDTDDHVMHSEXATLSADAAAALNAVRADGGKITAVGSTALRTLESAASEDGXLXPFSGDTXLFITPGYRFKXIDRMMTNFHXPKSTLFMLVSAFSGLDRMKSAYXHAIAAKYRFFSYGDACLLEPNRXTWGNTPEXXLGKRIDX

SEQ ID NO: 68485 - protein, 358 aa, Magnetovibrio sp.
  misc_feature (1)..(358): tr|A0A2D7AAP4|A0A2D7AAP4_9PROT S-adenosylmethionine:tRN A ribosyltransferase-isomerase OS=Magnetovibrio sp. OX= 2024836 GN=queA PE=3 SV=1
MRVDLFDFNLPVKNIAQYPVEPRDTAKLLHVGKNLRDLTVGDLPEILHAGDLIVVNDTKVLPCRLTGIRHSKVQSKLRKISVRVEVTLHKSKTPDTWLAFVRPARKLAIGDIIIFSPKFRATVRDKNNGGEIELQFNLGGITLLDQLEVCGVIPLPPYIKRNDPGVYNDADSYQTLFASELGAVAAPTAGLHFTPTLIDRLQNKGISISRVTLHVGAGTFLPVKVDDTRKHPMHGELGVLSDKTAETVNATRRSGGRVLAVGSTSMRLLESAADKLGEVQPFHGETNLFITPGYRFKVVNLMLTNFHLPRSTLFMLVAAFSGLDRMKKAYAYAIEKEYRFYSYGDACLLEPAFETWRN

SEQ ID NO: 68486 - protein, 342 aa, Mahella australiensis
  misc_feature (1)..(342): tr|F4A1F2|F4A1F2_MAHA5 S-adenosylmethionine:tRNA ribosy ltransferase-isomerase OS=Mahella australiensis (strain DSM 15567 / CIP 107919 / 50-1 BON) OX=697281 GN=queA P E=3 SV=1
MWRLEDFDYDLPEELIAQKPLEQRDMSRLLVYDRKTKSIDHRIFHDIVEYLETGDTLVINDTRVIPARLIGYREDTGGKIEFLLLKRLEADKWEIIERPGRRAKIGTVFVFGNGELKARILEKTSQGGRIVEFMYDGIFEEILDKLGQMPLPPYIKEKLDDKERYQTVYAKNEGSAAAPTAGLHFTNELLQRIKNKGVNIVHITLHVGLGTFRPVKENDITKHQMHSEYYQVSRQAADAINDTHKAGHRVFAVGTTCVRTLETVTDEQGTTHAGDGWTDIFIYPGYRFKAIDALITNFHLPKSTLLMLISAFAGREEILRVYKEAVEQRYRFFSFGDAMLIL

SEQ ID NO: 68487 - protein, 341 aa, Maledivibacter halophilus
  misc_feature (1)..(341): tr|A0A1T5L292|A0A1T5L292_9CLOT S-adenosylmethionine:tRN A ribosyltransferase-isomerase OS=Maledivibacter haloph ilus OX=36842 GN=queA PE=3 SV=1
MKTSDFYFDLPEELIAQVPLKERDKSRLMVLDKETGKVSHNSFRDVLGFLKAGDCLVLNDTRVIPARLFGVKDTGANVEFLLLKRIDKNKWQTLVKPGKRAKIGSKFFFGNGKELTGEIVDLAEEGTRIIEFTYEGIFEEVLDRLGNMPLPPYITRKLEDKERYQTVYSKHRGSAAAPTAGLHFTEDLLKELKNRGVKIAYITLHVGLGTFRPVKAENILEHKMHSEFYMVSKETADLINGTKADGRRIISVGTTATRTLETLGDSDGRIREGNGWTDIFIYPGYRFKVIDGLLTNFHLPESTLIMLVSALAGRENVLRAYNEAVKERYRFFSFGDAMLII

SEQ ID NO: 68488 - protein, 351 aa, Malikia granosa
  misc_feature (1)..(351): tr|A0A2S9K9J6|A0A2S9K9J6_9BURK S-adenosylmethionine:tRN A ribosyltransferase-isomerase OS=Malikia granosa OX=26 3067 GN=queA PE=3 SV=1
MNPSASSATRAHNVSDFDFELPPELVAQHPAAERSSSRLLDNSGRSPVDRIFKELPGLLRAGDLLVFNDTKVVKARLYGEKASGGKVELLIERVLDGHEVVAHMKVSKKPLPGAVLHMVGGFSAELLGRWPEDKGPLFRFRLSAEPYALMEQHGHVPLPPYIEHGDSAEDERRYQTVFARAPGAVAAPTASLHFDEALLDALEARGIERASVTLHVGAGTFQPVKVEAIADHVMHSERYAVPEATQQAIADCRARGGRVVAVGTTTVRTLESWAQSGRASGETQIFITPGFDFKVVDLLVTNFHLPKSTLMMLVSAFAGYETIMALYARAVREGYRFFSYGDAMLLSRSGR

SEQ ID NO: 68489 - protein, 353 aa, Malikia spinosa; identical to SEQ ID NO: 64522
  misc_feature (1)..(353): tr|A0A2S9KGK5|A0A2S9KGK5_9BURK S-adenosylmethionine:tRN A ribosyltransferase-isomerase OS=Malikia spinosa OX=86 180 GN=queA PE=3 SV=1

SEQ ID NO: 68490 - protein, 351 aa, Maliponia aquimaris
  misc_feature (1)..(351): tr|A0A238L4R3|A0A238L4R3_9RHOB S-adenosylmethionine:tRN A ribosyltransferase-isomerase OS=Maliponia aquimaris O X=1673631 GN=queA PE=3 SV=1
MKLSDFDFDLPDRLIATRPARPRTSARLLVAEGDGITDAHVYDLPRWLRPGDRLILNDTKVIPARLQGVRRRASDAGETEARIEVTLLEPRADGLWAALLKPLKKVRDGEEIRFSSELSATVEAREEGQGLLRFNLSGEDFDAALNAAGAMPLPPYIAAKRAADAQDRTDYQTVWARASGAVAAPTASLHFDEALLATLAAQGIGFTHVTLHVGAGTFLPVKVEDVTTHRMHGEWGEVTEAAAAKIAATRAAGGRIIPVGTTALRLIETAARASGRIAPFRGVTDIFIYPGFRFNVTDALMTNFHLPKSTLMMLVSALMGPERIRQIYAHAVASEYRFFSYGDASLLIPGD

SEQ ID NO: 68491 - protein, 344 aa, Malonomonas rubra
  misc_feature (1)..(344): tr|A0A1M6CDZ6|A0A1M6CDZ6_MALRU S-adenosylmethionine:tRN A ribosyltransferase-isomerase OS=Malonomonas rubra DSM 5091 OX=1122189 GN=queA PE=3 SV=1
MQLTDFDFLLPEELIAQQPAARRDASRLMSLERQTGQVTCGDFSDLPSFFRPGDLLVLNDTQVIPARLLGQKLTGGKIEIFLVRRDMQAETEDWFCLTKSSRAPKPGAEVLLGDKLRATVLEEAEEPYRRVRFECDGDFMQQVEAIGHLPLPPYIKREDDQNDRSRYQTVFAREKGAVAAPTAGLHFTPEVLDKLRAGGVEIHSLTLHVGLGTFLPVRVDDVTEHKMHSEFYNVPQETADAVNKAKLEGRRVFALGTTSARTLETAATDEGMLQAGCGESDIFIYPGYRFKIIDALITNFHLPKSTLLMLVSAFAGREFILSAYRRAVEERFRFFSYGDCMLIY

SEQ ID NO: 68492 - protein, 351 aa, Mameliella alba
  misc_feature (1)..(351): tr|A0A0B3RZJ1|A0A0B3RZJ1_9RHOB S-adenosylmethionine:tRN A ribosyltransferase-isomerase OS=Mameliella alba OX=56 1184 GN=queA PE=3 SV=1
MKLSDFDFDLPDGLIATRPARPRTSARLLVAEGDKITDAHVTDLVDWLRPGDRLVLNDTRVIPARLQGVRRRISDAGETEARIEVTLLEPRAGGTWAALIKPLKKVRDGEEIIFSSALSATLEAREEGQGLLRFNLEGDDFDAALNAAGAMPLPPYIAAKRPADAQDHEDYQTVWARHSGAVAAPTASLHFDDALLAQLRDRGLEFTHVTLHVGAGTFLPVKVEDVTTHRMHGEWGEVSEKAACEIAATRAAGGRIIPVGTTALRLIETAARGGEIAPFQGVTDIFIYPGFTFNVTDALMTNFHLPKSTLMMLVSALMGPDRIRAIYAHAVATEYRFFSYGDASLLIPPAG

SEQ ID NO: 68493 - protein, 351 aa, Mameliella sp.
  misc_feature (1)..(351): tr|A0A2E9I4W8|A0A2E9I4W8_9RHOB S-adenosylmethionine:tRN A ribosyltransferase-isomerase OS=Mameliella sp. OX=192 4940 GN=queA PE=3 SV=1
MKLSDFDFDLPDRLIATRPARPRSSARLLVAEGDAITDAHVFDIARWLRPGDRLILNDTKVIPARLQGVRKRVSDAGETEARIEVTLLEPQADGAWAALIKPLKKVRDGEEIIFSNDLSAVLEAREDGRGSLRFNLSGEDFDAALNAAGAMPLPPYIAAKRAADDRDREDYQTVWARNTGAVAAPTASLHFDDALLAALAAKGVSFTHVTLHVGAGTFLPVKVEDVTSHKMHGEWGEVTETAAAEIAATRAAGGRVIPVGTTALRLIETAARGGRIAPFQGVTDIFIYPGFTFKVTDALMTNFHLPKSTLMMLVSALMGSERIRAIYEHAVAEDYRFFSYGDASLLLPPRG

SEQ ID NO: 68494 - protein, 356 aa, Mangrovibacter phragmitis
  misc_feature (1)..(356): tr|A0A1B7L9Z1|A0A1B7L9Z1_9ENTR S-adenosylmethionine:tRN A ribosyltransferase-isomerase OS=Mangrovibacter phragm itis OX=1691903 GN=queA PE=3 SV=1
MRVADFSFELPESLIAHYPQAQRSACRLLSLDGPTGALTHGTFTDLLDKLNPGDLLVFNNTRVIPARLFGKKASGGKIELLVERMLDEHRVLAHIRASKAPKPGAELLLGDDESIKATMVARHDALFEVVFEESRPVLDILNQIGHMPLPPYIDRPDEEADKELYQTVYSERPGAVAAPTAGLHFDEPLLAALREKGVEMAFVTLHVGAGTFQPVRVDSIEDHIMHSEYAEVPQEVVDAVMAAKARGNRVIAVGTTSVRSLESAATAAKEALIAPFFGDTQIFIYPGYQYQVIDALITNFHLPESTLIMLVSAFAGYQHTMHAYHEAVKSEYRFFSYGDAMFITYNPQAINERPGE

SEQ ID NO: 68495 - protein, 356 aa, Mangrovibacter plantisponsor
  misc_feature (1)..(356): tr|A0A317Q1Z1|A0A317Q1Z1_9ENTR S-adenosylmethionine:tRN A ribosyltransferase-isomerase OS=Mangrovibacter planti sponsor OX=451513 GN=queA PE=3 SV=1
MRVADFSFELPESLIAHYPQAQRSACRLLSLDGPTGALTHGTFTDLLDKLNPGDLLVFNNTRVIPARLFGKKASGGKIELLVERMLDEHRVLAHIRASKAPKPGAELLLGDDESIKATMVARHDALFEVVFEESRPVLDILNQIGHMPLPPYIDRPDEEADKELYQTVYSERPGAVAAPTAGLHFDEPLLAALREKGVEMAFVTLHVGAGTFQPVRVDSIEDHIMHSEYAEVPQEVVDAVLAAKARGNRVIAVGTTSVRSLESAATAAKEALIAPFFGDTQIFIYPGYQYQVIDALITNFHLPESTLIMLVSAFAGYQHTMHAYHEAVKSEYRFFSYGDAMFITYNPEAINERPGK

SEQ ID NO: 68496 - protein, 356 aa, Mangrovibacter sp.; identical to SEQ ID NO: 68495
  misc_feature (1)..(356): tr|A0A071LMW9|A0A071LMW9_9ENTR S-adenosylmethionine:tRN A ribosyltransferase-isomerase OS=Mangrovibacter sp. MF B070 OX=1224318 GN=queA PE=3 SV=1

SEQ ID NO: 68497 - protein, 349 aa, Mangrovibacterium diazotrophicum
  misc_feature (1)..(349): tr|A0A419WAW9|A0A419WAW9_9BACT S-adenosylmethionine:tRN A ribosyltransferase-isomerase OS=Mangrovibacterium dia zotrophicum OX=1261403 GN=queA PE=3 SV=1
MKLSKFKFKLPEELIALHPAQNRDESRLMVVDRKTKKIEHKLFKDVTDYFDDQDVLVFNDTKVFPARLYGNKEKTGAEIEVFLLRELNREQRLWDVLVDPARKIRIGNKLYFGEDDLLVAEVIDNTTSRGRTLRFLFDGPYDEFKQTLYSLGETPLPKFIQRPVQPEDKDRYQTIFAKHEGAVAAPTAGLHFSRELMKRLEIIGVDFSFVTLHVGLGNFRSVDVEDLTKHKMDSEQIWITEEACDVVNKAKTNKKNVCAVGTTVMRTLESSVSTQGFLKPYEGWTNKFIFPPYEFSVANRMITNFHLPLSTLMMMVAAFGGYDLTMEAYKEAIKEGYRFGTYGDAMLIL

SEQ ID NO: 68498 - protein, 464 aa, Mangrovibacterium diazotrophicum
  misc_feature (1)..(464): tr|A0A419W2Q5|A0A419W2Q5_9BACT S-adenosylmethionine:tRN A ribosyltransferase-isomerase OS=Mangrovibacterium dia zotrophicum OX=1261403 GN=BC643_0094 PE=3 SV=1
MTTSKFSLRAPRSNLKQDLATNVSSFEFQVSLLPALCSLPFAIRPFFVILPPMDNMNTNTSVFNLSAQALNYELPDERIAKYPLPQRDQSKLLVWQDGNITDSRFTSLPDFLPEGSLLVFNNTKVIRARLLFQKATGANIEIFCLDPLQPADYQIAFQQTESCSWNCMVGNLKKWKNEVLEKDLQLNGKTVAFKAEKLNQIDGSVQVRFSWDCPEADFASLIEAAGILPIPPYLHRDTEESDIERYQTIYSKIKGSVAAPTAGLHFTDAVFSSLKNKQVECEEVTLHVGAGTFKQVKADTIGEHEMHAEQIIVRRDLIEKLLDHQGKLLAVGTTSIRTLESLYWLGVKLLQKPDSALNELDIEQWLPYETEKSYSKQESLEAILAYMLKNGLPVIGAHTKIIIVPGYQFRIVEGMITNFHQPQSTLLLLISAFIGNDWLRVYDHALANDYRFLSYGDSNLYLKA

SEQ ID NO: 68499 - protein, 412 aa, Mangrovibacterium marinum
  misc_feature (1)..(412): tr|A0A2T5C0D5|A0A2T5C0D5_9BACT S-adenosylmethionine:tRN A ribosyltransferase-isomerase OS=Mangrovibacterium mar inum OX=1639118 GN=C8N47_11123 PE=3 SV=1
MDKLKTETTVFDLSAQALNYNLPDKQIAKYPLPQRDQSKLLVWNSGNITDAQFRTLPDFLPEDSLLIFNNTKVIRARLMFQKATGANIEIFCLDPLEPADYQIAFQQTESCSWNCMVGNLKKWKTEVLEKELQFNGKTVVFKAEKLKQIDGSVQVKFSWDCPEADFASLIEAAGILPIPPYLHRETEESDLERYQTIYSKIKGSVAAPTAGLHFTDAVFESLKAKNIACDEVTLHVGAGTFKQVKAETIGEHEMHAEQIIVRRALIEKLLKHQGKLVAVGTTSIRTLESLYWLGVKLIEKPDSALNELDIEQWLPYQTEKSYSKQESLEAILTYMDQHNLPTIGAHTKIIIVPGYRFRIVEGMITNFHQPQSTLLLLISAFIGNDWLRVYEHALADGYRFLSYGDSNLYLKA

SEQ ID NO: 68500 - protein, 349 aa, Mangrovibacterium marinum
  misc_feature (1)..(349): tr|A0A2T5C693|A0A2T5C693_9BACT S-adenosylmethionine:tRN A ribosyltransferase-isomerase OS=Mangrovibacterium mar inum OX=1639118 GN=queA PE=3 SV=1
MKLSKFKFKLPEELIALHPADNRDESRLMVVDRKTRSIEHKLFKDVTDYFDDKDVMVFNDTKVFPARLYGNKEKTGAEIEVFLLRELNREQRLWDVLVDPARKIRIGNKLYFGEDDLLVAEVIDNTTSRGRTLRFLFDGPYDEFKNTLFGLGETPLPKFIQRPVQPDDKDRYQTIFAKHEGAVAAPTAGLHFSRELMKRLEIIGVDFGFVTLHVGLGNFRSVDVEDLTKHKMDSEQIWISEEACDIVNKAKEAKRNVCAVGTTVMRTLESSVSTQGFLKPFEGWTNKFIFPPYEFSVANRMITNFHLPLSTLMMMVAAFGGYDLTMEAYQVAIKEGYRFGTYGDAMLIL

SEQ ID NO: 68501 - protein, 349 aa, Mangrovimonas sp.
  misc_feature (1)..(349): tr|A0A1V1ZHI1|A0A1V1ZHI1_9FLAO S-adenosylmethionine:tRN A ribosyltransferase-isomerase OS=Mangrovimonas sp. DI 80 OX=1779330 GN=queA PE=3 SV=1
MKLSNFNFKLPDELLADRPSDIRDEARLMVLNRKEQTIEHKLFKDVIDYFDEGDVMILNNTKVFPARLYGNKEKTGARIEVFLLRELNEEQRLWDVLVDPARKIRIGNKLYFGDDETLVAEVIDNTTSRGRTLRFLYDGSYAEFRNKLTELGETPLPKYIKRDVEPEDEERYQTIFAKNEGAVAAPTAGLHFSKHLLKRLEIKGIELPEITLHVGLGTFNPVEVEDLSKHKMDSEEVIIDKAAVDVINKGIMNKRRVCAVGTTSMRAIESSVSSNGTLNEFAGWTNKFIFPPYDFSIANCMITNFHTPKSTLLMMVSAFAGHDFIKRAYEEAVKEEYKFYTYGDAMLIL

SEQ ID NO: 68502 - protein, 349 aa, Mangrovimonas sp.
  misc_feature (1)..(349): tr|A0A3R9MSY0|A0A3R9MSY0_9FLAO S-adenosylmethionine:tRN A ribosyltransferase-isomerase OS=Mangrovimonas sp. HN- E26 OX=2494697 GN=queA PE=3 SV=1
MKLSNFNFELPKELLAEYPSEHRDEARLMVLNREKKTIEHKLFKDLVDYFNEDDVMILNNTKVFPARLFGNKEKTGARIEVFLLRELNEEQRLWDVLVDPARKIRIGNKLYFGEDESLVAEVIDNTTSRGRTLRFLYDGSYTDFRKKLNELGETPLPKYIKREVEPEDEDRYQTIFAKNEGAVAAPTAGLHFSKHLLKRLEIKGINFAEITLHVGLGTFNPVEVEDLSKHKMDSEEITIDKLAVNTINQGIAEKRKICAVGTTVMRAVESSVSSSGTLNEFQGWSNKFIFPPYDFSIANCMVTNFHTPKSTLLMMASAFAGHDFIMEAYEEAVKEKYRFYTYGDAMLIL

SEQ ID NO: 68503 - protein, 349 aa, Mangrovimonas yunxiaonensis
  misc_feature (1)..(349): tr|A0A084TM28|A0A084TM28_9FLAO S-adenosylmethionine:tRN A ribosyltransferase-isomerase OS=Mangrovimonas yunxiao nensis OX=1197477 GN=queA PE=3 SV=1
MKLSNFNFDLPKELLAEYPSEHRDEARLMVLNREKQTIEHKLFKDLVDYFDENDVLILNNTKVFPARLYGNKEKTGARIEVFLLRELNEEQRLWDVLVDPARKIRIGNKLYFGEDESLVAEVIDNTTSRGRTLRFLYDGPYRDFRNKLKELGETPLPKYIKREVEPEDEERYQTIFAKTEGAVAAPTAGLHFSKHLLKKLEIKGIDFAEVTLHVGLGTFNPVEVEDLSKHKMDSEEIIIDKLAVNTINKGIAEGRKVCAIGTTVMRAVESSVSSSGTLNEFQGWSNKFIFPPYDFSIANCMVTNFHTPKSTLLMMASAFAGHDFIMRAYEEAVKEKYRFYTYGDAMLIL

SEQ ID NO: 68504 - protein, 361 aa, Mannheimia granulomatis
  misc_feature (1)..(361): tr|A0A011MHD0|A0A011MHD0_9PAST S-adenosylmethionine:tRN A ribosyltransferase-isomerase OS=Mannheimia granulomat is OX=85402 GN=queA PE=3 SV=1
MLVSDFHFDLPDELIARYPTAERSASRLLHLNGETGEFADQQFTDLYNHINAGDLLIFNNTRVIPARLYGRKPSGGKVEALVERVLDEHRCLAHVKASKAPKEGAELIFGEDKLGEGKGFIATMVARHDTLFELEFRAETPLFDLLQQAGHMPLPPYIDRPDEDADQERYQTVYSKVLGAVAAPTAGLHFDNAMLEKLKAKGVDIAFVTLHVGAGTFQPVRVDTIEAHKMHAEYAEVSQDVVNKILDTKARGKRVIAVGTTSVRSVESAAQAAEAEGKLIAPFFSDTAIFLYPGKTFKVIDALVTNFHLPESTLIMLVSAFAGYKNTMNAYAHAVEKQYRFFSYGDAMFINKNPNAFNDMP

SEQ ID NO: 68505 - protein, 225 aa, Mannheimia haemolytica
  misc_feature (1)..(225): tr|A0A378N7D9|A0A378N7D9_MANHA S-adenosylmethionine:tRN A ribosyltransferase-isomerase OS=Mannheimia haemolytic a OX=75985 GN=queA_2 PE=3 SV=1
MLVSDFHFNLPDELIARYPTAERSASRLLHLNGETGEFADQQFVDLYDHINEGDLLIFNNTRVIPARLYGRKPSGGKVEALVERVLDEHRCLAHVKASKAPKEGAELIFGEDKLGEGKGFTATMVARHDTLFELVFNEEQPLFELLQQAGHMPLPPYIDRPDEDADQERYQTVYSKVLGAVAAPTAGLHFDNAMLEKLKAKGVDTAFVTLHVGAGTFQPVRVENH

SEQ ID NO: 68506 - protein, 361 aa, Mannheimia haemolytica
  misc_feature (1)..(361): tr|A0A378N9B7|A0A378N9B7_MANHA S-adenosylmethionine:tRN A ribosyltransferase-isomerase OS=Mannheimia haemolytic a OX=75985 GN=queA PE=3 SV=1
MLVSDFHFNLPDELIARYPTAERSASRLLHLNGETGEFADQQFVDLYDHINEGDLLIFNNTRVIPARLYGRKPSGGKVEALVERVLDEHCCLAHVKASKAPKEGAELIFGEDKLGEGKGFTATMVARHDTLFELVFNEDQPLFELLQQAGHMPLPPYIDRPDEDADQERYQTVYSKVLGAVAAPTAGLHFDNAMLEKLKAKGVDTAFVTLHVGAGTFQPVRVETIEDHKMHAEYAEVSQEVVDKILATKAKGKRVIAIGTTSVRSVESAAQAAEKDGKLIAPFFSDTAIFLYPGKTFKVIDALVTNFHLPESTLIMLVSAFAGYRNTMNAYAHAVETKYRFFSYGDAMFINKNPNALSDVP

SEQ ID NO: 68507 - protein, 361 aa, Mannheimia sp.
  misc_feature (1)..(361): tr|W0Q867|W0Q867_9PAST S-adenosylmethionine:tRNA ribosy ltransferase-isomerase OS=Mannheimia sp. USDA-ARS-USMAR C-1261 OX=1432056 GN=queA PE=3 SV=1
MLVSDFHFDLPDELIARYPTAERSASRLLHLNGETGEFADQQFTDLYDHIHAGDLLIFNNTRVIPARLYGRKPSGGKVEALVERVLDEHRCLAHVKASKAPKEGAELIFGEDKLGEGNSFTATMVARHDTLFELEFNAQTPLFDLLQQAGHMPLPPYIDRPDEDADQERYQTVYSKVLGAVAAPTAGLHFDNVMLEKLKAKGVETAFVTLHVGAGTFQPVRVDTIEEHKMHAEYAEVSQEVVDKILATKAKGKRVIAVGTTSVRSVESAAKAADNEGKLIAPFFSDTSIFLYPGKTFKVVDALVTNFHLPESTLIMLVSAFAGYKNTMNAYAHAVEAKYRFFSYGDAMFINKNPNALNDVP

SEQ ID NO: 68508 - protein, 363 aa, Mannheimia succiniciproducens
  misc_feature (1)..(363): sp|Q65S95|QUEA_MANSM S-adenosylmethionine:tRNA ribosylt ransferase-isomerase OS=Mannheimia succiniciproducens ( strain MBEL55E) OX=221988 GN=queA PE=3 SV=1
MHLSDFYFDLPDELIARYPKPERSSSRLLRLSGENGDISHHTFSDVYDLINEGDLLIFNNTRVIPARMYGRKASGGKIEVLIERVLTESRFLAHVRSSKAPKAGTELILGEDKLGEGKGVKAVMIGRQDALFELEITEKSTALLDILQKIGHMPLPPYIDRPDEDADQERYQTVYSKIPGAVAAPTAGLHFDEELLAKLKAKGVNFAFVTLHVGAGTFQPVRVNNIEEHHMHAEYVEVPQQVVDAIVATKAAGKRVIAVGTTSVRSVESAALAAQEKGFAQIIEPFFADTSIFIYPGKQFRVVDCLITNFHLPESTLIMLVSAFAGYKNTMNAYKSAVENRYRFFSYGDAMFITKNNHVKGLD

SEQ ID NO: 68509 - protein, 361 aa, Mannheimia varigena
  misc_feature (1)..(361): tr|W0QE88|W0QE88_9PAST S-adenosylmethionine:tRNA ribosy ltransferase-isomerase OS=Mannheimia varigena USDA-ARS- USMARC-1296 OX=1433287 GN=queA PE=3 SV=1
MLVSDFHFDLPDELIARYPTAERSASRLLHLNGETGKFADQQFVDLYDHINEGDLLIFNNTRVIPARLYGRKPSGGKVEALVERVLDEHRCLAHVKASKAPKEGAELIFGEDKLGEGNGFTATMVARHDTLFELAFSAEQPLFDLLQQAGHMPLPPYIDRPDEDADQERYQTVYSKVLGAVAAPTAGLHFDNAMLEKLKAKGVDTAFVTLHVGAGTFQPVRVDTIEEHKMHAEYAEVSQEVVDKILATKANGKRVIAVGTTSVRSVESAAQAADKEGKLIAPFFSDTSIFLYPGKTFKVVDALVTNFHLPESTLIMLVSAFAGYKNTMNAYAHAVEKQYRFFSYGDAMFIHKNPNAINDLP

SEQ ID NO: 68510 - protein, 349 aa, Maribacter aquivivus
  misc_feature (1)..(349): tr|A0A1M6UXG1|A0A1M6UXG1_9FLAO S-adenosylmethionine:tRN A ribosyltransferase-isomerase OS=Maribacter aquivivus OX=228958 GN=queA PE=3 SV=1
MKLSNFSFELPDELLAEHPSENRDESKLMVIHRETGKIEHKMFKDMIDYFDEGDVMVLNNTKVFPARLYGNKEKTGARIEVFLLRELNEEQRLWDVLVDPARKIRIGNKLYFGDDETLVAEVIDNTTSRGRTLRFLYDGAYVDFRRKLRELGETPLPKYIKRDVEPEDEGRYQTIYAKHEGAVAAPTAGLHFSKHLLKRLEIKGVDFAELTLHVGLGTFNPVEVEDLSKHKMDSEELFIDEKATDIVNNAKREKRRICAVGTTAMRGLESAVSSKHMLNTYEGWTNKFIFPPYDFSIANAMITNFHLPKSTLLMMVSAFMGHDLMNKAYKEAILENYKFYSYGDAMLII

SEQ ID NO: 68511 - protein, 349 aa, Maribacter arcticus
  misc_feature (1)..(349): tr|A0A1T5DG80|A0A1T5DG80_9FLAO S-adenosylmethionine:tRN A ribosyltransferase-isomerase OS=Maribacter arcticus O X=561365 GN=queA PE=3 SV=1
MKLSNFSFELPKELLAEHPSENRDESKLMVIHRDTGKIEHKMFKDMIDYFEEGDVMVLNNTKVFPARLYGNKEKTGARIEVFLLRELNEEQRLWDVLVDPARKIRIGNKLYFGDDETLVAEVIDNTTSRGRTLRFLYDGAYVDFRRKLRELGETPLPKYIKREVEAEDESRYQTIYAKHEGAVAAPTAGLHFSKHLLKRLEIKGIDFAELTLHVGLGTFNPVEVEDLSKHKMDSEELFIDEKATHIVNNAKLKKRRICAVGTTAMRGLESAVSSKHTLNTFEGWTNKFIFPPYDFSLANAMITNFHLPKSTLLMMVSAFMGHDLMNKAYKEAILENYKFYSYGDAMLII

SEQ ID NO: 68512 - protein, 349 aa, Maribacter caenipelagi
  misc_feature (1)..(349): tr|A0A4R7CUJ8|A0A4R7CUJ8_9FLAO S-adenosylmethionine:tRN A ribosyltransferase-isomerase OS=Maribacter caenipelag i OX=1447781 GN=queA PE=3 SV=1
MKLSNFSFELPDELLAEHPSENRDESKLMVIHRETGKIEHKMFKDMIDYFDEGDVMVLNNTKVFPARLYGNKEKTGARIEVFLLRELNEEQRLWDVLVDPARKIRIGNKLYFGDDETLVAEVIDNTTSRGRTLRFLYDGAYLDFRRKLRELGETPLPKYIKRDVEPEDEGRYQTIYAKHEGAVAAPTAGLHFSKHLLKRLEIKGVDFAELTLHVGLGTFNPVEVEDLSKHKMDSEELFIDEKATDIVNNAKLQKRRICAVGTTAMRGLESAVSSKHTLNTYEGWTNKFIFPPYDFSIANAMITNFHLPKSTLLMMVSAFMGHDLMNKAYKEAILENYKFYSYGDAMLII

SEQ ID NO: 68513 - protein, 350 aa, Maribacter cobaltidurans
  misc_feature (1)..(350): tr|A0A223VBW2|A0A223VBW2_9FLAO S-adenosylmethionine:tRN A ribosyltransferase-isomerase OS=Maribacter cobaltidur ans OX=1178778 GN=queA PE=3 SV=1
MKLSNFNFELPKELLAEHPSENRDESKLMVIDTKTGKIEHKMFKDMIDYFDEGDVMVLNNTKVFPARLYGNKEKTGARIEVFLLRELNEEQRLWDVLVDPARKIRIGNKLYFGDDETLVAEVIDNTTSRGRTLRFLYDGAYLDFRRKLRELGETPLPKYIKRDVEPEDEERYQTIYAKHEGAVAAPTAGLHFSKHLLKRLEIKGIDFAELTLHVGLGTFNPVEVEDLSKHKMDSEELIIDEKATEIVNNAIEKKRRICAVGTTAMRGLESAVSSNHTLNTFEGWTNKFIFPPYEFSIANSMITNFHLPKSTLLMMISAFMGHDLMKKAYKEAIMEGYKFYSYGDAMLILR

SEQ ID NO: 68514 - protein, 349 aa, Maribacter dokdonensis
  misc_feature (1)..(349): tr|A0A1H4JHN1|A0A1H4JHN1_9FLAO S-adenosylmethionine:tRN A ribosyltransferase-isomerase OS=Maribacter dokdonensi s OX=320912 GN=queA PE=3 SV=1
MKLSNFNFELPKELLAEHPSENRDESKLMVIHRDTGKIEHKMFKDMIDYFDEGDVMVLNNTKVFPARLYGNKEKTGARIEVFLLRELNEEQRLWDVLVDPARKIRIGNKLYFGDDETLVAEVIDNTTSRGRTLRFLYDGAYLDFRRKLRELGETPLPKYIKRDVEPEDENRYQTIYAKHEGAVAAPTAGLHFSKHLLKRLEIKGVDFAELTLHVGLGTFNPVEVEDLSKHKMDSEEMFIDEKAAEIVNNAKAKKRRICAVGTTAMRGLESAVSSKQTLNTYEGWTNKFIFPPYDFSIANAMITNFHLPKSTLLMMVSAFMGHDLMNKAYKEAILESYKFYSYGDAMLII

SEQ ID NO: 68515 - protein, 350 aa, Maribacter flavus
  misc_feature (1)..(350): tr|A0A5B2TQP6|A0A5B2TQP6_9FLAO S-adenosylmethionine:tRN A ribosyltransferase-isomerase OS=Maribacter flavus OX= 1658664 GN=queA PE=3 SV=1
MKLSNFNFELPKELLAEHPSENRDESKLMVIDTKTGKIEHKMFKDMIDYFDEGDVMVLNNTKVFPARLYGNKEKTGARIEVFLLRELNEEQRLWDVLVDPARKIRIGNKLYFGDDETLVAEVIDNTTSRGRTLRFLYDGAYLDFRRKLRELGETPLPKYIKRNVEPEDEERYQTIYAKHEGAVAAPTAGLHFSKHLLKRLEIKGINFAELTLHVGLGTFNPVEVEDLSKHKMDSEELIIDEKATEVVNNAIAKKKRICAVGTTAMRGLESAVSSNRTLNTFEGWTNKFIFPPYEFSIANSMITNFHLPKSTLLMMISAFMGHDLMKKAYKEAIMESYRFYSYGDAMLILR

SEQ ID NO: 68516 - protein, 349 aa, Maribacter orientalis
  misc_feature (1)..(349): tr|A0A1H7VR93|A0A1H7VR93_9FLAO S-adenosylmethionine:tRN A ribosyltransferase-isomerase OS=Maribacter orientalis OX=228957 GN=queA PE=3 SV=1
MKLSNFSFELPKELLAEHPSENRDESKLMVIHRDTGKIEHKMFKDMIDYFDEGDVMVLNNTKVFPARLYGNKEKTGARIEVFLLRELNEEQRLWDVLVDPARKIRIGNKLYFGDDETLVAEVIDNTTSRGRTLRFLYDGAYVDFRRKLRELGETPLPKYIKREVEAEDELRYQTIYAKHEGAVAAPTAGLHFSKHLLKRLEIKGIDFAELTLHVGLGTFNPVEVEDLSKHKMDSEELFIDEKATQIVNNAKLKKRRICAVGTTAMRGLESAVSSKHTLNTFEGWTNKFIFPPYDFSLANAMITNFHLPKSTLLMMVSAFMGHDLMTRAYKEAILENYKFYSYGDAMLII

SEQ ID NO: 68517 - protein, 349 aa, Maribacter polysiphoniae
  misc_feature (1)..(349): tr|A0A316E0C9|A0A316E0C9_9FLAO S-adenosylmethionine:tRN A ribosyltransferase-isomerase OS=Maribacter polysiphon iae OX=429344 GN=queA PE=3 SV=1
MKLSHFNFELPKELLAEYPSENRDESKLMVIHRETGKIEHKMFKDLINYFDEGDVMVLNNTKVFPARLYGNKEKTGARIEVFLLRELNEEQRLWDVLVDPARKIRIGNKLYFGEDESLVAEVIDNTTSRGRTLRFLYDGSYTDFRRKLRELGETPLPKYIKRDVEPEDEDRYQTIYAKHEGAVAAPTAGLHFSKHLLKRLEIKGIDFAEVTLHVGLGTFNPVEVEDLSKHKMDSEELIIDEKATEIVNTAKTNKRKVCAVGTTAMRGLESAVSSEHTLNTFNGWTNKFIFPPYEFSIATCMITNFHLPKSTLMMMVSAFAGHDLMKKAYKEAIMEGYKFYSYGDAMLIL

SEQ ID NO: 68518 - protein, 349 aa, Maribacter sp.
  misc_feature (1)..(349): tr|A4ATP3|A4ATP3_MARSH S-adenosylmethionine:tRNA ribosy ltransferase-isomerase OS=Maribacter sp. (strain HTCC21 70 / KCCM 42371) OX=313603 GN=queA PE=3 SV=1
MKLSHFNFELPNDLLAEYPAENRDESKLMVIHRETGKIEHKMFKDLINYFDEGDVMVLNNTKVFPARLYGNKEKTGARIEVFLLRELNEEQRLWDVLVDPARKIRIGNKLYFGEDESLVAEVIDNTTSRGRTLRFLYDGSYTDFRRKLRELGQTPLPKYIKRDVEEEDETRYQTIYAKHEGAVAAPTAGLHFSKHLLKRLEIKGVDFAELTLHVGLGTFNPVEVEDLSKHKMDSEELIIDEKATEIVNNAKSNKRKVCAVGTTAMRGLESAVSSEHTLNTFNGWTNKFVFPPYEFSIANCMVTNFHLPKSTLLMMVSAFIGHDLMKKAYKEAILESYKFYSYGDAMLII

SEQ ID NO: 68519 - protein, 349 aa, Maribacter sp.
  misc_feature (1)..(349): tr|A0A559NPJ6|A0A559NPJ6_9FLAO S-adenosylmethionine:tRN A ribosyltransferase-isomerase OS=Maribacter sp. MAR_20 09_72 OX=1250050 GN=queA PE=3 SV=1
MKLSNFNFELPKELLAEHPSENRDESRLMVIHRDTGKIEHRMFKDMIDYFDEGDVMVLNNTKVFPARLYGNKEKTGARIEVFLLRELNEEQRLWDVLVDPARKIRIGNKLYFGDDETLVAEVIDNTTSRGRTLRFLYDGAYLDFRRKLRELGETPLPKYIKREVEPEDENRYQTIYAKHEGAVAAPTAGLHFSKHLLKRLEIKGVDFAELTLHVGLGTFNPVEVEDLSKHKMDSEEMFIDEKAAEIVNNAKAKKRRICAVGTTAMRGLESAVSSKQTLNTYEGWTNKFIFPPYDFSIANAMITNFHLPKSTLLMMVSAFMGHDLMNKAYKEAILESYKFYSYGDAMLIL

SEQ ID NO: 68520 - protein, 349 aa, Maribacter spongiicola
  misc_feature (1)..(349): tr|A0A4R7JKX6|A0A4R7JKX6_9FLAO S-adenosylmethionine:tRN A ribosyltransferase-isomerase OS=Maribacter spongiicol a OX=1206753 GN=queA PE=3 SV=1
MKLSNFSFELPKELLAEHPSENRDESKLMVIHRDTGKIEHKMFKDMIDYFDEGDVMVLNNTKVFPARLYGNKEKTGARIEVFLLRELNEEQRLWDVLVDPARKIRIGNKLYFGDDETLVAEVIDNTTSRGRTLRFLYDGAYVDFRRKLRELGETPLPKYIKRDVEPEDEGRYQTIYAKHEGAVAAPTAGLHFSKHLLKRLEIKGVDFAELTLHVGLGTFNPVEVEDLSKHKMDSEELFIDEKATDIVNNAKREKRRICAVGTTAMRGLESAVSSKQTLNTYEGWTNKFIFPPYDFSIANAMITNFHLPKSTLLMMVSAFMGHDLMNKAYKEAILESYKFYSYGDAMLII

SEQ ID NO: 68521 - protein, 349 aa, Maribacter stanieri
  misc_feature (1)..(349): tr|A0A1I6KCP9|A0A1I6KCP9_9FLAO S-adenosylmethionine:tRN A ribosyltransferase-isomerase OS=Maribacter stanieri O X=440514 GN=queA PE=3 SV=1
MKLSNFNFELPKELLAEHPSENRDESKLMVIHRDTGKIEHKMFKDMIDYFDEGDVMVLNNTKVFPARLYGNKEKTGARIEVFLLRELNEEQRLWDVLVDPARKIRIGNKLYFGDDETLVAEVIDNTTSRGRTLRFLYDGAYLDFRRKLRELGETPLPKYIKREVEPEDEGRYQTIYAKHEGAVAAPTAGLHFSKHLLKRLEIKGVDFAELTLHVGLGTFNPVEVEDLSKHKMDSEELFIDEKATDIVNNAKLEKRRICAVGTTAMRGLESAVSSKHTLNTYEGWTNKFIFPPYDFSIANAMITNFHLPKSTLLMMVSAFMGHDLMNKAYKEAILENYKFYSYGDAMLII

SEQ ID NO: 68522 - protein, 349 aa, Maribacter ulvicola
  misc_feature (1)..(349): tr|A0A1N6Y2T5|A0A1N6Y2T5_9FLAO S-adenosylmethionine:tRN A ribosyltransferase-isomerase OS=Maribacter ulvicola O X=228959 GN=queA PE=3 SV=1
MKLSNFNFELPDELLAEHPSENRDESKLMVIHRDTGKIEHRMFKDMIDYFDEGDVMVLNNTKVFPARLYGNKEKTGARIEVFLLRELNEEQRLWDVLVDPARKIRIGNKLYFGDDETLVAEVIDNTTSRGRTLRFLYDGAYVDFRRKLRELGETPLPKYIKRDVEPEDEGRYQTIYAKHEGAVAAPTAGLHFSKHLLKRLEIKGVDFAELTLHVGLGTFNPVEVEDLSKHKMDSEELFIDEKATDIVNNAKLNKRRICAVGTTAMRGLESAVSSKHTLNTYEGWTNKFIFPPYDFSIANAMITNFHLPKSTLLMMVSAFIGHDLMNKAYKEAILESYKFYSYGDAMLII

SEQ ID NO: 68523 - protein, 349 aa, Maribacter vaceletii
  misc_feature (1)..(349): tr|A0A495DT22|A0A495DT22_9FLAO S-adenosylmethionine:tRN A ribosyltransferase-isomerase OS=Maribacter vaceletii OX=1206816 GN=queA PE=3 SV=1
MKLSNFNFELPEELLAEYPAEHRDESKLMVVHRETGKIEHKMFKDLINYFDEGDVMVLNNTKVFPARLYGNKEKTGARIEVFLLRELNEEQRLWDVLVDPARKIRIGNKLYFGDDETLVAEVIDNTTSRGRTLRFLYDGSYLDFRRKLRDLGETPLPKYIKREVEENDEERYQTIYAKHEGAVAAPTAGLHFSKHLLKRLEIKGVDFAELTLHVGLGTFNPVEVEDLSKHKMDSEELIIDEKATEVVNNAKTNKRKVCAVGTTAMRGLESAVSSNQTLNTYEGWTNKFIFPPYDFSIANCMITNFHLPKSTLMMMVSAFAGHDLMKKAYKEAILESYKFYSYGDAMLII

SEQ ID NO: 68524 - protein, 350 aa, Maribius pelagius
  misc_feature (1)..(350): tr|A0A1H8B995|A0A1H8B995_9RHOB S-adenosylmethionine:tRN A ribosyltransferase-isomerase OS=Maribius pelagius OX= 387096 GN=queA PE=3 SV=1
MRLSEFDFDLPEDRIAVRPARPRSSARMLVARGDRIDDAVVRDLPDWLSPGDLLVLNDTKVIPARLSGHRTRQGAEGETTARIEATLLEPRADGTWSALLKPLKKVRDGEVVVFSDQLSATVEGRSDGTAHLRFNLAGDDFDAALADAGAMPLPPYIAAKRPADAQDHEDYQTIWAARSGAVAAPTASLHFDPPLMERLAARGIEIAHVTLHVGAGTFLPVKVDDVSEHKMHAEWGEVSQAAADAMMAARARGNRVIPVGTTALRLIETAATARGQIAAWSGDTDIFITPGFAFRMADALMTNFHLPKSTLMMLVSAFLGVERIRRVYDHAIGNDYRFFSYGDASLLIPE

SEQ ID NO: 68525 - protein, 350 aa, Maribius salinus
  misc_feature (1)..(350): tr|A0A1M6BIK4|A0A1M6BIK4_9RHOB S-adenosylmethionine:tRN A ribosyltransferase-isomerase OS=Maribius salinus OX=3 13368 GN=queA PE=3 SV=1
MRLSEFDFDLPEDRIAVRPARPRSSARMLVARGDRIDDAVVRDLPDWLAPGDLLVLNDTKVIPARLSGQRTRHGAEGETTARIEATLLEPRADGTWSALLKPLKKVRDGEVVVFSDQLSAVVEGRSDGTAHLRFNLAGDDFDAALAQAGAMPLPPYIAAKRPADAQDHEDYQTIWAARSGAVAAPTASLHFDPFLMERLAARGIEIAYVTLHVGAGTFLPVKVDDVSEHKMHAEWGEVSQGAADAMMATRARGNRVIPVGTTALRLIETAATGRGEIAAWSGDTDIFITPGFDFRMADALVTNFHLPKSTLMMLVSAFLGADRIRRVYDHAIANDYRFFSYGDASLLIPE

SEQ ID NO: 68526 - protein, 353 aa, Maricaulis maris
  misc_feature (1)..(353): tr|A0A495D1F4|A0A495D1F4_9RHOB S-adenosylmethionine:tRN A ribosyltransferase-isomerase OS=Maricaulis maris OX=7 4318 GN=queA PE=3 SV=1
MRVSDFDFHLPEERIALRPARPRDAARMLHVASNGVLADRGVRDLPDLLQPGDLMVFNDTRVIPAALKGVRPARAVGGGGPVELEVNLHKRIDASAWRAFVRPAKRLRTGDTITFSETLTAKVTGKSEGGDVRLVFNVTGAALDAAIAVAGEMPLPPYIARKRGVDEQDEADYQTLFATHEGSVAAPTAGLHFTPELMAALDARGVEQTRVTLHVGAGTFLPVKSDDTDDHQMHSEWCTVSEQAAAAINAAKAEGRRVIPVGTTALRTIESLASGPGVIKAGSRDTDIFLTPGSSFAITDMLMTNFHLPKSTLFMLVSALSGLDVMQRAYAHAIAAEYRFYSYGDACLLERRT

SEQ ID NO: 68527 - protein, 353 aa, Maricaulis maris
  misc_feature (1)..(353): sp|Q0ANH8|QUEA_MARMM S-adenosylmethionine:tRNA ribosylt ransferase-isomerase OS=Maricaulis maris (strain MCS10) OX=394221 GN=queA PE=3 SV=1
MRVSDFDFHLPEARIALRPARPRDAARMLHVASNGVFADRGVRDLPDLLQPGDLMVFNDTRVIPAALKGIRPARAVGGGGPVEVEVNLHKRIDASAWRAFVRPAKRLRMGDEIAFGETLKAEVTGKSEGGDVRLVFNAAGAALDAAIAVAGEMPLPPYIARKRGVDEKDEADYQTLFATHEGSVAAPTAGLHFTPELMAALEARGVEQTRVTLHVGAGTFLPVKSDDTDDHQMHSEWCTVSAEAADAINAAKAEGRRVIPVGTTALRTIESLASGPGIVRAGSRDTDIFLTPGSDFAITDMLMTNFHLPKSTLFMLVSALSGLDVMQRAYAHAIAAEYRFYSYGDACLLERRT

SEQ ID NO: 68528 - protein, 311 aa, Maricaulis salignorans
  misc_feature (1)..(311): tr|A0A1G9PS44|A0A1G9PS44_9RHOB S-adenosylmethionine:tRN A ribosyltransferase-isomerase OS=Maricaulis salignoran s OX=144026 GN=SAMN04488568_10410 PE=3 SV=1
MLDLPDLLRAGDLLVFNDTRVIPAALVGTRAARALGGGGDVSCEINLHKRAGPDRWRAFIRPAKRLKIGDSIAFGTFSAEVIEKGPGGDTLLAFDLSGAVLDEAIAATGVPPLPPYIARKRSVDAADVEDYQTLFAREDGSVAAPTAGLHFTERLFDALAARGVERCDVTLHVGAGTFLPVKAEDTADHRMHGEWCTVSEQAANAINTARLQGRRVIAVGTTALRTLESLAPEIGRIESGSRDTEIFITPGYDFRITDALLTNFHLPRSTLFMLVSALAGLETMQRAYAHAIENGYRFYSYGDTSLLERAR

SEQ ID NO: 68529 - protein, 355 aa, Maricaulis sp.
  misc_feature (1)..(355): tr|A0A2D8BTM6|A0A2D8BTM6_9RHOB S-adenosylmethionine:tRN A ribosyltransferase-isomerase OS=Maricaulis sp. OX=148 6257 GN=queA PE=3 SV=1
MRLSDFDYDLPDERIALRPARPRDSARLLHIRADGSLGDHGVKDLASLLRPGDLLVSNDTHVLRAALTGERAARAVGGGGAAKISVNLHTRDNARCWRAFVKPAKRLKVGDEIRFGSLKASIEAKRPGGEVVLEFDCEGEALDRAIAIAGQPPLPPYIASKRAPDAQDADDYQTVFADPDKTGSVAAPTAGLHFTDDLMAALRRAGVEFTAVTLHVGAGTFLPVKSENIAEHQMHSEWYEVSEAAAETINRARADGRRIIPVGTTALRTLESAASEDGELEACVGETEIFITPGYRFRAADALLTNFHLPKSTLLMLVSAMAGTDVIKRAYAHAVKVEYRFFSYGDACLIERADR

SEQ ID NO: 68530 - protein, 353 aa, Maricaulis sp.
  misc_feature (1)..(353): tr|A0A1Q8FJS7|A0A1Q8FJS7_9RHOB S-adenosylmethionine:tRN A ribosyltransferase-isomerase OS=Maricaulis sp. W15 OX =1772333 GN=queA PE=3 SV=1
MRVSDFDFHLPEERIALRPARPRDAARMLHVASNGVLADRGVRDLPDLLQPGDLMVFNDTRVIPAALKGVRPARAVGGGGPVELEVNLHKRIDASAWRAFVRPAKRLRTGDTITFSETLTAKVTGKSEGGDVRLVFNATGAALDAAIAVAGEMPLPPYIARKRGVDEQDEADYQTLFATHEGSVAAPTAGLHFTPELMAALDARGVEQTRVTLHVGAGTFLPVKSDDTNDHQMHSEWCTVSEQAAAAINAAKAEGRRVIPVGTTALRTIESLASGPGVIKAGSRDTDIFLTPGSSFAITDMLMTNFHLPKSTLFMLVSALSGLDVMQRAYAHAIAAEYRFYSYGDACLLERRT

SEQ ID NO: 68531 - protein, 352 aa, Marichromatium gracile
  misc_feature (1)..(352): tr|A0A4R4AG82|A0A4R4AG82_MARGR S-adenosylmethionine:tRN A ribosyltransferase-isomerase OS=Marichromatium gracil e OX=1048 GN=queA PE=3 SV=1
MRRSDFHFDLPDELIAQYPLAERAASRLLVLEAGAERPSDRRFLDLPALLRPNDLLVFNNTRVMRARLFAVKETGGRVELLIERVVEPGVALAHLRASKSPKPGARLSIDGVPRIEVIGRDDDLFRLRALDDDFAVLMERFGHMPLPPYITRADEAADESRYQTVYARNAGAVAAPTAGLHFDEALLDRLDARGVERAEITLHVGAGTFRPVRVDDLDQHHMHSEWLEVDEALCARVAETRARGARVIAVGTTSVRALETAAAGGELRPYRGESRLFIRPGYRFRVVDAMVTNFHLPESTLLMLVCAFAGYQRMMAAYRHAVAERYRFFSYGDAMFLAAMREDPSRQPPLIE

SEQ ID NO: 68532 - protein, 352 aa, Marichromatium purpuratum
  misc_feature (1)..(352): tr|W0E713|W0E713_MARPU S-adenosylmethionine:tRNA ribosy ltransferase-isomerase OS=Marichromatium purpuratum 984 OX=765910 GN=queA PE=3 SV=1
MRRSDFHFDLPDELIAQYPLAERAASRLLVLEAGAARPSDRRFLDLPELLRPNDLLVFNNTRVMRARLFAVKETGGRVELLIERVVEPGVALAHLRASKSPKPGARLLIDGVPCIEVIGRDDDLFRLRALDDDFTVLMERFGHMPLPPYITRADEAADESRYQTVYARNAGAVAAPTAGLHFDEALLDRLDAIGVERAEITLHVGAGTFRPVRVDDLDQHRMHSEWLEVDETLCARVAETRARGGRVVAVGTTSVRALETAAAAGELRPYRGESRLFIRPGYRFRVVDAMVTNFHLPESTLLMLVCAFAGYQRMMAAYRHAVAERYRFFSYGDAMFLAARREDRSRQAPLIE

SEQ ID NO: 68533 - protein, 334 aa, Unknown
  misc_feature (1)..(334): tr|A0A0C1UB74|A0A0C1UB74_9ACTN S-adenosylmethionine:tRN A ribosyltransferase-isomerase OS=marine actinobacteriu m MedAcidi-G2B OX=1550401 GN=queA PE=3 SV=1
MGPDDFDYELPEDLIAQHPLEERTAARMLVDLGNGPEHLRISDFPKLLKSGDIVVVNNTRVLPARLFLKKETGGNVEVLLLKALNQMTWEALVRPSRKVSPGTKFTVSPEMTIYIGEDLGAGKRLVQIKTKSDFLPLLEKYGKVPLPPYIKNDLEDGERYQTVFANRSNSSAAPTAGLHFTEDLVAECKDSGAQVEEIELAIGLDTFRPLTVNNLDDHDMHSEFYSVSEEVIHRCKEANRVIAIGTTTVRALESAVRFELSGQTNLFIRDPFEFKIVDLLLTNFHLPKSTLLVMLEAFIGPYWRDLYTEAQINRYRFLSFGDSMLVSDRSTRKL

SEQ ID NO: 68534 - protein, 339 aa, Unknown
  misc_feature (1)..(339): tr|A0A0C1UNU2|A0A0C1UNU2_9ACTN S-adenosylmethionine:tRN A ribosyltransferase-isomerase OS=marine actinobacteriu m MedAcidi-G3 OX=1550402 GN=queA PE=3 SV=1
MREFDYGLPEGAIAQSPAEPRDSAKLLVDCGIGQPVQHLTVANLPGLIAEGDVVVVNETSVIPARLHLRKVTGGAVEVLLLEPAEDGWSALVKPGRRVKSGTELRSERDTDLQVLVGDEISEDGQREVVVRHRGELISNPSEAQKLSRAGEQPLPPYITSKGHSPDRYQTVYARTPGSVAAPTAGLHLTEGVLQEIRDKGAQIKKIDLVVGIDTFRPVTVDDPANHVMHSESYKVDESTWEACQAAQRVVAIGTTTVRALESAARGALSGRTDLFLRRGARFEIVDALMTNFHMPKSTLLMMIDAFIGQRWKNLYREALENNYRFLSFGDAMFMDKTPS

SEQ ID NO: 68535 - protein, 411 aa, Unknown
  misc_feature (1)..(411): tr|A0A1Q3GXB8|A0A1Q3GXB8_9BACT S-adenosylmethionine:tRN A ribosyltransferase-isomerase OS=marine bacterium AO1- C OX=1905359 GN=queA PE=3 SV=1
MNPQNTHHLSPVYLRDYDYTLPEERIAKSPLAQRDHSKLLVYRSGNINHQHFYDLPQHLPGDTLLAFNDTKVIPARLYFQKPTGAVIEVFLLQPTNPPEIAAAMHKSQGCTWHCMIGNKRKWNQDLVLEQTLADGLVLKANLINREKNEVEFTWNDAQMSFAEILAKIGELPLPPYLKRKATQKDADQYQTVYSKFEGAVAAPTAGLHFTNEVIEALEQKGVQTEYLTLHVSAGTFQPVKVDNVLEHEMHSEQIVVQRKNIEHLAQHASQVVAVGTTSMRVLESIYWLGVRIIKENYQPQLDKPFQIEKLYPYQWENETLPTRQESMQAILTFMQTQGLEKLWGATEIFIFPGYDFKMCNGLITNYHLPKTTLILLIAAFVGEDWRKVYDEALASDYRFLSYGDSSLLWRN

SEQ ID NO: 68536 - protein, 350 aa, Unknown
  misc_feature (1)..(350): tr|A0A1Q3GIW3|A0A1Q3GIW3_9BACT S-adenosylmethionine:tRN A ribosyltransferase-isomerase OS=marine bacterium AO1- C OX=1905359 GN=queA PE=3 SV=1
MKLSEFKFDFPNSLLALHPTENRDESRLMVVHRESGKIEHKVFKDIVSYFDEGDVFVVNNTKVFPARLFGSKEKTGAQIEVFLLRELNQEAHLWDVLVDPARKIRVGNKLFFGNGELVAEVIDNTTSRGRTIRFLTDRSDEEFYQLIDELGETPLPKHIYQHRKTDPNDRERFQTIFAEHVGAVAAPTAGLHFTKQLIKRLELKGIDMTPITLHIGLGTFREVDVEDLTKHKADSENFSVPTITTEKVNNALAQKRKVCAIGTTAIKALESSVSANGLLKENEGWSDKFIFPPYEFKIPNALVTNFHLPESTLLMTACAFGGYELIMEAYSQAVKEKYRFFSYGDAMLIL

SEQ ID NO: 68537 - protein, 352 aa, Unknown
  misc_feature (1)..(352): tr|B7RY81|B7RY81_9GAMM S-adenosylmethionine:tRNA ribosy ltransferase-isomerase OS=marine gamma proteobacterium HTCC2148 OX=247634 GN=queA PE=3 SV=1
MKRTDFSYHLPEELVAQYPLPERSDSRLLCLDGSDGAMAHRNFTDFPGLLTSDDLLVFNNTRVIPARLWGQKETGGKLEILIERVTGTHSALAHIRCSKSPRPGTRILLAEREGASPGDYRLEVTGREGALFMLSSESGLPLTDIMRDIGHMPLPPYIARQDEEADQERYQTVFAEREGAVAAPTAGLHFTDDLLRQIAELDVRTAKVTLHVGAGTFQPVREDNILDHIMHSEFVEVGEDVCAAVSDARARGGRVVAVGTTAVRSLESASTTGEIRPFVGDTDIFIYPGYQFRSVDAMVTNFHLPESTLLMLVSAFAGKEHIMNAYEEAVARSYRFFSYGDAMFLSAGESSQ

SEQ ID NO: 68538 - protein, 349 aa, Unknown
  misc_feature (1)..(349): tr|A0YHN5|A0YHN5_9GAMM S-adenosylmethionine:tRNA ribosy ltransferase-isomerase OS=marine gamma proteobacterium HTCC2143 OX=247633 GN=queA PE=3 SV=1
MQLSDFNFQLPNHLIARYPTTNRTDSRLLVLDGQSGDIQHQQFNDLSELLNDGDLLVFNDTRVIPARLWGKKSTGGRIEILVERIIDSQRVLAHIRSSKSPKAGAVLHLHQNANSDETMATVTVVGRHDALFELMFDGEKEALSVLNSIGHMPLPPYIDRSDELADRERYQTVYGKKDGAVAAPTAGLHFSEQFIQHCQNKGVDTAFVTLHVGAGTFQPVRVSNITEHKMHAEWLEVSEQVCEKVRLTRQRGGRVIAVGTTSVRSLETASHSGELQPFSGDSEIFIYPGYQFKSVDAMLTNFHLPESTLIMLVSAFANREHVLEAYRTAVEHNYRFFSYGDAMFVLPQR

SEQ ID NO: 68539 - protein, 367 aa, Mariniblastus fucicola
  misc_feature (1)..(367): tr|A0A5B9P8V1|A0A5B9P8V1_9PLAN S-adenosylmethionine:tRN A ribosyltransferase-isomerase OS=Mariniblastus fucicol a OX=980251 GN=queA PE=3 SV=1
MSLTQPVPFEISMPNETQPKLATSDYDYELPKDLIAQHPLRNREDARLMMVSRERDFIDHYHVRDLAELLKPGDCLVLNNTRVLPAKLVGKRTQTGGRWQGLFLESDGNGNWKLLCKTRGKMQPGETVTVTDRHGVDRATLKMIARLDDGAWAVRPEAEGDYETLLSQMGRVPLPHYIRDGNMVDADLKDYQTIYAKTAGAVAAPTAGLHLTKRLIKELIDEGIRIAQVTLHVGIGTFRPVTADDLNEHVMHYETGEINQKSVDLINQTRADGGRIVAVGTTSVRVLETAGSDGELKPWVGDTNLFIKPPYEFKVVDGLMTNFHLPRSTLLVMIRTLGGDELLKRAYAEAVDEKYRFFSYGDAMLIL

SEQ ID NO: 68540 - protein, 354 aa, Marinicauda algicola
  misc_feature (1)..(354): tr|A0A4S2H249|A0A4S2H249_9RHOB S-adenosylmethionine:tRN A ribosyltransferase-isomerase OS=Marinicauda algicola OX=2029849 GN=queA PE=3 SV=1
MKLSDFDFVLPEDRIALRPVRPRDAAKLLQVASDGTLSDHGVVDLPGLLQPGDLLVFNDTKVIPAALEGVRPARAVGGGGEARIEINLHKRETENAWRAFARPAKRLKEKDTLTFTGGLSARVTGKGEGGEIALEFDRSGIELDRAIVAAGAPPLPPYIASKRAPDAADLTDYQTIYADPEKSGSVAAPTAGLHFTDRLMAALDARGVKKTWVTLHVGAGTFLPVKTENVAGHKMHAEWYEISDAAAAAINAARAAGGRIIPVGTTSLRTLESAAASDGRIEAGSADTAIFITPGYRFRVTDALMTNFHLPRSTLFMLVSALAGLDTMQRAYAHAIESGYRFFSYGDSSLIWRA

SEQ ID NO: 68541 - protein, 355 aa, Marinicauda pacifica
  misc_feature (1)..(355): tr|A0A4S2HFP2|A0A4S2HFP2_9RHOB S-adenosylmethionine:tRN A ribosyltransferase-isomerase OS=Marinicauda pacifica OX=1133559 GN=queA PE=3 SV=1
MNLSDFDFDLPEDRIALRPARPRDSARLLHVGADGALSDRGVLELPDLLAPGDLLVFNDTRVIPAALEGLRPARAVGGGGPAHIEINLHKRESEAVWRAFARPAKRLREGDTLAFEGGLGAVVEGKTDGGEVTLRFDRAGPALDRAIVEAGAPPLPPYIASKRKPDAADLEDYQTIYAAPDKTGSVAAPTAGLHFTDRLMEALRLRGVKSAQVTLHVGAGTFLPVKTENVAEHTMHSEWYEIGEEAAQAIAETRAAGGRIIAVGTTSLRTLESAAGEDGTIRAGSAETAIFITPGYRFRLVDGLMTNFHLPKSTLFMLVSALAGLDTMQAAYAHAIAQGYRFFSYGDSSLIWRAE

SEQ ID NO: 68542 - protein, 355 aa, Marinicauda sp.
  misc_feature (1)..(355): tr|A0A2U2BRI2|A0A2U2BRI2_9RHOB S-adenosylmethionine:tRN A ribosyltransferase-isomerase OS=Marinicauda sp. WD6-1 OX=2135793 GN=queA PE=3 SV=1
MKLADFDFDLPEDLIALRPARPRDSARLLHVAADGALADRGVLDLPALLNPGDLLVFNDTRVIPAALAGVRPARPVGGGGDSTVEINLHKRAGEAAWLAFARPAKRLREGDEIRFDGGLAATVTDKREGGEIALSFDRSGVDLDRAIVAAGAPPLPPYIASKRAPDETDLADYQTIYADPEKAGSVAAPTAGLHFTDRLFAALDDRGVKRARVTLHVGAGTFLPVKTEDVSEHRMHAEWYEIGADAAAAINETRAAGGRIIPVGTTSLRTLESAADADGTVRAEARDTDIFITPGYRFRVVDALLTNFHLPKSTLFMLVSALAGLETMQRAYAHAIAEKYRFFSYGDACFIERAG

SEQ ID NO: 68543 - protein, 351 aa, Marinicaulis flavus
  misc_feature (1)..(351): tr|A0A2S7K3Q4|A0A2S7K3Q4_9PROT S-adenosylmethionine:tRN A ribosyltransferase-isomerase OS=Marinicaulis flavus O X=2058213 GN=queA PE=3 SV=1
MRVDLFDFELPPERIAMEPVSPRDSARLLCVRPEGLEDRIVRDLPGLLRPGDLLVANDTKVIPAQLFGQRPPRDGQTGGAPVAVEATLHKDLGRNVWRAFVRPAKRLKEGDAITFAAGLAARVIARDGAEADLQFETQGDHFFAALEKAGVMPLPPYIARKRPAGEDDKASYQTMFADEAGSVAAPTAGLHFTPDLIAALRDKGVEQTTVTLHVGAGTFLPVTAEDTADHKMHAEWGEITHSQAAKINEARAAGGRIIAVGTTSLRLLESAAGEDGKIAPFADETDIFITPGYRFKAADMLMTNFHLPRSTLFMLVSAFAGTDRMKAAYAHAVEQGYRFYSYGDACLLERI

SEQ ID NO: 68544 - protein, 341 aa, Marinicella litoralis
  misc_feature (1)..(341): tr|A0A4R6XWV3|A0A4R6XWV3_9GAMM S-adenosylmethionine:tRN A ribosyltransferase-isomerase OS=Marinicella litoralis OX=644220 GN=queA PE=3 SV=1
MKKKDFDFTLPSELIAQEPLPDRSASRLLKLHKSTGQTTDLQFKDILCELNPGDLLVFNNTKVIPARLLAQKSTGGKIEVFIERVLNEQQAKALLKSNKSVKLGSTIEFDGMAKMTVTAKQGMFYLVETINGHHLSDLMQQHGHMPLPPYITREADSHDDERYQTVYADNKQTGAVAAPTAGLHFDNDLLAQIEAKGIQSAFVTLHVGAGTFQPVKTDEIESHQMHKEWLSVDQQVCDLVKQTHAKGCRVIAVGTTAVRCLETAAANGEIEPFVGDTQIFIYPGYEFKIIDGLITNFHLPESTLVMLVSSLAGRKNILAAYQHAIDEQYRFFSYGDAMLIV

SEQ ID NO: 68545 - protein, 402 aa, Marinifilaceae bacterium
  misc_feature (1)..(402): tr|A0A434B002|A0A434B002_9BACT S-adenosylmethionine:tRN A ribosyltransferase-isomerase OS=Marinifilaceae bacter ium T3-2 S1-C OX=2487017 GN=DLK05_01930 PE=3 SV=1
MKAQQIQIKEFTYDLPEERIAKYPLQNRDLSKLLIYKNGEIKEAVFQSLSQHIEANCSMVFNNTKVIQARLIFYKDTGARVEIFCLEPLNPADYNLAFQAQTRSSWKCIVGNLRKWKTGVLKMPFYVDGKTYHLRAERLSQVDGAHEVQFSWDPIDLSFGEVLDQTGKIPIPPYLNRDSEDSDTIRYQTVYSKFEGSVAAPTAGLHFTEEVLAELGGKGIFREELTLHVGAGTFKPVKAENIGEHEMHTEHIQVDLKTLVSLSECQHKIIAVGTTSVRSLESLYWMGVKLLCNVENPNLLKQWEAYQLPQFYNYQEAYQAICKYMQQHELSLFNAATQIIIAPGYDFKVISGLVTNFHQPKSTLLLLISALVGEDWKKIYQYALQNDFRFLSYGDSSLLMRS

SEQ ID NO: 68546 - protein, 349 aa, Marinifilaceae bacterium
  misc_feature (1)..(349): tr|A0A434AW98|A0A434AW98_9BACT S-adenosylmethionine:tRN A ribosyltransferase-isomerase OS=Marinifilaceae bacter ium T3-2 S1-C OX=2487017 GN=queA PE=3 SV=1
MKLSKFKYNLPTELIALHPAYNRDESRLMVLHKDTGEVEHRIFKDIIEYFDDEDVMVFNNTKVFPARLYGNKEKTGAEIEVFLLRELNREQRLWDVLVDPARKIRIGNKLYFGEDDLLVAEVIDNTTSRGRTLRFLYDGPYEEFKKTLYSLGETPLPKFIDRAVEPEDADRYQTIFAKHEGAVAAPTAGMHFSRELMKRLEIKGVDFAEVTLHVGLGNFRNVDVEDLTKHKMDSEQIIINNTAVEKVNLAKKQKKNVCAVGTTVMRTLESSVSTMGMLKPFEGWTNKFIFPPYEFHVPNRMITNFHLPLSTLMMMACAFGGYDNVMSCYQQAIKEKYRFGTYGDAMLIL

SEQ ID NO: 68547 - protein, 415 aa, Marinifilum breve
  misc_feature (1)..(415): tr|A0A2V4A2R2|A0A2V4A2R2_9BACT S-adenosylmethionine:tRN A ribosyltransferase-isomerase OS=Marinifilum breve OX= 2184082 GN=queA PE=3 SV=1
MEINTENKTLETQQIEIANFTYDLPDHRIAKHPLQNRDLSKLLIYRNGEINESVFNQLPEEIEAGTKMVYNNTKVIQARLIFHKETGARVEIFCLEPLNPADYNLAFQATQKSTWKCIVGNSKKWKSGVLSMSFFVDEKEYQLQAERVQLLDGAQEIQFSWNHDELSFSEVLEQTGKIPIPPYLNRDTEEGDLVRYQTVYSKFEGSVAAPTAGLHFTDKVFAEMDTKGIEREELTLHVGAGTFKPVKSDQIGDHEMHTEHIQVTAESLRSIAAAKNGVIAVGTTSVRTLESLYWMGVKILNKAEDPKLLKQWEAYELPKNYTVEESFQAICTYMDENEISLFNAATQIIIAPGYDFKVIKGLVTNFHQPQSTLLLLISALVGDDWRKIYQYALENEFRFLSYGDSSLLMRRERFA

SEQ ID NO: 68548 - protein, 349 aa, Marinifilum breve
  misc_feature (1)..(349): tr|A0A2V4A6U3|A0A2V4A6U3_9BACT S-adenosylmethionine:tRN A ribosyltransferase-isomerase OS=Marinifilum breve OX= 2184082 GN=queA PE=3 SV=1
MKLSKFKYKLPTELIALHPAYNRDESRLMVLHKDTGEIEHKIFKDLIEYFDDEDVMVFNNTKVFPARLYGNKEKTGAEIEVFLLRELNREQRLWDVLVDPARKIRIGNKLYFGDDDLLVAEVIDNTTSRGRTLRFLYDGPYDEFKKTLFGLGETPLPKFIDRSVEPEDAERYQTIFAKHEGAVAAPTAGMHFSRELMKRLEIKGIDFAEVTLHVGLGNFRTVDVEDLTKHKMDSEQIFIEDEAVEKVNSAKKKKKNVCAVGTTVMRTLESSVSTMGTLKPYEGWTNKFIFPPYEFHVPNRMITNFHLPLSTLMMMVCAFGGYDNVMAAYEEAIKEKYRFGTYGDAMLII

SEQ ID NO: 68549 - protein, 415 aa, Marinifilum flexuosum
  misc_feature (1)..(415): tr|A0A419XA45|A0A419XA45_9BACT S-adenosylmethionine:tRN A ribosyltransferase-isomerase OS=Marinifilum flexuosum OX=1117708 GN=queA PE=3 SV=1
MEINTENKTLETQQIEIANFTYDLPDHRIAKHPLQNRDLSKLLIYRNGEINESVFNQLPEEIESGTKMVYNNTKVIQARLIFHKETGARVEIFCLEPLNPADYNLAFQATQKSTWKCIVGNSKKWKSGVLSMSFFVDEKEYQLQAERIQLLEGAQEIQFSWNHEELSFSEVLEQTGKIPIPPYLNRDTEEGDLVRYQTVYSKFEGSVAAPTAGLHFTDKVFAEMDAKGIEREELTLHVGAGTFKPVKSDQIGDHEMHTEHIQVTAESLRSIAATKNGVIAVGTTSVRTLESLYWMGVKILTKAEDPKLLRQWEAYQLPKNYTVEESFQAICAYMEENEISLFNAATQIIIAPGYDFKVIKGLVTNFHQPQSTLLLLISALVGEDWRKIYQHALDNEFRFLSYGDSSLLMKREIVG

SEQ ID NO: 68550 - protein, 349 aa, Marinifilum flexuosum
  misc_feature (1)..(349): tr|A0A419X671|A0A419X671_9BACT S-adenosylmethionine:tRN A ribosyltransferase-isomerase OS=Marinifilum flexuosum OX=1117708 GN=queA PE=3 SV=1
MKLSKFKYKLPTELIALHPAYNRDESRLMVLHKDTGKVEHKIFKDLIEYFDDEDVMVFNNTKVFPARLYGNKEKTGAEIEVFLLRELNREQRLWDVLVDPARKIRIGNKLYFGDDDLLVAEVIDNTTSRGRTLRFLYDGPYDEFKKTLFGLGETPLPKFIDRSVEPEDAERYQTIFAKHEGAVAAPTAGMHFSRELMKRLEIKGIDFAEVTLHVGLGNFRTVDVEDLTKHKMDSEQIFIEDEAVEKVNLAKKKKKNVCAVGTTVMRTLESSVSTMGTLKPFEGWTNKFIFPPYEFHVPNRMITNFHLPLSTLMMMVCAFGGYDNVMAAYEEAIKEKYRFGTYGDAMLII

SEQ ID NO: 68551 - protein, 366 aa, Marinifilum sp.
  misc_feature (1)..(366): tr|A0A4V4R9H5|A0A4V4R9H5_9BACT S-adenosylmethionine:tRN A ribosyltransferase-isomerase OS=Marinifilum sp. JC120 OX=2302941 GN=queA PE=3 SV=1
MKTEKMNINTEDFFLKSYDFELPEGQIAQCPAVMRHGSKLLVLDQKSGETEIKNFTDIVDLLPEGALLVANNSKVVPARIFGKKPTGGRVEFLLLTPLPLIEAEEVPGGFKAQARGLLRASKGPKTGNEIFFEGGLKLTVLGKGRFGLSKVELEWNGDLKKIFEECGKIPLPPYIRRAADETDNERYQTIYACDEKAGSVAAPTAGLHFSEEINEKMKAKNIERAEVTLYVGYGTFSPVRAEDIRDHEMHHEYIEIPEETAAAVIKAKQEGRPVIAVGTTSARTLEGAFQQAGEICEFKGETNIFIYPGYEFKVVDRMITNFHLPESSLVIMISALAGRKNVLNAYSKAVDNEFRFFSYGDSMYIK

SEQ ID NO: 68552 - protein, 349 aa, Mariniflexile fucanivorans
  misc_feature (1)..(349): tr|A0A4R1RCD4|A0A4R1RCD4_9FLAO S-adenosylmethionine:tRN A ribosyltransferase-isomerase OS=Mariniflexile fucaniv orans OX=264023 GN=queA PE=3 SV=1
MKLSHFGFNLPEELLAEYPAENRDESRLMVLDRKKQTIEHKMFKDIIDYFDEDDVLILNNTKVFPARLYGNKEKTGARIEVFLLRELNEEQRLWDVLVDPARKIRIGNKLYFGDDDTLVAEVIDNTTSRGRTLRFLYDGSYKEFRRKLNELGETPLPKYIKREVQPEDEDRYQTIYAKNEGAVAAPTAGLHFSRHLLKRLEIKGVKFAEVTLHVGLGTFNPVEVEDLSKHKMDSEELKIETPAVEIVNTAKKNKRRICAVGTTAMRAIESSVSSNGELNEVEGWTNKFIFPPYDFSIANCMITNFHTPKSTLLMMVSAFAGHDFIKKAYEEAVKEKYKFYSYGDAMLII

SEQ ID NO: 68553 - protein, 349 aa, Mariniflexile sp.
  misc_feature (1)..(349): tr|A0A385BQ16|A0A385BQ16_9FLAO S-adenosylmethionine:tRN A ribosyltransferase-isomerase OS=Mariniflexile sp. TRM 1-10 OX=2027857 GN=queA PE=3 SV=1
MKLSHFGFNLPEELLAEYPAENRDESRLMVLDRKKQTIEHKMFKDIINYFDEDDVLILNNTKVFPARLYGNKEKTGARIEVFLLRELNEEQRLWDVLVDPARKIRIGNKLYFGDDDTLVAEVIDNTTSRGRTLRFLYDGSYKEFRRKLNELGETPLPKYIKREVQPEDEERYQTIYAKNEGAVAAPTAGLHFSKHLLKRLEIKGVKFAEVTLHVGLGTFNPVEVEDLSKHKMDSEELKIDEKAVEIVNKGIQNKKRVCAVGTTAMRAIESSVSSGGRLNEVDGWTNKFIFPPYDFSIANCMITNFHTPKSTLLMMVSAFAGHDFIKKAYEEAVKEKYKFYSYGDAMLII

SEQ ID NO: 68554 - protein, 398 aa, Marinilabilia salmonicolor
  misc_feature (1)..(398): tr|A0A368UN69|A0A368UN69_9BACT S-adenosylmethionine:tRN A ribosyltransferase-isomerase OS=Marinilabilia salmoni color OX=989 GN=queA PE=3 SV=1
MHISIDQYTYNLPTEKIAKYPLTERDQSKLLLFSDGSIDNKTFSDLPNLIPADAMLLFNNTKVIRARLPFRKATGARIEIFCLEPASPTDVATAFEQTQEVTWNCMVGNLKKWKEGALEMEVDTGKTPVVVKAEKVSKTNDGFVIRFRWENPEYTFSELMEAMGKTPIPPYLERESEEIDTERYQTVYSREQGSVAAPTAGLHFTPEVMNSLKNKGVLLTNLTLHVGAGTFRPVKSETIADHKMHTEHFRVPLETLKQLKNHTGPKVAVGTTTLRTLESLYWAGVLAHRGKAFHHIEQWTPYNNEGIISFEDAISHLIEATEKEGKSHFEGSTAIIIVPGYEVRSIKGLVTNFHQPGSTLLLLVAAIVGENWKKIYDHALKNDYRFLSYGDSSLLWKA

SEQ ID NO: 68555 - protein, 398 aa, Marinilabilia salmonicolor
  misc_feature (1)..(398): tr|A0A2T0X4K7|A0A2T0X4K7_9BACT S-adenosylmethionine:tRN A ribosyltransferase-isomerase OS=Marinilabilia salmoni color OX=989 GN=queA PE=3 SV=1
MHISIDQYTYNLPTEKIAKYPLTERDQSKLLLFSDGSIDNKTFSDLPNLIPADAMLLFNNTKVIRARLPFRKATGARIEIFCLEPASPTDVAIAFEQTQEVTWNCMVGNLKKWKEGALEMEVDTGKTPVVVKAEKVSKTNDGFVIRFRWENPEYTFSELMEAMGKTPIPPYLERESEELDTERYQTVYSREQGSVAAPTAGLHFTPEVMNSLKNKGVLLTNLTLHVGAGTFRPVKSETIADHKMHTEHFRVPLETLKQLKNHTGPKVAVGTTTLRTLESLYWAGVLAHRGKAFHHIEQWTPYNNEGMISFEDAISHLIEATEKEGKSHFEGSTAIIIVPGYEVRSIKGLVTNFHQPGSTLLLLVAAIVGENWKKIYDHALKNDYRFLSYGDSSLLWKA

SEQ ID NO: 68556 - protein, 349 aa, Marinilabilia sp.
  misc_feature (1)..(349): tr|A0A2U2B9I7|A0A2U2B9I7_9BACT S-adenosylmethionine:tRN A ribosyltransferase-isomerase OS=Marinilabilia sp. WTE OX=2162893 GN=queA PE=3 SV=1
MKLSKFKYKLPEELIALHPSQNRDESRLMVVHKETGKIEHKVFKDIIDYFDEKDVMVFNNTKVFPARLYGNKEKTGAEIEVFLLRELNKEQRLWDVLVDPARKIRIGNKLYFGENDSLVAEVIDNTTSRGRTLRFLFDGSHEEFKETLYSLGETPLPKFINRKVEPEDRERYQTIFAKHEGAVAAPTAGMHFSRELLKRFEIKGVDFSYVTLHVGLGSFRSVDVEDLTKHKMDSEQIIIPEDSSKVINHAKDERKRVCAVGTTVMRTIESSVSTNGHVNPFEGWTNKFIFPPYEFSVADSMVSNFHLPYSTLLMMVAAFGGYDLIMKAYKTAVKEKYRFGTYGDAMLII

SEQ ID NO: 68557 - protein, 402 aa, Marinilabilia sp.
  misc_feature (1)..(402): tr|A0A2U2BCJ2|A0A2U2BCJ2_9BACT S-adenosylmethionine:tRN A ribosyltransferase-isomerase OS=Marinilabilia sp. WTE OX=2162893 GN=queA PE=3 SV=1
MDISIEQYNYSLPDERIAKYPLKRRDHSRLLFYKNNRITDKQFYNLPDLLPSTAMMIFNNTKVIRARLPFHKHTGARVEIFCLEPASPTDVALAFGQTEEVTWNCMVGNNKKWKVGTLEKELQINSKTIVLKASKEQKTSDGFIIRFSWNNSDFTFSELMEEIGKTPIPPYLERESEEIDTERYQTVYSKAQGSVAAPTAGLHFTPEILENLKSDGIKLENLTLHVGAGTFRPVKSETIADHEMHTEHFRISLNTLKSLRSHRGPKISVGTTSLRTLESLYWAGALAAKSKPFHHIEQWTPYNNKDVKLSFREAIDYLISAISSENKNYYEGSTAIIIVPGYQIRAVDGLLTNFHQPKSTLLLLVAALVGEKWKEIYKHALENDYRFLSYGDSSLLWASTSI

SEQ ID NO: 68558 - protein, 400 aa, Marinilabiliaceae bacterium
  misc_feature (1)..(400): tr|A0A353TYD8|A0A353TYD8_9BACT S-adenosylmethionine:tRN A ribosyltransferase-isomerase OS=Marinilabiliaceae bac terium OX=2053574 GN=queA PE=3 SV=1
MSIPQINISDYQYILPPERIARYPLEKRDDSKLLVYNKGHIAHSAFRQLADFLPDNTLLVFNNTRVIRARLQFKKQSGARVEIFCLEPYQPSDTALAFQSRSQVQWICMVGNQKKWKEGPVYAQAELGGVTLEIKALVIERLTDGSVIEFSWGNKDYSFADILENLGHTPIPPYLEREDEEIDIERYQTVYSKYQGSVAAPTAGLHFTDGIMKILTEKGIASAELTLHVGAGTFKPVKADSISEHEMHTEHFEVNLPTLRKIASHSGPVIAVGTTSVRTLESLYCAAALLQKQEPYRHIKQWDGLELTSTMTRTDALGHLISELEKQELKSFKASTSIIIAPGYSFKTVDGIITNFHQPRSTLLLLIAALIGDNWKEVYKQALAHDYRFLSYGDSSLLLR

SEQ ID NO: 68559 - protein, 400 aa, Marinilabiliaceae bacterium
  misc_feature (1)..(400): tr|A0A359FZ11|A0A359FZ11_9BACT S-adenosylmethionine:tRN A ribosyltransferase-isomerase OS=Marinilabiliaceae bac terium OX=2053574 GN=queA PE=3 SV=1
MSIPEINISDYQYILPPERIARYPLEKRDDSKLLVYNKGHIAHSAFRQLADFLPDNTLLVFNNTRVIRARLQFKKQSGARVEIFCLEPYQPSDTVLAFQSRSQVQWICMVGNQKKWKEGPVYAQAELGGVTIEIKALVIERLTDGSVIEFSWENKDYSFADILENLGHTPIPPYLEREDEEIDIERYQTVYSKYQGSVAAPTAGLHFTDSIMQVLAEKGIASAELTLHVGAGTFKPVKADSISEHEMHTEHFEVNLPTLTKIASHSGPVIAVGTTSVRTLESLYGAAALLQKQGPYRHIKQWDGLELTSTMTRTDALGHLISELEKQGLKSFKASTSIIIAPGYSFKTVDGIITNFHQPRSTLLLLIAALIGDNWKEVYKQALAHDYRFLSYGDSSLLLR

SEQ ID NO: 68560 - protein, 349 aa, Marinilabiliales bacterium
  misc_feature (1)..(349): tr|A0A2J6IBW1|A0A2J6IBW1_9BACT S-adenosylmethionine:tRN A ribosyltransferase-isomerase OS=Marinilabiliales bact erium OX=2053303 GN=queA PE=3 SV=1
MKLSQFKFNLPRELIADHPPKNRDESRLMIVNRKDQTIEHKSFKDIIDYFDDGDIFAINNTKVFPARLNGEKEKTGAKIEVFLLRELNRESRLWDVMVDPARKIRIGNKLYFGEDDALVAEVIDNTTSRGRTLRFLFDGPYEDFKRTLQELGETPLPKIHEREIEPEDEERYQTIYAKHEGAVAAPTAGLHFSRELMKRLEIKGVEFAELTLHTGLGNFRTIEVEDLTKHKVDSEQMILTPESAARMNAAKAKRHKVVAVGTTTMKALETAVSITGQVKPYSGWTNKFIFPPYEFGFADAMVTNLHMPMSPMMMMISAFVGYDFLFDVYKEAVKEKYKFFTYGDAMLII

SEQ ID NO: 68561 - protein, 405 aa, Marinilabiliales bacterium
  misc_feature (1)..(405): tr|A0A359FKM8|A0A359FKM8_9BACT S-adenosylmethionine:tRN A ribosyltransferase-isomerase OS=Marinilabiliales bact erium OX=2053303 GN=DCY97_03945 PE=3 SV=1
MMQKIKNISIGHYNYHLPDELIAKYPLPKRDGSKLLVYRQGEITERQFHEIEQLIPPKSLMVFNNTKVIRARLEFFKNTGARIEVFCLEPHQPSDYSQAFAQTSQCQWSCIVGNVKKWKEGIIEKKVKMPQGEVSITVKRLSTLNGEHIIEFKWNNPNTTFGELLESQGNIPIPPYLNRDAEDSDLKTYQTIYSKNEGSVAAPTAGLHFTNEVLNALQKRQITLHEVTLHVGAGTFKPVKSNEIGGHPMHPEHFLITTETIPILISHLGKITAVGTTTVRTLESLYWLGVKLLSSQNHPKLELGQWECYELPQQVPLEDALLALHARVLESGNPYVMAATSIMIAPGYSFKMVDRLITNFHQPKSTLLLLIAAFIGDDWKNIYQFALDHQFRFLSYGDSNLLLRT

SEQ ID NO: 68562 - protein, 345 aa, Marinilactibacillus piezotolerans
  misc_feature (1)..(345): tr|A0A1I4ABC3|A0A1I4ABC3_9LACT S-adenosylmethionine:tRN A ribosyltransferase-isomerase OS=Marinilactibacillus p iezotolerans OX=258723 GN=queA PE=3 SV=1
MTLVTDDFDFNLPEELIAQTPLKDRSSSRMMVLSKTRQSVKDKQFENIVDELNAGDALVMNNTRVLPARLHGEKVETGAHIELLLLKNIDGDQWETLAKPAKKVKAGSKIKFGDGRLIGTVLEELDHGGRIIEFDYEGIFLETLESLGEMPLPPYIKERLDDPDRYQTVYAKENGSAAAPTAGLHFTQDILAKLKSKGVQIVFLTLHVGLGTFRPVNVDNLEEHKMHEEFYQLTEEAAQVLNKTRENNGKIVAVGTTSIRTLETIGTKFDGKLEADSGWTDIFISPGYNFKVVDAFLTNFHLPKSTLIMLVSAFAGREFVLEAYNHAVEEQYRFFSFGDAMFLKK

SEQ ID NO: 68563 - protein, 345 aa, Marinilactibacillus psychrotolerans
  misc_feature (1)..(345): tr|A0A1R4JDH3|A0A1R4JDH3_9LACT S-adenosylmethionine:tRN A ribosyltransferase-isomerase OS=Marinilactibacillus p sychrotolerans 42ea OX=1255609 GN=queA PE=3 SV=1
MTLVTDDFDFNLPEELIAQTPLKDRSSSRMMVLSKNEKVVKDKQFENIVDELNPGDALVMNNTRVLPARLHGEKLETGAHIELLLLKNIDGDQWETLAKPAKKVKVGSKIKFGDGRLTGTVRKELDHGGRIIEFDYQGIFLETLESLGEMPLPPYIKERLDDPDRYQTVYAKENGSAAAPTAGLHFTEDILTALKSKGVQIVFLTLHVGLGTFRPVNVDNLEEHKMHEEFYQLTEEAAQVLNKTRENNGKIVAVGTTSIRTLETIGTKFDGKLKADSGWTDIFISPGYNFKVVDAFLTNFHLPKSTLIMLVSAFAGREFVLEAYNHAVKERYRFFSFGDAMFLKK

SEQ ID NO: 68564 - protein, 345 aa, Marinilactibacillus psychrotolerans; identical to SEQ ID NO: 68563
  misc_feature (1)..(345): tr|A0A511H2T7|A0A511H2T7_9LACT S-adenosylmethionine:tRN A ribosyltransferase-isomerase OS=Marinilactibacillus p sychrotolerans OX=191770 GN=queA PE=3 SV=1

SEQ ID NO: 68565 - protein, 345 aa, Marinilactibacillus sp.; identical to SEQ ID NO: 68562
  misc_feature (1)..(345): tr|A0A1L4BZ13|A0A1L4BZ13_9LACT S-adenosylmethionine:tRN A ribosyltransferase-isomerase OS=Marinilactibacillus s p. 15R OX=1911586 GN=queA PE=3 SV=1

SEQ ID NO: 68566 - protein, 350 aa, Marinimicrobia bacterium
  misc_feature (1)..(350): tr|A0A117MAA2|A0A117MAA2_9BACT S-adenosylmethionine:tRN A ribosyltransferase-isomerase OS=Marinimicrobia bacter ium 46_43 OX=1635280 GN=queA PE=3 SV=1
MYKESTNPLIYRDTYNYELPEELIAQYPLKDRDHSRLLTLKRQTGHIDHLTFDVLPDLLQPGDVLVFNETKVISARLKGHKMSGGKAEIFLLNQKDDSHWECLVKPGRRLQPGTVVTFSDTFKAEIINVLEDGGRLVKFTWEGDFWNTLEVHGQIPLPPYVHREPEPSDKDHYQTVYARTYGSVAAHTAGLHFTQEILDKLSTKGVETAFVNLRVGLGTFRPVKTKRIDQHIMHREYCEISTHTANIVNKALDQGRRVIAVGTTSTRTLESFAENGRVHSGGHFTDIFIYPGGRPIQIISGLITNFHMPKSTLLMLVSAFAGYENIMNAYKIAVQEKYRFFSYGDAMMIL

SEQ ID NO: 68567 - protein, 350 aa, Marinimicrobia bacterium
  misc_feature (1)..(350): tr|A0A101G4T4|A0A101G4T4_9BACT S-adenosylmethionine:tRN A ribosyltransferase-isomerase OS=Marinimicrobia bacter ium 46_47 OX=1635279 GN=queA PE=3 SV=1
MYKESANPLIYRDTYNYELPEELIAQYPLKDRDHSRLLTLKRQTGHIDHLTFDVLPDLLQPGDVLVFNETKVISARLKGHKMSGGKAEIFLLNQKDDSHWECLVKPGRRLQPGTVVTFSDTFKAEIINVLEDGGRLVKFTWEGDFWNTLEVHGQIPLPPYVHREPEPSDKDHYQTVYARTYGSVAAHTAGLHFTQEILDKLSTKGVETTFVNLRVGLGTFRPVKTKRIDQHIMHREYCEISTHTANIVNKALDQGRRVIAVGTTSTRTLESFAENGRVHSGGHFTDIFIYPGGRPIQIISGLITNFHMPKSTLLMLVSAFAGYENIMNAYKIAVQEKYRFFSYGDAMMIL

SEQ ID NO: 68568 - protein, 359 aa, Marinimicrobium koreense
  misc_feature (1)..(359): tr|A0A3N1NUE6|A0A3N1NUE6_9GAMM S-adenosylmethionine:tRN A ribosyltransferase-isomerase OS=Marinimicrobium koree nse OX=306545 GN=queA PE=3 SV=1
MRRQDFYYDLPESLIAREPAAERRGSRLLGLDGPTGKVTHGQFPDLLEQVRPGDLMVFNDTKVIPARLFGMKDTGGKVEILVERLLTDARVLAHTRASKSPKIGSLIVLEDGTRLAVTGRRDDLFELNFPPEETALSVLERLGHMPLPPYIDREDEELDRERYQTVYGRKAGAVAAPTAGLHFDDDLLAQLQAKGVNLAFVTLHVGAGTFQPVRVDNIAEHKMHSEVMDLNEQVAEQVRATRATGGRVIAVGTTSVRCLETAAARAESGQGMAAYQGETDIFITPGFEFKAVDALLTNFHLPESTLMMLVSAFAGYRHIMDAYREAVAQEYRFFSYGDAMFITRNPDAPRDLPGSPSEG

SEQ ID NO: 68569 - protein, 359 aa, Marinimicrobium sp.
  misc_feature (1)..(359): tr|A0A2D8WHZ4|A0A2D8WHZ4_9GAMM S-adenosylmethionine:tRN A ribosyltransferase-isomerase OS=Marinimicrobium sp. O X=2024837 GN=queA PE=3 SV=1
MRRQDFYYDLPESLIAREPAAERRGSRLLGLDGPTGKVTHGQFPDLLEQVRPGDLMVFNDTKVIPARLFGMKDTGGKVEILVERLLTDARVLAHTRASKSPKIGSLIVLEDGTRLAVTGRRDDLFELNFPPEETSLSVLERLGHMPLPPYIDREDEELDRERYQTVYGRKAGAVAAPTAGLHFDDDLLAQLQAKGVNLAFVTLHVGAGTFQPVRVDNIAEHKMHSEVMDLNEQVAEQVRATRATGGRVIAVGTTSVRCLETAAARAEPGQGMAAYQGETDIFITPGFEFRAVDALLTNFHLPESTLMMLVSAFAGYRHIMDAYREAVAQEYRFFSYGDAMFITRNPDAPRDLPGSPSEG

SEQ ID NO: 68570 - protein, 343 aa, Marininema halotolerans
  misc_feature (1)..(343): tr|A0A1I6R1T4|A0A1I6R1T4_9BACL S-adenosylmethionine:tRN A ribosyltransferase-isomerase OS=Marininema halotolera ns OX=1155944 GN=queA PE=3 SV=1
MDVSLFDFDLPQELIAQTPLLNRSSSRLLVLDRKTEEIEHGTFADLLGYLKAGDVLVLNDTRVRPARLIGVKEETGAQIELLLLKPLGEDRWEALVKPAKRVKEGTVISFGEGRLKAIAQEEADMAGGRVFQLHYTASDLEELLVDLGQMPLPPYIREELAEKERYQTVYSRETGSAAAPTAGLHFTPELLQAAKEKGVEVTFLTLHVGLGTFRPVNVETLEAHQMHAEFYSLGEESANRIHRAKEEGRRVIAVGTTAVRTLETIARDHGEIRATSGWTDIFIYPGVKFQVVDALLTNFHLPKSTLIMLVSAFAGRELTLHAYQEAVEEQYRFFSFGDAMFIL

SEQ ID NO: 68571 - protein, 343 aa, Marininema mesophilum
  misc_feature (1)..(343): tr|A0A1H2SB26|A0A1H2SB26_9BACL S-adenosylmethionine:tRN A ribosyltransferase-isomerase OS=Marininema mesophilum OX=1048340 GN=queA PE=3 SV=1
MDVSLFNFHLPEELIAQTPLLDRSSSRLLVLDRETEEIKHASFPDLLGYLHAGDVLVLNDTRVRPARLIGVKEETGAQIELLLLKPLGEDRWEALVKPAKRVKEGSVISFGDGRLKAVAQEAADMAGGRVFRLEYTASDLEELLVELGEMPLPPYIREELAEKERYQTVYSRETGSAAAPTAGLHFTPELLNAAKEKGVEVTFLTLHVGLGTFRPVSVENVEEHQIHAEFYSLNEDSAAQIHQAKAEGRRVIAVGTTTVRTLETIARDYGKIQAANGWTDIFIYPGVRFRVVDAMLTNFHLPKSTLIMLVSAFAGREATLRAYREAVAKRYRFFSFGDAMLIT

SEQ ID NO: 68572 - protein, 402 aa, Mariniphaga anaerophila
  misc_feature (1)..(402): tr|A0A1M4SJT2|A0A1M4SJT2_9BACT S-adenosylmethionine:tRN A ribosyltransferase-isomerase OS=Mariniphaga anaerophi la OX=1484053 GN=queA PE=3 SV=1
MSDFKNIKISDFSYELPDDRIAKYPLKERDSSKLLIWKNGNIKKEQFRNIAEYVPENSMLVFNNTRVIHARLFFRKETGAKIEIFCLEPVDPADHQLAFQQTKQVVWKCMLGNAKKWKEGELCRETELNAETVSLKAKKLKQEGNSFFIEFSWNGNFTFSEIIENSGVLPIPPYLHRETEPADEETYQTVYAKSNGSVAAPTAGLHFTEQVINRLADKNIALREITLHVGAGTFQPVKSETIAGHNMHSEKVIIPKRFIEELLNNHREIIAVGTTSVRSLESIYWVGVQLDPGSNCQNIEVGQWEPYEQTTNITVQKSLSNILGYLENNNLNSLQFSTQIIIVPGYQFKLIQGMVTNFHQPQSTLLLLIGAFLGNDWKKVYDFALKNDFRFLSYGDSNLYLK

SEQ ID NO: 68573 - protein, 349 aa, Mariniphaga anaerophila
  misc_feature (1)..(349): tr|A0A1M4YIM4|A0A1M4YIM4_9BACT S-adenosylmethionine:tRN A ribosyltransferase-isomerase OS=Mariniphaga anaerophi la OX=1484053 GN=queA PE=3 SV=1
MKLSKFKYDLDEKKIALHPAYNRDEAKMMVLDRAKRTIEHKVFKDIVNYFDDGDVFVFNDTKVFPARLYGNKEKTGAEIEVFLLRELNREMRLWDVLVDPARKIRIGNKLYFGEDDTLVAEVIDNTTSRGRTLRFLFDGPYDEFKSTLYSLGETPLPKFINRAVVPEDKERYQTIFAKHEGAVAAPTAGLHFSRELMKRLEINGTEFAYVTLHVGLGNFRSVDVEDLTKHKMDSEQIWIKDEACEKINKAKTERRNVCAVGTTVMRTLESSVSTQGFVKPFEGWTNKFIFPPYEFNVANRMVTNFHLPYSTLLMMVAAFGGYDFVMEAYNVAMKNDYRFGTYGDAMLIL

SEQ ID NO: 68574 - protein, 404 aa, Mariniphaga sediminis
  misc_feature (1)..(404): tr|A0A399D2J7|A0A399D2J7_9BACT S-adenosylmethionine:tRN A ribosyltransferase-isomerase OS=Mariniphaga sediminis OX=1628158 GN=D1164_06210 PE=3 SV=1
MLSDYKKIKISDFSYSLPDNRIARYPLKERDGSNLLVWQNGHIEKDIFKNITEYIPKDSMLVFNNTRVIHARLFFWKETGAKIEIFCLEPVHPSDYQVAFQQTERAVWKCMVGNAKKWKETELSADIEIGGKTVKLKARKAGEQNNTLLIEFTWNGRFSFAEIIEKAGTLPLPPYLKRETEPADEVTYQTVYARNDGSVAAPTAGLHFTEQVLNQLAAKNIQPREITLHVGAGTFQPVKSENIGMHSMHHEKVVVPKSFIEELFSNQQKIIAVGTTSVRSLESLYWLGLKLGENQIDTESLEIEQWEPYEKKETVSLQQALENILKYLEKQKQENLSFSTQIIIVPGYQFKLVGGMITNFHQPQSTLLLLISAFLGSKWKDVYQFALENGFRFLSYGDSNLYLK

SEQ ID NO: 68575 - protein, 349 aa, Mariniphaga sediminis
  misc_feature (1)..(349): tr|A0A399D3E7|A0A399D3E7_9BACT S-adenosylmethionine:tRN A ribosyltransferase-isomerase OS=Mariniphaga sediminis OX=1628158 GN=queA PE=3 SV=1
MKLSKFKYDLDEKKIALHPAYNRDESKLMVLDRASRKIEHKAFKDIVDYFDDGDVFVFNDTKVFPARLYGNKEKTGAEIEVFLLRELNREMRLWDVLVDPARKIRIGNKLYFGDDDMLVAEVIDNTTSRGRTLRFLFDGPYDEFKSTLYSLGETPLPKFIKRAVVPEDKERYQTIFAKHEGAVAAPTAGLHFSRELLKRLEIKGAEFSFVTLHVGLGNFRSVDVEDLTKHKMDSEQIWIREESCEKINDAKTKRKNVCAVGTTVMRTLESSVSTQGFVKPFEGWTNKFIFPPYDFSVANRMITNFHLPYSTLLMMVAAFGGYDFVMEAYNVALKEDYRFGTYGDAMLII

SEQ ID NO: 68576 - protein, 321 aa, Mariniradius saccharolyticus
  misc_feature (1)..(321): tr|M7Y0C8|M7Y0C8_9BACT S-adenosylmethionine:tRNA ribosy ltransferase-isomerase OS=Mariniradius saccharolyticus AK6 OX=1239962 GN=C943_04020 PE=3 SV=1
MVVHKKTGQIEHRVFKDIIEYFGDGDVFVINDTKVFPARLYGNKEKTGAKIEVFLLRELNQDLRLWDVLVDPARKIRVGNKLYFGDSDLVAEVIDNTTSRGRTIRFLFDGSDEEFYKTIDSLGETPLLKEYIERKIEAEDRDRYQTIFAKHVGAVAAPTAGMHFTPHLLKRLELRGVDVTPITLHVGLGTFRQVDVEDLTKHKMDSENYDIPQKTVDLVNEALDNKKRVVAVGTTSLKTLESSVTANARLKISKGWTDKFIIPPYDFKIANALISNFHLSESTLLMTVAAFGGYDLVMKAYKEAIKEKYRFFSYGDAMLIL

SEQ ID NO: 68577 - protein, 404 aa, Mariniradius saccharolyticus
  misc_feature (1)..(404): tr|M7XCW2|M7XCW2_9BACT S-adenosylmethionine:tRNA ribosy ltransferase-isomerase OS=Mariniradius saccharolyticus AK6 OX=1239962 GN=queA PE=3 SV=1
MAKSIAEIRLSDYEYILPEERIAKFPLEKRDHSKLLQLKDGKISHHHFFDLPDLVPGDCMMVFNNTKVIPARLIFQRESGAKIEIFLLKPVYPSSLINEVMLETKRVVWECMIGNLKKWKSNEKLRGEILINGQSCTVFANLEYRDSKAVAFEWNDEKIPFVSIVEAAGEVPLPPYLNRKPTELDKPRYQTVYSEKEGAVAAPTAGLHFTQDVLENLKRKGVKEEFLTLHVSAGTFAPVKVDQVANHAMHSEQMVVNKETVAALARHSEKIIAVGTTSMRTLESLYWFGVMLGSEANAQFWIPKLYPYDSHSALPNRQQSFEAILKMMEKRGLHEITGHTEIMIMPGYEFKVCDGLITNFHQPSSTLILLVAAFTKGKWREVYHAALDNDYRFLSYGDSSILWY

SEQ ID NO: 68578 - protein, 351 aa, Marinirhabdus gelatinilytica
  misc_feature (1)..(351): tr|A0A370Q7A9|A0A370Q7A9_9FLAO S-adenosylmethionine:tRN A ribosyltransferase-isomerase OS=Marinirhabdus gelatin ilytica OX=1703343 GN=queA PE=3 SV=1
MGMKLSNFNFNLPQELLAEHPAPNRDEARLMVLNRKEQTIEHKMFKDLIDYFDEDDVLVLNNTKVFPARLYGNKEKTGARIEVFLLRELNPETRLWDVLVDPARKIRIGNKLYFGEDESLVAEVIDNTTSRGRTLRFLFDGSYEEFRNKLTELGETPLPKYIKRDVEPEDAERYQTIFAKKEGAVAAPTAGLHFSKHLLKRLEIKGVNFAEVTLHVGLGTFSPVEVEDLSKHKMDSEEIAIDKQAAKIINEGIAQKRRVCAVGTTVMRALESSVSSSATLNDYEGWTNKFIFPPYDFSIANMMVTNFHTPKSTLLMMVSAFAGHEFVKKAYAEAVKEKYRFYTYGDAMLII

SEQ ID NO: 68579 - protein, 341 aa, Marinisporobacter balticus
  misc_feature (1)..(341): tr|A0A4R2L2H6|A0A4R2L2H6_9CLOT S-adenosylmethionine:tRN A ribosyltransferase-isomerase OS=Marinisporobacter bal ticus OX=2018667 GN=queA PE=3 SV=1
MKTSDYYFDLPEELIAQTPLINRDASRLMVVDRRTGEIQHQLFKNIIEYLKPGDCLVLNNTRVLPARLFGVKENTGGKVEFLLLKRIDKDRWETLVKPGKKAKIGDTIVFGDGILKAHIIDMGEEGSRIVAFEYEGIFEEILDKLGTMPLPPYIKETLNDQERYQTVYSKHEGSAAAPTAGLHFTNELLRKIEEKGVEIVYITLHVGLGTFRPVKCEDILQHKMHSEFYMVSKETADTINHTKENGGRIISVGTTSTRTLESIADEEGIVRECQGWTDIFIYPGYKFKVIDGLITNFHLPESTLIMLVSAFCDRNSILGAYEEAVKDKYRFFSFGDAMCII

SEQ ID NO: 68580 - protein, 342 aa, Marinithermus hydrothermalis
  misc_feature (1)..(342): tr|F2NQA7|F2NQA7_MARHT S-adenosylmethionine:tRNA ribosy ltransferase-isomerase OS=Marinithermus hydrothermalis (strain DSM 14884 / JCM 11576 / T1) OX=869210 GN=queA P E=3 SV=1
MPRMADGTRLEDYAYDLPPERIAQQGAEPRDSARMMVLHRETGRLEHRIFREIPAYLRPGDVLVLNQTKVIPARTVARKPTGAVLEVLLLREEVAGRWRALVRPGRRARVGAELHFDEGLRAVVEGIGEGGERILRFAGDVWAHLERIGRTPLPPYIHAEVRPERYQTVFARVPGSVAAPTAGLHFTPELLARLEGMGVEVRYLTLHVGPGTFKPVKDSIERHVMHEEAYHVPEETARAVNRAKAEGRRVVAVGTTVVRALESAWRAGEGVRAGEGATRLFIRPPYTFHAVDALVTNFHLPRSTLLMLVAAFAGYETTMRAYRTAVAEGYRFYSLGDAMLIL

SEQ ID NO: 68581 - protein, 344 aa, Marinitoga hydrogenitolerans
  misc_feature (1)..(344): tr|A0A1M4SF02|A0A1M4SF02_9BACT S-adenosylmethionine:tRN A ribosyltransferase-isomerase OS=Marinitoga hydrogenit olerans DSM 16785 OX=1122195 GN=queA PE=3 SV=1
MRKPLYTVNDFDYELPEDYIAQKPVEPRDSSKLMVLNRDKRSIEHRKFRDIVDYLTPNDLLVINNTKVIPARLYGQKTTGANVEVLLLEKTPEENTWKALVKPGSKLKKGAEIKFSEYLYAKIIQHNSDGSRIIHFVSKKDVWEEIEKIGNMPLPPYIKNYNGPKERYQTTYAKKQGAVAAPTAGLHFTNELIEKIKNKGIKIAEVTLHVGLGTFRPVKADSIEKHEMHEEYYEVPNETVKIINEYKNNKGRIISVGTTVVRTLETIATLPKQKAYMGTTNIFIYPPYEFKLIDALITNFHLPKSTLLMLVSAFGGYDFIMNAYKTAVNERYRFFSFGDSMFIY

SEQ ID NO: 68582 - protein, 344 aa, Marinitoga piezophila
  misc_feature (1)..(344): tr|H2J4X7|H2J4X7_MARPK S-adenosylmethionine:tRNA ribosy ltransferase-isomerase OS=Marinitoga piezophila (strain DSM 14283 / JCM 11233 / KA3) OX=443254 GN=queA PE=3 SV =1
MRKPLYKVEDFDYHLPEEYIAQKPAEPRDSSRLMVLNRNIRTIEHKIFRNIIDYLKPGDLMVLNNTKVIPARLYGRKTTGAKVEVLLLEKTHEENTWKALVKPGSKLKKGAEIKFSDHLYAKIIEHNSDGSRIIHFTSDKDVWEEIERVGNMPLPPYIKSTDVPGERYQTEYAKIQGAVAAPTAGLHFTKELLNKIKEKGIEFAEVTLHVGLGTFRPVKVDNIEEHEMHEEYYEVPAETMKKIREYRQNKGRIISVGTTVVRTLETIAQLPEQESYMGTTDIFIYPPYEFKLIDALITNFHLPKSTLLMLVAAFGGYDFIMEAYKKAVEEKYRFFSFGDSMFIY

SEQ ID NO: 68583 - protein, 340 aa, Marinitoga sp.
  misc_feature (1)..(340): tr|A0A0H2SGK6|A0A0H2SGK6_9BACT S-adenosylmethionine:tRN A ribosyltransferase-isomerase OS=Marinitoga sp. 1197 O X=1428449 GN=queA PE=3 SV=1
MYEVNDFDYYLPEEYIAQKPANPRDSSRLMVLNRKKQNIEHKIFRDIIDYLKPGDLMVINNTKVIPARLYGQKTTGAKVEVLLLEKTHEDNTWKALVRPGSKLKKGAEIRFSDDLYAKIIEHNSDGSRIINFISDKDVWEEIEKIGNMPLPPYIKNQDVPKDRYQTEYAKIQGAVAAPTAGLHFTKELLEKIKNKGIEFAEVTLHVGLGTFRPVKVERIEEHEMHEEYYEVPENTVKKIKEYKKNNGRIISVGTTVVRTLETIALLPEQKAYMGTTDIFIYPPYEFKLIDALITNFHLPKSTLLMLVSSFGGYDFIMKAYKTAVEEKYRFFSFGDSMFIY

SEQ ID NO: 68584 - protein, 344 aa, Marinitoga sp.
  misc_feature (1)..(344): tr|A0A0H2SN79|A0A0H2SN79_9BACT S-adenosylmethionine:tRN A ribosyltransferase-isomerase OS=Marinitoga sp. 1155 O X=1428448 GN=queA PE=3 SV=1
MKKPLYEVNDFEYYLPEEYIAQKPANPRDSSRLMVLNRKKQSIEHKIFRDIIDYLKPGDLMVINNTKVIPARLYGQKTTGAKVEVLLLEKTHEDNTWKALVRPGSKLKKGAEIRFSDDLYAKIIEHNSDGSRIINFISDKVVWEEIEKIGNMPLPPYIKNQDVPKDRYQTEYAKIQGAVAAPTAGLHFTKELLEKIKNKGIEFAEVTLHVGLGTFRPVKVERIEEHEMHEEYYEVPENTVKKIEEYKKNNGRIISVGTTVVRTLETIALLPKQKAYMGTTDIFIYPPYEFKLIDALITNFHLPKSTLLMLVSSFGGYDFIMKAYKTAVEEKYRFFSFGDSMFIY

SEQ ID NO: 68585 - protein, 367 aa, Marinobacter adhaerens
  misc_feature (1)..(367): tr|E4PKE5|E4PKE5_MARAH S-adenosylmethionine:tRNA ribosy ltransferase-isomerase OS=Marinobacter adhaerens (strai n DSM 23420 / HP15) OX=225937 GN=queA PE=3 SV=1
MNVSDFHFDLPDELIARYPLKDRSASRLLCLDGLSGKLDHRIFSELPDLLQPGDLLVFNNTRVIPARLFGKKETGGQVEVLVERVTGEPDIIAHVRASKALKQGQKVILEDGTSLRMAGRDEALFHLVCESEEPVLEVLERIGHMPLPPYVDRPDESTDRERYQTVYAREAGAVAAPTAGLHFDESLLEKLAACGIESAFVTLHVGAGTFQPVRVDKIEDHTMHSEVVNVPQDAVDAIERTRARGGRVVAVGTTSVRSLESASRGGRLRAFTGETDIFIYPGYRFQTVDALITNFHLPESTLIMLVSAFAGYDNVMSAYREAVKERYRFFSYGDAMFINGQEPSRGMLLGATVESNEAGNDNAGEAL

SEQ ID NO: 68586 - protein, 367 aa, Marinobacter adhaerens
  misc_feature (1)..(367): tr|A0A1E3C5A1|A0A1E3C5A1_9ALTE S-adenosylmethionine:tRN A ribosyltransferase-isomerase OS=Marinobacter adhaeren s OX=1033846 GN=queA PE=3 SV=1
MNVSDFHFDLPDELIARYPLKDRSASRLLCLDGLSGKLDHRVFSELPDLLQPGDLLVFNNTRVIPARLFGKKETGGQVEVLVERVTGEHEIVAHVRASKALKEGQKVILEDGTCLRMSDRNEALFYLVCESEEPVLDVLERIGHMPLPPYVDRPDEATDRERYQTVYAREAGAVAAPTAGLHFDESLLEKLAACGIESTFVTLHVGAGTFQPVRVDRIEDHTMHSEVVNVPQDAVDAVERTRARGGRVVAVGTTSVRSLESASRGGRLRAFTGETDIFIYPGYRFQTVDALITNFHLPESTLIMLVSAFAGYDNVMAAYREAVKERYRFFSYGDAMFIAGQEPSRGMLLGAAVESNESGTDNAGEAL

SEQ ID NO: 68587 - protein, 364 aa, Marinobacter algicola
  misc_feature (1)..(364): tr|A6EWH8|A6EWH8_9ALTE S-adenosylmethionine:tRNA ribosy ltransferase-isomerase OS=Marinobacter algicola DG893 O X=443152 GN=queA PE=3 SV=1
MNVSDFHFDLPDELIARYPLKERSASRLLSLDGLSGDIRHLRFTDLPSLLQPGDLLVFNDTRVIPARLFGRKETGGQVEVLVERVLGEHDILAHVRASKALKEGQKVLLEDGTPLRMSGRDDALFHLHCDSDEPVLDVLERIGHMPLPPYVDRPDESSDRERYQTVYAREAGAVAAPTAGLHFDDRILAELESMGVETAFVTLHVGAGTFQPVRVEGIEDHVMHSEVAHVPQATVDAVNAARARGGRVVAVGTTSVRSLESASRGGVVRPFQGETDIFIYPGYRFQTVDAMVTNFHLPESTLIMLVSAFAGYQNVMSAYQAAVAECYRFFSYGDAMFISAQEPSLGALSSCSGKGSQNPENNDE

SEQ ID NO: 68588 - protein, 370 aa, Marinobacter antarcticus
  misc_feature (1)..(370): tr|A0A1M6U1S0|A0A1M6U1S0_9ALTE S-adenosylmethionine:tRN A ribosyltransferase-isomerase OS=Marinobacter antarcti cus OX=564117 GN=queA PE=3 SV=1
MNVSDFHFDLPNELIARYPLRERSASRLLCLEGNTGDIAHRLFTDLPDLLQPGDLLVFNNTRVIPARLFGIKETGGQVEVLVERVTGEHDLVAHVRASKALKEGQKVILEDGTALRMTGRSDALFHLESEADEPVLDMLERIGHMPLPPYVDRPDESTDRERYQTVYAKEPGAVAAPTAGLHFDDDVLEALRARGVESAFVTLHVGAGTFQPVRVDRIDEHIMHSEIVHVPEEVVEAVNRVRARGGRVVAVGTTSVRSLESASRGGYLRAFRGETDIFIHPGYRFQAVDALVTNFHLPESTLIMLVSAFAGYEHVMHAYRDAVAEKYRFFSYGDAMFITGQEPSRGMLLGAPDEPAQAVSPSPLNSGDKP

SEQ ID NO: 68589 - protein, 362 aa, Marinobacter confluentis
  misc_feature (1)..(362): tr|A0A4Z1BG80|A0A4Z1BG80_9ALTE S-adenosylmethionine:tRN A ribosyltransferase-isomerase OS=Marinobacter confluen tis OX=1697557 GN=queA PE=3 SV=1
MNVSDFHFDLPDELIARYPLEKRSASRLLTLDGSTGDIGHRSFENLLDLLHSGDLLVFNDTRVIPARLFGKKETGGQVEILMERLTGDHQMLAHVKASKALRPGQIIILEDGSRVTMRGREGALFQLDNSGPETLLALLERIGHMPLPPYVDRPDESTDRERYQTVYARESGAVAAPTAGLHFDDELLARLADKGVESTFVTLHVGAGTFQPVRVDRIEDHVMHSEVVRVTGQTVRAVQAARERGGRVVAVGTTSVRSLESASRNGVLSAFQGETDIFIHPGYRFNTVDALITNFHLPESTLIMLVSAFAGYDHTMAAYRAAVADRYRFFSYGDAMFITGQQPSLGACQTDTDTQPESGAAQ

SEQ ID NO: 68590 - protein, 356 aa, Marinobacter daqiaonensis
  misc_feature (1)..(356): tr|A0A1I6GL37|A0A1I6GL37_9ALTE S-adenosylmethionine:tRN A ribosyltransferase-isomerase OS=Marinobacter daqiaone nsis OX=650891 GN=queA PE=3 SV=1
MNVSDFHFDLPDELIARYPMPERSGSRLLVLEGVSGNVSHRYFRDLPALLEPEDLLIFNDTRVIPARLLGTKETGGKLEVLVERVIADDTVLAHVRASKALKPGQRVYLEDGSVLVMLDRDDTLFRLRTESGEPVLDLLERTGHMPLPPYVDRPDETADRERYQTVYAREAGAVAAPTAGLHFDDAMFEALATKGIETAFVTLHVGAGTFQPVRVEKVEDHVMHSEVATVPEATVAAIARARARGGRVIAVGTTSVRSLESASRGGVVRPFQGETDIFISPGYRFQTVDAMITNFHLPESTLIMLVSAFAGYQNTMNAYDEAVRERYRFFSYGDAMFITGEGPSLGALAGPGARDD

SEQ ID NO: 68591 - protein, 361 aa, Marinobacter excellens
  misc_feature (1)..(361): tr|A0A137SBG5|A0A137SBG5_9ALTE S-adenosylmethionine:tRN A ribosyltransferase-isomerase OS=Marinobacter excellen s LAMA 842 OX=1306954 GN=queA PE=3 SV=1
MNVSDFHFDLPDELIARYPLKQRSASRLLALEGLTGQTQHLNFTDLPGLLQPGDLLVFNNTRVIPARLFGQKESGGRVEILVERLLGEFELLAHARASKAVKEGQKVLLEDGSALRMVGREDALFRFVYEGLEPVLDVLERIGHMPLPPYMERDDDQSDRERYQTVYAKEAGAVAAPTAGLHFDDEILEVLKSNGIEFAYVTLHVGAGTFQPVRVDKIEDHLMHSEVAHVPQETVDAVERTRARGGRVVAVGTTSVRSLESASRAGQLNTFRGETDIFIYPGYRFQTVDAMITNFHLPESTLIMLVSAFAGYRNIMSAYQEAVEQRYRFFSYGDAMFLTAQEPSLGMLAGANQTESRGESL

SEQ ID NO: 68592 - protein, 366 aa, Marinobacter excellens
  misc_feature (1)..(366): tr|A0A0P8CWJ6|A0A0P8CWJ6_9ALTE S-adenosylmethionine:tRN A ribosyltransferase-isomerase OS=Marinobacter excellen s HL-55 OX=1305731 GN=queA PE=3 SV=1
MNVSDFHFDLPDELIARYPLEQRSASRLLSLDGLSGQAQHLQFTDLPDLLQPGDLLVFNNTRVIPARLFGQKETGGRVEVLVERLMGEREILAHARTSKALKEGQKVILEDGSSLTMVGRNDALFKFVYDGAEAILDVLERIGHMPLPPYIEREDEVSDRERYQTVYAREAGAVAAPTAGLHFDDPLLASLKDQGIEFAYVTLHVGAGTFQSVRVDKIEDHVMHSEVAHVPQETVDAVNRTRARGGRVVAVGTTSVRSLESASRGGHLGPFRGETNIFIYPGYRFQTVDAMVTNFHLPESTLIMLVSAFSGYTNILSAYREAVAQRYRFFSYGDAMFLTAQEPSRGMLAGADVSGAQNTESSGESL

SEQ ID NO: 68593 - protein, 367 aa, Marinobacter flavimaris
  misc_feature (1)..(367): tr|A0A3D8H025|A0A3D8H025_9ALTE S-adenosylmethionine:tRN A ribosyltransferase-isomerase OS=Marinobacter flavimar is OX=262076 GN=queA PE=3 SV=1
MNVSDFHFDLPDELIARYPLKDRSASRLLCLDGLSGKLDHRIFSELPELLQPGDLLVFNNTRVIPARLFGKKETGGQVEVLVERVTGEHDIIAHVRASKALKQGQKVILEDGTSLRMAGRDEALFHLVCESEEPVLEVLERIGHMPLPPYVDRPDESTDRERYQTVYAREAGAVAAPTAGLHFDEGLLEKLAACGIESAFVTLHVGAGTFQPVRVDKIEDHTMHSEVVNVPQDAVDAIERTRARGGRVVAVGTTSVRSLESASRGGRLRAFTGETDIFIYPGYRFQTVDALITNFHLPESTLIMLVSAFAGYDNVMSAYREAVKERYRFFSYGDAMFINGQEPSRGMLLGATVESNEAGNDNAGEAL

SEQ ID NO: 68594 - protein, 363 aa, Marinobacter fuscus
  misc_feature (1)..(363): tr|A0A2T1K6Q5|A0A2T1K6Q5_9ALTE S-adenosylmethionine:tRN A ribosyltransferase-isomerase OS=Marinobacter fuscus O X=2109942 GN=queA PE=3 SV=1
MNVSDFHFDLPDELIARYPLEQRSASRLFKLDGPSGQTSHLNFTDLPGLLQPGDLLVFNNTRVIPARLFALKETGGKVEVLVERVLSDSSIIAHTRSSKSPKPGQKLVLEDGSELEMTGREGALFQFEYRADESVLDLLERVGHMPLPPYMERDDELSDRERYQTVYAREAGAVAAPTAGLHFDDDILAELERGGVEFAYVTLHVGAGTFQPVRVDRIEDHEMHSEIAHVPAETVAAVARTRARGGRVVAVGTTSVRSLESASQAGRLEEFRGDTNIFIYPGYQFQTVDAMITNFHLPESTLIMLVSAFAGFENVMAAYAEAVEQRYRFFSYGDAMFISSREPSSGSVAAAGKPDTDSSGDIL

SEQ ID NO: 68595 - protein, 350 aa, Marinobacter gudaonensis
  misc_feature (1)..(350): tr|A0A1I6G7M5|A0A1I6G7M5_9ALTE S-adenosylmethionine:tRN A ribosyltransferase-isomerase OS=Marinobacter gudaonen sis OX=375760 GN=queA PE=3 SV=1
MNVSDFHFDLPDELIARYPLKERSASRLLCLDGPTGELTHRVFSDLPSMLRPGDLLVFNDTRVIPARLFGRKETGGQVEVLVERVTGEHEMLAHVRASKALKPGQRVFLEDGSALRMTGRNDALFQLETESAEPLLAVLERIGHMPLPPYVDRPDESTDRERYQTVYAREAGAVAAPTAGLHFDEPLLETLAAAGVESTFVTLHVGAGTFQPVRVDRIEDHTMHSEIVKVSQQTVDAVERTRARGGRVVAVGTTSVRSLESASADGRLSAFQGETDIFIYPGYRFQTVDALITNFHLPESTLIMLVSAFAGYDNVMAAYREAVSERYRFFSYGDAMFITGQQPSRGAEAM

SEQ ID NO: 68596 - protein, 367 aa, Marinobacter guineae
  misc_feature (1)..(367): tr|A0A2G1VBC3|A0A2G1VBC3_9ALTE S-adenosylmethionine:tRN A ribosyltransferase-isomerase OS=Marinobacter guineae OX=432303 GN=queA PE=3 SV=1
MNVSDFHFDLPDELIARYPLKERSASRLLCLDGLSGRLDHRIFSDLPELLQPGDLLVFNNTRVIPARLFGKKETGGQVEVLVERITGERDIIAHVRASKALKEGQKVILEDGTSLSMSGRDEALFHLVCDSEEPILDVLERIGHMPLPPYIDRSDESTDRDRYQTVYARESGAVAAPTAGLHFDEALLEKLAACGIESTFVTLHVGAGTFQPVRVDKIEDHAMHSEVVHVPQEAVDAVERTRARGGRVVAVGTTSVRSLESASRGGRLKAFTGETDIFIYPGYRFQAVDALVTNFHLPESTLIMLVSAFAGYDNVMGAYKEAVRERYRFFSYGDAMFITGQEPSRGMLLGPAVESTDTGIDNAGEAL

SEQ ID NO: 68597 - protein, 366 aa, Marinobacter halophilus
  misc_feature (1)..(366): tr|A0A2T1KI45|A0A2T1KI45_9ALTE S-adenosylmethionine:tRN A ribosyltransferase-isomerase OS=Marinobacter halophil us OX=1323740 GN=queA PE=3 SV=1
MNVSDFHFDLPDELIARYPLKQRSASRLLGLDGLSGQTQHLQFTDLPELLQPGDLLVFNNTRVIPARLFGQKESGGRVEVLVERLLGEREILAHARASKALKAGQKVILEDGTSMTMVGRDDALFRFVYDGEEVILDVLDRIGHMPLPPYIEREDDLSDRERYQTVYAREAGAVAAPTAGLHFDDALLEILKARGIEFAYVTLHVGAGTFQPVRVDKIEDHVMHSEVAHVPQETVDAVHQARARGGRVVAVGTTSVRSLESASRAGHLSTFRGDTDIFIYPGYRFQTVDAMVTNFHLPESTLIMLVSAFSGYTNIKAAYREAVDQEYRFFSYGDAMFLTAQEPSRGMLAGVDDTGTNLTESSGESL

SEQ ID NO: 68598 - protein, 366 aa, Marinobacter hydrocarbonoclasticus
  misc_feature (1)..(366): sp|A1TZN6|QUEA_MARHV S-adenosylmethionine:tRNA ribosylt ransferase-isomerase OS=Marinobacter hydrocarbonoclasti cus (strain ATCC 700491 / DSM 11845 / VT8) OX=351348 GN =queA PE=3 SV=1
MNVSDFHFDLPDELIARYPLKERSASRLLSLDGLSGQTTHLKFTDLPDLLQPGDLLVFNNTRVIPARLFGQKETGGKVEILVERLLGEKELLAHTRSSKSPKEGQRLLLEDGAALRMLARKDALFHFVYEGDEAFLDVLERIGHMPLPPYMEREDEQSDRERYQTVYAKEAGAVAAPTAGLHFDDVVLSALKAKGIEFAYVTLHVGAGTFQPVRVDKIEDHVMHSEIAHVPEETVKAVNEARARGGRVVAVGTTSVRSLESASRAGRLQEFRGDTDIFIYPGYRFQTVDAMITNFHLPESTLIMLVSAFAGYNNIMSAYREAVEQKYRFFSYGDAMFLTAQEPSRGMMLGTDSAEPHQTESRGESQ

SEQ ID NO: 68599 - protein, 361 aa, Marinobacter hydrocarbonoclasticus
  misc_feature (1)..(361): tr|A0A455W5N1|A0A455W5N1_MARHY S-adenosylmethionine:tRN A ribosyltransferase-isomerase OS=Marinobacter hydrocar bonoclasticus OX=2743 GN=queA PE=3 SV=1
MNVSDFHFDLPDELIARYPLKQRSASRLLTLDGLTGQSQHLNFTDLPGLLQPGDLLVFNNTRVIPARLFGQKETGGRVEILVERLLGEFELLAHARASKAVKEGQKVILEDGSALRMVGRDDALFRFVYEGSEPVLDVLERIGHMPLPPYMERDDDQSDRERYQTVYAKEAGAVAAPTAGLHFDDELLEAISSQGVEFAYVTLHVGAGTFQPVRVDKIEDHLMHSEVAHVPQETVDAVGRTRARGGRVVAVGTTSVRSLESASRGGRLNAFRGETDIFIYPGYRFQTVDAMITNFHLPESTLIMLVSAFAGYRHIMSAYQEAVEQRYRFFSYGDAMFLTAQEPSRGMLAGANQTESRGESL

SEQ ID NO: 68600 - protein, 360 aa, Marinobacter lipolyticus
  misc_feature (1)..(360): tr|R8B185|R8B185_9ALTE S-adenosylmethionine:tRNA ribosy ltransferase-isomerase OS=Marinobacter lipolyticus SM19 OX=1318628 GN=queA PE=3 SV=1
MNVSDFHFDLPDELIARYPLKERTASRLLSLNGLSGDIDHLQFTDLPDLLQPGDLLVFNDTRVIPARLFGRKETGGQVEVLVERVLGEHEILAHVRASKALKPGQKILLEDGTALQMTGRDDALFRLICDSDEEVLDVLERIGHMPLPPYVDRPDESSDRERYQTVYAREAGAVAAPTAGLHFDESMLERLKAQGVDVAWVTLHVGAGTFQPVRVDRIEDHVMHSEVAHVPEQTVDAVNRARARGGRVVAVGTTSVRSLESATRGGVLRSFRGETDIFIHPGYRFQAVDAMVTNFHLPESTLIMLVSAFAGYNNVMAAYAEAVREKYRFFSYGDAMFITGQEPSLGMLKGHVGETSQKAE

SEQ ID NO: 68601 - protein, 366 aa, Marinobacter litoralis
  misc_feature (1)..(366): tr|A0A3M2R9U6|A0A3M2R9U6_9ALTE S-adenosylmethionine:tRN A ribosyltransferase-isomerase OS=Marinobacter litorali s OX=187981 GN=queA PE=3 SV=1
MNVSDFHFDLPDELIARYPLKQRSASRLLTLEGVSGHTQHLQFTNLPDLLEPGDLLVFNNTRVIPARLFGQKETGGRVEVLVERLVGEREILAHARASKALKQGQKVILEDGSSLTMIGREDALFRFVNEGDEPILDLLERIGHMPLPPYMERDDDLSDRERYQTVYAQEAGAVAAPTAGLHFDDALLETLKAKGVEFAYVTLHVGAGTFQPVRVDKIEEHVMHSEVAHVPEETVEAVRKTRARGGRVVAVGTTSVRSLESASQSGELGTFRGETDIFIFPGYRFNTIDAMVTNFHLPESTLIMLVSAFAGYDNIMAAYREAVEQQYRFFSYGDAMFLTAQEPSRGRLTSSDQADTASSDSSGENL

SEQ ID NO: 68602 - protein, 369 aa, Marinobacter lutaoensis
  misc_feature (1)..(369): tr|A0A1V2DUD1|A0A1V2DUD1_9ALTE S-adenosylmethionine:tRN A ribosyltransferase-isomerase OS=Marinobacter lutaoens is OX=135739 GN=queA PE=3 SV=1
MNVSDFYFDLPDELIARYPLKERSASRLLSLNGLTGEVRHLQFRNLLDLVQAGDLLVFNNTRVIPARLFGRKATGGQVEILVERITGEREVLAHVRASKALKPDQTVILEDGSVLRMLDRHDALFRLALESAEPMLDLLERIGHMPLPPYVDRPDESSDRERYQTVYAREAGAVAAPTAGLHFDEAMLQALPERGVETAFVTLHVGAGTFQPVRVENIEDHVMHSEVAHVPEATVAAIERTRARGGRVIAVGTTSVRSLESASRGGRVHPFRGETDIFIRPGYRFETVDAMITNFHLPESTLIMLVSAFAGHANVMAAYREAVAERYRFFSYGDAMFVTSQEPSRGMLLGGDAARVTGEEKPESAGGAS

SEQ ID NO: 68603 - protein, 367 aa, Marinobacter manganoxydans
  misc_feature (1)..(367): tr|G6YV85|G6YV85_9ALTE S-adenosylmethionine:tRNA ribosy ltransferase-isomerase OS=Marinobacter manganoxydans Mn I7-9 OX=1094979 GN=queA PE=3 SV=1
MNVSDFHFDLPDELIARYPLKDRSASRLLCLDGLSGKLNHRIFSELPDLLQPGDLLVFNDTRVIPARLFGKKETGGQVEVLVERVTGEHEIIAHVRASKALKDGQKIILEDGTCMRMSGREEALFHLVCEAEEPVLDVLERIGHMPLPPYVDRPDESTDRERYQTVYAREAGAVAAPTAGLHFDESLLEKLAACGIESTFVTLHVGAGTFQPVRVDKIEDHTMHSEVVNVPQDAVDAIERTRARGGRVVAVGTTSVRSLESASRGGRLRPFTGETDIFIYPGYRFQTVDALITNFHLPESTLIMLVSAFAGYDNVMAAYREAVKERYRFFSYGDAMFITGQEPSRGMLLGSAVESNEAGTDNAGEAL

SEQ ID NO: 68604 - protein, 357 aa, Marinobacter mobilis
  misc_feature (1)..(357): tr|A0A1H3BS12|A0A1H3BS12_9ALTE S-adenosylmethionine:tRN A ribosyltransferase-isomerase OS=Marinobacter mobilis OX=488533 GN=queA PE=3 SV=1
MNVSDFHFDLPDELIARYPLAERSASRLLTLDGLSGAIDHRGFTDLPAFLQPGDLLVFNNTRVIPARLFGRKETGGQLEILVERVLDEHEVLAHVRASKSPKPGQAIIAEDGTVLRMIERQDALFRLRCEAAEPVLDVLDRIGHMPLPPYVDRPDEEADRERYQTVYAEQAGAVAAPTAGLHFDNAIIERLRSQGINTAFVTLHVGAGTFQPVRVERIEDHVMHSEIAQVPEETVEAVRRTREQGGRVIAVGTTSVRSLESASRGGKLRTFHGETDIFIHPGYRFQTVDAMVTNFHLPESTLIMLVSAFAGYENVMAAYHEAIRERYRFFSYGDAMFVTGQEPSLGALAGLSHGGDR

SEQ ID NO: 68605 - protein, 357 aa, Marinobacter nanhaiticus
  misc_feature (1)..(357): tr|N6VUI2|N6VUI2_9ALTE S-adenosylmethionine:tRNA ribosy ltransferase-isomerase OS=Marinobacter nanhaiticus D15- 8W OX=626887 GN=queA PE=3 SV=1
MKVSDFHYDLPDELIARYPLEDRTASRMLHLAGPTGAINHGHFRDILGLLEPGDLLVFNNTRVIPARVFGQKETGGKLEILVERVLDQRELLAHIRSSKSPKAGQLIHVEGDGAFRMVERQGALFRLALEKGADSVLDLLEAVGHMPLPPYVDRPDESADRERYQTVYARDPGAVAAPTAGLHFDESILSELAERGIEQAFVTLHVGAGTFQPVRVDSIEDHQMHSEVAEVPHVTVDAIRRTRERGGRVVAVGTTSVRSLESASRDGELKPYQGETDIFIYPGYRFQCIDALVTNFHLPESTLIMLVSAFAGYEAVMKAYREAVDERYRFFSYGDAMFVTGQRASEQAERAQQESER

SEQ ID NO: 68606 - protein, 367 aa, Marinobacter nitratireducens
  misc_feature (1)..(367): tr|A0A072N6K0|A0A072N6K0_9ALTE S-adenosylmethionine:tRN A ribosyltransferase-isomerase OS=Marinobacter nitratir educens OX=1137280 GN=queA PE=3 SV=1
MNVSDFHFDLPDELIARYPLKDRTASRLLCLDGLSGSTSHRQFSDLPGLLQPGDLLVFNDTRVIPARLFGKKETGGQVEILVERVTGEHEIMAHVRASKALKEGQAVILEDGTVMRMAGRHDALFDLFCESSEPVLDVLERIGHMPLPPYVDRPDESSDRERYQTVYAREAGAVAAPTAGLHFDEAMLATLREKGVETAFVTLHVGAGTFQPVRVDRIEDHVMHSEVVQVPQETVDAVERARSRGGRVVAVGTTSVRSLESASRGGQLRTFQGETDIFIHPGYRFQTVDALITNFHLPESTLIMLVSAFAGYDHVMNAYREAVAERYRFFSYGDAMFITGQEPSRGMLLGASETTNESRAQRDGEAE

SEQ ID NO: 68607 - protein, 367 aa, Marinobacter pelagius
  misc_feature (1)..(367): tr|A0A1I4VZK8|A0A1I4VZK8_9ALTE S-adenosylmethionine:tRN A ribosyltransferase-isomerase OS=Marinobacter pelagius OX=379482 GN=queA PE=3 SV=1
MNVSDFYFDLPDELIARYPLEERSASRLLYLEGLTGKVDHLRFTDLQNLVQEGDLLVFNDTRVIPARLFGRKETGGQVEVLVERVTGEHEILAHVRASKALKADQKVILEDGSVLRMVEREDALFRLMAETAEPILELLERIGHMPLPPYVDRPDESSDRERYQTVYAREAGAVAAPTAGLHFDEAMLEQLRAKGIETTFVTLHVGAGTFQPVRVERIEDHVMHSEVAHVPEETVEAIERTRARGGRVIAVGTTSVRSLESASRGGRVRPFRGETDIFIHPGYRFQTVDALITNFHLPESTLIMLVSAFAGYDNVMAAYREAVAERYRFFSYGDAMFITSQEPSRGMLLGASASAATTESDESGESS

SEQ ID NO: 68608 - protein, 367 aa, Marinobacter pelagius
  misc_feature (1)..(367): tr|A0A366GNY8|A0A366GNY8_9ALTE S-adenosylmethionine:tRN A ribosyltransferase-isomerase OS=Marinobacter pelagius OX=379482 GN=queA PE=3 SV=1
MNVSDFYFDLPDELIARYPLKERSASRLLHLDGLTGKVDHLRFTDLQELVHEGDLLVFNDTRVIPARLFGKKETGGQVEVLVERVTGEYEILAHVRASKALKADQKVILEDGSVLRMVEREDALFRLMADTAEPVLELLERIGHMPLPPYVDRPDESSDRERYQTVYAREAGAVAAPTAGLHFDEAMLEQLRAKGVETTFVTLHVGAGTFQPVRVERIEDHVMHSEVAHVPEQTVEAIERTRARGGRVIAVGTTSVRSLESASRGGRVRPFRGETDIFIHPGYRFQTVDALITNFHLPESTLIMLVSAFAGYDNVMAAYREAVAERYRFFSYGDAMFITSQEPSRGMLLGASASAATTESDESGESS

SEQ ID NO: 68609 - protein, 364 aa, Marinobacter persicus
  misc_feature (1)..(364): tr|A0A1I3WUJ1|A0A1I3WUJ1_9ALTE S-adenosylmethionine:tRN A ribosyltransferase-isomerase OS=Marinobacter persicus OX=930118 GN=queA PE=3 SV=1
MNVSDFHFDLPDELIARYPLEQRSASRLLNLDGATGQTRHLQFTDLPDLLEPGDLLVFNNTRVIPARLFGRKQTGGQIEILVERLLGEQEFLAHTRASKSPKQGQTVILEDGTELRMVERRDALFRFVHDGPEPVLDLLERVGHMPLPPYMERDDEQSDRERYQTVYAREAGAVAAPTAGLHFDDAILAQLKERGIEFAYVTLHVGAGTFQPVRVDNVKDHVMHSEVAHVPEDTVDAVRRIRERGGRVVAVGTTSVRSLESASRAGRLQPFRDETDIFIYPGYRFQTVDALITNFHLPESTLIMLVSAFSGYDNIMAAYREAVAQRYRFFSYGDAMFLTGQQPSQGRLATGLPTGHTDSTGEPS

SEQ ID NO: 68610 - protein, 360 aa, Marinobacter persicus
  misc_feature (1)..(360): tr|A0A2S6G7J0|A0A2S6G7J0_9ALTE S-adenosylmethionine:tRN A ribosyltransferase-isomerase OS=Marinobacter persicus OX=930118 GN=queA PE=3 SV=1
MNVSDFHFDLPDELIARYPLEQRSASRLLNLDGATGQTRHLQFTDLPDLLEPGDLLVFNNTRVIPARLFGRKETGGQVEILVERLLGEQEFLAHTRASKSPKVGQAIVLEDGSKLRMVERQDALFRFVHEGQEAVLDLLERIGHMPLPPYMEREDEQSDRERYQTVYAREAGAVAAPTAGLHFDDPLLARLKEKGIEFAYVTLHVGAGTFQPVRVDNVEDHVMHSEVAQVPEETVEAVRRTRERGGRVVAVGTTSVRSLESASRDGQLQPFRDETNIFIYPGYRFQTVDALITNFHLPESTLIMLVSAFAGYDNTMAAYREAVAQRYRFFSYGDAMFLIGQQPSLGRLAAGHTDSKGEPS

SEQ ID NO: 68611 - protein, 369 aa, Marinobacter psychrophilus
  misc_feature (1)..(369): tr|A0A0H4I3L0|A0A0H4I3L0_9ALTE S-adenosylmethionine:tRN A ribosyltransferase-isomerase OS=Marinobacter psychrop hilus OX=330734 GN=queA PE=3 SV=1
MNVSDFRFDLPDELIARYPLSERSASRLFCLDGLSGDINHRRFTDLPDFLQPGDLLVFNNTKVIPARLFGKKQSGGAVEILVERITGDQQMLAHVRASKSPKPGQQVLLEDGTALNVIARADALFELQADGSESLLDILDRLGHMPLPPYIDRADEASDRERYQTVYAREAGAVAAPTAGLHFDEALLQKLAAMGVDSTFVTLHIGAGTFQPVRVDKLEDHVMHHELMHVRQDTVDAVARTRARGGRVIAVGTTSVRSLESASRHGDLRPFTGDTDIFIYPGYNFQAVDALITNFHLPESTLIMLVSAFAGYEHVMGAYKEAVREGYRFFSYGDAMFITGQVPSRGMLQHSATEPQGGPETQEFRGETR

SEQ ID NO: 68612 - protein, 364 aa, Marinobacter salarius
  misc_feature (1)..(364): tr|A0A1W6KAY9|A0A1W6KAY9_9ALTE S-adenosylmethionine:tRN A ribosyltransferase-isomerase OS=Marinobacter salarius OX=1420917 GN=queA PE=3 SV=1
MNVSDFYFDLPDELIARYPLKERSASRLLSLDGLSGDTRHLRFTDLPGLLQPGDLLVFNDTRVIPARLFGRKETGGQVEVLVERVLGEHDILAHVRASKALKEGQKVLLEDGTALRMSGRDDALFHLHCDSDEPVLEVLERIGHMPLPPYVDRPDESSDRERYQTVYAREAGAVAAPTAGLHFDDRILAELESRGIETAFVTLHVGAGTFQPVRVEGIEDHVMHSEVAHVSQETVDAVNAARARGGRVVAVGTTSVRSLESASRGGVVRPFQGETDIFIYPGYRFQAVDAMVTNFHLPESTLIMLVSAFAGYQNVMSAYQAAVAERYRFFSYGDAMFITAQEPSLGALSSCSGKGSQNPENDDE

SEQ ID NO: 68613 - protein, 367 aa, Marinobacter salinus
  misc_feature (1)..(367): tr|A0A1D9GKB4|A0A1D9GKB4_9ALTE S-adenosylmethionine:tRN A ribosyltransferase-isomerase OS=Marinobacter salinus OX=1874317 GN=queA PE=3 SV=1
MNVSDFHFDLPDELIARYPLPERTASRLLCLNGLSGDTAHRHFTDLTDLLQSGDLLVFNDTRVIPARLFGKKETGGQIEILVERVTGEHGITAHVRASKALRSGQNVILEDGTVMRMTGRDEALFHLVCESSEPVLDVLERIGHMPLPPYVDRPDEGSDRERYQTVYAKEAGAVAAPTAGLHFDEKLLEHLREMGVETTFVTLHVGAGTFQPVRVDRIEDHVMHSEVVHVPQDAVDAVERTRARGGRVVAVGTTSVRSLESASRGGRLRAFRGETDIFISPGYRFETVDALVTNFHLPESTLIMLVSAFAGYENVMNAYRAAVAEEYRFFSYGDAMFITGQAPSRGMLLGASEPITDSKQDNAGEAV

SEQ ID NO: 68614 - protein, 367 aa, Marinobacter santoriniensis
  misc_feature (1)..(367): tr|M7D7D4|M7D7D4_9ALTE S-adenosylmethionine:tRNA ribosy ltransferase-isomerase OS=Marinobacter santoriniensis N KSG1 OX=1288826 GN=queA PE=3 SV=1
MNVSDFYFDLPDELIARYPLKERSASRLLDLDGLTGQIHHRHFTDLPDLVQDGDLLVFNNTRVIPARLFARKETGGQVEILVERLTGEHEFLAHVRASKSPKAGQVLILEDGTRLTMVERQDALFRLAAPEAEPVLELLERIGHMPLPPYVDRPDESSDRERYQTVYAREAGAVAAPTAGLHFDEALMDRLRDRGVEIAFVTLHVGAGTFQPVRVDRIEDHVMHSEVAHVPEETVAAVERARSRGGRVIAVGTTSVRSLESASRGGRVCAFRGETDIFIHPGYRFQTVDALITNFHLPESTLIMLVTAFAGYDNVMGAYREAVKERYRFFSYGDAMFITPQDPSRGMLLGASDTSAGVDSDESGDPQ

SEQ ID NO: 68615 - protein, 353 aa, Marinobacter segnicrescens
  misc_feature (1)..(353): tr|A0A1H9YDP4|A0A1H9YDP4_9ALTE S-adenosylmethionine:tRN A ribosyltransferase-isomerase OS=Marinobacter segnicre scens OX=430453 GN=queA PE=3 SV=1
MKVSDFHFDLPAELIARYPMAERSASRLLCLDGVSGALAHRQFRDLPDLLEPDDLLVFNDTRVIPARLFGTKDTGGRVEVLVERVESTDTVLAHVRASKALKPGQRVVLEDGSALVMLDREDALFRLKTESGEAMLDLLERAGHMPLPPYVDRPDESTDRERYQTVYAREAGAVAAPTAGLHFDQSIFDRLAAKGIQTAFVTLHVGAGTFQPVRVEKVEDHVMHSEVATVPEATVEAIRAARQRGGRVIAVGTTSVRSLESASRGGVVRPFQGETDIFIRPGYRFQTVDGMITNFHLPESTLIMLVSAFADYHHTMSAYRVAVAESYRFFSYGDAMFITGQEPSLGALAGPGA

SEQ ID NO: 68616 - protein, 361 aa, Marinobacter shengliensis
  misc_feature (1)..(361): tr|A0A2T1KNH0|A0A2T1KNH0_9ALTE S-adenosylmethionine:tRN A ribosyltransferase-isomerase OS=Marinobacter shenglie nsis OX=1389223 GN=queA PE=3 SV=1
MNVSDFHFDLPDELIARYPLKQRSASRLLALEGLTGQTQHLNFTDLPGLLQPGDLLVFNNTRVIPARLFGQKESGGRVEILVERLLGEFELLAHARASKAVKEGQKVLLEDGTALRMVGREDALFRFVYEGLEPVLDVLERIGHMPLPPYMERDDDQSDRERYQTVYAKEAGAVAAPTAGLHFDDEILEVLKSNGIEFAYVTLHVGAGTFQPVRVDKIEDHLMHSEVAHVPQEAVDAVERTRARGGRVVAVGTTSVRSLESASRAGQLNTFRGETDIFIYPGYRFQTVDAMITNFHLPESTLIMLVSAFAGYRNIMSAYQEAVEQRYRFFSYGDAMFLTAQEPSRGMLAGANQTESRGESL

SEQ ID NO: 68617 - protein, 360 aa, Marinobacter sp.
  misc_feature (1)..(360): tr|A0A1E7PZP9|A0A1E7PZP9_9ALTE S-adenosylmethionine:tRN A ribosyltransferase-isomerase OS=Marinobacter sp. X15- 166B OX=1897620 GN=queA PE=3 SV=1
MNVSDFQFELPDELIARYPLEQRSASRLLVLDGLTGNTTHSSFSALADQLHPDDLLVINNTKVIPARLLGRKETGGRVEVLVERVVGEHEILAHVRASKAPKPGQRLLFEGGYALTMVERQEALFRLVTETGSPILDILDRIGHMPLPPYMEREDELADRERYQTVYAAQAGAVAAPTAGLHFDQAVFDRLAAMGVETATVTLHVGAGTFQPVRVERLEDHVMHSEIAQVPEETVAAVARARARGGRVIAVGTTSVRSLESASRGGVLRAFHGETDIFIYPGYRFQTVDAMVTNFHLPESTLIMLVSAFAGYNHVMAAYAEAVRERYRFFSYGDAMFVTGQEPSLGSLLIQPDSGESSEQ

SEQ ID NO: 68618 - protein, 364 aa, Marinobacter sp.
  misc_feature (1)..(364): tr|A0A3S1BX56|A0A3S1BX56_9ALTE S-adenosylmethionine:tRN A ribosyltransferase-isomerase OS=Marinobacter sp. NP-6 OX=2488666 GN=queA PE=3 SV=1
MNVSDFHFDLPDELIARYPLKERSASRLLSLDGLSGDIRHLRFTDLPGLLQPGDLLVFNDTRVIPARLFGRKETGGQVEVLVERVLGEQDILAHVRASKALKEGQKVLLEDGTSLRMNGRDDALFHLHCDSDEPVLDVLERIGHMPLPPYVDRPDESSDRERYQTVYAREAGAVAAPTAGLHFDDRILTELESMGVETAFVTLHVGAGTFQPVRVEGIEDHVMHSEVAHVPQATVDAVNAARARGGRVIAVGTTSVRSLESASRGGMVRPFQGETDIFIYPGYRFQAVDVMVTNFHLPESTLIMLVSAFAGYQNVMSAYQAAVAERYRFFSYGDAMFITAQEPSLGALSSCSGKGSRNPENNDE

SEQ ID NO: 68619 - protein, 367 aa, Marinobacter subterrani
  misc_feature (1)..(367): tr|A0A0J7LZ89|A0A0J7LZ89_9ALTE S-adenosylmethionine:tRN A ribosyltransferase-isomerase OS=Marinobacter subterra ni OX=1658765 GN=queA PE=3 SV=1
MNVSDFHFDLPDELIARYPLKERSASRLLCLDGLSGGLDHRVFGDLPNLLQPGDLLVFNNTRVIPARLFGKKETGGQVEVLAERVTGEHEIIAHVRASKALKEGQAVILEDGTSLRMVGRDDALFHLVCESEESILDVLERIGHMPLPPYVDRPDESVDRERYQTVYAREAGAVAAPTAGLHFDEALLDKLAARGIESTFVTLHVGAGTFQPVRVDKIEDHAMHSEVVHVPQEAVDAVERTRARGGRVVAVGTTSVRSLESASRGGRLQAFTGETEIFIYPGYRFQSVDALVTNFHLPESTLIMLVSGFAGYDNVMAAYREAVQARYRFFSYGDAMFITGQEPSRGMLLGPALESTSTGTDETGEAL

SEQ ID NO: 68620 - protein, 366 aa, Marinobacter vinifirmus
  misc_feature (1)..(366): tr|A0A558BEK6|A0A558BEK6_9ALTE S-adenosylmethionine:tRN A ribosyltransferase-isomerase OS=Marinobacter vinifirm us OX=355591 GN=queA PE=3 SV=1
MNVSDFHFDLPDELIARYPLKQRSASRLLNLDGPTGRTRHLRFTDLPDLLQPGDLLVFNNTRVIPARLFGQKETGGRVEVLVERVVGEHEILAHTRSSKSPKPGQRVLLEDGTALRMTGREDALFRFVCESEEPILDVLERIGHMPLPPYMERDDDQSDRERYQTVYAKEAGAVAAPTAGLHFDDDLLGLLKEKGVEFAYVTLHVGAGTFQPVRVDNVKDHVMHSEVAHVPQETVDAVNQARARGGRVVAVGTTSVRSLESASHNGVLSAFRGETDIFIYPGYRFQTVDAMVTNFHLPESTLIMLVSAFSGYEHIMSAYRKAVQERYRFFSYGDAMFLTGQQPSLGRQAASGQADTDQPESRGESL

SEQ ID NO: 68621 - protein, 358 aa, Marinobacter zhejiangensis
  misc_feature (1)..(358): tr|A0A1I4P871|A0A1I4P871_9ALTE S-adenosylmethionine:tRN A ribosyltransferase-isomerase OS=Marinobacter zhejiang ensis OX=488535 GN=queA PE=3 SV=1
MNVSDFHFDLPDELIARYPLPERSASRLLTLDGLSGAIGHRGFTDLPTFLQPGDLLVFNNTRVIPARLFGKKETGGQVEILVERVLDEHELLAHVRASKAPKPGQAIIVEDGTVFRMKERQDALFLLRCEAVEPVLDVLERTGHMPLPPYVDRPDEEADRERYQTVYAEQAGAVAAPTAGLHFDKAMIASLQEQGVNTAFVTLHVGAGTFQPVRVERIEDHVMHTEIAQVPEETVEAVRRTREQGGRVIAVGTTSVRSLESASRGGKLRSFQGETDIFIHPGYRFQTVDAMVTNFHLPESTLIMLVSAFAGYEHVMSAYHDAVQQRYRFFSYGDAMFITGQEPSLGALAGPSQTGDRS

SEQ ID NO: 68622 - protein, 348 aa, Marinobacterium aestuarii
  misc_feature (1)..(348): tr|A0A1A9F238|A0A1A9F238_9GAMM S-adenosylmethionine:tRN A ribosyltransferase-isomerase OS=Marinobacterium aestu arii OX=1821621 GN=queA PE=3 SV=1
MQVKDFSFELPDELIARFPLERRSASRLLCLEGNSGAIEHRAFSDILELLNPGDLLVFNDTRVIPARLFGEKASGGKVEVLIERVLDAGQALAHVRASRAPKPGTGLLLEGAVRATVTGRRGNLFELSFDIDRHLVEVLEEFGHMPLPPYMKRDDQQSDRERYQTVYNRKPGAVAAPTAGLHFDNELLAQLEARGVQQAFVTLHVGAGTFQPVKVEQVQDHQMHAEFIEVSEAVCQAVRDTRARGGRVVAVGTTSVRCLETASRSGEIAPYSGDTDIFIYPGYEYRTVDVLITNFHLPESTLLMLVSAFAGYDGIMQAYREAVAERYRFFSYGDAMFLTRRGAALEDK

SEQ ID NO: 68623 - protein, 350 aa, Marinobacterium georgiense
  misc_feature (1)..(350): tr|A0A1H4GRC1|A0A1H4GRC1_9GAMM S-adenosylmethionine:tRN A ribosyltransferase-isomerase OS=Marinobacterium georg iense DSM 11526 OX=1122198 GN=queA PE=3 SV=1
MQVKDFYFELPEELIARYPLEQRSASRLLCLDGNTGERTHRQFTDLLTLLQPGDLLVFNDTRVIPARLFGQKESGGQIEMLVERVTSENTALAHIRASRAPRPGARLLFEGGLEAEVTGRQENLFQLRFTNLDDHLVSALERHGHMPLPPYMKREDQLSDRERYQTVYNRKPGAVAAPTAGLHFDQALLQQLKDKGIEQTFVTLHVGAGTFQPVKVDTIAEHHMHAEYIEVSDEACAAVKAAQARGNKVVAVGTTSVRCLETASRSGEIAPFYGDTDIFIYPGYRFRTVDRLITNFHLPESTLMMLVSAFAGHQSIMQAYADAVAERYRFFSYGDAMFLTRRDAADEDAL

SEQ ID NO: 68624 - protein, 350 aa, Marinobacterium halophilum
  misc_feature (1)..(350): tr|A0A2P8EQP5|A0A2P8EQP5_9GAMM S-adenosylmethionine:tRN A ribosyltransferase-isomerase OS=Marinobacterium halop hilum OX=267374 GN=queA PE=3 SV=1
MQVKDFHFELPEELIARYPLEQRSASRLLCVDGNTGERAHRQFSDLPSLLQPGDLLVFNDTRVIPARLFGQKASGGKIEMLIERVTSESEALAHIRSSRAPKPGTCLQLEGGLEAEVTGRQQNLFEVRFTNLDGHLVSALEQHGHMPLPPYMNREDQLSDRERYQTVYNRKPGAVAAPTAGLHFDEPLLQQLRDMGVEQAFVTLHVGAGTFQPVKVDNITDHHMHAEYIEVSEETCAAVKAAQARGSRVIAVGTTSVRCLETASQSGEIAPFYGDTDIFIYPGYRYRTVEALVTNFHLPESTLLMLVSAFTGHKAMMQAYADAVAERYRFFSYGDAMFLTRREAADEESL

SEQ ID NO: 68625 - protein, 347 aa, Marinobacterium lutimaris
  misc_feature (1)..(347): tr|A0A1H6CT88|A0A1H6CT88_9GAMM S-adenosylmethionine:tRN A ribosyltransferase-isomerase OS=Marinobacterium lutim aris OX=568106 GN=queA PE=3 SV=1
MQLKDFYFDLPEELIARYPLEQRSASRMLCVDGNSGELNHRVFSDILDLLEPGDLLVFNDTRVIPARLFGQKESGGKVELLIERVTGEHEALAHIRSSRSPKPGARLLLEGGLKAEVTGRRENLFELRFDIEGHLVAALEEFGHIPLPPYMKRDDQLSDRERYQTVYNRKPGAVAAPTAGLHFDQPLLDKLKEKGIETAFVTLHVGAGTFQPVKVDKIEDHHMHAEYIEVSAEVCEAVKAARARGKRVVAVGTTSVRSLESASRSGEIAPFYGDTEIFIYPGYQYVSVDALITNFHLPESTLLMLVSAFAGYEHMMHAYEQAVAERYRFFSYGDAMFLTRRDAQENP

SEQ ID NO: 68626 - protein, 347 aa, Marinobacterium mangrovicola
  misc_feature (1)..(347): tr|A0A4R1GG21|A0A4R1GG21_9GAMM S-adenosylmethionine:tRN A ribosyltransferase-isomerase OS=Marinobacterium mangr ovicola OX=1476959 GN=queA PE=3 SV=1
MQLKDFYFDLPEELIARYPLEQRSASRMLCVDGNSGELNHRVFSDILDLLEPGDLLVFNDTRVIPARLFGQKESGGKVELLIERVTGEHEALAHIRSSRSPKPGATLLLEGGLKAEVTGRQENLFELRFDIEGHLVAALEEFGHIPLPPYMKRDDQLSDRERYQTVYNRKPGAVAAPTAGLHFDQPLLDKLKEKGIETAFVTLHVGAGTFQPVKVDKIEDHHMHAEYIEVSPEVCEAVNAARARGKRVVAVGTTSVRSLESASRSGEIAPFYGDTEIFIYPGYQYVSVDALITNFHLPESTLLMLVSAFAGYEHMMYAYEQAVAERYRFFSYGDAMFLTRRDAQENP

SEQ ID NO: 68627 - protein, 347 aa, Marinobacterium sp.
  misc_feature (1)..(347): tr|A0A081G1E1|A0A081G1E1_9GAMM S-adenosylmethionine:tRN A ribosyltransferase-isomerase OS=Marinobacterium sp. A K27 OX=1232683 GN=queA PE=3 SV=1
MQVKDFYFELPDELIARYPLEQRSASRLLCVDGNSGALHHRVFSDILELLDPGDLLVFNDTRVIPARLFGQKESGGKIELLIERVTGEHEALAHVRSSRSPKPGARLLLEGGLIAQVTGRRENLFELHFEIEGHLVEALERFGHMPLPPYMKREDQSSDRERYQTVYNRKPGAVAAPTAGLHFDQPLLDKLAEKGIETAFVTLHVGAGTFQPVKVDRIEDHHMHAEYIEVPPAVCEAVKATRARGNRVIAVGTTSVRCLESASHSGEIEPMYGDTDIFIYPGYRFRSVDALITNFHLPESTLLMLVSAFAGYDHMMNAYREAVAERYRFFSYGDAMFLTRREAQENE

SEQ ID NO: 68628 - protein, 350 aa, Marinobacterium stanieri
  misc_feature (1)..(350): tr|A0A1N6U767|A0A1N6U767_9GAMM S-adenosylmethionine:tRN A ribosyltransferase-isomerase OS=Marinobacterium stani eri OX=49186 GN=queA PE=3 SV=1
MQVKDFYFELPEELIARYPLEQRSASRLLCVDGNTGERTHRQFSDLPSMLQPGDLLVFNDTRVIPARLFGQKASGGKIEMLIERVTSDSEALAHIRSSRAPKPGTALTLEGGLEAEVVGRQQNLFEVRFTNLEGHLVSALEEYGHMPLPPYMNREDQLSDRERYQTVYNRKPGAVAAPTAGLHFDEPLLEQLKAMGVEQAFVTLHVGAGTFQPVKVDNIHDHHMHAEYIEVSEEACAAVKAAQARGNRVIAVGTTSVRCLETASQSGEIEPFYGDTDIFIYPGYRYRTVEALITNFHLPESTLLMLVSAFSGHKAMMDAYAEAVAERYRFFSYGDAMFLTRREATDEESA

SEQ ID NO: 68629 - protein, 347 aa, Marinococcus halophilus
  misc_feature (1)..(347): tr|A0A510Y809|A0A510Y809_MARHA S-adenosylmethionine:tRN A ribosyltransferase-isomerase OS=Marinococcus halophil us OX=1371 GN=queA PE=3 SV=1
MNINEFDFELPEELIAQQPLKERDQSRLLVMNTGARTIAHERFHQIEDHLEAGDCLVLNNTKVWPARLIGEKKETGAGIEVLLLQQEGDTWETLVKPAKRVKPGTVVTFGDGRLTAECTKVLEHGGREMVFTYDGIFLEILQELGEMPLPPYIKEKIEDQDRYQTVYAEHYGSAAAPTAGLHFTTELLERLKAKGVQTAHLTLHVGLGTFRPVSAETVEEHDMHAEFYHLPQETAEILNETKSAGKRIIAVGTTSARTLETVAGKQENEFMEARGWTDIFIYPGYTFRGIDALLTNFHLPKSTLVMLVSALAGKEFLFRAYEEAIRERYRFFSFGDAMLIHSGGNNE

SEQ ID NO: 68630 - protein, 347 aa, Marinococcus luteus
  misc_feature (1)..(347): tr|A0A1H2S8Z2|A0A1H2S8Z2_9BACI S-adenosylmethionine:tRN A ribosyltransferase-isomerase OS=Marinococcus luteus O X=1122204 GN=queA PE=3 SV=1
MNINEFDFELPEELIAQQPLKERDQSRLLVMNTKEETIAHEQFHQIEDYLEAGDCLVLNNTKVWPARLIGEKKETGAGIEVLLLQQEGDKWETLVKPAKRVKPGTVVTFGDGRLTAECTKVLEHGGREMVFTYDGIFLEILQELGEMPLPPYIKEKLEDQDRYQTVYAEHYGSAAAPTAGLHFTTALLERLKAKGVRTAHLTLHVGLGTFRPVSAETVEEHDMHAEFYHLPQETAEILNETKSAGKRIIAVGTTSARTLETVAGKQENKFMEARGWTDIFIYPGYTFQGIDALLTNFHLPKSTLVMLVSALAGKEFLFRAYGEAIRERYRFFSFGDAMLIHSGGNNE

SEQ ID NO: 68631 - protein, 353 aa, Marinomonas alcarazii
  misc_feature (1)..(353): tr|A0A318V732|A0A318V732_9GAMM S-adenosylmethionine:tRN A ribosyltransferase-isomerase OS=Marinomonas alcarazii OX=491949 GN=queA PE=3 SV=1
MLVSDYHFDLPDSLIANYPTPDRTASRLLHLDGPTGDVVHRQFPDVLDLVQPGDLMVFNNTRVIPARVFGQKESGGKVEILVERVINGNEALAHVRASKSPKENSKLILGQDKGEQIEATMVGRSGALFHLVFNESVLDVLSRAGHMPLPPYIERPDEDSDQERYQTVYNQKPGAVAAPTAGLHFDDALLEKLKAKGVETAFVTLHVGAGTFQPMKVENVKDHVMHAEYVEVEPSVVEQVKATKARGGRVIAVGTTSVRSLESASQSGEIAPMQGDTSIFIYPGYEFKTVDALVTNFHLPESTLIMLISAFAGYDHVMAAYKTAVEQKYRFFSYGDAMFITRNAQAKGPQGEE

SEQ ID NO: 68632 - protein, 353 aa, Marinomonas aquimarina
  misc_feature (1)..(353): tr|A0A1A8TKG8|A0A1A8TKG8_9GAMM S-adenosylmethionine:tRN A ribosyltransferase-isomerase OS=Marinomonas aquimarin a OX=295068 GN=queA PE=3 SV=1
MRVSDYRFELPEELIARYPMPERSASRLLKLDGPTGELSHNTFKDVLDFVEPGDLMVFNNTRVIPARLYGQKASGGKLELLVERLLSEHEILAHVRCSKSPKVGNRLELGTDRGAAHGAEMVGRDDTLFHLRFDEPVLEVLEKVGHMPLPPYIERPDDESDQERYQTVYNKTPGAVAAPTAGLHFDDGLLAKLKDKGVDTAFVTLHVGAGTFQPVRVDDVKDHVMHSEYAEVSQEVVDKVRATKAAGKRVIAVGTTSVRSLESASQSGQIEPFATDTSIFIYPGYEFKTVDVLVTNFHLPESTLIMLISAFAGYNNVMNAYHVAVAEKYRFFSYGDAMFITRNPKAKGPTAEE

SEQ ID NO: 68633 - protein, 353 aa, Marinomonas aquiplantarum
  misc_feature (1)..(353): tr|A0A366CVV4|A0A366CVV4_9GAMM S-adenosylmethionine:tRN A ribosyltransferase-isomerase OS=Marinomonas aquiplant arum OX=491951 GN=queA PE=3 SV=1
MLVSDYHFDLPDSLIANYPTPDRTASRLLHLDGPSGEVVHRQFPDVLDLVQAGDLMVFNNTRVIPARVFGQKESGGKVEILVERVTSSHEVLAHVRASKSPKEGTKIFLGQDKGEQIEATMLGRSGALFHLAFQEPVLDILTRVGHMPLPPYIERPDEDSDQERYQTVYNEKPGAVAAPTAGLHFDDALLAKLKDKGVEVAFVTLHVGAGTFQPMKVDNVEDHIMHAEYVEVDEQVVQQVQATKARGGRVIAVGTTSVRSLESASQSGEIAPMQGDTSIFIYPGYEFKTVDALVTNFHLPESTLIMLISAFAGYQQVMSAYRVAVEQKYRFFSYGDAMFITRNAQAKGPQSEE

SEQ ID NO: 68634 - protein, 353 aa, Marinomonas balearica
  misc_feature (1)..(353): tr|A0A4R6MHS0|A0A4R6MHS0_9GAMM S-adenosylmethionine:tRN A ribosyltransferase-isomerase OS=Marinomonas balearica OX=491947 GN=queA PE=3 SV=1
MKVSDYQFDLPDELIARYPMPERTSSRLLKLNGQSGELEHGQFADILSLVEPGDLMVFNNTRVIPARIFGQKESGGKIEVLVERLVSPTEILAHVRASKSPKPGNELVLGTDRGVSFKAVMVERQANLFRLQFEEPVLEVLDKVGHMPLPPYIERPDEESDQERYQTVYNEKPGAVAAPTAGLHFDDELLKQLSEIGVDTAFVTLHVGAGTFQPVKVDNVKDHIMHSEYAEVSQDVVDKVRLAKSKGKRVIAVGTTSVRSLESASQSGSIQPMADDTSIFIYPGYEFKTVDALVTNFHLPESTLIMLISAFAGYANVMAAYKTAVSEQYRFFSYGDAMFITRNSKADGPQSEE

SEQ ID NO: 68635 - protein, 353 aa, Marinomonas communis
  misc_feature (1)..(353): tr|A0A4R6X9L7|A0A4R6X9L7_9GAMM S-adenosylmethionine:tRN A ribosyltransferase-isomerase OS=Marinomonas communis OX=28254 GN=queA PE=3 SV=1
MRVSDYRFELPEELIARYPMPERTASRLLKLDGPSGELTHNTFKDVLDFVEPGDLMVFNNTRVIPARLYGQKESGGKLELLVERLLSEHEILAHVRCSKSPKVGNRLMLGTDRGAAHGAEMVGREDTLFHLRFDEPVLEVLEKVGHMPLPPYIERPDDESDQERYQTVYNKTPGAVAAPTAGLHFDDELLAALKDKGVDTAFVTLHVGAGTFQPVRVDDVKDHVMHSEYAEVSQEVVDKVRATKAAGKRVIAVGTTSVRSLESASQSGQIEPFATDTSIFIYPGYEFKTVDVLVTNFHLPESTLIMLISAFAGYESVMNAYRVAVEEKYRFFSYGDAMFITRNPKAEGPTTEE

SEQ ID NO: 68636 - protein, 353 aa, Marinomonas foliarum
  misc_feature (1)..(353): tr|A0A369ADG0|A0A369ADG0_9GAMM S-adenosylmethionine:tRN A ribosyltransferase-isomerase OS=Marinomonas foliarum OX=491950 GN=queA PE=3 SV=1
MLVSDYHFDLPDSLIANYPMPDRTASRLLHLDGPTGDVVHRQFPDVLDLVQPGDLMVFNNTRVIPARVFGQKESGGKVEILVERVINTNEALAHVRASKSPKENSKLILGQDKGEQIEATMIGRSGALFHLVFNEPVLDVLTRAGHMPLPPYIERPDEDSDQERYQTVYNQKPGAVAAPTAGLHFDDALLEKLKAKGVEMAFVTLHVGAGTFQPMKVENVQDHIMHAEYVEVEPSVVEQVKATKARGGRVIAVGTTSVRSLESASQSGEIAPMQDDTSIFIYPGYEFKTVDALVTNFHLPESTLIMLISAFAGYDHVMAAYKKAVEQKYRFFSYGDAMFITRNAQAKGPQCEE

SEQ ID NO: 68637 - protein, 353 aa, Marinomonas fungiae
  misc_feature (1)..(353): tr|A0A0K6IRT3|A0A0K6IRT3_9GAMM S-adenosylmethionine:tRN A ribosyltransferase-isomerase OS=Marinomonas fungiae O X=1137284 GN=queA PE=3 SV=1
MRVSDYRFELPEELIARYPMPERTASRLLKLDGPTGELSHHTFKDVLDFVEPGDLMVFNNTRVIPARLYGQKASGGKLELLVERLLSEHEILAHVRCSKSPKVGNRLELGTDRGACHGAEMIGRDDTLFHLRFDEPVLEVLEKVGHMPLPPYIERPDDESDQERYQTVYNKTPGAVAAPTAGLHFDDALLAKLKEKGVDTAFVTLHVGAGTFQPVRVDDIKDHVMHSEYAEVSQEVVDKVRATKAAGKRVIAVGTTSVRSLESASQTGQIEPFATDTSIFIYPGYEFKTVDVLVTNFHLPESTLIMLISAFAGYSNVMNAYRVAVAEKYRFFSYGDAMFITRNPKAEGPTAEE

SEQ ID NO: 68638 - protein, 353 aa, Marinomonas gallaica
  misc_feature (1)..(353): tr|A0A1C3JT47|A0A1C3JT47_9GAMM S-adenosylmethionine:tRN A ribosyltransferase-isomerase OS=Marinomonas gallaica OX=1806667 GN=queA PE=3 SV=1
MRVSDYRFELPEELIARYPMPERTASRLLKLDGPSGELAHKHFTDVLECVEPGDLMVFNNTRVIPARLFGQKASGGKLELLVERLLSEHEILAHVRCSKSPKVGNRLELGIDRGASHGAEMVGRDDTLFHLRFDEPVLEVLEKVGHMPLPPYIERPDDESDQERYQTVYNKTPGAVAAPTAGLHFDDALLEKLKAKGVDTAFVTLHVGAGTFQPVRVDDIKDHVMHSEYAEVSQEVVDKVRATKANGKRVIAVGTTSVRSLESASQSGQIEPFATDTSIFIYPGYEFKTVDVLVTNFHLPESTLIMLISAFAGYDNVMNAYRVAVAEKYRFFSYGDAMFITRNPKAEGPTAEE

SEQ ID NO: 68639 - protein, 353 aa, Marinomonas hwangdonensis
  misc_feature (1)..(353): tr|A0A3M8Q7A4|A0A3M8Q7A4_9GAMM S-adenosylmethionine:tRN A ribosyltransferase-isomerase OS=Marinomonas hwangdone nsis OX=1053647 GN=queA PE=3 SV=1
MLVSDYHFDLPDSLIAHYPTPDRTASRLLHLDGPSGEVAHRHFPDLLDLVQPGDLMVFNNTRVIAARVFGQKASGGKIEILIERVINSTEALAHIRASKSPKEGAKLFLGQDKGEEIEATMIGRSGALFHLSFNESVLDILSRVGHMPLPPYIERPDEDSDQERYQTVYNEKPGAVAAPTAGLHFDEILLEKLKAKGVEIAFVTLHVGAGTFQPMKVENVKDHIMHAEYVEVEPSVVEQVKATKGRGGRVIAVGTTSVRSLESASQSGEIAPMQDDTSIFIYPGYEFKTVDALVTNFHLPESTLIMLISAFAGYDHVMAAYKVAVEQKYRFFSYGDAMFITRNAQAKGPQGEE

SEQ ID NO: 68640 - protein, 353 aa, Marinomonas mediterranea
  misc_feature (1)..(353): tr|F2JY79|F2JY79_MARM1 S-adenosylmethionine:tRNA ribosy ltransferase-isomerase OS=Marinomonas mediterranea (str ain ATCC 700492 / JCM 21426 / NBRC 103028 / MMB-1) OX=7 17774 GN=queA PE=3 SV=1
MKVSDYHFNLPDELIARYPMPERSSSRLLQLHGQTGELKHGVFSDVLSLVEPGDLMVFNNTRVIPARVFGQKASGGKVEVLVERLLSSTEILAHVRASKSPKPGNELYLGTDRNESFKAVMVERDANLFRLQFENPVLEVLEKVGHMPLPPYIERPDEDSDQERYQTVYNEKPGAVAAPTAGLHFDDELLEKLAEKGVDTAFVTLHVGAGTFQPVKVDDVKDHIMHSEYAEVSQEVVDKVRQAKANGKRVIAVGTTSVRSLESASQSGQIEPMADDTSIFIYPGYEFKTVDALVTNFHLPESTLIMLISAFAGYSNVMAAYKAAVDEKYRFFSYGDAMFITRNPEASGPQSEE

SEQ ID NO: 68641 - protein, 353 aa, Marinomonas polaris
  misc_feature (1)..(353): tr|A0A1M5G895|A0A1M5G895_9GAMM S-adenosylmethionine:tRN A ribosyltransferase-isomerase OS=Marinomonas polaris D SM 16579 OX=1122206 GN=queA PE=3 SV=1
MLVSDYHFDLPDSLIANYPMPDRTASRLLHLDGPSGDVVHRQFPDVLDLVQPGDLMVFNNTRVIPARVFGQKESGGKVEVLVERVINTNEALAHVRASKSPKENSKLILGQDKGEQIEATMVGRSGALFHLVFNEPVLDVLTRAGHMPLPPYIERPDEDSDQERYQTVYNQKPGAVAAPTAGLHFDEVLLEKLQAKGVEIAFVTLHVGAGTFQPMKVENVKDHIMHAEYVEVEPSVVEQVKAAKARGGRVIAVGTTSVRSLESASQSGEIAPMQDDTSIFIYPGYEFKTVDALVTNFHLPESTLIMLISAFAGYDHVMAAYKKAVEQKYRFFSYGDAMFITRNAQAKGPQGEE

SEQ ID NO: 68642 - protein, 353 aa, Marinomonas pollencensis
  misc_feature (1)..(353): tr|A0A3E0DGA2|A0A3E0DGA2_9GAMM S-adenosylmethionine:tRN A ribosyltransferase-isomerase OS=Marinomonas pollencen sis OX=491954 GN=queA PE=3 SV=1
MRVSDYHFDLPEKLIATYPMPDRTASRLLHLDGESGNLAHLQFPNILDLVRPGDLMVFNNTRVIPARVFGQKESGGKIEILIERIVDEKQALAHIRASKSPKPGNKLILGQDKGEAIDAVMLDRSGPLFRVAFAEPVLDVLARIGHMPLPPYIERPDEDSDQERYQTVYNQKPGAVAAPTAGLHFDETILAKLKEKGVDTAFVTLHVGAGTFQPVKVEDVKDHIMHAEYVEVEDSVVEQVRATKARGGRVIAVGTTSVRSLESASQSGELQAMKDDTSIFIYPGYKFKTVDCMVTNFHLPESTLIMLISAFAGYDQVMAAYRSAVENEYRFFSYGDAMFITRNEQAKGPQSEE

SEQ ID NO: 68643 - protein, 353 aa, Marinomonas posidonica
  misc_feature (1)..(353): tr|F6CXB2|F6CXB2_MARPP S-adenosylmethionine:tRNA ribosy ltransferase-isomerase OS=Marinomonas posidonica (strai n CECT 7376 / NCIMB 14433 / IVIA-Po-181) OX=491952 GN=q ueA PE=3 SV=1
MLVSDYHFDLPDSLIANYPTPDRTASRLLHLDGPSGEVIHRQFPNVLELVQAGDLMVFNNTRVIPARVFGQKESGGKVEILVERVIASHEVLAHVRASKSPKEGTKIFLGQDKGEQIEATMLGRSGALFHLAFQEPVLDILTRVGHMPLPPYIERPDEDSDQERYQTVYNQKPGAVAAPTAGLHFDDALLAKLKDKGVEVAFVTLHVGAGTFQPMKVDNVEDHIMHAEYVEVGEQVVQQVQATKARGGRVVAVGTTSVRSLESASQSGEIAPMQGDTSIFIYPGYEFKTVDALVTNFHLPESTLIMLISAFAGYQQVMSAYRVAVEQKYRFFSYGDAMFITRNAQAKGPQGEE

SEQ ID NO: 68644 - protein, 353 aa, Marinomonas primoryensis
  misc_feature (1)..(353): tr|A0A2Z4PUA0|A0A2Z4PUA0_9GAMM S-adenosylmethionine:tRN A ribosyltransferase-isomerase OS=Marinomonas primoryen sis OX=178399 GN=queA PE=3 SV=1
MLVSDYHFDLPDSLIANYPTPDRTASRLLHLDGPSGEVVHRQFPDVLDLVQPGDLMVFNNTRVIPARVFGQKESGGKIEVLVERVIGTNEALAHIRASKSPKENSKLILGQDKGEQIEVTMLGRSGALFHLAFNEPVLDVLSRVGHMPLPPYIERPDEDSDQERYQTVYNQKPGAVAAPTAGLHFDDELLEKLKAKGIETAFVTLHVGAGTFQPMKVDNVKDHIMHAEYVEVEPSVVEQVKAAKARGGRVIAVGTTSVRSLESASQSGEIAPMQGDTSIFIYPGYEFKTVDALVTNFHLPESTLIMLISAFAGYDHVMSAYQAAVEQKYRFFSYGDAMFITRNTQASGPQSEE

SEQ ID NO: 68645 - protein, 353 aa, Marinomonas profundimaris
  misc_feature (1)..(353): tr|W1RWW7|W1RWW7_9GAMM S-adenosylmethionine:tRNA ribosy ltransferase-isomerase OS=Marinomonas profundimaris OX= 1208321 GN=queA PE=3 SV=1
MLVSDYHFDLPDSLIANYPTPDRTASRLLHLDGPSGDVIHRHFPDVLDLVQPGDLMVFNNTRVIPARVFGQKESGGKVEILVERVIGANEALAHVRASKSPKENTKLFLGQDKGEQIEVTMLGRSGALFHLAFNEPVLDVLSRVGHMPLPPYIERPDEDSDQERYQTVYNQKPGAVAAPTAGLHFDDALLEKLKAKGVETAFVTLHVGAGTFQPMKVDNVKDHIMHAEYVEVEQSVVDQVNATKARGGRVIAVGTTSVRSLESASQSGEIAPMQGDTSIFIYPGYEFKTVDALVTNFHLPESTLIMLISAFAGYDHVMLAYKKAVEEQYRFFSYGDAMFITRNAQAKGPQSEE

SEQ ID NO: 68646 - protein, 353 aa, Marinomonas rhizomae
  misc_feature (1)..(353): tr|A0A366JC03|A0A366JC03_9GAMM S-adenosylmethionine:tRN A ribosyltransferase-isomerase OS=Marinomonas rhizomae OX=491948 GN=queA PE=3 SV=1
MLVSDYHFDLPDSLIANYPMPDRTASRLLHLDGPSGEVVHRQFPDVLDLVQPGDLMVFNNTRVIPARVFGQKESGGKVEILVERVINANEAMAHVRASKSPKENSRLILGQDKGESIEATMIGRSGALFHLVFNEPVLDVLTRVGHMPLPPYIERPDEDSDQERYQTVYNEKPGAVAAPTAGLHFDEALLEKLKIKGVETAFVTLHVGAGTFQPMKVENVKDHIMHAEYVEVEPSVVEQVKATKARGGRVIAVGTTSVRSLESASQSGEIAPMQDDTSIFIYPGYEFKTVDALVTNFHLPESTLIMLISAFAGYDHVMAAYKAAVEQQYRFFSYGDAMFITRNSQAKGPQGEE

SEQ ID NO: 68647 - protein, 353 aa, Marinomonas sp.
  misc_feature (1)..(353): sp|A6VYN2|QUEA_MARMS S-adenosylmethionine:tRNA ribosylt ransferase-isomerase OS=Marinomonas sp. (strain MWYL1) OX=400668 GN=queA PE=3 SV=1
MLVSDYHFDLPDSLIANYPMPDRTASRLLHLDGHSGEVVHRQFPDVLDLVQPGDLMVFNNTRVIPARVFGQKESGGKVEILVERVINVNEALAHVRASKSPKESSKLILGQDKGEHIEATMIGRSGALFHLVFDEPVLDVLMRAGHMPLPPYIERPDEDSDQERYQTVYNQKPGAVAAPTAGLHFDEALLEKLKAKGVETAFVTLHVGAGTFQPMKVENVKDHIMHAEYVEVEPSVVEQVKAAKARGGRVIAVGTTSVRSLESASQSGEIAPMQGDTSIFIYPGYEFKTVDALVTNFHLPESTLIMLISAFAGYDHVMAAYKKAVEQKYRFFSYGDAMFVTRNPQAKGPQGEE

SEQ ID NO: 68648 - protein, 353 aa, Marinomonas sp.
  misc_feature (1)..(353): tr|A0A166MBB8|A0A166MBB8_9GAMM S-adenosylmethionine:tRN A ribosyltransferase-isomerase OS=Marinomonas sp. TW1 O X=1561203 GN=queA PE=3 SV=1
MLVSDYHFDLPDSLIANYPMPDRTASRLLHLDGPSGEVVHRQFPEILDLVQAGDLMVFNNTRVIPARVFGQKESGGKVEILVERVTSSHEVLAHVRASKSPKEGTKIFLGQDKGEQIEATMLGRSGALFHLAFQEPVLDILTRVGHMPLPPYIERPDEDSDQERYQTVYNEKPGAVAAPTAGLHFDDALLAKLKDKGVEVAFVTLHVGAGTFQPMKVDNVEDHIMHAEYVEVDEQVVQQVQATKARGGRVIAVGTTSVRSLESASQSGDIAPMQGDTSIFIYPGYEFKTVDALVTNFHLPESTLIMLISAFAGYQQVMSAYRVAVEQKYRFFSYGDAMFITRNAQAKGPQSEE

SEQ ID NO: 68649 - protein, 371 aa, Marinomonas spartinae
  misc_feature (1)..(371): tr|A0A1A8TB67|A0A1A8TB67_9GAMM S-adenosylmethionine:tRN A ribosyltransferase-isomerase OS=Marinomonas spartinae OX=1792290 GN=queA PE=3 SV=1
MEKNSLKYWVIFLGRFLRMRVSDYHFDLPDSLIATYPAPDRTSSRLLKLDGPTGELTHLQFSNVLDLVQPGDLMVFNNTRVIPARVFGEKESGGKIEILIERITSETEALAHIRASKSPKPGSKLFLGQDKSESIEVTMVERSGALFCLAFGEPVLQVLSRVGHMPLPPYIERPDEDSDQERYQTVYNQKPGAVAAPTAGLHFDEGLLDKIQAKGVDLAFVTLHVGAGTFQPVKVDHVKDHIMHAEYVEVEETVVEQVKATKARGGRVIAVGTTSVRSLESASQSGEIAPMKDDTSIFIYPGYKFKTVDCLVTNFHLPESTLIMLISAFAGYDQVMSAYKSAVENDYRFFSYGDAMFITRNAQAKGPQSKE

SEQ ID NO: 68650 - protein, 353 aa, Marinomonas ushuaiensis
  misc_feature (1)..(353): tr|X7E180|X7E180_9GAMM S-adenosylmethionine:tRNA ribosy ltransferase-isomerase OS=Marinomonas ushuaiensis DSM 1 5871 OX=1122207 GN=queA PE=3 SV=1
MLVSDYHFDLPDSLIANYPTPDRTASRLLHLDGPSGELAHRQFPDVLDLVQPGDLMVFNNTRVIPARVFGQKESGGKVEILVERVVATNEALAHVRASKSPKENSKIFLGQDKGEQIEATMIGRSGALFHLVFEEPVLDVLSRVGHMPLPPYIERPDEESDQERYQTVYNQKPGAVAAPTAGLHFDDELLEKLKSKGVETAFVTLHVGAGTFQPMKVDNVKDHIMHAEYVEVEQSVVDQVKATKARGGRVIAVGTTSVRSLESASQSGEIAPMQGDTSIFIYPGYEFKTVDALVTNFHLPESTLIMLISAFAGYDHVMAAYQAAVEQKYRFFSYGDAMFITRNAQAKGPQSEE

SEQ ID NO: 68651 - protein, 348 aa, Marinoscillum furvescens
  misc_feature (1)..(348): tr|A0A3D9KWQ6|A0A3D9KWQ6_9BACT S-adenosylmethionine:tRN A ribosyltransferase-isomerase OS=Marinoscillum furvesc ens DSM 4134 OX=1122208 GN=queA PE=3 SV=1
MKLSAFKFDLPSSHIALRPTENRDESRLMVIHKDTGEIEHKIFKDIVDYFDEGDMMVINNTKVFPARLYGNKEKTGAKIEVFLLRELNKEMKLWDVLVDPARKIRVGNKLYFGEGELVAEVIDNTTSRGRTIRFLFDGDETDFYKMIDRLGETPLPKRIERAAEPEDRERFQTIYAEHVGAVAAPTAGLHFTQQVMKRLEIKGIDIDPITLHVGLGTFRPVDVEDLTKHKMDSENYIVPESTADRVNRALDEKRRVVSVGTTVMRTLESSVSASGRLKANEGWTDKFIFPQYDFKICNALVTNFHLPESTLLMMAAAFGGYDLIMDAYQTAIKEKYRFFTYGDAMLII

SEQ ID NO: 68652 - protein, 394 aa, Marinoscillum furvescens
  misc_feature (1)..(394): tr|A0A3D9L2I9|A0A3D9L2I9_9BACT S-adenosylmethionine:tRN A ribosyltransferase-isomerase OS=Marinoscillum furvesc ens DSM 4134 OX=1122208 GN=queA PE=3 SV=1
MQPESLDLRNYTYELPDEKIAKYPLEDRASSKLLCYDNGQITHGHFRDISQKLPSGSFLVFNDTKVIPARLIFYKETGARIEIFLLDPIAPTNVYESVMSGKESCTWHAMIGNAKKWKEHALTMQVGDNLLKATRVADDQVKFEWTSDDTFSDVLTAIGKIPLPPYLGREATDKDIPRYQTIYSKHEGAVAAPTAGLHFTEEVMNSLKARKIAIDYLTLHVSAGTFQPIKTDNVADHPMHREQVVLSKTNIENLLNNDILIPVGTTSMRTMESLFWYGQLLSENPEAPFFVEKSTPYRKVPVISKQESLQNVLSYMERNQLETLIGHTEIFIYPGYSFKLCKGLITNFHLPGSTLILLVAALIGDDWRKVYQEALNANYRFLSYGDSSLLLPNQ

SEQ ID NO: 68653 - protein, 385 aa, Marinoscillum sp.
  misc_feature (1)..(385): tr|A0A2D7TFN9|A0A2D7TFN9_9BACT S-adenosylmethionine:tRN A ribosyltransferase-isomerase OS=Marinoscillum sp. OX= 2024838 GN=CMG94_03260 PE=3 SV=1
  misc_feature (10)..(10): Xaa can be any naturally occurring amino acid
  misc_feature (16)..(16): Xaa can be any naturally occurring amino acid
  misc_feature (18)..(18): Xaa can be any naturally occurring amino acid
  misc_feature (20)..(20): Xaa can be any naturally occurring amino acid
  misc_feature (23)..(23): Xaa can be any naturally occurring amino acid
  misc_feature (37)..(38): Xaa can be any naturally occurring amino acid
  misc_feature (65)..(65): Xaa can be any naturally occurring amino acid
  misc_feature (72)..(72): Xaa can be any naturally occurring amino acid
  misc_feature (77)..(77): Xaa can be any naturally occurring amino acid
  misc_feature (84)..(84): Xaa can be any naturally occurring amino acid
  misc_feature (86)..(86): Xaa can be any naturally occurring amino acid
  misc_feature (115)..(115): Xaa can be any naturally occurring amino acid
  misc_feature (122)..(122): Xaa can be any naturally occurring amino acid
  misc_feature (134)..(134): Xaa can be any naturally occurring amino acid
  misc_feature (221)..(221): Xaa can be any naturally occurring amino acid
  misc_feature (246)..(246): Xaa can be any naturally occurring amino acid
  misc_feature (266)..(266): Xaa can be any naturally occurring amino acid
  misc_feature (270)..(270): Xaa can be any naturally occurring amino acid
  misc_feature (273)..(273): Xaa can be any naturally occurring amino acid
  misc_feature (305)..(305): Xaa can be any naturally occurring amino acid
  misc_feature (364)..(364): Xaa can be any naturally occurring amino acid
  misc_feature (368)..(368): Xaa can be any naturally occurring amino acid
  misc_feature (371)..(371): Xaa can be any naturally occurring amino acid
MIKNIHNLNXYDYELXKXYXSSXPVDKRAESKLLVYXXKKIIDSSFKLISNYLPKNSTLFFNDSXVINGRLXFENKXGAKIEIXIXDEKISSLLKSKSPLLLKVLIGNKKKWKGXERLEKKXNGITIKIQKIKXKVSFEWDKDLSFDDILVKSGIIPLPPYIKRDTESSDYYNYQTVYSKNKGSIAAPTAGLHFNNDLIYDLKKNHKVDFFTLHVGLGTFXPIDSENIENHNMHSEEVIINKENIXNIYNSENITAVGTTSLRVLXSIYXLGXIIEKKKYNYEISQEIQKKKFKLNLKESCKKIXDHFNFNKTNELRFNSKIFIYPGYSFKVCDQLITNFHYPKSSLILLIASFIGKDWREVYXFAKXKNXRFLSYGDSSLLFRK

SEQ ID NO: 68654 - protein, 348 aa, Marinoscillum sp.; identical to SEQ ID NO: 66576
  misc_feature (1)..(348): tr|A0A2D7TGN2|A0A2D7TGN2_9BACT S-adenosylmethionine:tRN A ribosyltransferase-isomerase OS=Marinoscillum sp. OX= 2024838 GN=queA PE=3 SV=1
  misc_feature (68)..(68): Xaa can be any naturally occurring amino acid

SEQ ID NO: 68655 - protein, 348 aa, Marinospirillum alkaliphilum
  misc_feature (1)..(348): tr|A0A1K1VY41|A0A1K1VY41_9GAMM S-adenosylmethionine:tRN A ribosyltransferase-isomerase OS=Marinospirillum alkal iphilum DSM 21637 OX=1122209 GN=queA PE=3 SV=1
MQRSDFHFDLPDELIARFPTAERRGSRLLVLKDQQLEHRQFPDLLDYLQPGDLMVFNNTRVIPARLFGQKATGGKIEVLIERPLDEHRALAHIRASKAPKQGSRLLLEGGIEAECTGRQGALFCLTFLGDTPLLQLLEQHGHLPLPPYIDRADAEEDRERYQTVYAQRPGAVAAPTAGLHFDEALLQQIRDKGVQTAFVTLHVGAGTFQPVKADRLEDHEMHSEWLEVTAEVAAQVQATQAAGGRIIAVGTTSVRCLETASQSGEIHPYTGETSIFIYPGYRWRCVDLLVTNFHLPESTLLMLVSSFAGYQLVMQAYQAAVAEQYRFFSYGDAMLLFRNPDQTHPEKG

SEQ ID NO: 68656 - protein, 345 aa, Marinospirillum celere
  misc_feature (1)..(345): tr|A0A1I1J6B1|A0A1I1J6B1_9GAMM S-adenosylmethionine:tRN A ribosyltransferase-isomerase OS=Marinospirillum celer e OX=1122252 GN=queA PE=3 SV=1
MQRSDFHFELPDELIARYPAAERRGSRLLVLEGQQVSHRQFPDLLDYLKPGDLMVFNNTRVIPARLFGQKETGGKIEVLIERPLDEHRALAHIRSSKSPKAGTRLLLEGGIEAECTGREGALFCLTFLNQEPLLELLENHGHLPLPPYIDREDQQEDKERYQTVYAQHPGAVAAPTAGLHFDDQLLEQIRKKGIETAFVTLHVGAGTFQPVKVDKLEEHQMHSEWLEVTPQVAEQVRTTQQRGGRVIAVGTTSVRCLETASRSGEIQAYTGDTQIFIYPGYQWQCVDLLITNFHLPESTLLMLVSSFAGHQPIMQAYQEAVRNKYRFFSYGDAMLLSRNSAQESQ

SEQ ID NO: 68657 - protein, 356 aa, Marinosulfonomonas sp.
  misc_feature (1)..(356): tr|A0A2G2B6S4|A0A2G2B6S4_9RHOB S-adenosylmethionine:tRN A ribosyltransferase-isomerase OS=Marinosulfonomonas sp . OX=2030815 GN=queA PE=3 SV=1
  misc_feature (312)..(312): Xaa can be any naturally occurring amino acid
MKLSDFDFDLPENLIATRPARPRSASKMLVAGPDAIEDANAFDLPRFLQPDDRLILNDTKVIPARLFGTRNRGQGAGQTNARMNVTLLEPLPGDHWRALIKPLKKIRIGEEIHFKGGLIAALINKEDGVATLEFNLSGYAFDAALLEVGAMPLPPYIAAKRAADALDMDDYQTVWARHSGAVAAPTASLHFDHDLLEQLRAKGVKFTHVTLHVGAGTFLPVKVDNIKDHKMHAEWGEVTKQAADEINQTRASGGRIIPVGTTALRLIETAANQNGEITPWAGDTDIFISPGYRFRVADALITNFHLPKSTLXMLVSALMGSERIQEIYAHAIAGNYRFFSYGDASLLSPRAETRQS

SEQ ID NO: 68658 - protein, 361 aa, Marinosulfonomonas sp.
  misc_feature (1)..(361): tr|A0A0P9CLD3|A0A0P9CLD3_9RHOB S-adenosylmethionine:tRN A ribosyltransferase-isomerase OS=Marinosulfonomonas sp . PRT-SC04 OX=1527300 GN=queA PE=3 SV=1
MKLSDFDFDLPEDLIATRPASPRTSARLLVATGTELRDQQVSDLPDIFRAGDRLVLNDTKVIPARLFGLRHRDSAQGAVAAKIEVTLLEPQPDGCWMALVKPLRKLKIGEDVVFSDDLSARLIDKVDGTAMLKFNLTGDDFDAALAQSGAMPLPPYIAAKRPADAQDHHDYQTVFARHKGAVAAPTASLHFDTDLLAEIAEKGVTFSHVTLHVGAGTFLPVKVDDVSQHKMHSEWGEVTQQAADEINATHKAGGRIIAVGTTALRLIESAGTEDGQLHPWRGSTDIFICPGYKFRISDALMTNFHLPKSTLMMLVSALMGSDAVRAIYRHAIDQGYRFFSYGDASILFPSGESRREGETRR

SEQ ID NO: 68659 - protein, 351 aa, Marinovum algicola
  misc_feature (1)..(351): tr|A0A0H4KUN0|A0A0H4KUN0_9RHOB S-adenosylmethionine:tRN A ribosyltransferase-isomerase OS=Marinovum algicola DG 898 OX=988812 GN=queA PE=3 SV=1
MQLSDFDFDLPQDRIATRPARPRSSARLLVAEGDAVTDAHVFDLPDWLRPGDRLVLNDTRVIPARLSGSRRREGAQGPTEARIGVTLLEPQADGTWSALIKPLKKVADGEVIRFSDALSAVMEARAEGQGLLRFNLEGEDFDAALAEAGAMPLPPYIEALRPADAQDREDYQTVWAARKGAVAAPTASLHFDAALLAALEARGIGFTKVTLHVGAGTFLPVKVEDVTTHKMHAEWGEVSEEAAAEIAATKAAGGRVIPVGTTALRLIETAARDTGAIRPWQGETDIFIYPGFAFRVTDALMTNFHLPRSTLMMLVAALMGRDRILRVYDHAIASGYRFFSYGDASLLIPQR

SEQ ID NO: 68660 - protein, 352 aa, Marinovum sp.
  misc_feature (1)..(352): tr|A0A2D7SGI2|A0A2D7SGI2_9RHOB S-adenosylmethionine:tRN A ribosyltransferase-isomerase OS=Marinovum sp. OX=2024 839 GN=queA PE=3 SV=1
MRLEDFDFELPTELIALRPQKPRTSAKLLVANEKSINDYCVNDLVRLLRPGDRLVLNNTKVIPARLLGTRTRKIDLTNVAEAKINVNLIERKASDTWIALVKPLRKLNLGESLDFGSGLKAQLIDKQNGTAKFLFNKKGQELEESLSVVGSMPLPPYIANKRPVDVRDDVDYQTIWAEEAGSVAAPTASLHFDKKLLLELEEIGILITFVTLHVGAGTFLPVKVDKISEHKMHPEIGYISEAAALEINETKSQGNRVIPVGTTALRLIESAAREYGIINEWSGETDIFIYPGFQFKITDGLVTNFHLPKSTLLMLVSALMGSDCIRKIYAHAIQKKYRFFSYGDASLLLKKL

SEQ ID NO: 68661 - protein, 352 aa, Marinovum sp.
  misc_feature (1)..(352): tr|A0A2D7LE45|A0A2D7LE45_9RHOB S-adenosylmethionine:tRN A ribosyltransferase-isomerase OS=Marinovum sp. OX=2024 839 GN=queA PE=3 SV=1
MKLEDFDFELPTDLIALRPKTPRVSARLLVATDNTIDDLIVSDLVNLLRPGDRLVLNNTKVIPARLSGTRTRTISPKKIVTAKIAINLIERVAKDTWVALVKPLRKLDLGEIIDLGLGLNAKITHKSNGTATLCFNKCGQELDESLYAIGSMPLPPYIEKKRSADSRDVVDYQTIWAKEPGSVAAPTASLHFDKELLTKLKRLGVTTTFVTLHVGAGTFLPVKANYISEHQMHPEIGYISETAATEINETKSSGNRVIPVGTTALRLIESAAQDDGLVNAWSGQTDIFIYPGFNFKVADGLMTNFHLPKSTLLMLVSALMGADRIKKIYAHALQKKYRFFSYGDASLLLKKL

SEQ ID NO: 68662 - protein, 344 aa, Mariprofundus aestuarium
  misc_feature (1)..(344): tr|A0A2K8KWE7|A0A2K8KWE7_9PROT S-adenosylmethionine:tRN A ribosyltransferase-isomerase OS=Mariprofundus aestuar ium OX=1921086 GN=queA PE=3 SV=1
MQVSDFDFELPEHLIAKKPLQQRDASRLLCLASSDDAIVDAMIRDLPALVKPGDLWVLNDTRVIPARLVGVKPSGGKVEVLLLEPAGENHIWLAWGKSNKPLKPGTVVNFSDEFSAEVLSRDGKNIEVLLRADDVAAAIEVHGHMPLPPYIDRPDSEEDKERYQTVFARHAGAVAAPTAGLHLTAELMAAMQDAGASFAHVTLHVGPGTFQPVQVDDVDSHVMHEEAYIVPAETAAQVNLAKAEGRRVVAVGTTSLRTLEAASAGGELKAGAGRTSIFIYPGYHFQIVDALLTNFHLPKSTLIMLVAALAGRDRVLAAYAHAREEEYRFYSYGDAMFVPRRCES

SEQ ID NO: 68663 - protein, 344 aa, Mariprofundus ferrinatatus
  misc_feature (1)..(344): tr|A0A2K8L593|A0A2K8L593_9PROT S-adenosylmethionine:tRN A ribosyltransferase-isomerase OS=Mariprofundus ferrina tatus OX=1921087 GN=queA PE=3 SV=1
MQVSDFDFELPEYLIAKRPLEARDASRLLCIPEDGGALVDSMIRDLPLLVKPGDVWVLNDTRVIPARLVGNKPSGGRVEILLLEPAGENNVWLAWGKSNKPLKPGTIVVFSDSFSAEVLTRDGKNVEVLLCADDVPAAIESHGHMPLPPYIDRPDSREDRERYQTVFARHAGAVAAPTAGLHLTSELMAAMQQAGATFAHVTLHVGPGTFQPVQVDDVNSHVMHEEAYIVPEQTAETVNRAKAEGRRIVAVGTTSLRTLEAASAAGELKAGAGRTSIFIYPGYHFRTVDALLTNFHLPKSTLIMLVAALAGRARVLDAYTHARESGYRFYSYGDAMFVPKLSDA

SEQ ID NO: 68664 - protein, 342 aa, Mariprofundus ferrooxydans
  misc_feature (1)..(342): tr|Q0EXQ8|Q0EXQ8_9PROT S-adenosylmethionine:tRNA ribosy ltransferase-isomerase OS=Mariprofundus ferrooxydans PV -1 OX=314345 GN=SPV1_00902 PE=3 SV=1
MRVSDYDFDLPEKSIASQPLRQRDASRLLTLSGEDGQLTDRWIRDLPQLVEPGDVWVVNDTRVIPARLIGQKSSGGKVEVLLLEPSDKTDVWRAWGKSNKPLKAGTVITFTNTFSALVLSRDGKDILVHLLADDVPAAIEAHGHMPLPPYINRPDSEEDKQRYQTVFARHAGAVAAPTAGLHLTTELMAAMEEAGAVFAHVTLHVGPGTFQPVQVENLDEHVMHEEGYIVPEETATLVNMARSQGRRIVAVGTTSLRTLEAAGASGELLAGSDRTSIFITPGYHFSYGRCAVDQLSPAQIHIDYAGVCTGRAGACAGSIYACQRGRLPLLLLRGCDVCTGLS

SEQ ID NO: 68665 - protein, 65 aa, Mariprofundus ferrooxydans
  misc_feature (1)..(65): tr|Q0EXQ7|Q0EXQ7_9PROT S-adenosylmethionine:tRNA ribosy ltransferase-isomerase OS=Mariprofundus ferrooxydans PV -1 OX=314345 GN=SPV1_00907 PE=3 SV=1
MVDALLTNFHLPKSTLIMLVSALAGRERVLAAYTHAREEGYRFYSYGDAMFVPVYPDTAAMEAST

SEQ ID NO: 68666 - protein, 344 aa, Mariprofundus micogutta
  misc_feature (1)..(344): tr|A0A1L8CK18|A0A1L8CK18_9PROT S-adenosylmethionine:tRN A ribosyltransferase-isomerase OS=Mariprofundus micogut ta OX=1921010 GN=queA PE=3 SV=1
MQVSDFDFELPERLIAKKPLEQRDASRLLCLSDSDDAFVDGLIRDLSRYVQPGDVWVLNDTKVIPARLVGRKKSGGKVEVLLLEPMDQPNVWLAWGKSNKPLKPDTEIEFADGFYAKVISREGKNIEVLLLAEDVGHAIENYGHMPLPPYIDRPDTEEDKARYQTVFARHAGAVAAPTAGLHLTDALMHKMQIAGASFAHVTLHVGPGTFQPVQVDDVNSHVMHEEAYIVPAETARMVNQAKAEGRRVIAVGTTSLRTLEAASADGELQAGAGRTSIFIYPGYHFQIVDALLTNFHLPKSTLIMLVAALAGRERVLNAYDFARVHDYRFYSYGDAMFVPRSTNS

SEQ ID NO: 68667 - protein, 342 aa, Mariprofundus sp.
  misc_feature (1)..(342): tr|A0A498DY31|A0A498DY31_9PROT S-adenosylmethionine:tRN A ribosyltransferase-isomerase OS=Mariprofundus sp. EBB -1 OX=2650971 GN=queA PE=3 SV=1
MQVSDFNFELPEHLIAKQPLKQRDASRLLCLSDSGCTDARISDLAALVQPGDVWVLNDTKVIPARLTGTKPSGGKVEVLLLEPTGDDNCWIAWGKCNKPLKPDTIIHFSDNFSAKVLRRDGKQIEVQLFADDVGTAIETHGHMPLPPYINRPDTEEDKARYQTVFARHSGAVAAPTAGLHLTTALMAAMQQAGAEFVHLTLHVGPGTFQPVQVDSLSEHIMHEEAYIVPAETAKTINQAKADGKRIVAVGTTSLRTLEAASQHGTLQAGAARTSIFIYPGYHFQMVDALLTNFHLPKSTLIMLVAALAGQDRVLAAYEHAKAHDYRFYSYGDAMFVPRLESA

SEQ ID NO: 68668 - protein, 348 aa, Marisediminitalea aggregata
  misc_feature (1)..(348): tr|A0A1M5GXB3|A0A1M5GXB3_9ALTE S-adenosylmethionine:tRN A ribosyltransferase-isomerase OS=Marisediminitalea agg regata OX=634436 GN=queA PE=3 SV=1
MKLSDFSFTLPEHLIAKYPTPDRTASRLLHLNGTTGDVHHKQFQQMLDLVEPGDLLVFNNTRVIPARLLGQKASGGKVEVLIERIVDDNNALAHVRASKAPKPGTDLLLEGAVSVTVTGRQDALFELRFNGDATVLEQLEQYGHMPLPPYIDRPDEQADKERYQTVYNQAPGAVAAPTAGLHFDDALLERLQQKGVNLAYVTLHVGAGTFQPVRVDNILEHKMHSEFAIVPEHVVNAVRATKAAGKRVIAVGTTSVRSLESSALEASKGEVLVPYQSDTDIFIYPGFEFKVVDAMFTNFHLPESTLIMLISAFAGKDNVLAAYEQAIEQEYRFYSYGDSMFIEKATNA

SEQ ID NO: 68669 - protein, 337 aa, Marispirochaeta aestuarii
  misc_feature (1)..(337): tr|A0A1Y1S152|A0A1Y1S152_9SPIO S-adenosylmethionine:tRN A ribosyltransferase-isomerase OS=Marispirochaeta aestu arii OX=1963862 GN=queA PE=3 SV=1
MLTRDFSFDLPEHLIAQFPPEHRGESRLLLLDRKTGTSSDHVMAEFPELLPENSLVVFNNTRVRKSRIFGRTENGGSVEFLLLKEREPGLWDAVVQRRKRQKIGRRYSFPEGVEAVLVDKPGDRGILRFDPPLDKAYLERNGAIPLPPYIRRSADESDSERYQTVYSREEGSVAAPTAGLHFTPAILHRIRERAEIRYVTLHVGIGTFAPIRTEHLSDHRMHTEEYEVSVETADAVNRARREKRPVVAVGTTTVRTLESAFSEGKLAAGRNSTDLFISPGYRFKIVDHMFTNFHTPGSSLLVMVSAFAGREVILEAYAEAVRKEYRFFSYGDAMFIQ

SEQ ID NO: 68670 - protein, 357 aa, Maritalea mobilis
  misc_feature (1)..(357): tr|A0A4R6VQK3|A0A4R6VQK3_9RHIZ S-adenosylmethionine:tRN A ribosyltransferase-isomerase OS=Maritalea mobilis OX= 483324 GN=queA PE=3 SV=1
MRVDEFDFTLPDDLVALHPAVPRDSARMLVVNPATDLQDRSVSELTDFLTENDVLVVNNTKVLPAELVGTRTRGEAVAKISVNLHKRVDPQQWRAFARPAKKLAIGDQVEFLRESVDPLRAEVVEKADAGEVQLKFAEKGAELDEAIKARGAMPLPPYIGAKRDHEDQDDTDYQTIYAKHDGAVAAPTAGLHFTDRLLDAIRAKGVKIEEVTLHVGAGTFLPVKVDDTEDHKMHAEWGEITSSTIETINEAKAKGGRVIAVGTTSLRLLESASMDGELKPFCGETDIFITPGYQFNAVDVLMTNFHLPKSTLFMLVSAFSGFETMQKAYKHAIDSKYRFYSFGDASLLFRADLAAKD

SEQ ID NO: 68671 - protein, 358 aa, Maritalea myrionectae
  misc_feature (1)..(358): tr|A0A2R4MFG0|A0A2R4MFG0_9RHIZ S-adenosylmethionine:tRN A ribosyltransferase-isomerase OS=Maritalea myrionectae OX=454601 GN=queA PE=3 SV=1
MRVDDFDFTLPDDLVALHPAVPRDSARMLVVDPAKEIQDRSVSELLEFLSENDVLVVNNTKVLPAELVGTRTRGDAVAKISVNLHKRVDPSQWRAFARPAKKLAIGDHVEFLREGVDPLRAEVVEKADAGEVQLKFAEKGAELDEAIKARGAMPLPPYIGAKRDHEDQDDTDYQTIYAKHDGAVAAPTAGLHFTDRLLDAIRAKGVKIEEVTLHVGAGTFLPVKVDNTEDHKMHAEWGEITPATIDTIKNARTKGGRVFAVGTTSLRLLESAAFDGELKPFCGETDIFITPGYRFNAVDVLMTNFHLPKSTLFMLVSAFSGFETMQKAYKHAIDNKYRFYSFGDASLLFRDDSADKDK

SEQ ID NO: 68672 - protein, 355 aa, Maritimibacter alkaliphilus
  misc_feature (1)..(355): tr|A3VE41|A3VE41_9RHOB S-adenosylmethionine:tRNA ribosy ltransferase-isomerase OS=Maritimibacter alkaliphilus H TCC2654 OX=314271 GN=queA PE=3 SV=1
MTTDAIGTRLSDYDFDLPEDLIATRPARPRSSARLLVAERARITDGVVTDLVDWLRPGDRLVLNDTRVIPARLEGTRTRGEAQARIEVTLLAPDAQPGAWSALVKPLRKVKDGETIDFAAGLSATVLSRSEGQAVLTFNLTGAAFDAALAEAGRMPLPPYIEAKRRADAQDREDYQTVWARQTGAVAAPTASLHFDDALLAALDARGVARTHVTLHVGAGTFLPVKVDDVSDHKMHAEWGEVTEAAAAEINATRAAGGRIIPVGTTALRLIESAAAAPGRIEPWRGPTDIFIRPGYAFKITDGLMTNFHLPKSTLMMLVSALMGMERMREVYAHAIENRYRFFSYGDASLLLPNG

SEQ ID NO: 68673 - protein, 357 aa, Maritimibacter sp.
  misc_feature (1)..(357): tr|A0A1X7PZ98|A0A1X7PZ98_9RHOB S-adenosylmethionine:tRN A ribosyltransferase-isomerase OS=Maritimibacter sp. HL -12 OX=1162418 GN=queA PE=3 SV=1
MNDQDRAEGSRLSDYDFDLPEHLIATRPARPRSSARLLVATPGSLTDATAIELPDFLRPGDRLVLNDTRVIPARLRGTRQRGEAVAGIDVTLLEPLPGGAWLALLKPLRKVAEGEEIVFSDQLSARLVAKEGGEARLAFNLSGPDFDAALEEAGQMPLPPYIEARRKPDARDRDDYQTVWAEKPGAVAAPTASLHFDDALLAALVARGVATTRVTLHVGAGTFLPVKTDDLTDHRMHAEWGEVTPEAAAEINATKAAGGRIIPVGTTALRLIESAADAPGRIAPWRGPTDIFIRPGFPFRLSDGLMTNFHLPKSTLMMLVSALMGIGRMREVYAHAIARDYRFFSYGDASLLLPNED

SEQ ID NO: 68674 - protein, 356 aa, Maritimibacter sp.
  misc_feature (1)..(356): tr|A0A2D9YMW8|A0A2D9YMW8_9RHOB S-adenosylmethionine:tRN A ribosyltransferase-isomerase OS=Maritimibacter sp. OX =2003363 GN=queA PE=3 SV=1
MKLSDFDFDLPDDLIATRPARPRSSARLLVAGPDWTEDAHVFDLVNWLQPGDRLVLNDTKVIPARLFGTRTRQTGQGPATARIEATLVEPTASGTWQALIKPLRKVAEGEEIVFSDALTARLVTRGDGMGELAFNLTGDDFDAALAQAGAMPLPPYIAAKRPADEADREDYQTVWAERSGAVAAPTASLHFDQPLLAALAERGVGFTHVTLHVGAGTFLPVKVDDVSQHKMHAEWGEVSATAAAEIAGTKAAGGRVIPVGTTALRLIETAARDSGAIAPWTGDTDIFIRPGFDFHVADALMTNFHLPKSTLLMLVSALMGRDRILDIYDHAVRGGYRFFSYGDASLLLPKGGKRHD

SEQ ID NO: 68675 - protein, 348 aa, Marivirga lumbricoides
  misc_feature (1)..(348): tr|A0A2T4DVA4|A0A2T4DVA4_9BACT S-adenosylmethionine:tRN A ribosyltransferase-isomerase OS=Marivirga lumbricoide s OX=1046115 GN=queA PE=3 SV=1
MKLSEFKFDLPLKLVAQHPAEDRDLSKLLVLHKDTGKIEHKVFKDIVDYFDDGDVLVTNNTKVFPARLYGNKEKTGAQIEVFLLRELNKEMHLWDVLVDPARKIRVGNKLYFGDGELVAEVIDNTTSRGRTIRFLYDGDDEAFYKMVDTLGETPLPKYIKRPVEEADRDRFQTIYAEEIGAVAAPTAGMHFTRQILKRMELKGVKTSPITLHIGLGTFRPVDVEDLTKHKMDSENYKVPSKTAEIVNEALDNKKRVCAVGTTSMRSMESSVNANNRLKGNEGWTDRFIFPPYDFKICNALLTNFHMPESTLLMMACAFGGYENVINAYKVAIKENYRFLSYGDAMLII

SEQ ID NO: 68676 - protein, 348 aa, Marivirga sericea
  misc_feature (1)..(348): tr|A0A1X7LHR1|A0A1X7LHR1_9BACT S-adenosylmethionine:tRN A ribosyltransferase-isomerase OS=Marivirga sericea OX= 1028 GN=queA PE=3 SV=1
MKLSEFKFELPLKLVAQHPAEDRDLAKLMVLHKDTGEIEHKTFKDIVDYFDEGDILVTNNTKVFPARLYGNKEKTGAQIEVFLLRELNKEMHLWDVLVDPARKIRVGNKLYFGDGELVAEVIDNTTSRGRTIKFLYDGDDQDFYKLVDSLGETPLPKYIKRPVEEADRERFQTIYAEEVGAVAAPTAGMHFTRQVLKRMELKGIKTSPITLHIGLGTFRPVDVEDLTKHKMDSENFKVPKKTAELVNESLDSKKRVCAVGTTAMRSMESSVTANNHLKENEGWTDRFIFPPYEFKICNALLTNFHMPESTLLMMAAAFGGYDNVMKAYQEAIKHKYRFLSYGDAMLII

SEQ ID NO: 68677 - protein, 406 aa, Marivirga sericea
  misc_feature (1)..(406): tr|A0A1X7INI5|A0A1X7INI5_9BACT S-adenosylmethionine:tRN A ribosyltransferase-isomerase OS=Marivirga sericea OX= 1028 GN=queA PE=3 SV=1
MNLLEIASKIDLQKYQYTLPEERIAKFPLEERDHSQLLVYQNGDIEHQHFYDLANHLPKNCSLIFNNTKVIPARIHFKKQSGANIEIFLLSPLKPTPEVAQAMLVKNKCVWHCMVGNRKRWKAGDALERFFETDYGKIKVIATYANFDKNEIQFEWDNEAVPFVEIVELMGTTPLPPYLNRSATEEDKPRYQTVYSKNEGAVAAPTAGLHFTDAIVENIQKTHAIHELTLHVGAGTFQPIKTENVLEHDMHCEQIQIEKSTIEFLATTDNPIVAVGTTSIRSLESAYWFGIELLKKEQDTFHIKKLYPYENGFDNLPTRKESFQAILEFMESQQMESLHGDTEIFIFPGYQFQVVNGLITNFHQPESTLILLIAALIGENWQKVYHEALNNSYRFLSYGDSSLLLP

SEQ ID NO: 68678 - protein, 406 aa, Marivirga tractuosa
  misc_feature (1)..(406): tr|E4TRG8|E4TRG8_MARTH S-adenosylmethionine:tRNA ribosy ltransferase-isomerase OS=Marivirga tractuosa (strain A TCC 23168 / DSM 4126 / NBRC 15989 / NCIMB 1408 / VKM B- 1430 / H-43) OX=643867 GN=queA PE=3 SV=1
MNLLEKASQIDLNKYQYELPEERIAKFPLEKRDHSQLLVYQKGNIQHQHFYDIKSHLPENSSLIFNNTKVIPARIHFQKQSGAKIEIFLLSPLEPTPEVAQAMLAKKKCIWHCMVGNRKRWKIQDQLERFFETEYGKIQVTATYADYEQNHIQFEWDNDAVPFVEIVELMGTTPLPPYLNRTATDEDKPRYQTVYSKNEGAVAAPTAGLHFTDTILKDIQKSHSIHELTLHVGAGTFQPIKAENVLEHDMHCEQIQIDKSTIEFLAQSENPITAVGTTSIRSLESAYWFGVQLINKEARTFHITKLYPYEKGFDELPRRKESFQAILNYMKAENVESLHGDTEIFIFPGYEFQVVNGLITNFHQPESTLILLIAAFIGEKWQKVYDEALKNDYRFLSYGDSSLLLP

SEQ ID NO: 68679 - protein, 348 aa, Marivirga tractuosa
  misc_feature (1)..(348): tr|E4TTF0|E4TTF0_MARTH S-adenosylmethionine:tRNA ribosy ltransferase-isomerase OS=Marivirga tractuosa (strain A TCC 23168 / DSM 4126 / NBRC 15989 / NCIMB 1408 / VKM B- 1430 / H-43) OX=643867 GN=queA PE=3 SV=1
MKLSEFKFELPLKLVAQHPAEDRDLAKLMVLHKDTGEIEHKTFKDIVDYFDEGDILVTNNTKVFPARLYGNKEKTGAQIEVFLLRELNKEMHLWDVLVDPARKIRVGNKLYFGDGELVAEVIDNTTSRGRTIKFLYDGDDQDFYKLVDSLGETPLPKYIKRPVEEADRERFQTIYAEEVGAVAAPTAGMHFTRQVLKRMELKGIKTSPITLHIGLGTFRPVDVEDLTKHKMDSENFKVPVKTAELVNESLNSKKRVCAVGTTAMRSMESSVTANNRLKENEGWTDRFIFPPYEFKICNALLTNFHMPESTLLMMAAAFGGYDNVMNAYQEAIKHKYRFLSYGDAMLII

SEQ ID NO: 68680 - protein, 348 aa, Marivita cryptomonadis
  misc_feature (1)..(348): tr|A0A1X4NTA4|A0A1X4NTA4_9RHOB S-adenosylmethionine:tRN A ribosyltransferase-isomerase OS=Marivita cryptomonadi s OX=505252 GN=queA PE=3 SV=1
MKLSDFDFHLPEDLIATRPASPRSSARLLHVEAGVIADRIVNHLPDILRPTDRLVLNDTKVIPARLFGVRHRVGEAGATEAKIEVTLLEPQADGTWSALVKPLKKLREGEDVVFSSDLTACLEDRRDGQALLRFNLTGDDFDAALAEAGAMPLPPYIAAKRPADAQDKQDYQTIWARNSGAVAAPTASLHFDEALVAALNARGVGMSFVTLHVGAGTFLPVKVEDVTTHKMHAEWGRVSETAAAEIAATKAAGGRVIPVGTTALRLIESAARGGSIQQWEGDTDIFIYPGFEFQVTDGLMTNFHLPKSTLMMLVSALMGQDRVREIYAHAIEERYRFFSYGDSSLLIP

SEQ ID NO: 68681 - protein, 348 aa, Marivita geojedonensis
  misc_feature (1)..(348): tr|A0A1X4NLN3|A0A1X4NLN3_9RHOB S-adenosylmethionine:tRN A ribosyltransferase-isomerase OS=Marivita geojedonensi s OX=1123756 GN=queA PE=3 SV=1
MKLSDFDFDLPEDLIATRPASPRSSARLLHAEAGGIADRIVNQLPDILRPTDRLVLNDTKVIPARLFGVRHRHGAAGATEAKIEVTLLEPQASGLWAALVKPLKKLRDGEEVVFSRDLSATLEGRSEGQALLRFNLAGQDFDEALAQAGAMPLPPYIAAKRPADEKDKEDYQTIWARNAGAVAAPTASLHFDEPLVAALRARGVGMSFVTLHVGAGTFLPVKVEDVTTHRMHAEWGHVSEAAAAEIAATKASGGRVIPVGTTALRLIESAARGGSIRPWEGDTDIFIYPGFEFRVADGLMTNFHLPKSTLMMLVSALMGQTRIKEIYAHAIEHRYRFFSYGDSSLLIP

SEQ ID NO: 68682 - protein, 348 aa, Marivita hallyeonensis
  misc_feature (1)..(348): tr|A0A1M5VYU1|A0A1M5VYU1_9RHOB S-adenosylmethionine:tRN A ribosyltransferase-isomerase OS=Marivita hallyeonensi s OX=996342 GN=queA PE=3 SV=1
MKLSDFDFDLPDDLIATRPASPRSSARLLHAEAGGIADRIVSDLPEILRPSDRLILNDTRVIPARLFGVRKRSGEAGPSEAKIEVTLLEPQANGSWSALVKPLKKVKDGETITFSPDLSARVDSRAEGQAFLRFNLTGEDFDNALAHAGAMPLPPYIAAKRHADDRDKEDYQTIWARNAGAVAAPTASLHFDEALVAALKARGVGMTFVTLHVGAGTFLPVKVEDVTTHKMHAEWGHVSEDAAAEIRATKAAGGRIIPVGTTALRLIESAARDEGIAPWEGDTDIFIYPGFEFRVTDGLMTNFHLPKSTLMMLVSALMGQERIREIYAHAIAERYRFFSYGDSSLLIP

SEQ ID NO: 68683 - protein, 348 aa, Marivita sp.
  misc_feature (1)..(348): tr|A0A316KLW7|A0A316KLW7_9RHOB S-adenosylmethionine:tRN A ribosyltransferase-isomerase OS=Marivita sp. XM-24bin 2 OX=2133951 GN=queA PE=3 SV=1
MKLSDFDFHLPEELIATRPASPRSSARLLYAEAGGIADRIVNQLPEILRPTDRLVLNDTKVIPARLFGVRRRMGDTGLTEAKIEVTLLEPQADGTWSALVKPLKKLREGEVVEFSSDLSASLEGRSDGQALLRFNLTGDDFDAALAEAGAMPLPPYIAAKRPADEKDKEDYQTIWARNAGAVAAPTASLHFDEALVAALKARGVGMSFVTLHVGAGTFLPVKVEDVTTHKMHAEWGRVSETAAAEIAETKAAGGRVIPVGTTALRLIESAARGGSIQPWEGDTDIFIYPGFEFQVTDGLMTNFHLPKSTLMMLVSALMGQERVREIYAHAIENRYRFFSYGDSSLLIP

SEQ ID NO: 68684 - protein, 349 aa, Marivivens niveibacter
  misc_feature (1)..(349): tr|A0A251WVY6|A0A251WVY6_9RHOB S-adenosylmethionine:tRN A ribosyltransferase-isomerase OS=Marivivens niveibacte r OX=1930667 GN=queA PE=3 SV=1
MKLSDFDFDLPENLIATRPAKPRSSARLLVAQGGQISDLTVMDLVDQLGAGDRLVLNDTRVIPARLTGLRHRVSAQGDVSAKIEVTLLEPRADGTWAALIKPLKKVKDGEDIVFSDDLSAKVEGRDEGQAHIRFNLTGDDFDAALAAAGAMPLPPYIAALRAPDDQDKEDYQTIWARNTGAVAAPTASLHFDDTLLAALRDKGVEFTYVTLHVGAGTFLPVKVDDISDHKMHSEWGHVSEKAAAEINATKAAGKRVVPVGTTALRLIESAAKDGAIAPWSAPTDIFITPGFEFQIADGLMTNFHLPKSTLMMLVSALAGVQEIKDIYAHAILQGYRFFSYGDASLLWRK

SEQ ID NO: 68685 - protein, 349 aa, Marixanthomonas ophiurae
  misc_feature (1)..(349): tr|A0A3E1QEG1|A0A3E1QEG1_9FLAO S-adenosylmethionine:tRN A ribosyltransferase-isomerase OS=Marixanthomonas ophiu rae OX=387659 GN=queA PE=3 SV=1
MKLSNFNFELPEELLAEYPASNRDEARLMVLNRKEKTIEHKMFKDLIDYFEEDDVMVLNNTKVFPARLFGNKEKTGARIEVFLLRELNPETRLWDVLVDPARKIRIGNKLYFGEDESLVAEVIDNTTSRGRTLRFLFDGSYEEFRSKLTELGETPLPKYIKRDVEPEDAERYQTIFAKEEGAVAAPTAGLHFSKHLLKRLEIKGINFAEVTLHVGLGTFSPVEVEDLSKHKMDSEEIAIPQESVDIINGGNNRKKRVCAVGTTVMRALESSVSSNLMLNPYAGWTNKFIFPPYDFSIANCMVTNFHTPKSTLLMMVAAFAGHDFVKEAYAEAVKEKYRFYTYGDAMLII

SEQ ID NO: 68686 - protein, 349 aa, Marixanthomonas sp.
  misc_feature (1)..(349): tr|A0A2U0I8L1|A0A2U0I8L1_9FLAO S-adenosylmethionine:tRN A ribosyltransferase-isomerase OS=Marixanthomonas sp. H N-E44 OX=2174845 GN=queA PE=3 SV=1
MKLSNFNFDLPAELLAEYPASNRDEARLMVLNRKEKTIEHKMFKDLIDYFEEDDVLVLNNTKVFPARLFGNKEKTGARIEVFLLRELNPETRLWDVLVDPARKIRIGNKLYFGEDESLVAEVIDNTTSRGRTLRFLFDGSYEEFRNKLTELGETPLPKYIKREVEPEDADRYQTIYAKEEGAVAAPTAGLHFSKHLLKRLEIKGINFAEVTLHVGLGTFSPVEVEDLSKHKMDSEEIVLPQNSVDIINQGINRKKRVCAVGTTVMRALESSVSSNSMLNPYAGWTNKFIFPPYDFSIANCMVTNFHTPKSTLLMMVAAFAGHDFVKEAYAEAIKEKYRFYTYGDAMLII

SEQ ID NO: 68687 - protein, 351 aa, Marmoricola ginsengisoli
  misc_feature (1)..(351): tr|A0A3N0CNY2|A0A3N0CNY2_9ACTN S-adenosylmethionine:tRN A ribosyltransferase-isomerase OS=Marmoricola ginsengis oli OX=661483 GN=EFK50_03385 PE=3 SV=1
MRILDEHPSTVFSSPADATAPAPPESRGLERDAVRLLVAGPDGVSHARVRDLASYLEPGDLVVVNDSATVAGELDAERLGAGPVVLHLATPLDDGTWVVEVRTAPSAERAILDAAPGDRFLAGSVVVDLVAPYPRTGSSPTGHGNRLWRASVSGPLPDRLAAHGRPIAYGYLPRRYPLSAYQTIFGTRPGSAEMPSAGRPFTPRVVTDLVARGVTIAPVTLHTGVSSQEAGEAPQAERYQVPETTARLVNTVRAGGGRIVAVGTTVTRALESAVEGDRVVARSGWTDRVVTPLHPPRIVTGLVTGWHDPQASHLLLVEAVAGRELSQRAYDEAVAHGYQWHEFGDTALLLP

SEQ ID NO: 68688 - protein, 350 aa, Marmoricola pocheonensis
  misc_feature (1)..(350): tr|A0A3N0GUQ8|A0A3N0GUQ8_9ACTN S-adenosylmethionine:tRN A ribosyltransferase-isomerase OS=Marmoricola pocheonen sis OX=661485 GN=EFL26_07140 PE=3 SV=1
MLEERSTIHFEPAPDAVAPAPAEARGLSREDVRLLVASPEGLVHGRFRDLPDHLRAGDLVVVNDSATIPGEVDAESATRGPVVLHLATPLDDGTWVSEVRTPGDAARAILDAEPGDRFDAGPVTVTLVEPYPRTGSSPTGRGNRLWRAQVDGPLESHLDRHGRPIAYGYLSRRHPLSAYQTVFATRPGSAEMPSAGRPFTHGLVTRLVSKGVAIAPITLHTGVSSQEAGEAPQPERFAVPAATARLVNAVRAGGGRVVAVGTTVTRALESAVAEDGTVVARRGWTDRVVTPADPPRVVAGLVTGWHDPMASHLLLVEAVAGRELAQRAYEAAVAQEYLWHEFGDAALLLP

SEQ ID NO: 68689 - protein, 345 aa, Marmoricola sp.
  misc_feature (1)..(345): tr|A0A3L8P3A9|A0A3L8P3A9_9ACTN S-adenosylmethionine:tRN A ribosyltransferase-isomerase OS=Marmoricola sp. 4Q3S- 7 OX=2478913 GN=D9V37_10110 PE=3 SV=1
MRTLETPTTRFAAASFAPSPPARRDDVRLLVARPSGVAHARFADLPDQLRAGDVVVVNDSATVNGEIDARSARHGPVVLHAATPLDDETWVVEVRTAPHAARAVLDAVPGERFTIGPHTVVLQAPYPEEGSSPTGQGDRLWRASVNGDLAAYLAAHGRPIAYGYLDRRYPLSAYQTVFGIRAGSAEMPSAGRPFTTALVTSLVARGVAVAPITLHTGVSSQEVGEGPQPERFSVPDATARLVNAVRAGGGRVVAVGTTVTRALESAVAADGRLVAASGWTTRVVTPAEPPRVVTGLVTGWHDPQASHLLLVEAVAGAELSQLAYDAAVSQRYAWHEFGDSCLMLP

SEQ ID NO: 68690 - protein, 359 aa, Martelella endophytica
  misc_feature (1)..(359): tr|A0A0D5LU80|A0A0D5LU80_9RHIZ S-adenosylmethionine:tRN A ribosyltransferase-isomerase OS=Martelella endophytic a OX=1486262 GN=queA PE=3 SV=1
MRVDLFDFDLPDENIALRPANPRDSARLLVVRPERADGVLEDHVVTDLPSFLRPGDALVFNDTKVIPAQLEGIRHRAGGEEVPVSATLHLRKADNIWHAFARPGKRIKPGDMLRFTSPDGETALEATVEEKREGGEVVLTFNARGAALDEALMRVGHVPLPPYIASKRAEDGKDRDDYQTVYARENGAVAAPTAGLHFTPRLMKALEEVGIEQHFVTLHVGAGTFLPVKADDTDDHVMHFERGIVSPETAEALNAVKARGGRIVSVGTTSLRLLESAAAEEGGIQPWEGETGIFITPGYRFRAVDMLMTNFHLPKSTLFMLVSAFSGLETMRSAYAHAIETGYRFYSYGDSSLLFRKDP

SEQ ID NO: 68691 - protein, 356 aa, Martelella mediterranea
  misc_feature (1)..(356): tr|A0A1U9Z3P6|A0A1U9Z3P6_9RHIZ S-adenosylmethionine:tRN A ribosyltransferase-isomerase OS=Martelella mediterran ea DSM 17316 OX=1122214 GN=queA PE=3 SV=1
MRVDLFDFDLPDENIALRPASPRDSARLLVVRPGEGLGDHVVSELPTFLRPGDALVFNDTKVIPAQLEGVRLREGGEEVPVSATLHLRKADNLWHAFARPGKRIKLGDVLRFVSADGATTLVATVDEKRDGGEVVLTFDAHGGVLDEAMMRVGHVPLPPYIASKRAEDGKDRDDYQTIYARENGAVAAPTAGLHFTPRLMQALEQAGIERHFVTLHVGAGTFLPVKADDTDDHVMHFERGIVSAETAAALNAVKARGGRIVSVGTTSLRLLESAATEDGRIAPWEGETGIFITPGYHFRAVDILMTNFHLPKSTLFMLVSAFSGLETMRAAYAHAIETGYRFYSYGDSSLLFRKDR

SEQ ID NO: 68692 - protein, 321 aa, Martelella mediterranea
  misc_feature (1)..(321): tr|A0A4R3NSM2|A0A4R3NSM2_9RHIZ S-adenosylmethionine:tRN A ribosyltransferase-isomerase OS=Martelella mediterran ea OX=293089 GN=queA PE=3 SV=1
MTEDHSVLDLPSFLNPGDALVFNDTKVIPAQLEGVRKRPGGQDVSVSVTLHLRSADNIWHAFAKPGKRIKAHDQMVFTSADGSMTLEATVAEKREGGEVALSFNARGGALDEALMQVGHVPLPPYIAAKRAEDDRDRDDYQTIYAREDGAVAAPTAGLHFTPRLFDALDKAGIERHFVTLHVGAGTFLPVKADDTDNHKMHFERGYVSEEAAAALNAVRARGGRIVSVGTTSLRLLESAATDNGVLQPWHGETGIFIQPGYRFKAVDVLMTNFHLPKSTLFMLVSAFCGLDTMQAAYAHAIKTGYRFYSYGDSSLLFRKDR

SEQ ID NO: 68693 - protein, 356 aa, Martelella sp.
  misc_feature (1)..(356): tr|A0A127CIR9|A0A127CIR9_9RHIZ S-adenosylmethionine:tRN A ribosyltransferase-isomerase OS=Martelella sp. AD-3 O X=686597 GN=queA PE=3 SV=1
MRVDLFDFDLPDENIALRPASPRDSARLLVVRPGEGLADHVVSELPTFLKPGDALVFNDTKVIPAQLEGVRHREGGEEVPVSATLHLRKADNVWHAFARPGKRIKPGDVLRFVSADRATTLSATVEEKREGGEVALTFDARGGALDEALMRVGHVPLPPYIASKRAEDGRDRDDYQTIYARENGAVAAPTAGLHFTPRLLTALEEAGIEQYFVTLHVGAGTFLPVKAEDTDDHKMHFERGIVTTETAEALNAVKARGGRIISVGTTSLRLLESAAAEDGTLGAWEGETGIFITPGYRFRAVDMLMTNFHLPKSTLFMLVSAFCGLETMRAAYAHAIETGYRFYSYGDSSLLFRKDV

SEQ ID NO: 68694 - protein, 356 aa, Martelella sp.
  misc_feature (1)..(356): tr|A0A506UID4|A0A506UID4_9RHIZ S-adenosylmethionine:tRN A ribosyltransferase-isomerase OS=Martelella sp. BGMRC2 036 OX=2590451 GN=queA PE=3 SV=1
MRVDLFDFDLPDERIALRPANPRDSARLLLVEPGGEPMLSDHQVFDLPKFLRAGDALVFNDTKVIPAQLEGFRIRAGAQETPVSATLHLRSADNVWHAFAKPGKRIKQGDRLVFQKDGAQLEAEVTEKREAGEVVLTFSERGGALDEALMAVGHIPLPPYIASKRAEDGRDRDDYQTIYARERGAVAAPTAGLHFTPSLFEALDKAGIERHFVTLHVGAGTFLPVKADDTDDHKMHFERGYITDETASALNAVKARGGRIVSVGTTSLRLLESAARDDGTIPSWHGETGIFIQPGYRFKAVDALMTNFHLPKSTLFMLVSAFSGLETMQAAYAHAIASGYRFYSYGDSSLLMRKDR

SEQ ID NO: 68695 - protein, 341 aa, Marvinbryantia formatexigens
  misc_feature (1)..(341): tr|C6LJ54|C6LJ54_9FIRM S-adenosylmethionine:tRNA ribosy ltransferase-isomerase OS=Marvinbryantia formatexigens DSM 14469 OX=478749 GN=queA PE=3 SV=1
MKTSDFYFDLPQELIAQDPLEDRSSSRLLVLDRRTGQMEHHIFKEIVHYLNPGDCLVINDTKVIPARLFGSKVGTDAKIEILLLKRREGDVWETLVKPGKKAKPGTQISFGDGILMGEVLEVAEDGNRLIRFTYEGIFEEILDRLGQMPLPPYITHQLKDKNRYQTVYAKHDGSAAAPTAGLHFTPELLQEIRDKGVNIAHVTLHVGLGTFRPVKVEEVTQHHMHSEFYMVEEEQAELINRTKANGGKIICVGTTSCRTIESAADENGILHAGSGWTDIFIYPGYRFKILDELITNFHLPESTLLMLVSALAGKENIEKAYAEAVKERYRFFSFGDAMLIK

SEQ ID NO: 68696 - protein, 341 aa, Massilia albidiflava
  misc_feature (1)..(341): tr|A0A411X731|A0A411X731_9BURK S-adenosylmethionine:tRN A ribosyltransferase-isomerase OS=Massilia albidiflava OX=321983 GN=queA PE=3 SV=1
MYSLSDFDFNLPPERIAQFPLPDRSASRLLHVDETRLHDRRFTDILDLLQPGDLLVMNDTRVLKARFFGVKDSGGKVEVLVERVLDTRTVLAQVRASKSPGPGVRIRLADAFDVTVGERAGEFFTLKFEADVFDLIEQYGRLPLPPYIEHAPGEVDETRYQTVFNKVPGAVAAPTAGLHFDEALLQKLRDKGVNFAYVTLHVGAGTFQPVRTENLAEHKMHTEWYTMPQATVDAVKAARAAGRDVIAVGTTSLRALESASQSGTIEAGSADTALFITPGYRFKSVTRLITNFHLPKSTLLMLVSAFAGFDEIRAAYAHAIASEYRFFSYGDAMLLTTPNRA
